United States Patent Application Publication US 2017/0114356 A1 - sequence listing, part 98

SEQ ID NO: 172275 - protein, 683 aa, Zea Mays
MPPPAAMLLLTAASGPPTLSLTLAARRAPLRAPSRRRLRALRPARIRAAAAIGGEFGGLGRRRVVVGEFIERLRNVLPGGSWWRLEDGDEAGDGAGRAEGSGTTAVSALRRMWALVAGDRLVIYVGFASLVGAALSEIAIPHLLAASIFSAQNGGAVFYRNAKLLVVLCLVSGVFSGIRSCCFGVANMILVKRMREELFDSILSQDISFFDEETVGDLTSRLGSDCQQVSRVIGNDLNLISRNLLQGAGALIYLLVLSWPLGLCTMFVCATLSAIMLVHGRFQKRAAKFAQEFTANANNVAQEVITLVRTVRVYGTEKQEFKRYANWLDKLYDVSFRQTVAYGGWSLSLNYLYHSTQVIGVVIGGLAIMSGKLTAEQLTKFTLYAEWLILSTWWIGDNWSSLMQSVGASEKVFRLMDLLPSKQLSSEGLKLEKLKGQIQYADVSFSYPSRPTVPILGGLNLTLNPNEVVAIVGLSGSGKSTIINLLLRLYEPTNGQILIDGVPLTELDIRWFRERIGFVGQEPRLFRMDISSNIKYGCPRDVSHEEVIWAAKQAYAHDFIMALPDGYNTIVDDALLSGGQKQRVAIARALLRDPSILLLDEATSALDAESEHYVKSVITKVSRDSKAKRTVVIIAHRLSTIQTADRIIVMENGNIVEDGKHIDLIEKGGLYSRLARRQNDDLK

SEQ ID NO: 172276 - protein, 496 aa, Zea Mays
MILVKRMREELFDSILSQDISFFDEETVGDLTSRLGSDCQQVSRVIGNDLNLISRNLLQGAGALIYLLVLSWPLGLCTMFVCATLSAIMLVHGRFQKRAAKFAQEFTANANNVAQEVITLVRTVRVYGTEKQEFKRYANWLDKLYDVSFRQTVAYGGWSLSLNYLYHSTQVIGVVIGGLAIMSGKLTAEQLTKFTLYAEWLILSTWWIGDNWSSLMQSVGASEKVFRLMDLLPSKQLSSEGLKLEKLKGQIQYADVSFSYPSRPTVPILGGLNLTLNPNEVVAIVGLSGSGKSTIINLLLRLYEPTNGQILIDGVPLTELDIRWFRERIGFVGQEPRLFRMDISSNIKYGCPRDVSHEEVIWAAKQAYAHDFIMALPDGYNTIVDDALLSGGQKQRVAIARALLRDPSILLLDEATSALDAESEHYVKSVITKVSRDSKAKRTVVIIAHRLSTIQTADRIIVMENGNIVEDGKHIDLIEKGGLYSRLARRQNDDLK

SEQ ID NO: 172277 - protein, 353 aa, Zea Mays
MEQKSRSLKVAYGGWSLSLNYLYHSTQVIGVVIGGLAIMSGKLTAEQLTKFTLYAEWLILSTWWIGDNWSSLMQSVGASEKVFRLMDLLPSKQLSSEGLKLEKLKGQIQYADVSFSYPSRPTVPILGGLNLTLNPNEVVAIVGLSGSGKSTIINLLLRLYEPTNGQILIDGVPLTELDIRWFRERIGFVGQEPRLFRMDISSNIKYGCPRDVSHEEVIWAAKQAYAHDFIMALPDGYNTIVDDALLSGGQKQRVAIARALLRDPSILLLDEATSALDAESEHYVKSVITKVSRDSKAKRTVVIIAHRLSTIQTADRIIVMENGNIVEDGKHIDLIEKGGLYSRLARRQNDDLK

SEQ ID NO: 172278 - protein, 250 aa, Zea Mays
MSGKLTAEQLTKFTLYAEWLILSTWWIGDNWSSLMQSVGASEKVFRLMDLLPSKQLSSEGLKLEKLKGQIQYADVSFSYPSRPTVPILGGLNLTLNPNEVVAIVGLSGSGKSTIINLLLRLYEPTNGQILIDGVPLTELDIRWFRERIGFVGQEPRLFRMDISSNIKYGCPRDVSHEEVIWAAKQAYAHDFIMALPDGYNTIVDDALLSGGQKQRVAIARALLRDPSILLLDEATSALDAESEHYVKVNH

SEQ ID NO: 172279 - protein, 405 aa, Zea Mays
MDGFRKGQLNLHRSSPQTPIMVAQEVITLVRTVRVYGTEKQEFKRYANWLDKLYDVSFRQTVAYGGWSLSLNYLYHSTQVIGVVIGGLAIMSGKLTAEQLTKFTLYAEWLILSTWWIGDNWSSLMQSVGASEKVFRLMDLLPSKQLSSEGLKLEKLKGQIQYADVSFSYPSRPTVPILGGLNLTLNPNEVVAIVGLSGSGKSTIINLLLRLYEPTNGQILIDGVPLTELDIRWFRERIGFVGQEPRLFRMDISSNIKYGCPRDVSHEEVIWAAKQAYAHDFIMALPDGYNTIVDDALLSGGQKQRVAIARALLRDPSILLLDEATSALDAESEHYVKSVITKVSRDSKAKRTVVIIAHRLSTIQTADRIIVMENGNIVEDGKHIDLIEKGGLYSRLARRQNDDLK

SEQ ID NO: 172280 - protein, 129 aa, Zea Mays
MGHAAARCQTGLGDSPEATEAVLGRGWRPGTLLCDSNRAPRQLHARGRTSTMDVTKDQSDAGPLRGRDSRDCAGSETACGHEDLKNHPGNWNLKCQASCALDSLLLPNNVLCNHLPCIGLILMGPNRSP

SEQ ID NO: 172281 - protein, 111 aa, Zea Mays
MVEATYRKTQPRNNHVSERETTGGGFHPHPWAMLPLGVKRGWVIRRRPLKLFLAEDGGRERSYAIATVPRDNCMRAAAPAQWMSQRTSRMRDLSAAGTLVIARALKLEKNR

SEQ ID NO: 172282 - protein, 227 aa, Zea Mays
MHSLVRRGNGYGYGYGGYGSSNPHMNYHRQNTESVTTVVTEMNRMAVDDKPCYGGGVQKQACKVEAFQEHDEAYKGAVAVQQKHSSFKEDKEESGYQYEEAYAGTGAGGYGAHYGGGAAVAQKQGYRQGIYESESESESESESDESDCEEAFLPHGGRTPQGGVQHSYGYGGGAYKHGAGNLGGLRRYQSYESREDLGGGRRYETYQSTVQYTGSPTKNRHVLRYGA

SEQ ID NO: 172283 - protein, 438 aa, Zea Mays
MHSLVRRGNGYGYGYGGYGSSNPHMNYHRQNTESVTTVVTEMNRMAVDDKPCYGGGVQKQACKVEAFQEHDELYKEEEEEKRVVDTEYGARYGGVAAVKKPGYNYKQHEAYGETEGAGYGYGAGGVKKQAGYSYAQEACGESYGGAHHGGAGAVAQTYAYDQQQAYKHKNAAGAGAGYGAPYGGGAVQQHDGHKDVYRHGAAAGGKVKKNGYQYQEAYGGTDAGGYGAHYGGGGGAVQQYGYGGATTDGKVKKGGHQYYGGSGAGGYDSHYGGGGGGAVQQYGGYHKDAYGYGGGATAGGKAKKSGYQYEEAYAGTGAGGYGAHYGGGAAVAQKQGYRQGIYESESESESESESDESDCEEAFLPHGGRTPQGGVQHSYGYGGGAYKHGAGNLGGLRRYQSYESREDLGGGRRYETYQSTVQYTGSPTKNRHVLRYGA

SEQ ID NO: 172284 - protein, 1443 aa, Zea Mays
MDASTAGDGDTNTLKRPCKTSPPEGETDKYKRQKRECQDFSPRRYQLDVYEVATRHNTIAMLDTGAGKTMIAVMLIKHFGKINKANNDRKLIIFLAPTVQLVTQQCEVIKSYTDFEVEHYHGAKGVDQWKAHSWQQQLLKYQVMVMTPQVLLDALRQAFLILDMVSLMIFDECHHATGNHPYTRIMKEFYHGSEHKPNVFGMTASPIIRKGVSSDLDCKNQLSELENILDSKIHSVVDREEIELCVPSAKEVNRYYEPRTVSFDDLSEELEILCSKYDGLIIQLHNRSTNQYKDADEITKESRKRLSNSLAKICYCLEDAGLLCASEATKICIERGQRKGWLKGGSDTTDQQSGQNGPILFAEISMLHMEFFQEVLDIIGKRVQQQQGIDALLNSERGCVEAKNMGYISPKLYELMQVFLSFSDPDNVRCLVFVDRKISARVIERTMKKIGQLSCFRVSFLTGGSSSVDALTPKMQKDTLDSFRSGKVNLLFTTDVAEEGIHIPDCSCVIRFDLPRTTRSYVQSRGRARQRDSQYILMIEQGNVKQDDLISGIMRSKASMTGIASNREPEDSHPSFLPTEEINEYHISKTGAKITTDSSISVLNQYCDKLPKDKYYTPRPKFQFTHYGDGYECTVTLPSSAMFQLLVGQKARNMQKAKQLVCLDACKRLHQLGALDDHLSPSVEEPPPEISSKSSISTPGAGLGTTKRKELHGTTKVLSMSGSWGSDRSVTKLQGYKLNFVCDQVGQKYSAFVLLIDASIAKEAATLDIDLYLHDKMVKASVSPCGPLELDAWQMEQTKLFQALLFNSLFGKLFIGSKASKTPREFILKKDDVFLWNKENMYLLLPVDSTLDSHKSVCINWSVIDVVATAVGFMRSIYSDGKCNLTDKLNYEKNGEDLIHLANKSCKGNDLKNMVVLAIHTGKIYTIVVVSDLCANSKFDGTTDKKEAKFRTFAEYFEKKYSIFLCHPLQPLLVLKPTHNPHNLLSSKNRDEDNVVENKNRANSLVHMPPELLIPLDLPIDVLRVFYLFPSLMHRLESLMLASQLRSEIAYRDSDISSFVILEAMTTLRCCEDFSMERLELLGDSVLKYAVSAHLFMTFLNKHEGQLSSRRQETICNATLYRLGIERRIQGYIRDAAFDPRRWLAPGQLSRRPCPCECPVNSEVVTEDIHRIDDKSIIIGKACDKGHRWICSKTISDCVEALIGAYYVEGGLKAAFAVLKWFQIETEIEEELIMEALSSASVRNYLPKVDVVELLEAKLGYTFQMKGLLIEALTHSSQQESGATYCYQRLEFLGDAVLDILITRHLFLSHKDTDEGELTDLRSASVNNENFAQVAVKHNLHQFLQHSSGFLQDQITEYVNSLESSSMDRASLLSSGPCRGPKFGGFLNLFFHQLSHLRIWSCPDSENLMSGLTRMGTLLELSVKIEETAQWLSLTYNSRICFL

SEQ ID NO: 172285 - protein, 1122 aa, Zea Mays
MIEQGNVKQDDLISGIMRSKASMTGIASNREPEDSHPSFLPTEEINEYHISKTGAKITTDSSISVLNQYCDKLPKDKYYTPRPKFQFTHYGDGYECTVTLPSSAMFQLLVGQKARNMQKAKQLVCLDACKRLHQLGALDDHLSPSVEEPPPEISSKSSISTPGAGLGTTKRKELHGTTKVLSMSGSWGSDRSVTKLQGYKLNFVCDQVGQKYSAFVLLIDASIAKEAATLDIDLYLHDKMVKASVSPCGPLELDAWQMEQTKLFQALLFNSLFGKLFIGSKASKTPREFILKKDDVFLWNKENMYLLLPVDSTLDSHKSVCINWSVIDVVATAVGFMRSIYSDGKCNLTDKLNYEKNGEDLIHLANKSCKGNDLKNMVVLAIHTGKIYTIVVVSDLCANSKFDGTTDKKEAKFRTFAEYFEKKYSIFLCHPLQPLLVLKPTHNPHNLLSSKNRDEDNVVENKNRANSLVHMPPELLIPLDLPIDVLRVFYLFPSLMHRLESLMLASQLRSEIAYRDSDISSFVILEAMTTLRCCEDFSMERLELLGDSVLKYAVSAHLFMTFLNKHEGQLSSRRQETICNATLYRLGIERRIQGYIRDAAFDPRRWLAPGQLSRRPCPCECPVNSEVVTEDIHRIDDKSIIIGKACDKGHRWICSKTISDCVEALIGAYYVEGGLKAAFAVLKWFQIETEIEEELIMEALSSASVRNYLPKVDVVELLEAKLGYTFQMKGLLIEALTHSSQQESGATYCYQRLEFLGDAVLDILITRHLFLSHKDTDEGELTDLRSASVNNENFAQVAVKHNLHQFLQHSSGFLQDQITEYVNSLESSSMDRASLLSSGPCRGPKVLGDIVESIAGAILIDSKLDLDLVWRVFKPLLSPIVTPENLELPRFRELNEWSDKNGYFIGIKCENRGDSTMAILNLQLKDLLLVRQGCGKNKVDAKAHAASLLLRDLEEKGLIIPRNASRVEQLEKNSGTVKHCNNVLDVMDTQNVAPPRQKEVAVLSTTTPGSVLDKPLVVKVKLSKGGPRISLYESCKKLQWPMPTFEFVKVEPSVCSSSCGSSQKVAPQGFAFASTITLHIPNGDVISLTGDGRADKKSSQDSAALLMLYELQRQRRFQVQEV

SEQ ID NO: 172286 - protein, 1620 aa, Zea Mays
MDASTAGDGDTNTLKRPCKTSPPEGETDKYKRQKRECQDFSPRRYQLDVYEVATRHNTIAMLDTGAGKTMIAVMLIKHFGKINKANNDRKLIIFLAPTVQLVTQQCEVIKSYTDFEVEHYHGAKGVDQWKAHSWQQQLLKYQVMVMTPQVLLDALRQAFLILDMVSLMIFDECHHATGNHPYTRIMKEFYHGSEHKPNVFGMTASPIIRKGVSSDLDCKNQLSELENILDSKIHSVVDREEIELCVPSAKEVNRYYEPRTVSFDDLSEELEILCSKYDGLIIQLHNRSTNQYKDADEITKESRKRLSNSLAKICYCLEDAGLLCASEATKICIERGQRKGWLKGGSDTTDQQSGQNGPILFAEISMLHMEFFQEVLDIIGKRVQQQQGIDALLNSERGCVEAKNMGYISPKLYELMQVFLSFSDPDNVRCLVFVDRKISARVIERTMKKIGQLSCFRVSFLTGGSSSVDALTPKMQKDTLDSFRSGKVNLLFTTDVAEEGIHIPDCSCVIRFDLPRTTRSYVQSRGRARQRDSQYILMIEQGNVKQDDLISGIMRSKASMTGIASNREPEDSHPSFLPTEEINEYHISKTGAKITTDSSISVLNQYCDKLPKDKYYTPRPKFQFTHYGDGYECTVTLPSSAMFQLLVGQKARNMQKAKQLVCLDACKRLHQLGALDDHLSPSVEEPPPEISSKSSISTPGAGLGTTKRKELHGTTKVLSMSGSWGSDRSVTKLQGYKLNFVCDQVGQKYSAFVLLIDASIAKEAATLDIDLYLHDKMVKASVSPCGPLELDAWQMEQTKLFQALLFNSLFGKLFIGSKASKTPREFILKKDDVFLWNKENMYLLLPVDSTLDSHKSVCINWSVIDVVATAVGFMRSIYSDGKCNLTDKLNYEKNGEDLIHLANKSCKGNDLKNMVVLAIHTGKIYTIVVVSDLCANSKFDGTTDKKEAKFRTFAEYFEKKYSIFLCHPLQPLLVLKPTHNPHNLLSSKNRDEDNVVENKNRANSLVHMPPELLIPLDLPIDVLRVFYLFPSLMHRLESLMLASQLRSEIAYRDSDISSFVILEAMTTLRCCEDFSMERLELLGDSVLKYAVSAHLFMTFLNKHEGQLSSRRQETICNATLYRLGIERRIQGYIRDAAFDPRRWLAPGQLSRRPCPCECPVNSEVVTEDIHRIDDKSIIIGKACDKGHRWICSKTISDCVEALIGAYYVEGGLKAAFAVLKWFQIETEIEEELIMEALSSASVRNYLPKVDVVELLEAKLGYTFQMKGLLIEALTHSSQQESGATYCYQRLEFLGDAVLDILITRHLFLSHKDTDEGELTDLRSASVNNENFAQVAVKHNLHQFLQHSSGFLQDQITEYVNSLESSSMDRASLLSSGPCRGPKNLELPRFRELNEWSDKNGYFIGIKCENRGDSTMAILNLQLKDLLLVRQGCGKNKVDAKAHAASLLLRDLEEKGLIIPRNASRVEQLEKNSGTVKHCNNVLDVMDTQNVAPPRQKEVAVLSTTTPGSVLDKPLVVKVKLSKGGPRISLYESCKKLQWPMPTFEFVKVEPSVCSSSCGSSQKVAPQGFAFASTITLHIPNGDVISLTGDGRADKKSSQDSAALLMLYELQRQRRFQVQEV

SEQ ID NO: 172287 - protein, 1647 aa, Zea Mays
MDASTAGDGDTNTLKRPCKTSPPEGETDKYKRQKRECQDFSPRRYQLDVYEVATRHNTIAMLDTGAGKTMIAVMLIKHFGKINKANNDRKLIIFLAPTVQLVTQQCEVIKSYTDFEVEHYHGAKGVDQWKAHSWQQQLLKYQVMVMTPQVLLDALRQAFLILDMVSLMIFDECHHATGNHPYTRIMKEFYHGSEHKPNVFGMTASPIIRKGVSSDLDCKNQLSELENILDSKIHSVVDREEIELCVPSAKEVNRYYEPRTVSFDDLSEELEILCSKYDGLIIQLHNRSTNQYKDADEITKESRKRLSNSLAKICYCLEDAGLLCASEATKICIERGQRKGWLKGGSDTTDQQSGQNGPILFAEISMLHMEFFQEVLDIIGKRVQQQQGIDALLNSERGCVEAKNMGYISPKLYELMQVFLSFSDPDNVRCLVFVDRKISARVIERTMKKIGQLSCFRVSFLTGGSSSVDALTPKMQKDTLDSFRSGKVNLLFTTDVAEEGIHIPDCSCVIRFDLPRTTRSYVQSRGRARQRDSQYILMIEQGNVKQDDLISGIMRSKASMTGIASNREPEDSHPSFLPTEEINEYHISKTGAKITTDSSISVLNQYCDKLPKDKYYTPRPKFQFTHYGDGYECTVTLPSSAMFQLLVGQKARNMQKAKQLVCLDACKRLHQLGALDDHLSPSVEEPPPEISSTTKRKELHGTTKVLSMSGSWGSDRSVTKLQGYKLNFVCDQVGQKYSAFVLLIDASIAKEAATLDIDLYLHDKMVKASVSPCGPLELDAWQMEQTKLFQALLFNSLFGKLFIGSKASKTPREFILKKDDVFLWNKENMYLLLPVDSTLDSHKSVCINWSVIDVVATAVGFMRSIYSDGKCNLTDKLNYEKNGEDLIHLANKSCKGNDLKNMVVLAIHTGKIYTIVVVSDLCANSKFDGTTDKKEAKFRTFAEYFEKKYSIFLCHPLQPLLVLKPTHNPHNLLSSKNRDEDNVVENKNRANSLVHMPPELLIPLDLPIDVLRVFYLFPSLMHRLESLMLASQLRSEIAYRDSDISSFVILEAMTTLRCCEDFSMERLELLGDSVLKYAVSAHLFMTFLNKHEGQLSSRRQETICNATLYRLGIERRIQGYIRDAAFDPRRWLAPGQLSRRPCPCECPVNSEVVTEDIHRIDDKSIIIGKACDKGHRWICSKTISDCVEALIGAYYVEGGLKAAFAVLKWFQIETEIEEELIMEALSSASVRNYLPKVDVVELLEAKLGYTFQMKGLLIEALTHSSQQESGATYCYQRLEFLGDAVLDILITRHLFLSHKDTDEGELTDLRSASVNNENFAQVAVKHNLHQFLQHSSGFLQDQITEYVNSLESSSMDRASLLSSGPCRGPKVLGDIVESIAGAILIDSKLDLDLVWRVFKPLLSPIVTPENLELPRFRELNEWSDKNGYFIGIKCENRGDSTMAILNLQLKDLLLVRQGCGKNKVDAKAHAASLLLRDLEEKGLIIPRNASRVEQLEKNSGTVKHCNNVLDVMDTQNVAPPRQKEVAVLSTTTPGSVLDKPLVVKVKLSKGGPRISLYESCKKLQWPMPTFEFVKVEPSVCSSSCGSSQKVAPQGFAFASTITLHIPNGDVISLTGDGRADKKSSQDSAALLMLYELQRQRRFQVQEV

SEQ ID NO: 172288 - protein, 1272 aa, Zea Mays
MDASTAGDGDTNTLKRPCKTSPPEGETDKYKRQKRECQDFSPRRYQLDVYEVATRHNTIAMLDTGAGKTMIAVMLIKHFGKINKANNDRKLIIFLAPTVQLVTQQCEVIKSYTDFEVEHYHGAKGVDQWKAHSWQQQLLKYQVMVMTPQVLLDALRQAFLILDMVSLMIFDECHHATGNHPYTRIMKEFYHGSEHKPNVFGMTASPIIRKGVSSDLDCKNQLSELENILDSKIHSVVDREEIELCVPSAKEVNRYYEPRTVSFDDLSEELEILCSKYDGLIIQLHNRSTNQYKDADEITKESRKRLSNSLAKICYCLEDAGLLCASEATKICIERGQRKGWLKGGSDTTDQQSGQNGPILFAEISMLHMEFFQEVLDIIGKRVQQQQGIDALLNSERGCVEAKNMGYISPKLYELMQVFLSFSDPDNVRCLVFVDRKISARVIERTMKKIGQLSCFRVSFLTGGSSSVDALTPKMQKDTLDSFRSGKVNLLFTTDVAEEGIHIPDCSCVIRFDLPRTTRSYVQSRGRARQRDSQYILMIEQGNVKQDDLISGIMRSKASMTGIASNREPEDSHPSFLPTEEINEYHISKTGAKITTDSSISVLNQYCDKLPKDKYYTPRPKFQFTHYGDGYECTVTLPSSAMFQLLVGQKARNMQKAKQLVCLDACKRLHQLGALDDHLSPSVEEPPPEISSKSSISTPGAGLGTTKRKELHGTTKVLSMSGSWGSDRSVTKLQGYKLNFVCDQVGQKYSAFVLLIDASIAKEAATLDIDLYLHDKMVKASVSPCGPLELDAWQMEQTKLFQALLFNSLFGKLFIGSKASKTPREFILKKDDVFLWNKENMYLLLPVDSTLDSHKSVCINWSVIDVVATAVGFMRSIYSDGKCNLTDKLNYEKNGEDLIHLANKSCKGNDLKNMVVLAIHTGKIYTIVVVSDLCANSKFDGTTDKKEAKFRTFAEYFEKKYSIFLCHPLQPLLVLKPTHNPHNLLSSKNRDEDNVVENKNRANSLVHMPPELLIPLDLPIDVLRVFYLFPSLMHRLESLMLASQLRSEIAYRDSDISSFVILEAMTTLRCCEDFSMERLELLGDSVLKYAVSAHLFMTFLNKHEGQLSSRRQETICNATLYRLGIERRIQGYIRDAAFDPRRWLAPGQLSRRPCPCECPVNSEVVTEDIHRIDDKSIIIGKACDKGHRWICSKTISDCVEALIGAYYVEGGLKAAFAVLKWFQIETEIEEELIMEALSSASVRNYLPKVDVVELLEAKLGYTFQMKALGVPW

SEQ ID NO: 172289 - protein, 1599 aa, Zea Mays
MLDTGAGKTMIAVMLIKHFGKINKANNDRKLIIFLAPTVQLVTQQCEVIKSYTDFEVEHYHGAKGVDQWKAHSWQQQLLKYQVMVMTPQVLLDALRQAFLILDMVSLMIFDECHHATGNHPYTRIMKEFYHGSEHKPNVFGMTASPIIRKGVSSDLDCKNQLSELENILDSKIHSVVDREEIELCVPSAKEVNRYYEPRTVSFDDLSEELEILCSKYDGLIIQLHNRSTNQYKDADEITKESRKRLSNSLAKICYCLEDAGLLCASEATKICIERGQRKGWLKGGSDTTDQQSGQNGPILFAEISMLHMEFFQEVLDIIGKRVQQQQGIDALLNSERGCVEAKNMGYISPKLYELMQVFLSFSDPDNVRCLVFVDRKISARVIERTMKKIGQLSCFRVSFLTGGSSSVDALTPKMQKDTLDSFRSGKVNLLFTTDVAEEGIHIPDCSCVIRFDLPRTTRSYVQSRGRARQRDSQYILMIEQGNVKQDDLISGIMRSKASMTGIASNREPEDSHPSFLPTEEINEYHISKTGAKITTDSSISVLNQYCDKLPKDKYYTPRPKFQFTHYGDGYECTVTLPSSAMFQLLVGQKARNMQKAKQLVCLDACKRLHQLGALDDHLSPSVEEPPPEISSKSSISTPGAGLGTTKRKELHGTTKVLSMSGSWGSDRSVTKLQGYKLNFVCDQVGQKYSAFVLLIDASIAKEAATLDIDLYLHDKMVKASVSPCGPLELDAWQMEQTKLFQALLFNSLFGKLFIGSKASKTPREFILKKDDVFLWNKENMYLLLPVDSTLDSHKSVCINWSVIDVVATAVGFMRSIYSDGKCNLTDKLNYEKNGEDLIHLANKSCKGNDLKNMVVLAIHTGKIYTIVVVSDLCANSKFDGTTDKKEAKFRTFAEYFEKKYSIFLCHPLQPLLVLKPTHNPHNLLSSKNRDEDNVVENKNRANSLVHMPPELLIPLDLPIDVLRVFYLFPSLMHRLESLMLASQLRSEIAYRDSDISSFVILEAMTTLRCCEDFSMERLELLGDSVLKYAVSAHLFMTFLNKHEGQLSSRRQETICNATLYRLGIERRIQGYIRDAAFDPRRWLAPGQLSRRPCPCECPVNSEVVTEDIHRIDDKSIIIGKACDKGHRWICSKTISDCVEALIGAYYVEGGLKAAFAVLKWFQIETEIEEELIMEALSSASVRNYLPKVDVVELLEAKLGYTFQMKGLLIEALTHSSQQESGATYCYQRLEFLGDAVLDILITRHLFLSHKDTDEGELTDLRSASVNNENFAQVAVKHNLHQFLQHSSGFLQDQITEYVNSLESSSMDRASLLSSGPCRGPKVLGDIVESIAGAILIDSKLDLDLVWRVFKPLLSPIVTPENLELPRFRELNEWSDKNGYFIGIKCENRGDSTMAILNLQLKDLLLVRQGCGKNKVDAKAHAASLLLRDLEEKGLIIPRNASRVEQLEKNSGTVKHCNNVLDVMDTQNVAPPRQKEVAVLSTTTPGSVLDKPLVVKVKLSKGGPRISLYESCKKLQWPMPTFEFVKVEPSVCSSSCGSSQKVAPQGFAFASTITLHIPNGDVISLTGDGRADKKSSQDSAALLMLYELQRQRRFQVQEV

SEQ ID NO: 172290 - protein, 1668 aa, Zea Mays
MDASTAGDGDTNTLKRPCKTSPPEGETDKYKRQKRECQDFSPRRYQLDVYEVATRHNTIAMLDTGAGKTMIAVMLIKHFGKINKANNDRKLIIFLAPTVQLVTQQCEVIKSYTDFEVEHYHGAKGVDQWKAHSWQQQLLKYQVMVMTPQVLLDALRQAFLILDMVSLMIFDECHHATGNHPYTRIMKFLLFCPFEQEFYHGSEHKPNVFGMTASPIIRKGVSSDLDCKNQLSELENILDSKIHSVVDREEIELCVPSAKEVNRYYEPRTVSFDDLSEELEILCSKYDGLIIQLHNRSTNQYKDADEITKESRKRLSNSLAKICYCLEDAGLLCASEATKICIERGQRKGWLKGGSDTTDQQSGQNGPILFAEISMLHMEFFQEVLDIIGKRVQQQQGIDALLNSERGCVEAKNMGYISPKLYELMQVFLSFSDPDNVRCLVFVDRKISARVIERTMKKIGQLSCFRVSFLTGGSSSVDALTPKMQKDTLDSFRSGKVNLLFTTDVAEEGIHIPDCSCVIRFDLPRTTRSYVQSRGRARQRDSQYILMIEQGNVKQDDLISGIMRSKASMTGIASNREPEDSHPSFLPTEEINEYHISKTGAKITTDSSISVLNQYCDKLPKDKYYTPRPKFQFTHYGDGYECTVTLPSSAMFQLLVGQKARNMQKAKQLVCLDACKRLHQLGALDDHLSPSVEEPPPEISSKSSISTPGAGLGTTKRKELHGTTKVLSMSGSWGSDRSVTKLQGYKLNFVCDQVGQKYSAFVLLIDASIAKEAATLDIDLYLHDKMVKASVSPCGPLELDAWQMEQTKLFQALLFNSLFGKLFIGSKASKTPREFILKKDDVFLWNKENMYLLLPVDSTLDSHKSVCINWSVIDVVATAVGFMRSIYSDGKCNLTDKLNYEKNGEDLIHLANKSCKGNDLKNMVVLAIHTGKIYTIVVVSDLCANSKFDGTTDKKEAKFRTFAEYFEKKYSIFLCHPLQPLLVLKPTHNPHNLLSSKNRDEDNVVENKNRANSLVHMPPELLIPLDLPIDVLRVFYLFPSLMHRLESLMLASQLRSEIAYRDSDISSFVILEAMTTLRCCEDFSMERLELLGDSVLKYAVSAHLFMTFLNKHEGQLSSRRQETICNATLYRLGIERRIQGYIRDAAFDPRRWLAPGQLSRRPCPCECPVNSEVVTEDIHRIDDKSIIIGKACDKGHRWICSKTISDCVEALIGAYYVEGGLKAAFAVLKWFQIETEIEEELIMEALSSASVRNYLPKVDVVELLEAKLGYTFQMKGLLIEALTHSSQQESGATYCYQRLEFLGDAVLDILITRHLFLSHKDTDEGELTDLRSASVNNENFAQVAVKHNLHQFLQHSSGFLQDQITEYVNSLESSSMDRASLLSSGPCRGPKVLGDIVESIAGAILIDSKLDLDLVWRVFKPLLSPIVTPENLELPRFRELNEWSDKNGYFIGIKCENRGDSTMAILNLQLKDLLLVRQGCGKNKVDAKAHAASLLLRDLEEKGLIIPRNASRVEQLEKNSGTVKHCNNVLDVMDTQNVAPPRQKEVAVLSTTTPGSVLDKPLVVKVKLSKGGPRISLYESCKKLQWPMPTFEFVKVEPSVCSSSCGSSQKVAPQGFAFASTITLHIPNGDVISLTGDGRADKKSSQDSAALLMLYELQRQRRFQVQEV

SEQ ID NO: 172291 - protein, 1300 aa, Zea Mays
MVMTPQVLLDALRQAFLILDMVSLMIFDECHHATGNHPYTRIMKEFYHGSEHKPNVFGMTASPIIRKGVSSDLDCKNQLSELENILDSKIHSVVDREEIELCVPSAKEVNRYYEPRTVSFDDLSEELEILCSKYDGLIIQLHNRSTNQYKDADEITKESRKRLSNSLAKICYCLEDAGLLCASEATKICIERGQRKGWLKGGSDTTDQQSGQNGPILFAEISMLHMEFFQEVLDIIGKRVQQQQGIDALLNSERGCVEAKNMGYISPKLYELMQVFLSFSDPDNVRCLVFVDRKISARVIERTMKKIGQLSCFRVSFLTGGSSSVDALTPKMQKDTLDSFRSGKVNLLFTTDVAEEGIHIPDCSCVIRFDLPRTTRSYVQSRGRARQRDSQYILMIEQGNVKQDDLISGIMRSKASMTGIASNREPEDSHPSFLPTEEINEYHISKTGAKITTDSSISVLNQYCDKLPKDKYYTPRPKFQFTHYGDGYECTVTLPSSAMFQLLVGQKARNMQKAKQLVCLDACKRLHQLGALDDHLSPSVEEPPPEISSKSSISTPGAGLGTTKRKELHGTTKVLSMSGSWGSDRSVTKLQGYKLNFVCDQVGQKYSAFVLLIDASIAKEAATLDIDLYLHDKMVKASVSPCGPLELDAWQMEQTKLFQALLFNSLFGKLFIGSKASKTPREFILKKDDVFLWNKENMYLLLPVDSTLDSHKSVCINWSVIDVVATAVGFMRSIYSDGKCNLTDKLNYEKNGEDLIHLANKSCKGNDLKNMVVLAIHTGKIYTIVVVSDLCANSKFDGTTDKKEAKFRTFAEYFEKKYSIFLCHPLQPLLVLKPTHNPHNLLSSKNRDEDNVVENKNRANSLVHMPPELLIPLDLPIDVLRVFYLFPSLMHRLESLMLASQLRSEIAYRDSDISSFVILEAMTTLRCCEDFSMERLELLGDSVLKYAVSAHLFMTFLNKHEGQLSSRRQETICNATLYRLGIERRIQGYIRDAAFDPRRWLAPGQLSRRPCPCECPVNSEVVTEDIHRIDDKSIIIGKACDKGHRWICSKTISDCVEALIGAYYVEGGLKAAFAVLKWFQIETEIEEELIMEALSSASVRNYLPKVDVVELLEAKLGYTFQMKGLLIEALTHSSQQESGATYCYQRLEFLGDAVLDILITRHLFLSHKDTDEGELTDLRSASVNNENFAQVAVKHNLHQFLQHSSGFLQDQITEYVNSLESSSMDRASLLSSGPCRGPKFGGFLNLFFHQLSHLRIWSCPDSENLMSGLTRMGTLLELSVKIEETAQWLSLTYNSRICFL

SEQ ID NO: 172292 - protein, 1255 aa, Zea Mays
MGYISPKLYELMQVFLSFSDPDNVRCLVFVDRKISARVIERTMKKIGQLSCFRVSFLTGGSSSVDALTPKMQKDTLDSFRSGKVNLLFTTDVAEEGIHIPDCSCVIRFDLPRTTRSYVQSRGRARQRDSQYILMIEQGNVKQDDLISGIMRSKASMTGIASNREPEDSHPSFLPTEEINEYHISKTGAKITTDSSISVLNQYCDKLPKDKYYTPRPKFQFTHYGDGYECTVTLPSSAMFQLLVGQKARNMQKAKQLVCLDACKRLHQLGALDDHLSPSVEEPPPEISSKSSISTPGAGLGTTKRKELHGTTKVLSMSGSWGSDRSVTKLQGYKLNFVCDQVGQKYSAFVLLIDASIAKEAATLDIDLYLHDKMVKASVSPCGPLELDAWQMEQTKLFQALLFNSLFGKLFIGSKASKTPREFILKKDDVFLWNKENMYLLLPVDSTLDSHKSVCINWSVIDVVATAVGFMRSIYSDGKCNLTDKLNYEKNGEDLIHLANKSCKGNDLKNMVVLAIHTGKIYTIVVVSDLCANSKFDGTTDKKEAKFRTFAEYFEKKYSIFLCHPLQPLLVLKPTHNPHNLLSSKNRDEDNVVENKNRANSLVHMPPELLIPLDLPIDVLRVFYLFPSLMHRLESLMLASQLRSEIAYRDSDISSFVILEAMTTLRCCEDFSMERLELLGDSVLKYAVSAHLFMTFLNKHEGQLSSRRQETICNATLYRLGIERRIQGYIRDAAFDPRRWLAPGQLSRRPCPCECPVNSEVVTEDIHRIDDKSIIIGKACDKGHRWICSKTISDCVEALIGAYYVEGGLKAAFAVLKWFQIETEIEEELIMEALSSASVRNYLPKVDVVELLEAKLGYTFQMKGLLIEALTHSSQQESGATYCYQRLEFLGDAVLDILITRHLFLSHKDTDEGELTDLRSASVNNENFAQVAVKHNLHQFLQHSSGFLQDQITEYVNSLESSSMDRASLLSSGPCRGPKVLGDIVESIAGAILIDSKLDLDLVWRVFKPLLSPIVTPENLELPRFRELNEWSDKNGYFIGIKCENRGDSTMAILNLQLKDLLLVRQGCGKNKVDAKAHAASLLLRDLEEKGLIIPRNASRVEQLEKNSGTVKHCNNVLDVMDTQNVAPPRQKEVAVLSTTTPGSVLDKPLVVKVKLSKGGPRISLYESCKKLQWPMPTFEFVKVEPSVCSSSCGSSQKVAPQGFAFASTITLHIPNGDVISLTGDGRADKKSSQDSAALLMLYELQRQRRFQVQEV

SEQ ID NO: 172293 - protein, 149 aa, Zea Mays
MMMMIYSSDDDDDDFTTSDSDNEMSEEDDSSDEDEMSEEDDSSDEDEMSGGADPSDDSSDESGSEHTSAPKKTDVVVGKKRAIKAEAPYGKKAKSEQSSQKTGELLLLCSYKAQLKTGELLLLCRLSSVDDHISLSISNFTLQTVQSTV

SEQ ID NO: 172294 - protein, 398 aa, Zea Mays
MLRLQKHLSLRLQEHLLPLHRSASLIQLSLQRSLLSTGSATYSSPGHFAADDYLVSTCGLTREQAANAAKCISHWKSSSNADAVLSFLTGPALGLSNAEIALLVAKDPRVLSCSVDNTLRARLARFRSHGFSAAQISEFVRVAPCFFRKFNIDVKLGFWMPFLGSPDRFLRLVKRNFYLLSSDLDKVVKPNIQLLQECGLSIQEIGSLCVANPRLLTSKPDRIRAVLVRAGEMGVPRKTLLFRHAVTAVAGLCPETFASKLKMMANILGCSEAEVARMVQKNPLVLRRSMETIQRACEFLINVVGVGTNFILDKPTILMYSLERRLVPRHYVMKVLQDKGLMRKDHSFYTLAAISASVFCSSKLAIWAAAAVVSCMSFLTHSDTLMCTLRGCSSVLGS

SEQ ID NO: 172295 - protein, 389 aa, Zea Mays
MLRLQKHLSLRLQEHLLPLHRSASLIQLSLQRSLLSTGSATYSSPGHFAADDYLVSTCGLTREQAANAAKCISHWKSSSNADAVLSFLTGPALGLSNAEIALLVAKDPRVLSCSVDNTLRARLARFRSHGFSAAQISEFVRVAPCFFRKFNIDVKLGFWMPFLGSPDRFLRLVKRNFYLLSSDLDKVVKPNIQLLQECGLSIQEIGSLCVANPRLLTSKPDRIRAVLVRAGEMGVPRKTLLFRHAVTAVAGLCPETFASKLKMMANILGCSEAEVARMVQKNPLVLRRSMETIQRACEFLINVVGVGTNFILDKPTILMYSLERRLVPRHYVMKVLQDKGLMRKDHSFYTLAAISASVFCSRLLLVPMTDVSSFKFGVHNHFAFVAGDS

SEQ ID NO: 172296 - protein, 147 aa, Zea Mays
MSKNMAQSRKEAAFALSALMEIPQQYKATVELGNLGRRSSKSPNRVPLPPPSASHDAYSYSSKSFSKPTTYPQSSSSSSAYPQYGTPHTATPAAPSSTYDNQVCPICLVNPKDMAFGCGHQTCCDCGQSLESCPICRTPITTRIKLY

SEQ ID NO: 172297 - protein, 216 aa, Zea Mays
MEGESSNVASPFPLPSASKGHEMEMTKKTTAVVPEMTSSSSMPNLAIAKDGNTNVLPFEFRALEVCLESACRSLEDETSTLEQEAYPALDELTSKISTLNLERVRQIKSRLVAISGRVQKVRDELEHLLDDEMDMAEMYLTEKLTQQEISEASSRAEVDDPSQTEEDRDEDYRSEPDGSNDSFIGYKPNIEELEMLLEAYFVQIDGTLNKLSHGVR

SEQ ID NO: 172298 - protein, 360 aa, Zea Mays
MRPHAVGTGGGGVGRRKAGAAAAAASREWMVVPASGPARVEEAGKHAVMARTGLPARDLRVLDPLLSYPSTILGRERAIVVNLERVKALITATEVLLPNTKDPAFARFVRDLQTRVLASSSDQTSTLEQEAYPALDELTSKISTLNLERVRQIKSRLVAISGRVQKVRDELEHLLDDEMDMAEMYLTEKLTQQEISEASSRAEVDDPSQTEEDRDEDYRSEPDGSNDSFIGYKPNIEELEMLLEAYFVQIDGTLNKLSHLREYVDDTEDYINIMLDDKQNQLLQMGVMLSTATVVITAGVAVVGLFGMNIGISLYADPTTEEETRAANRKFWETTFGTVAGCVILYIIAMGWGKRSGLLQ

SEQ ID NO: 172299 - protein, 314 aa, Zea Mays
MEGESSNVASPFPLPSASKGHEMEMTKKTTAVVPEMTSSSSMPNLAIAKDGNTNVLPFEFRALEVCLESACRSLEDETSTLEQEAYPALDELTSKISTLNLERVRQIKSRLVAISGRVQKVRDELEHLLDDEMDMAEMYLTEKLTQQEISEASSRAEVDDPSQTEEDRDEDYRSEPDGSNDSFIGYKPNIEELEMLLEAYFVQIDGTLNKLSHLREYVDDTEDYINIMLDDKQNQLLQMGVMLSTATVVITAGVAVVGLFGMNIGISLYADPTTEEETRAANRKFWETTFGTVAGCVILYIIAMGWGKRSGLLQ

SEQ ID NO: 172300 - protein, 354 aa, Zea Mays
MPETHPPPPRPVMLADLNFEPAESDGEDRPPTPAPNPAAAAAAAAAPAVAADSSTKSGNEEGGLTKTVITTKDTDTVECEDVDQHCQGASAPREEKVSNLKAALVHVARKMPKNAHAHFMLGLMYQRLGQAQKAIASYEKSTEILLQDEEEVRRPDLLSSVRIHHAQCILQASMGDSFDEELETGELDDILSKLKSSVELDHRQAAVWNILGLVLLRGGQIQSAISVLSSLTAVAPDYLDSLANLGVAYIQSGKLELSAKCFQELLLKDQNHPAALVNYAVLLLCRYGSLSAGAGGNVSTGPYVHQKEALVVAKECLLAAVKADPRAASVWVNLANAYYMDGEHKNSKRCLEQF

SEQ ID NO: 172301 - protein, 360 aa, Zea Mays
MPETHPPPPRPVMLADLNFEPAESDGEDRPPTPAPNPAAAAAAAAAPAVAADSSTKSGNEEGGLTKTVITTKDTDTVECEDVDQHCQGASAPREEKVSNLKAALVHVARKMPKNAHAHFMLGLMYQRLGQAQKAIASYEKSTEILLQDEEEVRRPDLLSSVRIHHAQCILQASMGDSFDEELETGELDDILSKLKSSVELDHRQAAVWNILGLVLLRGGQIQSAISVLSSLTAVAPDYLDSLANLGVAYIQSGKLELSAKCFQELLLKDQNHPAALVNYAVLLLCRYGSLSAGAGGNVSTGPYVHQKEALVVAKECLLAAVKADPRAASVWVNLANAYYMDGEHKNSKRCLEQFTVSEML

SEQ ID NO: 172302 - protein, 374 aa, Zea Mays
MPETHPPPPRPVMLADLNFEPAESDGEDRPPTPAPNPAAAAAAAAAPAVAADSSTKSGNEEGGLTKTVITTKDTDTVECEDVDQHCQGASAPREEKVSNLKAALVHVARKMPKNAHAHFMLGLMYQRLGQAQKAIASYEKSTEILLQDEEEVRRPDLLSSVRIHHAQCILQASMGDSFDEELETGELDDILSKLKSSVELDHRQAAVWNILGLVLLRGGQIQSAISVLSSLTAVAPDYLDSLANLGVAYIQSGKLELSAKCFQELLLKDQNHPAALVNYAVLLLCRYGSLSAGAGGNVSTGPYVHQKEALVVAKECLLAAVKADPRAASVWVNLANAYYMDGEHKNSKRCLEQAAKLEPNHMPARSKRRRPFRS

SEQ ID NO: 172303 - protein, 300 aa, Zea Mays
MPETHPPPPRPVMLADLNFEPAESDGEDRPPTPAPNPAAAAAAAAAPAVAADSSTKSGNEEGGLTKTVITTKDTDTVECEDVDQHCQGASAPREEKVSNLKAALVHVARKMPKNAHAHFMLGLMYQRLGQAQKAIASYEKSTEILLQDEEEVRRPDLLSSVRIHHAQCILQASMGDSFDEELETGELDDILSKLKSSVELDHRQAAVWNILGLVLLRGGQIQSAISVLSSLTAVAPDYLDSLANLGVAYIQSGKLELSAKCFQELLLKDQNHPAALVNYAVLLLCRYGSLSAEYRHPNSS

SEQ ID NO: 172304 - protein, 294 aa, Zea Mays
MPETHPPPPRPVMLADLNFEPAESDGEDRPPTPAPNPAAAAAAAAAPAVAADSSTKSGNEEGGLTKTVITTKDTDTVECEDVDQHCQGASAPREEKVSNLKAALVHVARKMPKNAHAHFMLGLMYQRLGQAQKAIASYEKSTEILLQDEEEVRRPDLLSSVRIHHAQCILQASMGDSFDEELETGELDDILSKLKSSVELDHRQAAVWNILGLVLLRGGQIQSAISVLSSLTAVAPDYLDSLANLGVAYIQSGKLELSAKCFQELLLKDQNHPAALVNYAVLLLCRYGSLSAGT

SEQ ID NO: 172305 - protein, 379 aa, Zea Mays
MVKEEKQENRGSVEFQVFSFTNKIRRLASHLELHKKDFSSERGLRRLLGKRQRLLAYLAKKNRVRYKKLISQLDIREKERELIYDLFEAATGVVEYQELITQNPIFLERVEGVGFISGEEAVNWGLSGPMLRASGIQWDLRKIDPYESYNQFDWKVQWQKEGDSLARYLVRVGEMRESIKIIQQAVEKIPGGPYENLEARRFKKAKNPEWNDFEYRFLGKKPSPNFELSKQELYVRVEAPKEREISASIQQRIGPEYAGPLGLLQAIADGTKLLLKEDILPSRGDIPLFSIGPSIAVISILLSFLVIPLGYRFVLADLSIGVFLWIAISSIAPIGLLMAGYSSNNKYSFSGGLRAAAQSISYEIPLTFCVLAISLRVIR

SEQ ID NO: 172306 - protein, 651 aa, Zea Mays
MLLQQLSDACLVVDALEPSVREELVKNFCSKELTSYRQIFEGAELAKLDKTERRYAWIKRRLRSNEDTWKIFPPSWHVDYLLCIQFCKITSLPVKILLFRAQLVDILNNLKEKPDVATLLLAFQRTIEFEEELAEKFSGGTTNARNKETTSDDEDEGGGHNKIVSDIRKKYEKKLAAPSDEDKDKQKDLSVPGAGFNFHGIISSCFEPYMTVYIELEEKSLVDQLEKLVQEERWEIEEGSQTNILSSSMQVFLVIRKSLKRCSALTKNQTLFNLFQVFQRILKAYAAKLYARLPKGGTGIVAAATGTDGQIRTSDRDERMICYIVNTAEYCHQTSGELAENVAKMINPQFADKVDMSEVQDEFSAVITKALMTLVHGLETKFDAEMVAMTRVPWATLESVGDQSEYVNGISSILSSSIPVLGTLLSPTYFQYFLDKLAASLGPRFYLNIYKCKHISETGAQQMLLDTQAVKTILLDIPALGKQSTGAASYSKFVSREMGKAEALLKVILSPVDSVANTYRALLPEGTPLEFQRILDLKGLKKADQQAILEDFNKHAPAPAPAIKHPAVAPTVATPVATASVQIVPSVATPAVSITPSMASLKGALANQEDVLARAAALGRGAATTGFKRFLALTEAAKDRKDGPFRKLFNA

SEQ ID NO: 172307 - protein, 327 aa, Zea Mays
MSAYCGKYKDELIKNAAYIGTPGKGILAADESTGTIGKRLSSINVENVEENRRALRELLFCCPGALQYISGVILFEETLYQKTKDGKPFVDVLKEGGVLPGIKVDKGTIEVVGTDKETTTQGHDDLGKRCAKYYEAGARFAKWRAVLKIGPNEPSQLAIDLNAQGLARYAIICQENGLVPIVEPEILVDGPHDIDRCAYVTETVLAACYKALNEHHVLLEGTLLKTVPAAVPAVVFLSGGQSEEEATRNLNAMNKLSTKKPWSLSFSFGRALQASTLKAWAGKVENLEKARAAFLARCKANSEATLGTYKGDAAADTESLHVKDYKY

SEQ ID NO: 172308 - protein, 349 aa, Zea Mays
MPLDELIKNAAYIGTPGKGILAADESTGTIGKRLSSINVENVEENRRALRELLFCCPGALQYISGVILFEETLYQKTKDGKPFVDVLKEGGVLPGIKVDKGTIEVVGTDKETTTQGHDDLGKRCAKYYEAGARFAKWRAVLKIGPNEPSQLAIDLNAQGLARYAIICQENGLVPIVEPEILVDGPHDIDRCAYVTETVLAACYKALNEHHVLLEGTLLKPNMVTPGSDSKKVTPEVIAEYTVRTLQRTVPAAVPAVVFLSGGQSEEEATRNLNAMNKLSTKKPWSLSFSFGRALQASTLKAWAGKVENLEKARAAFLARCKANSEATLGTYKGDAAADTESLHVKDYKY

SEQ ID NO: 172309 - protein, 95 aa, Zea Mays
MLPPTPRASTSRTTSTELLLFACPFWNSCLRARLRSVVCSLELIFGHPKNMLPMWDDGYLYICMLISLFAVKFRVSWSCRWRIEQLPFFVLSTML

SEQ ID NO: 172310 - protein, 686 aa, Zea Mays
MQPATDTEVVGGAVKKEPEEIVVEVDGDGDEEAEKVVKRRRRRRKKTTAWDPHKKRACVDCTKRCARIHGQPASPSALASSSSNARPVPAVPSFFKVMLGYFSEDMDIPPPFAKTIWDLAGSNVFLEDAFGLRWRVRLCLRDGVLSFGHGWKNFVLDHAVSCGEFLVFRQIARSVFTVQMFAPSAVERLHLCERNKRQSRKRKPRPQRQRTSSPSIQTVKATKNRVKNSNKKRQRTDDHQNGVRPRGHKSKTAAQVCVDDSDVPDPASEPKCPDTSERLPEAEVTEPQEISEPPAGRHEREAQKVLDGEAEVADDSAMLEETETIYNARLTEHQVPAANETEHGECLANFDASIPLAMMDLNEVSIDDIFLSADTYEFGSDMCNPEPFSVGLNMEGTTTGQNSGFSCLEELDTPQNHLSSMGDGHCSLVPEAGPCTENNKEKADALETGASYFCDSSFHDIDINALPAKEPPSFGEDSPSPRAGAEMHPNECGLSSCSQDRGNSSLLIINKQAAHKESDSFMTTKQDKPQGGQCSMQDGVGRQHPTEITSRNAKPRESPELTRNPLGTGTGSESTHSGTSESGGLLALTENITKFCIAVPAPGQTWLEIPGRLPVIPRTKKHGRKVVMLKDPRMRLWPVLYQCTPRFNGIITGWVDVCRENRIKEGDTCEFELSVLQKSSVLSLAK

SEQ ID NO: 172311 - protein, 583 aa, Zea Mays
MALTDATAFPYGLRVLVVDDDPTWLKILEKMLRKCSYEVTTCGLASVAIQILRERRNKFDIVISDVNMPDMDGFKLLELIGLEMDLPVIMMSIDGETSRVMKGVQHGACDYLLKPVRMKELRNIWQHVYRKKMHEVKEIEGNDSYDDLQMFRNGVEGFDERDLFMRADSDTMRKRKDVNKDHADQDSSDGATVKKARVVWSVDLHQKFVNAVNQIGFDIGPKKILDLMNVPGLTRENVASHLQKYRLYLSRLQKQNEERIMGAARQDFNQKGPSDHLNLRSSFQEQPGNLSNGCQHSSQKVEAQTNILDPHLDDTKTSMPLKVPDKNGISASDAVDPHNITTASPLSGVFSFERMPVNQDRKLSETMILECESWSGSVPPKQFMQYPKHNHERCDLLGDYSCLPKPDLEHPIAPGHLYAPPPVISMSYNVEKDVRDFSDVKPDLLGCMKSLSPALTCTVESVSAQLSDSVVTSTNSDRKFSSVEGLSSIKDCDFDQERNGAILFTSEEASILCGTDFTCLPEDLSGYQLQGVSFGNKGLNSIDLYQCNDTMLIPGLQNNWYDDDVEFSSETVEFPLLDGGLFA

SEQ ID NO: 172312 - protein, 657 aa, Zea Mays
MSRGLGCDNILAQLHTAHPEFCDKVGGILAMHIDDLRALAPLWLSKTEEVRQDKSHWSTNITGDIYGMGWISEMYGYSFGAAEVGLRHKINDDIMIYPGYTPRPGIEPLILHYGLPFKVGNWSFSKLEHHEDGIIYDCNRLFDPPPFPREVEMMESDPNIKRGLFLSIECINTLNEGLLLHHASAGCPKPQWSKYLSFLKSRRFSELTKPKYWKGEQVDSIMTMQHVALSKANNEYPKIHTLFSTECSSYFDWQTVGLMHSFRLSGQPGNITRLLSCTDEDLKNYKGHDLAPTHYVPSMSRHPLTGDWYPAINKPAAVLHWLNHVQTDAEFLVILDADMIMRGPITPWEYGAKRGHPVSTPYEYLIGCDNILAKIHTRNPSACDKVGGVIIMHIDDLRRFALLWLHKSEEVRADKAHYATNITGDIYNSGWISEMYGYSFAAAEINLRHIIRRDIMIYPGYVPLPRAKYRVFHYGLRFGVGNWSFDKADWRNADVVNTCWAKFPEPPDPATITKQDLDARERDFLSIECGRALNKALYLHHKRRNCPRLDTISSTSKKTDQVSASNKIVSVAQKSRSISRGNIESMDEGRLKTVKRTAASVQPLHRSRRLARSSRMWIIAVWALSIVVFLLVISMFFTEQRRNASRSRVSRSLKAHV

SEQ ID NO: 172313 - protein, 814 aa, Zea Mays
MAAGIAGAVVAALLLLYPARAAAAAAVGEGRRLHTLFSVECGDYFDWQAVGLLHSLRKARQPGGVTRLVSCAEDQLPSYRGLRIGHTLQVPSFSRHPRTGDWYPAINKPAGVVHWLKHSPEADNVDWVVILDADQIIRGPIIPWELGAEKGKPFAAYYGYLKGCDNILAQLHTAHPEFCDKVGGILAMHIDDLRALAPLWLSKTEEVRQDKSHWSTNITGDIYGMGWISEMYGYSFGAAEVGLRHKINDDIMIYPGYTPRPGIEPLILHYGLPFKVGNWSFSKLEHHEDGIIYDCNRLFDPPPFPREVEMMESDPNIKRGLFLSIECINTLNEGLLLHHASAGCPKPQWSKYLSFLKSRRFSELTKPKYWKGEQVDSIMTMQHVALSKANNEYPKIHTLFSTECSSYFDWQTVGLMHSFRLSGQPGNITRLLSCTDEDLKNYKGHDLAPTHYVPSMSRHPLTGDWYPAINKPAAVLHWLNHVQTDAEFLVILDADMIMRGPITPWEYGAKRGHPVSTPYEYLIGCDNILAKIHTRNPSACDKVGGVIIMHIDDLRRFALLWLHKSEEVRADKAHYATNITGDIYNSGWISEMYGYSFAAAEINLRHIIRRDIMIYPGYVPLPRAKYRVFHYGLRFGVGNWSFDKADWRNADVVNTCWAKFPEPPDPATITKQDLDARERDFLSIECGRALNKALYLHHKRRNCPRLDTISSTSKKTDQVSASNKIVSVAQKSRSISRGNIESMDEGRLKTVKRTAASVQPLHRSRRLARSSRMWIIAVWALSIVVFLLVISMFFTEQRRNASRSRVSRSLKAHV

SEQ ID NO: 172314 - protein, 319 aa, Zea Mays
MIMRGPITPWEYGAKRGHPVSTPYEYLIGCDNILAKIHTRNPSACDKVGGVIIMHIDDLRRFALLWLHKSEEVRADKAHYATNITGDIYNSGWISEMYGYSFAAAEINLRHIIRRDIMIYPGYVPLPRAKYRVFHYGLRFGVGNWSFDKADWRNADVVNTCWAKFPEPPDPATITKQDLDARERDFLSIECGRALNKALYLHHKRRNCPRLDTISSTSKKTDQVSASNKIVSVAQKSRSISRGNIESMDEGRLKTVKRTAASVQPLHRSRRLARSSRMWIIAVWALSIVVFLLVISMFFTEQRRNASRSRVSRSLKAHV

SEQ ID NO: 172315 - protein, 889 aa, Zea Mays
MLDASISATRLLSTHGRVTSDAPLHRFHFETFRIPQPPKGRKPQRLQKFPARAPRTLVPSPTGDASPAAGEMHIKEVTLEGFKSYAGRTVVPGFDPLFNAITGLNGSGKSNILDSICFVLGITDLRQVRAASLQELVYKQGQAGVTKATVSIVFDNSDRSRSPLGYEDSPEITVTRQIVVGGRNKYLINGHLAQPSRVQTLFHSVQLNVNNPHFLIMQGRITKVLNMKPPEILSMLEEAAGTRMYEMKKESALKTLEKKQNKVDEINKLLDVEILPALEKLRKERCQYMKWANGNAELDRLKRFCIAYDFVQAERVRDGALNDVKQIKTKIVELDETTENIKAAIQEMDNNISTLAAEKEAKVGGEMKVLSDKVDKLSHVLIKETSVMNNQEETLKSEEKGAEKILTNIEDIKRSILERDAAVKNVENEASDMKRRAEDLTKELDEKEKEYQGVLAGKSSANEKKCLEDQLRDAKAAVGDAESGLKQLATKIKHSEKELKEKKTLLVSKRDEAIAAENELKTRTKDLEGIKASMGSINYDEGQMEALQKDRSAELEIIQKLKDRVRNLSGELANVHFSYRDPERNFDRSKVKGVVARLIRIKDSSTATALEVAAGGRLFNVVVDTEETGKQLLKNGDLRSRVTIIPLNKIQTYMIPDRVQQTARRLVGPDNVTLALELVGYGEEVKNAVAFVFGSTFVCRNMDAAKEVAFNRQISSTSVTLEGDTYQPSGLLTGGSKGGRGNLLRKLDELAKAEADLSDHEKKLFVIEQQIGALLPLQKRHTELKSQFELKSYDLSLFQNRVEQNEHHKLGELVKKIEQELQESKQELTEKQVQHEKCVSTVSELEKTIKTYGTEREGKLKALEKRIKSIKSEMQSMSKQLKLRKNSGC

SEQ ID NO: 172316 - protein, 593 aa, Zea Mays
MIPDRVQQTARRLVGPDNVTLALELVGYGEEVKNAVAFVFGSTFVCRNMDAAKEVAFNRQISSTSVTLEGDTYQPSGLLTGGSKGGRGNLLRKLDELAKAEADLSDHEKKLFVIEQQIGALLPLQKRHTELKSQFELKSYDLSLFQNRVEQNEHHKLGELVKKIEQELQESKQELTEKQVQHEKCVSTVSELEKTIKTYGTEREGKLKALEKRIKSIKSEMQSMSKQLKAYESDRERLIMEKDAVVGELATLEEQLTTSKAQITSLSETLEKQKDKVTSIKQDYDQAESELNVGRSKLKECDSQINRMAKEQQKLQQKLSDSNVERKKMENEVKRMEIEQKDCSSIVDKLVEKYNWIATEKQLFGKSGTDYDFESCEPHKAREELENLQAQQSSLEKRVNKKVMAMFEKAEDEYNDLMSKKNIIENDKAKIKKVIEELDEKKKETLKVTWLKVNKDFGSIFSTLLPGTMAKLDPPEGGTFLDGLEVRVAFGTVWKQSLSELSGGQRSLLALSLILALLLFKPAPLYILDEVDAALDLSHTQNIGRMIKAHFPHSQFIVVSLKEGMFNNANVIFRTKFVDGVSTVTRTVPSKQR

SEQ ID NO: 172317 - protein, 286 aa, Zea Mays
MPLALAQLQDLRDRISDRLRPWSRSAQFWVRAADIYTSYKVCQLRAGFVKDEDEREAMWEQQHELGAQKMYSLCSELGGLFLKAAQILGKPDLAPMAWVKRLVTLCDKAPATPFDVVRDVVEKQFMKNFDDIFEFFDVEPVGSASIAQVHRARLKLSNTDVAVKVQHPGAEHLMMVDIRNMQAMALFLQKYDINFDLFSATKEMEKQICYEFDFVREASAMERIREFLRITNKKPPVMVPRVIPGMVTREVLVMEFIKGTPIMNLGNEMARRGIDPSGKIAAMAKQ

SEQ ID NO: 172318 - protein, 180 aa, Zea Mays
MILKDGFFHADPHPGNILICKDTEVALLDYGQVKEMPEDLRLAYANLVVAMADDDFLRAEESFRELGIRTWAISDNKLEELFQLSLRMFDTRLPPGVTVMSPFADDSSLTKIGVESFPEELFSVLRTIQLLRGLTVGMGLTFSCAKHWRSIAEDALLKAGRQSASKSRKQKRSFLRRLFW

SEQ ID NO: 172319 - protein, 207 aa, Zea Mays
MVEVQWPLPSRLALRKILSDLTLAYGQMILKDGFFHADPHPGNILICKDTEVALLDYGQVKEMPEDLRLAYANLVVAMADDDFLRAEESFRELGIRTWAISDNKLEELFQLSLRMFDTRLPPGVTVMSPFADDSSLTKIGVESFPEELFSVLRTIQLLRGLTVGMGLTFSCAKHWRSIAEDALLKAGRQSASKSRKQKRSFLRRLFW

SEQ ID NO: 172320 - protein, 142 aa, Zea Mays
MYPFFIGSVPTHSEIRLANSYFYDKSTCLLAWRLFLSEKEFNLDHPAANPLAPSRRAPPLKCMPPTLTVIAEHDWMRDRAIAYSEELRKVNVDSPVLDYKDTVHEFATLDVFLKTPQAQACAEDIAIWMKKYISLRGHEFSY

SEQ ID NO: 172321 - protein, 93 aa, Zea Mays
MPSSHSATVTALAVAIGLQDGFNCSLFATATIFASVVMYDASGIRLHAGKQAAVLNQIVCELPSEHPLSETRPLRELLGHTPTQNLKLADPTS

SEQ ID NO: 172322 - protein, 313 aa, Zea Mays
MTTLLRRASLRRVIAAAAASSFHPESYKQGICGSTFHCREFASKAKKKSSGTDSGEENMSKKDLALHQAIDQITSAFGKGAIMWLGRSQGHRDVPVVSTGSLDLDMALGTGGLPKGRVVEVYGPEASGKTTLALHVIAEAQKNGGYCAFVDAEHALDPALAESIGVDTNNLLLSQPDCAEQALSLVDTLIRSGSVDVVVVDSVAALVPKTELDGEMGDAHIALQARLMSQALRKLSHSLSLSQTILLFINQIRAKVATFGFGGPTEVTSGGNALKFYASVRLNIRRIGLVKKGEEVLHMFGIYLISLVSYYNV

SEQ ID NO: 172323 - protein, 401 aa, Zea Mays
MSYKQGICGSTFHCREFASKAKKKSSGTDSGEENMSKKDLALHQAIDQITSAFGKGAIMWLGRSQGHRDVPVVSTGSLDLDMALGTGGLPKGRVVEVYGPEASGKTTLALHVIAEAQKNGGYCAFVDAEHALDPALAESIGVDTNNLLLSQPDCAEQALSLVDTLIRSGSVDVVVVDSVAALVPKTELDGEMGDAHIALQARLMSQALRKLSHSLSLSQTILLFINQIRAKVATFGFGGPTEVTSGGNALKFYASVRLNIRRIGLVKKGEETIGSQIAVKIVKNKHAPPFKTAQFELEFGKGICRSSELFELGLKHKLIRKSGGSYYSFNGKAFNGKSNLKSYLTENKSVANDLEMELKRLMGTDASKEQEAGDSSQSDFPEESVTPEASSEEDLGAIIEG

SEQ ID NO: 172324 - protein, 168 aa, Zea Mays
MSDRELRPLRSIRITGDGRCLFRSVAYGACLRRGKHAPSDSAQKELADELRAKVADEFVKRRGDTEWFLEGSFESYVRQMRKPHAWGGEPELFMCSHVLRMPITVYMYTGSSDGPRIIAEYGQEYGKDDPVRVLYDGYGHYDALQPSLARCVGHRGLRCLSFFYRTAA

SEQ ID NO: 172325 - protein, 160 aa, Zea Mays
MCGQRHTSDGSHGGITGDGRCLFRSVAYGACLRRGKHAPSDSAQKELADELRAKVADEFVKRRGDTEWFLEGSFESYVRQMRKPHAWGGEPELFMCSHVLRMPITVYMYTGSSDGPRIIAEYGQEYGKDDPVRVLYDGYGHYDALQPSLVRTQSSRLALI

SEQ ID NO: 172326 - protein, 119 aa, Zea Mays
MCGQRHTSDGSHGGITGDGRCLFRSVAYGACLRRGKHAPSDSAQKELADELRAKVADEFVKRRGDTEWFHPLSITAFMIYVLLVSMDVLSVSAYRLYIPIQQLYTFNLLIDVLPSLIKI

SEQ ID NO: 172327 - protein, 138 aa, Zea Mays
MATASSPIDAQLTQALEHQTRAILAELDKRFSAIDSKWELRVGALESQAKEFARHHEDISSTIRADVEAHLSAADADTLDRIRYWEASTGFGDGAATLGFGGIARSKQIRTVWVGFGHAEPLGLPLDQAVTGPVSSPP

SEQ ID NO: 172328 - protein, 321 aa, Zea Mays
MATASSPIDAQLTQALEHQTRAILAELDKRFSAIDSKWELRVGALESQAKEFARHHEDISSTIRADVEAHLSAADADTLDRIRYWEASTGARVTALESAIHLLDTWRPRMGSSVDAFHTSMDTVHAELSKMEIQWSNGARVDGFSRPSLLDARESAPARSPAPVSFADGSCFGPRLSSTNRDCGFGPYVVDLHFPVKGTWSPQPHGSFEFPAHHNFSPGELERRGLSSRGLGGLPKLSFPVFNGTCRKLWQKRCEDYFDMYATEEIMWVKVATMHFQGVVARWLQSIELVCRRSLGASFANSSMKDLAASNMNWLSASFST

SEQ ID NO: 172329 - protein, 247 aa, Zea Mays
MCPSSNLSSCRELGNHVTCSFTAQAIHNNNGEKMDSPSNGLSIVGYLRPAFIEEESYLRSMFHGDNGGYSSDWKVNETDEYNRETRPVSGTNRLIDDDKSRFDFNHAETRTDSMIYKLEIMTIELFSMYGKQFKIDPQDFQDSEPDILANSASSIIERIKENSDQCAAALRSLCRRKKGLTVEEASLIGVDSLGIDVRAFSGLEVKTVRFSFNAQALSERSAEKKIRRMLFPRYQRKNVKASTEDES

SEQ ID NO: 172330 - protein, 332 aa, Zea Mays
MLIPDGLYMLEIDRLLQPGGYWVFSKPPVNWKSTYNISNQGTIDKQDNQVAMDDMSKRLRWTKVSEEGTISVWRKPSCNLHCDQEANAKLAGLPPLCTGEDPDSAWYANISMCMTCIPRAETFNGCAGGAMKKWPKRLGAVPPRIASGEIEWLSIQRYRYDTLVWEKRVNFYLTYLNFLSNGTYRNVMDMSAGSGGFAAAMSKHPVWVMNVVPANTTENALGVIYERGLIGTYTDWCEAFSTYPRTYDLIHGNGIFSSHIHKCGIIDILVEMDRILRPGGAVIVRDRADVVLRVKKDADRLRWHSRVVDTENGPLDPEKLLIVDNSLPLPGS

SEQ ID NO: 172331 - protein, 392 aa, Zea Mays
MPLSEPSAPAVLAALPRALSLAAAAVAAATATLLLISAVFSTPHHAASSSSPQLSPSASASTAAPVAPAPAHAPDSGPGHPHPPPPVPPCPPNATHDVPCHEPPSRERHCPPRPPPPPPLLPHPPKDPPPHPPPHCRVPPPPRYRPPPPWPARRDRARYANVDLPPLPPVKAADGQQQDPVHGRGEWLLFTDGVQGYVERLERVVPLRDGVVHTALDIGCGVASFGDYLLNYGVLTMSIAPRDRFEPQVQLALERGLPAMIGALVAHRLPYPSRSFDMVHCADCRVPWTAHDGLYMLEIDRLLQPGGYWVFSKPPVNWKSTYNISNQGTIDKQDNQVAMDDMSKRLRWTKVSEEGTISVWRKPSCNLHCDQEANAKLAGLPPLCTGEDPDSA

SEQ ID NO: 172332 - protein, 174 aa, Zea Mays
MWRRCCCNCQVDESDQHENGHVKATINNIDGAIMGLKDSTTGKVEPQDAAPQIDIPVLSLDELIEKTDDFGSTALIGEGSYGRVYYAILDNGTKMAVKKLDSTENEPTAEFLTQEEKEFKVLNLAWRLIGCSECKLLLMRQKDLNIFMRKFSLPLSIGILDQVISSCLKISRQR

SEQ ID NO: 172333 - protein, 248 aa, Zea Mays
MWRRCCCNCQVDESDQHENGHVKATINNIDGAIMGLKDSTTGKVEPQDAAPQIDIPVLSLDELIEKTDDFGSTALIGEGSYGRVYYAILDNGTKMAVKKLDSTENEPTAEFLTQVSLVSRLKHENFVDMLGYCMERNLRIVAYEFATMGSLHDVLHGRKGVQGAQPGLALDWMQRVQIAVDAAKGLEYLHEKVQPSIVHRDIRSSNILLFEDFKAKIADFNLSNQAPDMAARLHSTRVLGTFGYHAPE

SEQ ID NO: 172334 - protein, 213 aa, Zea Mays
MWRRCCCNCQVDESDQHENGHVKATINNIDGAIMGLKDSTTGKVEPQDAAPQIDIPVLSLDELIEKTDDFGSTALIGEGSYGRVYYAILDNGTKMAVKKLDSTENEPTAEFLTQVSLVSRLKHENFVDMLGYCMERNLRIVAYEFATMGSLHDEEKEFKVLNLAWRLIGCSECKLLLMRQKDLNIFMRKFSLPLSIGILDQVISSCLKISRQR

SEQ ID NO: 172335 - protein, 167 aa, Zea Mays
MQRVQIAVDAAKGLEYLHEKVQPSIVHRDIRSSNILLFEDFKAKIADFNLSNQAPDMAARLHSTRVLGTFGYHAPEYAMTGQLTQKSDVYSFGVVLLELLTGRKPVDHTMPRGQQSLVTWATPRLTEDKVKQCVDPRLMGEYPAKGLAKLAAVAALCVQYEAEFAQI

SEQ ID NO: 172336 - protein, 74 aa, Zea Mays
MHISFIPSTAWEQCGFIDNQVKYQLKILFTSVSWSSHVARLGTRPCDVIEHKLRASSELRVLAIGSVSTMMTTK

SEQ ID NO: 172337 - protein, 1219 aa, Zea Mays
MFYSQFILAKKGPLGTIWIAAHLERKLRKNQVADTDIGVSVDSIIFPDVPIALRLSSHLMLGVVRIYSRKVNYLFHDCSEALLKIKQAFRSTAVDLPPEESTAPYHSITLPETFDLDDFELPEAAFQGDTDHHVSTKEQITLQDNPEKTGYSTSQFGLDERFGDASSSHIGFDLEEELILNKDHSIHLQSDDGIIIQGRSSVPSTDMDIDDNKSQDIIAEGYHNMDGGHSSHGKLGSLNLNAIDLGGNSIPNWTGYNVHTPDLNDILLHNEGIAGPSASYIQPSPYTCDEPASPEFISAQAPATPGLMEETVPSRVHESPVLSPQRKPSPSTNDETAKTDTPAAPASDFLHSATGNANDVGAERTELGLAKHVQVESSAFWDADASGQQHTSEGLPSQGQADHLEPAADKLVNSDGIAASVETVTVNATIKDVPLAVNDSEPCVDGSTEPSVVENLVQINGPLIDAQDFQHEAQAMQQVVASNDRLNELATSEFAEPEKMLSVPDSEFNHPIDLGLITAEKGTTESDGSNIIGSLASRKRHLEDSLPALESETTERLSSRPHGIRTNDFVPHDDDILASILVGRRTPGFTLDSTPLPPRESSLKRRRLGSKMGTLKRKVQIDDAMVLHADTIRQQLINTEDIRRIRKKAPCTRSEIWMIEKGSLEDDIFHEPIFSCKFFVMSLFFCLLFLYTMTYGKLEKMEVVSSLRDDWLIFISLLGLSEELNKLHNRTYEAIVHPAVQNMELQGQLDMPEAITEDSNIAGFGAATIDGPLHIPDGIQSDAMLPRANDAYGATAAFSLQVPPNNQVNGASNDFVIGTLFQGVTGPFIGNEKEVALADRERAQVNTLYSDHFQDVPSDLHSTDANISSQDVTLDNSGQACAHATDGMTRELTHFVHSNANIFESNEVPASEITGVEYNQGASGFPQSTEDENAVGYNQDVSGFPRPTEDENAVDYNQDASGFSRPTEDVQDASGFPRPTEDENMVDYNQDASGFPRPTEDVNAVGYNQDASGFARPTEDVNAVGCNQDASGFPRSMKDENAVEYNQDGSGFPRPAENENDVSAMGDNSGFHENNMGSLTDLDMVNDYELKESNDFGSAINGVDTDFLNYDDDDGGDFDDANDDEPNPNEFQSLDNSGWSSRTRGVARYLKALFDDESGLERKSVAIDHLVRGKTRKEASRMFFETLVLTTKDYISVDQPNPFDLVRIKPGSKLLMSEF

SEQ ID NO: 172338 - protein, 916 aa, Zea Mays
MFYSQFILAKKGPLGTIWIAAHLERKLRKNQVADTDIGVSVDSIIFPDVPIALRLSSHLMLGVVRIYSRKVNYLFHDCSEALLKIKQAFRSTAVDLPPEESTAPYHSITLPETFDLDDFELPEAAFQGDTDHHVSTKEQITLQDNPEKTGYSTSQFGLDERFGDASSSHIGFDLEEELILNKDHSIHLQSDDGIIIQGRSSVPSTDMDIDDNKSQDIIAEGYHNMDGGHSSHGKLGSLNLNAIDLGGNSIPNWTGYNVHTPDLNDILLHNEGIAGPSASYIQPSPYTCDEPASPEFISAQAPATPGLMEETVPSRVHESPVLSPQRKPSPSTNDETAKTDTPAAPASDFLHSATGNANDVGAERTELGLAKHVQVESSAFWDADASGQQHTSEGLPSQGQADHLEPAADKLVNSDGIAASVETVTVNATIKDVPLAVNDSEPCVDGSTEPSVVENLVQINGPLIDAQGTITQIADFQHEAQAMQQVVASNDRLNELATSEFAEPEKMLSVPDSEFNHPIDLGLITAEKGTTESDGSNIIGSLASRKRHLEDSLPALESETTERLSSRPHGIRTNDFVPHDDDILASILVGRRTPGFTLDSTPLPPRESSLKRRRLGSKMGTLKRKVQIDDAMVLHADTIRQQLINTEDIRRIRKKAPCTRSEIWMIEKGSLEDDIFHEPIFSCLSEELNKLHNRTYEAIVHPAVQNMELQGQLDMPEAITEDSNIAGFGAATIDGPLHIPDGIQSDAMLPRANDAYGATAAFSLQVPPNNQVNGASNDFVIGTLFQGVTGPFIGNEKEVALADRERAQVNTLYSDHFQDVPSDLHSTDANISSQDVTLDNSGQACAHATDGMTRELTHFVHSNANIFESNEVPASEITGVEYNQGASGFPQSTEDENAKMFKMPLVFLDQRRMKIW

SEQ ID NO: 172339 - protein, 1167 aa, Zea Mays
MLGVVRIYSRKVNYLFHDCSEALLKIKQAFRSTAVDLPPEESTAPYHSITLPETFDLDDFELPEAAFQGDTDHHVSTKEQITLQDNPEKTGYSTSQFGLDERFGDASSSHIGFDLEEELILNKDHSIHLQSDDGIIIQGRSSVPSTDMDIDDNKSQDIIAEGYHNMDGGHSSHGKLGSLNLNAIDLGGNSIPNWTGYNVHTPDLNDILLHNEGIAGPSASYIQPSPYTCDEPASPEFISAQAPATPGLMEETVPSRVHESPVLSPQRKPSPSTNDETAKTDTPAAPASDFLHSATGNANDVGAERTELGLAKHVQVESSAFWDADASGQQHTSEGLPSQGQADHLEPAADKLVNSDGIAASVETVTVNATIKDVPLAVNDSEPCVDGSTEPSVVENLVQINGPLIDAQGTITQIADFQHEAQAMQQVVASNDRLNELATSEFAEPEKMLSVPDSEFNHPIDLGLITAEKGTTESDGSNIIGSLASRKRHLEDSLPALESETTERLSSRPHGIRTNDFVPHDDDILASILVGRRTPGFTLDSTPLPPRESSLKRRRLGSKMGTLKRKVQIDDAMVLHADTIRQQLINTEDIRRIRKKAPCTRSEIWMIEKGSLEDDIFHEPIFSCKFFVMSLFFCLLFLYTMTYGKLEKMEVVSSLRDDWLIFISLLGLSEELNKLHNRTYEAIVHPAVQNMELQGQLDMPEAITEDSNIAGFGAATIDGPLHIPDGIQSDAMLPRANDAYGATAAFSLQVPPNNQVNGASNDFVIGTLFQGVTGPFIGNEKEVALADRERAQVNTLYSDHFQDVPSDLHSTDANISSQDVTLDNSGQACAHATDGMTRELTHFVHSNANIFESNEVPASEITGVEYNQGASGFPQSTEDENAVGYNQDVSGFPRPTEDENAVDYNQDASGFSRPTEDVQDASGFPRPTEDENMVDYNQDASGFPRPTEDVNAVGYNQDASGFARPTEDVNAVGCNQDASGFPRSMKDENAVEYNQDGSGFPRPAENENDVSAMGDNSGFHENNMGSLTDLDMVNDYELKESNDFGSAINGVDTDFLNYDDDDGGDFDDANDDEPNPNEFQSLDNSGWSSRTRGVARYLKALFDDESGLERKSVAIDHLVRGKTRKEASRMFFETLVLTTKDYISVDQPNPFDLVRIKPGSKLLMSEF

SEQ ID NO: 172340 - protein, 934 aa, Zea Mays
MPSPRQFLQLLLPTLLATCCVDGANGPHAPATARRQLHQPFFVPDQPGQPSAPPPFFPAIPVTPPPPVPTGQDQPTYPALVFPSNGSSGATPPAGNSHGSKKSSKLVPAILLPLLTVAVLGLSIAFFFSHRRRNAARGGGGGCVGGGDAKFLHPERTSLFARDEFGGSGGGGVREAAPAPAPASATSAEFLYVGTLASRADERSSDTTSSGDEVSRSSGGSPELRPLPPLARQCAPAPSRSPGAASPSSGEEEFYSPRGSSTKTSSSRRTLATAVQAALEARDRSRTPSPGSVLSTPSYPSSPGATLSPAPASPPAFSSPGESGRRSVKSRSESARVVVLPPVPPTPPPPPPFAPTLPPPPPPRRKPPSPSPPCSPLNDKPALRSSTDTIERNPFAQPPSLPTSTHPPRPPPAAGPPPPPPPPPPPPVGYWESRVRKPDTSKETRSPALSPPSFRSVPAPTDAFPSWLPESSEQGDKSEDTTPRPKLKPLHWDKVRASSDRVMVPLNSRRVNEEMIETLFICNPANAPAKEATRRPVLPTPKAENKVLDPKKAQNIAILLRALNVTKEEVSDALCEGNTENFGADLLETLLKMAPTKEEEIKLREFKEESSPVKLNPAEKFLKAVLDVPFAFKRVDAMLYIANFDAEVNYLKKSFETLEAACDELRSSRLFLKLLEAVLKTGNRMNVGTNRGDAHAFKLDTLLKLVDVKGTDGHTTLLHFVVQEMIRTEGARVSASTQTTPRTQANPLREELECKRLGLRVVGGLASELGNVKKAAAMDSDVLSSYVAKLAGGIEKVTEVLRLNEEVKSRDDAWQFHDRMQRFLKKADDEIIRVQCQESVALSLVKEITEYFHGDSAKEEAHPFRIFMVVRDFLAVLDQVCKEVGRINERTIASSARHFPVPVNPMMPQLFPRLHALRAGFSDDESSAASVSSP

SEQ ID NO: 172341 - protein, 198 aa, Zea Mays
METRRPRRGWNKRFVLPLALLCLAVLLPGALLPPSASASSSSPAAGGGSRKRRWVGFDYYVLALQWPGTICRETSNCCDTNGCCRSQPLKWFTIHGLWPQYNYGGWPSCCRPTRFNINKILMLMPILEKYWPSLYCGSSSTCFGGRGPFWVHEWGMQFLNLLGTNNVLFCYLLIGSRNLFMFCCVAVDAVFADILLRI

SEQ ID NO: 172342 - protein, 296 aa, Zea Mays
METRRPRRGWNKRFVLPLALLCLAVLLPGALLPPSASASSSSPAAGGGSRKRRWVGFDYYVLALQWPGTICRETSNCCDTNGCCRSQPLKWFTIHGLWPQYNYGGWPSCCRPTRFNINKILMLMPILEKYWPSLYCGSSSTCFGGRGPFWVHEWETHGTCAYPEIQDEYDYFSTALYLYSKYNVTKALRKARIRPTSGRKYAVGHIVAVIEYAFGAMPSLVCKNGSVQELRLCFHKDYQPRDCTLEAGSAPNGRSYCPRYITFPSYKPSVVANTTEGINNQSNGEVPSYMRTSDSE

SEQ ID NO: 172343 - protein, 183 aa, Zea Mays
METRRPRRGWNKRFVLPLALLCLAVLLPGALLPPSASASSSSPAAGGGSRKRRWVGFDYYVLALQWPGTICRETSNCCDTNGCCRSQPLKWFTIHGLWPQYNYGGWPSCCRPTRFNINKILMLMPILEKYWPSLYCGSSSTCFGGRGPFWVHEWGMQFLNLLGTNNVLFCYLLIGNSWDLCLP

SEQ ID NO: 172344 - protein, 241 aa, Zea Mays
METRRPRRGWNKRFVLPLALLCLAVLLPGALLPPSASASSSSPAAGGGSRKRRWVGFDYYVLALQWPGTICRETSNCCDTNGCCRSQPLKWFTIQTHGTCAYPEIQDEYDYFSTALYLYSKYNVTHFVLQKALRKARIRPTSGRKYAVGHIVAVIEYAFGAMPSLVCKNGSVQELRLCFHKDYQPRDCTLEAGSAPNGRSYCPRYITFPSYKPSVVANTTEGINNQSNGEVPSYMRTSDSE

SEQ ID NO: 172345 - protein, 283 aa, Zea Mays
METRRPRRGWNKRFVLPLALLCLAVLLPGALLPPSASASSSSPAAGGGSRKRRWVGFDYYVLALQWPGTICRETSNCCDTNGCCRSQPLKWFTIHGLWPQYNYGGWPSCCRPTRFNINKILMLMPILEKYWPSLYCGSSSTCFGGRGPFWVHEDEYDYFSTALYLYSKYNVTKALRKARIRPTSGRKYAVGHIVAVIEYAFGAMPSLVCKNGSVQELRLCFHKDYQPRDCTLEAGSAPNGRSYCPRYITFPSYKPSVVANTTEGINNQSNGEVPSYMRTSDSE

SEQ ID NO: 172346 - protein, 91 aa, Zea Mays
MLSSGWIQVSNGKEYALSDVIDTIKHAFGGSPQIVCKRGSIEELRLCFDKELKPRDCLTTSLANGSVSKSKHCPRYITLPTYDPLDHDTVR

SEQ ID NO: 172347 - protein, 202 aa, Zea Mays
MLSHLLPRHHHRRLLQILSRAAAAPDVDLHQRLCSSSAASSTSLSIWWRKKEMGKEGLMAVALLKRLAALPPVGCHPRLEQFMRSHVSQLLRTDLLAELLRQDHASLSMKEPARLLLYCVVAAGFSRGPGAEAPSRRRGPGKQAVQQAGAAQAAGQASSATSRRMGPGATRDQQPASSAVAARQSMIADCSCRSEQICQPRL

SEQ ID NO: 172348 - protein, 632 aa, Zea Mays
METLMVDRVHSSLRLFMYRNAIFLCERLCAQFPSETNVQLLATCYLHNNQPYAAYHVLKGKKLPESRYLFATSCFRMNLLREAEEILCPVNEPNMEVPSGATGHYLLGVIYRCTGRISAAAEQFTQALTLDPLLWAAYEELCILGIAEDTDECFSESTALRLQQEHTSTSTLVKSNFANENRVLSSSVSASFGDIIPKQIKQLHANNITEVSGYPHVRPTALHVQNSSTSNVSQFDTPSPAAAQTSIMPPPLFRNVHAYQNTISGDAPTKQKANGVSQPLRRKYMDEARLKKVSGRLFNSDAMPRRSQRLKDTTTNSNTSQIGGNGTDHLSGKLRVNSSTQSKLCSTAIRSVQVRKGKPRATENFDEGTSSSVSTADGRSFEQDRAERILLQDSKVALGIRELLGLFRTLGEGFRLSCLFKCQEALEVYRKLPESQFNTGWVLCQVGKAYFELVDYLEADHYFELAHRLSPCTLDGMDIYSTVLYHLNEEMRLSYLAQELISIDRLSPQAWCAVGNCFALRKDHETALKNFQRSVQLDSRFAYAHTLCGHEYSALEDYENSIKFYRCALQVDERHYNAWYGLGVVYLRQEKFEFAEHHFRRAFQINPRSSVLMCYLGMALHSLKVDIIDRQQ

SEQ ID NO: 172349 - protein, 572 aa, Zea Mays
METLMVDRVHSSLRLFMYRNAIFLCERLCAQFPSETNVQLLATCYLHNNQPYAAYHVLKGKKLPESRYLFATSCFRMNLLREAEEILCPVNEPNMEVPSGATGHYLLGVIYRCTGRISAAAEQFTQALTLDPLLWAAYEELCILGIAEDTDECFSESTALRLQQEHTSTSTLVKSNFANENRVLSSSVSASFGDIIPKQIKQLHANNITEVSGYPHTSIMPPPLFRNVHAYQNTISGDAPTKQKANGVSQPLRRKYMDEARLKKVSGRLFNSDAMPRRSQRLKDTTTNSNTSQIGGNGTDHLSDNMSGTSSSVSTADGRSFEQDRAERILLQDSKVALGIRELLGLFRTLGEGFRLSCLFKCQEALEVYRKLPESQFNTGWVLCQVGKAYFELVDYLEADHYFELAHRLSPCTLDGMDIYSTVLYHLNEEMRLSYLAQELISIDRLSPQAWCAVGNCFALRKDHETALKNFQRSVQLDSRFAYAHTLCGHEYSALEDYENSIKFYRCALQVDERHYNAWYGLGVVYLRQEKFEFAEHHFRRAFQINPRSSVLMCYLGMALHSLKVDIIDRQQ

SEQ ID NO: 172350 - protein, 739 aa, Zea Mays
METLMVDRVHSSLRLFMYRNAIFLCERLCAQFPSETNVQLLATCYLHNNQPYAAYHVLKGKKLPESRYLFATSCFRMNLLREAEEILCPVNEPNMEVPSGATGHYLLGVIYRCTGRISAAAEQFTQALTLDPLLWAAYEELCILGIAEDTDECFSESTALRLQQEHTSTSTLVKSNFANENRVLSSSVSASFGDIIPKQIKQLHANNITEVSGYPHVRPTALHVQNSSTSNVSQFDTPSPAAAQTSIMPPPLFRNVHAYQNTISGDAPTKQKANGVSQPLRRKYMDEARLKKVSGRLFNSDAMPRRSQRLKDTTTNSNTSQIGGNGTDHLSGKLRVNSSTQSKLCSTAIRSVQVRKGKPRATENFDEDNMSGTSSSVSTADGRSFEQDRAERILLQDSKVALGIRELLGLFRTLGEGFRLSCLFKCQEALEVYRKLPESQFNTGWVLCQVGKAYFELVDYLEADHYFELAHRLSPCTLDGMDIYSTVLYHLNEEMRLSYLAQELISIDRLSPQAWCAVGNCFALRKDHETALKNFQRSVQLDSRFAYAHTLCGHEYSALEDYENSIKFYRCALQVDERHYNAWYGLGVVYLRQEKFEFAEHHFRRAFQINPRSSVLMCYLGMALHSLKRNEEALEMMEKAIAADKKNPLPKYQKSLILLGLMKYEEALDELERLKEIAPHESSMYALMGKIYKQLNILDKAVFCFGIALDLKPPAADLAIIKSAMEKVHLPDELMEDDL

SEQ ID NO: 172351 - protein, 727 aa, Zea Mays
METLMVDRVHSSLRLFMYRNAIFLCERLCAQFPSETNVQLLATCYLHNNQPYAAYHVLKGKKLPESRYLFATSCFRMNLLREAEEILCPVNEPNMEVPSGATGHYLLGVIYRCTGRISAAAEQFTQALTLDPLLWAAYEELCILGIAEDTDECFSESTALRLQQEHTSTSTLVKSNFANENRVLSSSVSASFGDIIPKQIKQLHANNITEVSGYPHVRPTALHVQNSSTSNVSQFDTPSPAAAQTSIMPPPLFRNVHAYQNTISGDAPTKQKANGVSQPLRRKYMDEARLKKVSGRLFNSDAMPRRSQRLKDTTTNSNTSQIGGNGTDHLSGKLRVNSSTQSKLCSTAIRSVQVRKGKPRATENFDEADGRSFEQDRAERILLQDSKVALGIRELLGLFRTLGEGFRLSCLFKCQEALEVYRKLPESQFNTGWVLCQVGKAYFELVDYLEADHYFELAHRLSPCTLDGMDIYSTVLYHLNEEMRLSYLAQELISIDRLSPQAWCAVGNCFALRKDHETALKNFQRSVQLDSRFAYAHTLCGHEYSALEDYENSIKFYRCALQVDERHYNAWYGLGVVYLRQEKFEFAEHHFRRAFQINPRSSVLMCYLGMALHSLKRNEEALEMMEKAIAADKKNPLPKYQKSLILLGLMKYEEALDELERLKEIAPHESSMYALMGKIYKQLNILDKAVFCFGIALDLKPPAADLAIIKSAMEKVHLPDELMEDDL

SEQ ID NO: 172352 - protein, 529 aa, Zea Mays
METLMVDRVHSSLRLFMYRNAIFLCERLCAQFPSETNVQLLATCYLHNNQPYAAYHVLKGKKLPESRYLFATSCFRMNLLREAEEILCPVNEPNMEVPSGATGHYLLGVIYRCTGRISAAAEQFTQALTLDPLLWAAYEELCILGIAEDTDECFSESTALRLQQEHTSTSTLVKSNFANENRVLSSSVSASFGDIIPKQIKQLHANNITEVSGYPHTSIMPPPLFRNVHAYQNTISGDAPTKQKANGVSQPLRRKYMDEARLKKVSGRLFNSDAMPRRSQRLKDTTTNSNTSQIGGNGTDHLSGKLRVNSSTQSKLCSTAIRSVQVRKGKPRATENFDEGSRYEVIDEMWTDNMSGTSSSVSTADGRSFEQDRAERILLQDSKVALGIRELLGLFRTLGEGFRLSCLFKCQEALEVYRKLPESQFNTGWVLCQVGKAYFELVDYLEADHYFELAHRLSPCTLDGMDIYSTVLYHLNEEMRLSYLAQELISIDRLSPQAWCAVGNCFALRKDHETALKNFQRSVFCTGGL

SEQ ID NO: 172353 - protein, 687 aa, Zea Mays
METLMVDRVHSSLRLFMYRNAIFLCERLCAQFPSETNVQLLATCYLHNNQPYAAYHVLKGKKLPESRYLFATSCFRMNLLREAEEILCPVNEPNMEVPSGATGHYLLGVIYRCTGRISAAAEQFTQALTLDPLLWAAYEELCILGIAEDTDECFSESTALRLQQEHTSTSTLVKSNFANENRVLSSSVSASFGDIIPKQIKQLHANNITEVSGYPHTSIMPPPLFRNVHAYQNTISGDAPTKQKANGVSQPLRRKYMDEARLKKVSGRLFNSDAMPRRSQRLKDTTTNSNTSQIGGNGTDHLSGSRYEVIDEMWTDNMSGTSSSVSTADGRSFEQDRAERILLQDSKVALGIRELLGLFRTLGEGFRLSCLFKCQEALEVYRKLPESQFNTGWVLCQVGKAYFELVDYLEADHYFELAHRLSPCTLDGMDIYSTVLYHLNEEMRLSYLAQELISIDRLSPQAWCAVGNCFALRKDHETALKNFQRSVQLDSRFAYAHTLCGHEYSALEDYENSIKFYRCALQVDERHYNAWYGLGVVYLRQEKFEFAEHHFRRAFQINPRSSVLMCYLGMALHSLKRNEEALEMMEKAIAADKKNPLPKYQKSLILLGLMKYEEALDELERLKEIAPHESSMYALMGKIYKQLNILDKAVFCFGIALDLKPPAADLAIIKSAMEKVHLPDELMEDDL

SEQ ID NO: 172354 - protein, 691 aa, Zea Mays
METLMVDRVHSSLRLFMYRNAIFLCERLCAQFPSETNVQLLATCYLHNNQPYAAYHVLKGKKLPESRYLFATSCFRMNLLREAEEILCPVNEPNMEVPSGATGHYLLGVIYRCTGRISAAAEQFTQALTLDPLLWAAYEELCILGIAEDTDECFSESTALRLQQEHTSTSTLVKSNFANENRVLSSSVSASFGDIIPKQIKQLHANNITEVSGYPHVRPTALHVQNSSTSNVSQFDTPSPAAAQTSIMPPPLFRNVHAYQNTISGDAPTKQKANGVSQPLRRKYMDEARLKKVSGRLFNSDAMPRRSQRLKDTTTNSNTSQIGGNGTDHLSADGRSFEQDRAERILLQDSKVALGIRELLGLFRTLGEGFRLSCLFKCQEALEVYRKLPESQFNTGWVLCQVGKAYFELVDYLEADHYFELAHRLSPCTLDGMDIYSTVLYHLNEEMRLSYLAQELISIDRLSPQAWCAVGNCFALRKDHETALKNFQRSVQLDSRFAYAHTLCGHEYSALEDYENSIKFYRCALQVDERHYNAWYGLGVVYLRQEKFEFAEHHFRRAFQINPRSSVLMCYLGMALHSLKRNEEALEMMEKAIAADKKNPLPKYQKSLILLGLMKYEEALDELERLKEIAPHESSMYALMGKIYKQLNILDKAVFCFGIALDLKPPAADLAIIKSAMEKVHLPDELMEDDL

SEQ ID NO: 172355 - protein, 594 aa, Zea Mays
METLMVDRVHSSLRLFMYRNAIFLCERLCAQFPSETNVQLLATCYLHNNQPYAAYHVLKGKKLPESRYLFATSCFRMNLLREAEEILCPVNEPNMEVPSGATGHYLLGVIYRCTGRISAAAEQFTQALTLDPLLWAAYEELCILGIAEDTDECFSESTALRLQQEHTSTSTLVKSNFANENRVLSSSVSASFGDIIPKQIKQLHANNITEVSGYPHVRPTALHVQNSSTSNVSQFDTPSPAAAQTSIMPPPLFRNVHAYQNTISGDAPTKQKANGVSQPLRRKYMDEARLKKVSGRLFNSDAMPRRSQRLKDTTTNSNTSQIGGNGTDHLSGKLRVNSSTQSKLCSTAIRSVQVRKGKPRATENFDEGSRYEVIDEMWTDNMSGTSSSVSTADGRSFEQDRAERILLQDSKVALGIRELLGLFRTLGEGFRLSCLFKCQEALEVYRKLPESQFNTGWVLCQVGKAYFELVDYLEADHYFELAHRLSPCTLDGMDIYSTVLYHLNEEMRLSYLAQELISIDRLSPQAWCAVGNCFALRKDHETALKNFQRSVQLDSRFAYAHTLCGHEYSALEDYENSIKFYRCALQVDERHYNA

SEQ ID NO: 172356 - protein, 398 aa, Zea Mays
MHHSEGQALCSGESCLTESPGRRFTAVSPHLRGKIDLVYFSLDPTCGSLQHWVCPLFTLMHHSGSATVGDIRIEDVFQVSGRLFNSDAMPRRSQRLKDTTTNSNTSQIGGNGTDHLSGSRYEVIDEMWTDNMSGTSSSVSTADGRSFEQDRAERILLQDSKVALGIRELLGLFRTLGEGFRLSCLFKCQEALEVYRKLPESQFNTGWVLCQVGKAYFELVDYLEADHYFELAHRLSPCTLDGMDIYSTVLYHLNEEMRLSYLAQELISIDRLSPQAWCAVGNCFALRKDHETALKNFQRSVQLDSRFAYAHTLCGHEYSALEDYENSIKFYRCALQVDERHYNAWYGLGVVYLRQEKFEFAEHHFRRAFQINPRSSVLMCYLGMALHSLKVDIIDRQQ

SEQ ID NO: 172357 - protein, 636 aa, Zea Mays
METLMVDRVHSSLRLFMYRNAIFLCERLCAQFPSETNVQLLATCYLHNNQPYAAYHVLKGKKLPESRYLFATSCFRMNLLREAEEILCPVNEPNMEVPSGATGHYLLGVIYRCTGRISAAAEQFTQALTLDPLLWAAYEELCILGIAEDTDECFSESTALRLQQEHTSTSTLVKSNFANENRVLSSSVSASFGDIIPKQIKQLHANNITEVSGYPHVRPTALHVQNSSTSNVSQFDTPSPAAAQTSIMPPPLFRNVHAYQNTISGDAPTKQKANGVSQPLRRKYMDEARLKKVSGRLFNSDAMPRRSQRLKDTTTNSNTSQIGGNGTDHLSGKLRVNSSTQSKLCSTAIRSVQVRKGKPRATENFDEDNMSGTSSSVSTADGRSFEQDRAERILLQDSKVALGIRELLGLFRTLGEGFRLSCLFKCQEALEVYRKLPESQFNTGWVLCQVGKAYFELVDYLEADHYFELAHRLSPCTLDGMDIYSTVLYHLNEEMRLSYLAQELISIDRLSPQAWCAVGNCFALRKDHETALKNFQRSVQLDSRFAYAHTLCGHEYSALEDYENSIKFYRCALQVDERHYNAWYGLGVVYLRQEKFEFAEHHFRRAFQINPRSSVLMCYLGMALHSLKVDIIDRQQ

SEQ ID NO: 172358 - protein, 451 aa, Zea Mays
MSPPAMLLPVCSAAPSCSPLCPVTASHVVARVARRVDVGAALRSYADSLVAQVPDRPPLADSSILSPYIAAPDDIARAFGAPASELPPLPSADPSPGLCCTGTDQPLAAVADLAATAVVNSAPTDAAERALSDAPFPSTFPSDASEVEDSVARLIDKVGKQVFQAEDALTEAYDKLRLSAYDALGAWRKTVRDAIGGLKASVDAGKQQAAGGVTDASGALHEKVAGAGTVAVDVLRKAIVAAEDSLGSAATFVVYSYGSAKESLPPNVRDLLSSSEEKASLVLRPIGNALQQVYVVVEGVEKNVGLDPSDPIVQLAVVLGGSVTIGTTYWLFTYSGYSGDLSPESAFDLLKNDDKAVLIDVRPEDLREKDGVPDLRLGARSKYASVASPEIKDPVKSMLKDEREFDDALLAVVIRNLKLVKGDSKVIVMDSNGARSKAIARLLKKLATLPC

SEQ ID NO: 172359 - protein, 603 aa, Zea Mays
MSPPAMLLPVCSAAPSCSPLCPVTASHVVARVARRVDVGAALRSYADSLVAQVPDRPPLADSSILSPYIAAPDDIARAFGAPASELPPLPSADPSPGLCCTGTDQPLAAVADLAATAVVNSAPTDAAERALSDAPFPSTFPSDASEVEDSVARLIDKVGKQVFQAEDALTEAYDKLRLSAYDALGAWRKTVRDAIGGLKASVDAGKQQAAGGVTDASGALHEKVAGAGTVAVDVLRKAIVAAEDSLGSAATFVVYSYGSAKESLPPNVRDLLSSSEEKASLVLRPIGNALQQVYVVVEGVEKNVGLDPSDPIVQLAVVLGGSVTIGTTYWLFTYSGYSGDLSPESAFDLLKNDDKAVLIDVRPEDLREKDGVPDLRLGARSKYASVASPEIKDPVKSMLKDEREFDDALLAVVIRNLKLVKGDSKVIVMDSNGARSKAIARLLKKLGGFQAWSKNLRVKELKPETALTSINEDVEEILEQIKPTPTLVFGSLLGLSALSYALLEWEMTLQYIAVLSVGLTIYLRFSTYEDSEDLEKDLKLLLSPVRVGADALSWAAKKIEPNKVGLPTSPSTTAVKDRVLQAAAKHESQPSDADESSVQTAEA

SEQ ID NO: 172360 - protein, 153 aa, Zea Mays
MLKDEREFDDALLAVVIRNLKLVKGDSKVIVMDSNGARSKAIARLLKKLGVQRPYLVKGGFQAWSKNLRVKELKPETALTSINEDVEEILEQIKPTPTLVFGSLLGLSALSYALLEWEMTLQYIAVLSVGLTIYLRFSTYEDSEDLEKDLNFS

SEQ ID NO: 172361 - protein, 194 aa, Zea Mays
MLKDEREFDDALLAVVIRNLKLVKGDSKVIVMDSNGARSKAIARLLKKLGVQRPYLVKGGFQAWSKNLRVKELKPETALTSINEGLSALSYALLEWEMTLQYIAVLSVGLTIYLRFSTYEDSEDLEKDLKLLLSPVRVGADALSWAAKKIEPNKVGLPTSPSTTAVKDRVLQAAAKHESQPSDADESSVQTAEA

SEQ ID NO: 172362 - protein, 121 aa, Zea Mays
MLKDEREFDDALLAVVIRNLKLVKGDSKVIVMDSNGARSKAIARLLKKLGVQRPYLVKGGFQAWSKNLRVKELKPETALTSINEDVEEILEQIKPTPTLVFGSLLGLSALSYALLGCCCLQ

SEQ ID NO: 172363 - protein, 184 aa, Zea Mays
MNQMIRELPKTNPVYLMLRTSFGFSAKGTGLKALEFALSICDSFDMYGFTVDPGYKECSVLTAEVIFQDKVLLRENHVQLVKIHSPMQGDPGRTVRWLPTKATIEAARVASEKLLKRPGAGSDDPLGTCTMIKKRRKGKAPNRSGLRDAAMKHLEDMKGATRYPLERNAGGGYLCMINDRYDRG

SEQ ID NO: 172364 - protein, 185 aa, Zea Mays
MDVRLSSFWPLERWIRNPSRDNRCSWSRTGLYDMLSVLIPTHWSCSSLIYLLCFCSISYILYSAKHCTRRPKFVQYINVQSFEALNPRAVAVVIDPIQKRTIDFRFCRRAVKPLRLRHFRFRFCALFGAEFSARFTNSERKFPFCFADCRAVESVWAMVAEALAVGRVFIGDGVWYSAPVRHHRP

SEQ ID NO: 172365 - protein, 126 aa, Zea Mays
MEFGTARQYDTTDLDEALQRESFEALNPRAVAVVIDPIQKRTIDFRFCRRAVKPLRLRHFRFRFCALFGAEFSAHFTNSERKFPFCFADCRAVESVWAMVAEALAVGRVFIGDGVWYSAPVRHHRP

SEQ ID NO: 172366 - protein, 207 aa, Zea Mays
MVQSLKGILADRSEGEIYATLCDCGMDPDIAVERLISQTPAQLRWSLTKQEWLLATGLTGLLNPYGLWSPRHSQSDVSSSEMEFGTARQYDTTDLDEALQRESFEALNPRAVAVVIDPIQKRTIDFRFCRRAVKPLRLRHFRFRFCALFGAEFSAHFTNSERKFPFCFADCRAVESVWAMVAEALAVGRVFIGDGVWYSAPVRHHRP

SEQ ID NO: 172367 - protein, 106 aa, Zea Mays
MLVKIHSPMQGDPGRTVRWLPTKATIEAARVASEKLLKRPGAGSDDPLGTCTMIKKRRKGKAPNRSGLRDAAMKHLEDMKGATRYPLERNAGGGYLCMINDRYDRG

SEQ ID NO: 172368 - protein, 202 aa, Zea Mays
MPTPKHAVPASVRPISTAGGRRTFLPVSAVGSGQGSSVTEADRKSDLSLENVKTSVVSRDGEKINVRVQLPGKATQKVFDEALTFLARDAPPVPGFRKSKGGKTSNIPSSILLQMLGKSRVTKFVLQEILSITIEEFVKKENLKVKPEIQTTQSEGEMESAFAPGSAFGFNVVLQLETPDSDDPEEKPGSDDDLQEESGSSE

SEQ ID NO: 172369 - protein, 188 aa, Zea Mays
MASAATATLPKVQLRPRCNSYFQVTGQVHAHTKTCGACKCPTHIHGLLVSAGGRRTFLPVSAVGSGQGSSVTEADRKSDLSLENVKTSVVSRDGEKINVRVQLPGKATQKVFDEALTFLARDAPPVPGFRKSKGGKTSNVSAHGPFFPISFTNANYSKSFYHLPRYPAASCCRCLARAGSPNSFFRKY

SEQ ID NO: 172370 - protein, 208 aa, Zea Mays
MARTEKLTSDGCSGGEVQVEVELGMGVDGKGIIECRICQEEGEEAAMDSPCACAGTLKFAHRKCIQRWCNKKGNITCEICNQVYSPNYVIPPPKCCSDEMDMNLRQNWVGRIDPHDSHFLAIAIAEQQLLQAEFDDCVSANSSGATCCRSIALIVMFLLLVRHVIVIVRDVSMLQDATVLFSFAGFFLPCYVIARSCYALQHRRRRQV

SEQ ID NO: 172371 - protein, 216 aa, Zea Mays
MARTEKLTSDGCSGGEVQVEVELGMGVDGKGIIECRICQEEGEEAAMDSPCACAGTLKFAHRKCIQRWCNKKGNITCEICNQVYSPNYVIPPPKCCSDEMDMNLRQNWVGRIDPHDSHFLAIAIAEQQLLQAEFDDCVSANSSGATCCRSIALIVMFLLLVRHVIVIVRDVSMLQDATVLFSATLQFAGFFLPCYVIARSCYALQHRRRRQVGRLT

SEQ ID NO: 172372 - protein, 169 aa, Zea Mays
MEIAKEAGALLSYDPNLREALWPSREEARTQILSIWDQADIVKVSEVELEFLTGIDSVEDDVVMKLWRPTMKLLLVTLGDQGCKYYARDFHGAVPSFKVQQVDTTGAGDAFVGALLQRIVKDPSSLQDEKKLVESIKFANACGAITTTKKGAIPSLPTEAEVLQLIEKA

SEQ ID NO: 172373 - protein, 116 aa, Zea Mays
MGSPICIAPPSPPTLRRLQSAQIPLRHLASTHHARADLLARPPQIPPGSSTFPTSGVNVRGPTFPKSAPVPLPSPHRLSTFADGASPHSAPVVTGYRIHRYLLLLGSLGRAGNLVL

SEQ ID NO: 172374 - protein, 101 aa, Zea Mays
MGSPICIAPPSPPTLRRLQSAQIPLRHLASTHHARADLLARPPQIPPGSSTFPTSGVNVRGPTFPKSAPVPLPSPHRLSTFADGASPHSAPVVTGAGNLVL

SEQ ID NO: 172375 - protein, 92 aa, Zea Mays
MESARLATQVSVASPSSSQGLPTSARANQEETDMASLFTILFDLFGEVCLTMNLHSKTVCFLPPSKMCSFLLENNMMWFLLRSCSGTILPIK

SEQ ID NO: 172376 - protein, 74 aa, Zea Mays
MNRQRMEYSYTISTQKLLCVGVLILLAQFKADSTFRTYVFSLQALLTLQTNEIAVLFSRTSFKLKKERNVPRDT

SEQ ID NO: 172377 - protein, 81 aa, Zea Mays
MCGGVRRARRGTVPWPSSAEYYHHREPYTCEVSREIRMHGRVHGGAGRTCGHGGAWTMGKQRQRSSTLVGGARLTSLAAAR

SEQ ID NO: 172378 - protein, 310 aa, Zea Mays
MKRIEYTLGNLHTPYSSVTIKKTRHDTQTLKEFLMAELRELREMDKDGSSERSRPDHGDVKMLKFRPKVPRQKQKPKQQDPKPIDEDVMKILRTRQVAAKSAPNTEDECSPQKTLSTPPSADVVCLSPAQLGVQKQNQLPLQIPRSFPVPVNSGLVYEEESSDDDDDNDSDNVGLLETQPDSIESEALTCPAEELDLLQEGSKERMFFFQFPNSLPLPKRSSSAGKEVMEGSNLQQLPQGYLGKMLVYKSGKIKMKLGDIIFDVNPGVESRMLQRAVALNTRDKHCCLLGEIENRHVIVTPNVDSLLNDK

SEQ ID NO: 172379 - protein, 454 aa, Zea Mays
MPFATSPRTTSVSSPPSRWACATHGGTYKVLRNLLRNKLVHHGATKYDGYRLTYLGYDFLAIKTLVNRGVFASVGRQIGVGKESDIFEVATDDGTVLAMKLHRLGRTSFRAVKSKRDYLRHRRSFNWLYLSRLAALKEFAFMKALGDHGFPVPTAVDCNRHCVIMSLVQGYPLVQVKKLQNPDDVFDSILGLIVRLAEHGLIHCDFNEFNIMIDDDEKITVIDFPQMVSVSHRNAQMFFDRDIECIYKFFNKRFNLRSVKNEEQAGSENDDEGNSRPSFLSVEKGAGSLDKELAASGFTRKEKVDMDKYIEEVVEGHDSSSDDDNDEDSSDEPDCDLTPSDSDAPGTFSEEHGTSCSGENRLEIPPSDGNGVVMAPLESGIKTFSMEDDDNDDGSSEDADEEEDAELTKQLNKQRRKAIAAAHGRRRPTSSRNAYKDKGKGTMNSKMQRQACNW

SEQ ID NO: 172380 - protein, 290 aa, Zea Mays
MSLVQGYPLVQVKKLQNPDDVFDSILGLIVRLAEHGLIHCDFNEFNIMIDDDEKITVIDFPQMVSVSHRNAQMFFDRDIECIYKFFNKRFNLRSVKNEEQAGSENDDEGNSRPSFLSVEKGAGSLDKELAASGFTRKEKVDMDKYIEEVVEGHDSSSDDDNDEDSSDEPDCDLTPSDSDAPGTFSEEHGTSCSGENRLEIPPSDGNGVVMAPLESGIKTFSMEDDDNDDGSSEDADEEEDAELTKQLNKQRRKAIAAAHGRRRPTSSRNAYKDKGKGTMNSKMQRQACNW

SEQ ID NO: 172381 - protein, 228 aa, Zea Mays
MVSVSHRNAQMFFDRDIECIYKFFNKRFNLRSVKNEEQAGSENDDEGNSRPSFLSVEKGAGSLDKELAASGFTRKEKVDMDKYIEEVVEGHDSSSDDDNDEDSSDEPDCDLTPSDSDAPGTFSEEHGTSCSGENRLEIPPSDGNGVVMAPLESGIKTFSMEDDDNDDGSSEDADEEEDAELTKQLNKQRRKAIAAAHGRRRPTSSRNAYKDKGKGTMNSKMQRQACNW

SEQ ID NO: 172382 - protein, 251 aa, Zea Mays
MPFATSPRTTSVSSPPSRWACATHGGTYKVLRNLLRNKLVHHGATKYDGYRLTYLGYDFLAIKTLVNRGVFASVGRQIGVGKESDIFEVATDDGTVLAMKLHRLGRTSFRAVKSKRDYLRHRRSFNWLYLSRLAALKEFAFMKALGDHGFPVPTAVDCNRHCVIMSLVQGYPLVQVKKLQNPDDVFDSILGLIVRLAEHGLIHCDFNEFNIMIDDDEKITVIDFPQMVSVSHRNAQMYEASQPTNVKVSCI

SEQ ID NO: 172383 - protein, 231 aa, Zea Mays
MKLHRLGRTSFRAVKSKRDYLRHRRSFNWLYLSRLAALKEFAFMKALGDHGFPVPTAVDCNRHCVIMSLVQGYPLVQVKKLQNPDDVFDSILGLIVRLAEHGLIHCDFNEFNIMIDDDEKITVIDFPQMVSVSHRNAQMFFDRDIECIYKFFNKRFNLRSVKNEEQAGSENDDEGNSRPSFLSVEKGAGSLDKELAASGFTRKEKVDMDKYIEEVVEGHDSSSDDDNDEFR

SEQ ID NO: 172384 - protein, 350 aa, Zea Mays
MKLDVNALRYLAKDDFRVLTAVEMGMRNHEIVPVELIDRIARLKHGGTYKVLRNLLRNKLVHHGATKYDGYRLTYLGYDFLAIKTLVNRGVFASVGRQIGVGKESDIFEVATDDGTVLAMKLHRLGRTSFRAVKSKRDYLRHRRSFNWLYLSRLAALKEFAFMKALGDHGFPVPTAVDCNRHCVIMSLVQGYPLVQVKKLQNPDDVFDSILGLIVRLAEHGLIHCDFNEFNIMIDDDEKITVIDFPQMVSVSHRNAQMFFDRDIECIYKFFNKRFNLRSVKNEEQAGSENDDEGNSRPSFLSVEKGAGSLDKELAASGFTRKEKVDMDKYIEEVVEGHDSSSDDDNDEFR

SEQ ID NO: 172385 - protein, 231 aa, Zea Mays
MARALLLLRVAVARYPPLPASPALLQPLLRRHAPSQYSDGGGGRDGEEDGAKSGGRVDYLGMSDEELMEQCDMGTFKASGPGGQHRNKRESAVRLKHLPTGIIAQAVEDRSQHKNRASALSRLRTLIALKVRRPINLEDYTPPVELLQILPLKSSVRGKDVGPQIGPNNSKFSPGMQALLDLLFAVEGSVSDAAKILGLSTGALSRLILSDDSLRTAANELRASKGLKPLR

SEQ ID NO: 172386 - protein, 132 aa, Zea Mays
MSGGRRRGLVWSLPVARSDALGKLGPAFGIGAGCGVGLGFGLIGGIGAGFPGLQLGFGAGAGCGIGIGFGYGFGKGVAYDESGRYSNIRRPFQSSRSIAFDEKFDIMFDELMESTRKLVKATSKEIDKWRRM

SEQ ID NO: 172387 - protein, 593 aa, Zea Mays
MATEVKQTYFSWSQGESTERDGPQGVSVSQTLDHGSISFGRFELESLSWEKWSVFTNDRRNEEFGKFNGLVAQKKAYFEEYYKKIRELKASQQQNQQTELILEYSGDGSDSSQTAEEEQGADLETPTGSGAAVDVYVEEVPCETTSEHGLQCYNDQGNENFDTEFSSSNLSSSGGFLQQTDHDVRVPVRGDNSTSKLYAAPQNASSVHDGTRKTYEAARTPRRIIEKDSRLRHSPKIIPKSVKALSQSAMDYTFTSERPGSVKPNTTTSQKAKPVQRPNAASQKMSASTERSKLTGLRRPSSAGAQRPSTGERHAIARENSQLPVVVSTPRRPSTAERRPVTRDRAEKQANVTTPRRPSTSERLPIKRETAAKHNDISAVRRPSTGERRAFTRDGVLRTDVKTPSKARATVAHPMSEMTTVGNTRKAITPNAARSSKLETKSNNYRLKGPSALDSHSTRSNRMDLQVSGKQKSSSVNLPPRKIFSSTAGEPSVGTISRSKKKESSRSQTSLILRRQLSIWYLWAIVLSMRAESMRGTCASGDAPDQSSCRCIRCADNRTVCSVCCSGPLLHLPVGLLQVSDSERTLLPSAWLF

SEQ ID NO: 172388 - protein, 76 aa, Zea Mays
MVCTPVGPCRAAPKCSLSTTPVGPSLPLQSSSLVYVVARIISHRCLVSSSTRNLEHCKYLEINLQLSSKVNPAQDL

SEQ ID NO: 172389 - protein, 292 aa, Zea Mays
MPLTRVAADAFGVLTIALFALFAALGLFCIFQSVYFRCRIRRGPSFLPLGYFNGPWVTRIALILITIWWGVGEIVRLSFLKKKLFSSLTWQRNICDVYILSNLGFAEPGIFFAFAFLLHGSLQKRELGTLNQRWNWKTMAYLLVFCIPVFSVQAILVFVGPRFVREENHDLGRRKIAKYFIRTYTPVGDTSVCTYPLFGTLFLGLVDAFLMSYVSYVGLRVLSLVINKSLRRRVYLLMLSVLCFLPIRVLLLGFSVLLKPGHVAFEGTSLVANQSFREIERNSDTSTKPGSI

SEQ ID NO: 172390 - protein, 344 aa, Zea Mays
MPLTRVAADAFGVLTIALFALFAALGLFCIFQSVYFRCRIRRGPSFLPLGYFNGPWVTRIALILITIWWGVGEIVRLSFLKKKLFSSLTWQRNICDVYILSNLGFAEPGIFFAFAFLLHGSLQKRELGTLNQRWNWKTMAYLLVFCIPVFSVQAILVFVGPRFVREENHDLGRRKIAKYFIRTYTPVGDTSVCTYPLFGTLFLGLVDAFLMSYVSYVGLRVLSLVINKSLRRRVYLLMLSVLCFLPIRVLLLGFSVLLKPGHVAFEGIIFLSFLMMLSCTTVGILLLVYYPVADSLALRDIGQRDIAEMVPYDDYYYEGTSLVANQSFREIERNSDTSTKPGSI

SEQ ID NO: 172391 - protein, 485 aa, Zea Mays
MSWKRQKQDKDEMTEECCFICKDSGHDLRVCDSRNCPKAYHPRCFQNKDEVFICDWHTCVHCRGRSDYQCLCCPFYSVCSACLGKLEFVQLRKQNKGFCSSCLNLAIAIEKDDPHVSKTDNYKILFKDYWEGIKDAEHLTLVDLEEASDILNRKLNCKGATLERFPADDHKLDENTSPDNGANDQTRFPADDLKTHENTSPDNGANDQTISFDSEGKQIKANTSRNNKSNKRTYVGWGSKELIGFLSSLGKDTSKSLDELEIIGVVKGYIKQKKLYQDDKKLRFLCDDKLQPLFTRRKVRCKMIRKFLAVHLASNAISEDERFCSYEDDDDALVIKKRPRNSLGPKIAKRVSERSKRHFASLTQNNINLIYLRKTLVISLLNQPDTFEQKVIGCFVRVRCGKKTHSYEIPKKAYLLGKVIGIKKSKNEYKINDTYTKILLCVTGLLDDVSVSMLSDEDLEEDECDDLISLAEKGLLERATVNLTI

SEQ ID NO: 172392 - protein, 530 aa, Zea Mays
MSWKRQKQDKDEMTEECCFICKDSGHDLRVCDSRNCPKAYHPRCFQNKDEVFICDWHTCVHCRGRSDYQCLCCPFYSVCSACLGKLEFVQLRKQNKGFCSSCLNLAIAIEKDDPHVSKTDNYKILFKDYWEGIKDAEHLTLVDLEEASDILNRKLNCKGATLERFPADDHKLDENTSPDNGANDQTRFPADDLKTHENTSPDNGANDQTISFDSEGKQIKANTSRNNKSNKRTYVGWGSKELIGFLSSLGKDTSKSLDELEIIGVVKGYIKQKKLYQDDKKLRFLCDDKLQPLFTRRKVRCKMIRKFLAVHLASNAISEDERFCSYEDDDDALVIKKRPRNSLGPKIAKRVSERSKRHFASLTQNNINLIYLRKTLVISLLNQPDTFEQKVIGCFVRVRCGKKTHSYEIPKKAYLLGKVIGIKKSKNEYKINDTYTKILLCVTGLLDDVSVSMLSDEDLEEDECDDLISLAEKGLLERATVAELEEKVATVHTDIVNHDLDTRRILFRVVKMGSIPFHQTLGEKLYFFAF

SEQ ID NO: 172393 - protein, 593 aa, Zea Mays
MSWKRQKQDKDEMTEECCFICKDSGHDLRVCDSRNCPKAYHPRCFQNKDEVFICDWHTCVHCRGRSDYQCLCCPFYSVCSACLGKLEFVQLRKQNKGFCSSCLNLAIAIEKDDPHVSKTDNYKILFKDYWEGIKDAEHLTLVDLEEASDILNRKLNCKGATLERFPADDHKLDENTSPDNGANDQTRFPADDLKTHENTSPDNGANDQTISFDSEGKQIKANTSRNNKSNKRTYVGWGSKELIGFLSSLGKDTSKSLDELEIIGVVKGYIKQKKLYQDDKKLRFLCDDKLQPLFTRRKVRCKMIRKFLAVHLASNAISEDERFCSYEDDDDALVIKKRPRNSLGPKIAKRVSERSKRHFASLTQNNINLIYLRKTLVISLLNQPDTFEQKVIGCFVRVRCGKKTHSYEIPKKAYLLGKVIGIKKSKNEYKINDTYTKILLCVTGLLDDVSVSMLSDEDLEEDECDDLISLAEKGLLERATVAELEEKVATVHTDIVNHWIERELVRLERKIDIAHTKGLRIEMVELLDQKILLNTPAERRRLLEEVPEIVPDTEYREKETELQVAASNSSQEIRGRLVILSNWNSETIRTPKP

SEQ ID NO: 172394 - protein, 576 aa, Zea Mays
MTGLAGFCQLPAVGIHKSICKRNSVPFADERVFCPERPSMVKLHPLLPRKQVLEQTKQRHGGSPDWYHATDQTWSYLKGSTPLVGQRLRWGLRWSPIPGQEVGAGLGKVVAGVGVSAGRWLRGNEASGRDWHTCVHCRGRSDYQCLCCPFYSVCSACLGKLEFVQLRKQNKGFCSSCLNLAIAIEKDDPHVSKTDNYKILFKDYWEGIKDAEHLTLVDLEEASDILNRKLNCKGATLERFPADDHKLDENTSPDNGANDQTRFPADDLKTHENTSPDNGANDQTISFDSEGKQIKANTSRNNKSNKRTYVGWGSKELIGFLSSLGKDTSKSLDELEIIGVVKGYIKQKKLYQDDKKLRFLCDDKLQPLFTRRKVRCKMIRKFLAVHLASNAISEDERFCSYEDDDDALVIKKRPRNSLGPKIAKRVSERSKRHFASLTQNNINLIYLRKTLVISLLNQPDTFEQKVIGCFVRVRCGKKTHSYEIPKKAYLLGKVIGIKKSKNEYKINDTYTKILLCVTGLLDDVSVSMLSDEDLEEDECDDLISLAEKGLLERATVEGNSLVHRDEGPRLSWRKRW

SEQ ID NO: 172395 - protein, 668 aa, Zea Mays
MTGLAGFCQLPAVGIHKSICKRNSVPFADERVFCPERPSMVKLHPLLPRKQVLEQTKQRHGGSPDWYHATDQTWSYLKGSTPLVGQRLRWGLRWSPIPGQEVGAGLGKVVAGVGVSAGRWLRGNEASGRDWHTCVHCRGRSDYQCLCCPFYSVCSACLGKLEFVQLRKQNKGFCSSCLNLAIAIEKDDPHVSKTDNYKILFKDYWEGIKDAEHLTLVDLEEASDILNRKLNCKGATLERFPADDHKLDENTSPDNGANDQTRFPADDLKTHENTSPDNGANDQTISFDSEGKQIKANTSRNNKSNKRTYVGWGSKELIGFLSSLGKDTSKSLDELEIIGVVKGYIKQKKLYQDDKKLRFLCDDKLQPLFTRRKVRCKMIRKFLAVHLASNAISEDERFCSYEDDDDALVIKKRPRNSLGPKIAKRVSERSKRHFASLTQNNINLIYLRKTLVISLLNQPDTFEQKVIGCFVRVRCGKKTHSYEIPKKAYLLGKVIGIKKSKNEYKINDTYTKILLCVTGLLDDVSVSMLSDEDLEEDECDDLISLAEKGLLERATVAELEEKVATVHTDIVNHMAQGRMLMMGTTLNLWIERELVRLERKIDIAHTKGLRIEMVELLDQKILLNTPAERRRLLEEVPEIVPDTEYREKETELQVAASNSSQEIRGANT

SEQ ID NO: 172396 - protein, 198 aa, Zea Mays
MIRKFLAVHLASNAISEDERFCSYEDDDDALVIKKRPRNSLGPKIAKRVSERSKRHFASLTQNNINLIYLRKTLVISLLNQPDTFEQKVIGCFVRVRCGKKTHSYEIPKKAYLLGKVIGIKKSKNEYKINDTYTKILLCVTGLLDDVSVSMLSDEDLEEDECDDLISLAEKGLLERATVAELEEKVATVHTDIVNHGG

SEQ ID NO: 172397 - protein, 235 aa, Zea Mays
MVELLDQKILLNTPAERRRLLEEVPEIVPDTEYREKETELQVAASNSSQEIRAHEACVSGGVTPDPALYYQMDDTQDDSPTQAMNIDQDECDHSRQVAMTRINEAEVIDLTSDDEEDPRTVQHKPEGKVMHDPTPWAMDGILQPEQRQPAHAAMNGIVPPEQHKPARAATNGVSPWTLQWHYIDPQGDTRGPFSLVHLLHWKRGGFFDEGFRVWRTGQTSEQAILLRDALLHLHL

SEQ ID NO: 172398 - protein, 164 aa, Zea Mays
MDDTQDDSPTQAMNIDQDECDHSRQVAMTRINEAEVIDLTSDDEEDPRTVQHKPEGKVMHDPTPWAMDGILQPEQRQPAHAAMNGIVPPEQHKPARAATNGVSPWTLQWHYIDPQGDTRGPFSLVHLLHWKRGGFFDEGFRVWRTGQTSEQAILLRDALLHLHL

SEQ ID NO: 172399 - protein, 73 aa, Zea Mays
MSNPNSLTFFLPNSLIAAAPQIPFQKRTNRPNLVVHHIHRPYTHFHRSTYTVGLKSCVVRLKCATLNSFIFLF

SEQ ID NO: 172400 - protein, 215 aa, Zea Mays
MAENTKSARSQSPCLLLSGALSLSHLHLLIALHLFRGLKQQVRSMELATLQDVFIVILPVEHQYPLLLLPPLLAGFAVPMPLGHLSSWRTEAVEMIALIAAVTQDDLVIVRVAQADTAEARWTVPALAAHLHITCNLLGSQATNVVVLVQAKIVVTDQEPLVHLFRSSTHLAADQHSSTGQLRKFRGVHTSDAYKSDNITLSNAKSLPKLRFIGS

SEQ ID NO: 172401 - protein, 54 aa, Zea Mays
MGVGMGMKSHPHVHEGRVPANIQVEYTYQILPAGTRNLRIYMNIYHMSFAYHVD

SEQ ID NO: 172402 - protein, 207 aa, Zea Mays
MGRGKIEIKRIENSTNRQVTFSKRRNGILKKAREISVLCDAEVGVVVFSSAGKLYDYCSPKTSLSKILEKYQTNSGKILWGEKHKSLSAEIDRIKKENDTMQIELRHLKGEDLNSLQPKDLIMIEEALDNGLTNLNEKLMEHWERRVTNTKMMEDENKLLAFKLQDIALSGSMRELELGYHPDRDLAAQMPITFRVQPSHPNLQENN

SEQ ID NO: 172403 - protein, 176 aa, Zea Mays
MGRGKIEIKRIENSTNRQVTFSKRRNGILKKAREISVLCDAEVGVVVFSSAGKLYDYCSPKTSLSKILEKYQTNSGKILWGEKHKSLSAEIDRIKKENDTMQIELRHLKGEDLNSLQPKDLIMIEEALDNGLTNLNEKLMEHWERRVTNTKMMEDENKLLAFKLTTFTLMLKSRVP

SEQ ID NO: 172404 - protein, 124 aa, Zea Mays
MWSAATAAAARAVSVSPVPAPSLLSGRRGGSRGGRGSVSVRSTVWDFVGGDLVRPDLGKWLDDVEKHKALAIYPPHEGGYEGRYLNRLRYQGYYFLDLSARGLGDPETTLTKVHPVCPEHSSLR

SEQ ID NO: 172405 - protein, 686 aa, Zea Mays
MYAAISRIYSAARRRLEAFITALPGSHDGCGGSRRGSHRHRQRRRWSSPFRTPLGSPMSMSSIIGAADEQATPASSGAAYATPQGETATPSVILASPLPPPQMVVVALDATRDHRDDEIKTAFRNLVERGDILRARDSLLVLGVLHSITHPMGYQTKPFTESFVGTSDRYLLDQVANIAESYKNKLQQVIEMLHNVKITVTLKITPGAPAKVFIIHEVNSSKASWVVLDRHFRRDFKHLEKHIACKVATFQDHLQVQSLRSIRTNPSNKSTYELEDLQRFAVTMDLSSETVNGDTRKVSIRSSPVSYLASLNKHEIHETSSVAACSMPYFSGMSLTIDDMESLPNEKYEDKMSSQYDSSERPVLCIGCGLKSVLYIKESMKFPFSEIQTATSDFSSENLLGEGGFGHVYKGQLKDGQVIAAKVHKEASSQGYTEFFSEVQVLSFARHRNIVMLLGYCCKESYNILVYEYICNNSLEWHLFDKSASLLEWHKRYAIAIGIAKGLRFLHEECRAGPIIHRDLRPSNVLLTHDFVPMLGDFGLAKWKAGGDNIQTRILGQTGYLAPEYAQYGMVSVRTDVYAFGIVLFQLISGRKLQYIRTVQFQFPIRQQKFQAEPLVESLALHELIDDRIKDTNDTYGLYHLAKIAYLCARPNPEQRPSMGEVVRLIEIETEHIRDLSRQFIPHFMK

SEQ ID NO: 172406 - protein, 241 aa, Zea Mays
MDSAQQPTGELNNSFDTLMVSGGDQSRQPQDAGNETSFTNWKDLPMELLLRIISLVGDDRIVIVASGVCTGWRDTLGWGVANLSLSWCQDRMNDLVISLAHKFTKLQVLSLRQIRPQLEDSGVEAVANHCHDLRELDLSRSFRLSDRSLYALAHGCPQLTRLNISGCSSFSDVALVFLSSQCGNLRCLNLCGCVRAASDRALQMRAWLRWRTAAFTCAPWVSTTARTSRTAPCTPWPPTAA

SEQ ID NO: 172407 - protein, 334 aa, Zea Mays
MRRPHNAVQPSAMPPAVGLLPLLLLLLLFHLPVSLCSHHHHHSTPPASPSPSPSPAPSSAPLAVLLACNATRFQPACVSTLSGAAPDASTADLLAATLSALRARLPPAVSTAKSVLASSSNVNLSNAATNCLTFLALSSRRLSPSPSAPPLLSASTALLHLYDCWSAYKYVNFSRTISDAMAYLDDTITVNSNYISMLAARQRYGDETSLWRPPQTERDGYWPPPAASSGADVDALGVPKGLPANATVCGAGCDYRTVREAVAAAPDYGDGAFVVHVKEGAYRETVSVPWEKTNVVLVGDGMGKTVITGDLNADTSGVSTFNTATVGQGILEVL

SEQ ID NO: 172408 - protein, 511 aa, Zea Mays
MVVKTLTELSLQDKDVTVQVEVNRRWEFRGIGDDGPVLHVDMILTDATGNAIYAELPAKLLEQKGSLLQSNKVYYIRRFRVANAKSQYKVIDAPLMIYFTVYSIIEVCRDPPSTFPLYVYNLIPYEAIDANGPKSKDFHDILGMINEVSEINPIQLSGKSSIYRNVFIKNLSNDIIKVTLWGNQALKFSYEAIYDQKIQHAVVVLFVGCLPKEYKGSVYLSGGAACHWYFNPSINEAQPYYQRIHNENVTIKLPPLTNEQAAFVNPPETQHKDLKELLESEPLTLPEEGFKCTVTITRLLDDHPWWYKACNTCPNKPSMRSSVSSCPTCGSTDAILRYKLNFMATDDIAEMRMFCFDNVAKRIIGKTCTSLLTSVTDTSNIPPDLAAIVSLKFTFVVVYNLMSFQNQEKELLIKSVIASHGRDLSLPSTKLSIPMHPSTPTKLLSRTRQTISPSTALSNLSTSSSLEQHSSFEAEDSLEDQNPESFESPPKRTKHKSLRFDCGEDATNKDK

SEQ ID NO: 172409 - protein, 125 aa, Zea Mays
MNRSALPGSTLPYHPASCQEDNCYSHHLPRPVRGCLFTYGIAGFRLTHGEVCGQLKGPRSAGQQSVRSLIDSDEDTTSRLLSRASQLPDLSFIIFNPKFGTWQRYIFSDVEPIPAVMDPPSSFIF

SEQ ID NO: 172410 - protein, 277 aa, Zea Mays
MWLWLTIHTIFCKFFEPQRYAYTFQNYVFVTRVMQEKESACGIKPLRLMERSVFSDRMVFVRAVHEANWMNEMEISIYDSWFDPVVSSLPGLVPDGFIYLRASPDTCHKRMMVRKRSEEAGVTLDYLRGLHEKHESWLLPSKGGGSGVLSISQLPVHMEGSLHADIRDRVFYLEGDHMHSSIQKVPALILDCEHDIDFNKDIEAKRQYARQVAEFFDFVKKKKESLTAESETADGDKSINKQIVLPHGGGLWVPGSSPLPESALKSFDFRRTMSSST

SEQ ID NO: 172411 - protein, 385 aa, Zea Mays
MWLWLTIHTIFCKFFGKSNEKMIEFLQNSVGIIHKNHAESITLFIKESVDEELKGTDTSKLPKNRRLTFCIEGNISVGKTTFLQRIANETIELRDLVEIVPEPIAKWQDVGPEHFNVLDAFYAEPQRYAYTFQNYVFVTRVMQEKESACGIKPLRLMERSVFSDRMVFVRAVHEANWMNEMEISIYDSWFDPVVSSLPGLVPDGFIYLRASPDTCHKRMMVRKRSEEAGVTLDYLRGLHEKHESWLLPSKGGGSGVLSISQLPVHMEGSLHADIRDRVFYLEGDHMHSSIQKVPALILDCEHDIDFNKDIEAKRQYARQVAEFFDFVKKKKESLTAESETADGDKSINKQIVLPHGGGLWVPGSSPLPESALKSFDFRRTMSSST

SEQ ID NO: 172412 - protein, 495 aa, Zea Mays
MGGFCSKGSAVDKSPSDTTLGPGREVDRHDRLVVKEEKKAVVGEAAAKRMQEEQHQQQQQQQQPAAPPLPVSVSQTAVPGATADNTAAPWDGVPPLARLPSQKSGMGVANKVSEVSSILGRASTAGLGKAVEVLDTLGSSMTNLNISSFGSGTATKGNKISILAFEVANTIVKGCSLMRALSKDSIKHLKETVLHSEGVQNLISKDMDELLKIAAADKREELKVFSTEVVRFGNRCKDPQWHNLDRYFDKLTSEQTPQHQLKEEAESVMQELVTSVQFTAELYHEMHALDRFQQDYQRKQHEEDGSSVVQRGDNMHILKQEVKSQSKHVKSLRKKSLWSKNLEEVMGKLVDIVHFLHLEIHNVFGRSDSEESQEPTKRRNRLGPAGLALHYANIISQIDTLVSRSSSVPPNTRDALYQSLPPTIKSSLRSKLHSFGVKEELTVSQIKAEMEKTLRWLVPIASNTTKAHHGFGWVGEWANTGCELQAKWADRPDPN

SEQ ID NO: 172413 - protein, 644 aa, Zea Mays
MGGFCSKGSAVDKSPSDTTLGPGREVDRHDRLVVKEEKKAVVGEAAAKRMQEEQHQQQQQQQQPAAPPLPVSVSQTAVPGATADNTAAPWDGVPPLARLPSQKSGMGVANKVSEVSSILGRASTAGLGKAVEVLDTLGSSMTNLNISSFGSGTATKGNKISILAFEVANTIVKGCSLMRALSKDSIKHLKETVLHSEGVQNLISKDMDELLKIAAADKREELKVFSTEVVRFGNRCKDPQWHNLDRYFDKLTSEQTPQHQLKEEAESVMQELVTSVQFTAELYHEMHALDRFQQDYQRKQHEEDGSSVVQRGDNMHILKQEVKSQSKHVKSLRKKSLWSKNLEEVMGKLVDIVHFLHLEIHNVFGRSDSEESQEPTKRRNRLGPAGLALHYANIISQIDTLVSRSSSVPPNTRDALYQSLPPTIKSSLRSKLHSFGVKEEAEMEKTLRWLVPIASNTTKAHHGFGWVGEWANTGSDVNCKPNGQIDLIRIETLYHADKEKTEAYILELVIWLHHLISLSKTANGERSPIKSPVRSPTQRGASITLSPNKNSSNSSPLLTQEDQDMLRDVKYRKFIPGISKSQEFDTKERHNKQSRLSKSNSHSPSSGNRKETLSIRRLLPVIDFEIDRIKALDMIDRVDDLRVQ

SEQ ID NO: 172414 - protein, 422 aa, Zea Mays
MGGFCSKGSAVDKSPSDTTLGPGREVDRHDRLVVKEEKKAVVGEAAAKRMQEEQHQQQQQQQQPAAPPLPVSVSQTAVPGATADNTAAPWDGVPPLARLPSQKSGMGVANKVSEVSSILGRASTAGLGKAVEVLDTLGSSMTNLNISSFGSGTATKGNKISILAFEVANTIVKGCSLMRALSKDSIKHLKETVLHSEGVQNLISKDMDELLKIAAADKREELKVFSTEVVRFGNRCKDPQWHNLDRYFDKLTSEQTPQHQLKEEAESVMQELVTSVQFTAELYHEMHALDRFQQDYQRKQHEEDGSSVVQRGDNMHILKQEVKSQSKHVKSLRKKSLWSKNLEEVMGKLVDIVHFLHLEIHNVFGRSVKNHRNLPNDVIDWVQQVLHCIMQISSVRLILLFLVQALFLQIQGMHYTKVCHQP

SEQ ID NO: 172415 - protein, 1259 aa, Zea Mays
MDAPGELQCVGRLEVAAPPPARYLRVGSLPVPTDSSASLPVLLPSPSPIGAPRYQMLPLETDLNTLPMIPNIPEKVFSSDAKSTEGLRYDSGHINQNLSRKCEALAVSGLAEYGDEIDVIAPADIMKQIFKIPYSKAQVSIAVNRIGDTLILNTGPDVDEGEKIFRRQGNQPKGSDPSIFLNFAMHSVRAEACDCPPSHQPSQKKQTASAVLRGSFGCDEGSFDSSPSSSFSTSPYLDQNDSKSRKASHSTHESLYLGAMENNRKVKGSDPIKKTTRVGEKNSCEVQESEKSKRVGNNGFRKVCFWQFHNFHVLLGSDLLIFSNEKYIAVSLHLWDVSRQVTPLNWLEAWLDNVMASVPELAICYHQNGVVQGYELLKNDDIFLLKGVSDDGTPAFHPQVVQQNGLAVLRFIQDNCKQDPGAYWLYKGAEEDVIQLYDLSILPEKHTAGDHRSPCGPMSSFIDKGRKESLFSLGTLLYRVAHRMSLSKVPSNRAKCAKFFRKCFDFLSEQDHLVVRACAHEQFARLILKCYEDLELTSESFMIESEVTLTDLDDDSPELRLENLPAKQNVLPELGKNEPAVLDEVLECTTSVSSGMTSSLVEPSQVDGGSSSSVTKEDVSLDSLVMCQAGISKTIADAISSKLAAIHHVSQAIKSLRWNRQLQNNTQHGCGDSADTIWERSVDFSLCRCGDVDCIEVCDIREWLPKSKMDHKLWKLVLLLGESYLALGEAYKNDGQLQRTLKVVELACLVYGSMPGHIDGDEFISSMSNSSLSREDLALKTKLVLDEADYCNNKRCFSYEVSSHQLPPNYLFWAKAWMLVGDVYAEYHRLNSHQAKLAPEQKSHGEVRMSNEVALEVKRLKRKLGKDKQNCDTCSLINCSCQSDRASSGSSASSSSSEASKLYSRKKNKKSLGKNLQLQSQYREASKNPNAQEATQGSESKQHDVNDTCIENNSVLNDDIGHYSQARENQSRNVDGVPDKSQASVPTVRDGGIFKFLGGPKPGDVEYNLSSAIHCYGAAKGALFAFPVHSVETSMVLKKRGWGFNELGRCRLENRNLVSAEIAFADAIKAFEEVFDHTNVILINCNLGHGRRALAEECVSRIDEFQKHNLPEGTYMQSFKSAKSEYFQAINYYSAAKRQLKYVNTEADKVLYHEVYTQYAHTYLRLGMLLARESFLTDSYEGGLVNESSNRTAVEILASDAFREALSTYESLGEHRKQEAAFGHFQLACYQRDLCLRFLDLVDKEVKQKNEDKYRQKNA

SEQ ID NO: 172416 - protein, 318 aa, Zea Mays
MAVGGDDDSMERDFAARLRLAHSPSPATPAAAASSSPTAAGGIAFRAPQEQFTADDFVLGKIYGVGSYSKVVRAKKKDTGRVYALKIMDKKFITKENKISYVKMERIVLDQLDHPGVIRLFFTFQDTYSLYMALESCEGGELFDQIVRKGRLSEDDARFYAAEIVDILEYLHGLGLIHRDVKPENLLLTSDGHIKIADFGSVKPTRDTPIKVLPNSTTERACTFVGTAAYVPPEVLNSAPATFGNDLWALGCTLYQMLSGSSPFKDASEWLIFQRIIARDLKFPEYFSAEARDLVDKLLARIPGPRRVCSLNIKAEED

SEQ ID NO: 172417 - protein, 248 aa, Zea Mays
MLSGSSPFKDASEWLIFQRIIARDLKFPEYFSAEARDLVDKLLDVDPGKRPGAGPDGYSSLKEHPFFRGIDWKNLRKTRPPKLAIDANANEDEDSQDSNWLAHMGSVAVNQQSNTVGNNGAPSSSEVRSHISKLASIDSFDSKWQEFLDPGESVVLISKLKKINKLANKKIQLILTDKPQLICVDPSKMVAKGNIIWSDDPSELSVQVSDSSHFRICTPKKVSTFEDAKQRAWQWKKAIEDLQRCQRN

SEQ ID NO: 172418 - protein, 50 aa, Zea Mays
MVALLSRVVSQRTSPYGEVLRKQPEPPRVSQDHQHHQDNSIINSHIMFID

SEQ ID NO: 172419 - protein, 63 aa, Zea Mays
MKKKRMRKDEKREVTPEFVNMSKEILYPQIQGVTMLLLYMVLGIEVFTTHDYTCYYLFIILCS

SEQ ID NO: 172420 - protein, 103 aa, Zea Mays
MPVNPDLSETNSAMWPRSCPAVWVLGIPQGYKETHQAASSIAPPWTFHLLLHGTFSTQYDSTPGRPPWRVATQALALSLPSTLQGHRPLRLPLLHTASMAAGR

SEQ ID NO: 172421 - protein, 55 aa, Zea Mays
MNVCELTLAVSHPPTGQEQVPQDEAHGGCCDVFVRGLGRRLPVNFGLLDRCLLIM

SEQ ID NO: 172422 - protein, 61 aa, Zea Mays
MPWNEQPFKLFRSYSASSSEGKNRCGAVVACLSRTSKVAPSQFRKFPVFRWGAEIFSFTKL

SEQ ID NO: 172423 - protein, 767 aa, Zea Mays
MAESDGGSEAQSPSPDPRSGDGANPDPRPPRPQLTKSRTISGSVAASILAADRVAGGGGGSGGGGLRDSILVRRSSTAPLPPYTASAAGASSAPRRLTVAVDDPSYAAPNGGVLDRDWCYPSFLGPHASRPRPPRQQQTATTTERRSANPTVPVPPRVAVSQREEEKSLASVVKRPALLEERRTPPPTLPPPRAPRFDLSPYLSLLLVITIASSTLAVWQWIKVMGLQEKIRSCSEANAGDRDGTEKVSWIDRDHGSAFFGSRRWNLAQSSTIFALAIPLFLFKYIDLLRRRQTNSMRGRSGEEEVPLKKRIAYKVDVFFSGHPYAKLLALLLATIILIALGGIALYVVSGSGFLEALWLSWTFVADSGNHADQIGLGPRIVSVSISSGGMLVFATMLGLVSDAISEKVDSWRKGKSEVIEINHILILGWSDKLGSLLKQLAIANKSIGGGVVVVLAERDKEEMEMDIAKLEFDFMGTSVICRSGSPLILADLKKVSVSKARAIIVLASDENADQSDARALRVVLSLTGVKEGLRGHVVVEMSDLDNEPLVKLVGGELIETVVAHDVIGRLMIQCALQPGLAQIWEDILGFENAEFYIKQWPELDGMRFGDVLISFPDAVPCGVKVASKSGKILMNPDDGYVLREGDEVLVIAEDDDTYAPAPLPEVNKGFLPNIPTPPKYPEKILFCGWRRDIHDMIMVLEAFLAPGSELWMFNEVPEKEREIKLTDGGLDIGGLINIKLVHKEGNAVIRRHLESLPLETFDSMSQ

SEQ ID NO: 172424 - protein, 715 aa, Zea Mays
MAESDGGSEAQSPSPDPRSGDGANPDPRPPRPQLTKSRTISGSVAASILAADRVAGGGGGSGGGGLRDSILVRRSSTAPLPPYTASAAGASSAPRRLTVAVDDPSYAAPNGGVLDRDWCYPSFLGPHASRPRPPRQQQTATTTERRSANPTVPVPPRVAVSQREEEKSLASVVKRPALLEERRTPPPTLPPPRAPRFDLSPYLSLLLVITIASSTLAVWQWIKVMGLQEKIRSCSEANAGDRDGTEKVSWIDRDHGSAFFGSRRWNLAQSSTIFALAIPLFLFKYIDLLRRRQTNSMRGRSGEEEVPLKKRIAYKVDVFFSGHPYAKLLALLLATIILIALGGIALYVVSGSGFLEALWLSWTFVADSGNHADQIGLGPRIVSVSISSGGMLVFATMLGLVSDAISEKVDSWRKGKSEVIEINHILILGWSDKLGSLLKQLAIANKSIGGGVVVVLAERDKEEMEMDIAKLEFDFMGTSVICRSGSPLILADLKKVSVSKARAIIVLASDENADQSDARALRVVLSLTGVKEGLRGHVVVEMSDLDNEPLVKLVGGELIETVVAHDVIGRLMIQCALQPGLAQIWEDILGFENAEFYIKQWPELDGMRFGDVLISFPDAVPCGVKVASKSGKILMNPDDGYVLREGDEVLVIAEDDDTYAPAPLPEVNKGFLPNIPTPPKYPEKILFCGWRRDIHDMIMVLNYGCSMKCRRRRGR

SEQ ID NO: 172425 - protein, 706 aa, Zea Mays
MAESDGGSEAQSPSPDPRSGDGANPDPRPPRPQLTKSRTISGSVAASILAADRVAGGGGGSGGGGLRDSILVRRSSTAPLPPYTASAAGASSAPRRLTVAVDDPSYAAPNGGVLDRDWCYPSFLGPHASRPRPPRQQQTATTTERRSANPTVPVPPRVAVSQREEEKSLASVVKRPALLEERRTPPPTLPPPRAPRFDLSPYLSLLLVITIASSTLAVWQWIKVMGLQEKIRSCSEANAGDRDGTEKVSWIDRDHGSAFFGSRRWNLAQSSTIFALAIPLFLFKYIDLLRRRQTNSMRGRSGEEEVPLKKRIAYKVDVFFSGHPYAKLLALLLATIILIALGGIALYVVSGSGFLEALWLSWTFVADSGNHADQIGLGPRIVSVSISSGGMLVFATMLGLVSDAISEKVDSWRKGKSEVIEINHILILGWSDKLGSLLKQLAIANKSIGGGVVVVLAERDKEEMEMDIAKLEFDFMGTSVICRSGSPLILADLKKVSVSKARAIIVLASDENADQSDARALRVVLSLTGVKEGLRGHVVVEMSDLDNEPLVKLVGGELIETVVAHDVIGRLMIQCALQPGLAQIWEDILGFENAEFYIKQWPELDGMRFGDVLISFPDAVPCGVKVASKSGKILMNPDDGYVLREGDEVLVIAEDDDTYAPAPLPEVNKGFLPNIPTPPKYPEKILFCGWRRDIHDMIMCRRRRGR

SEQ ID NO: 172426 - protein, 781 aa, Zea Mays
MAESDGGSEAQSPSPDPRSGDGANPDPRPPRPQLTKSRTISGSVAASILAADRVAGGGGGSGGGGLRDSILVRRSSTAPLPPYTASAAGASSAPRRLTVAVDDPSYAAPNGGVLDRDWCYPSFLGPHASRPRPPRQQQTATTTERRSANPTVPVPPRVAVSQREEEKSLASVVKRPALLEERRTPPPTLPPPRAPRFDLSPYLSLLLVITIASSTLAVWQWIKVMGLQEKIRSCSEANAGDRDGTEKVSWIDRDHGSAFFGSRRWNLAQSSTIFALAIPLFLFKYIDLLRRRQTNSMRGRSGEEEVPLKKRIAYKVDVFFSGHPYAKLLALLLATIILIALGGIALYVVSGSGFLEALWLSWTFVADSGNHADQIGLGPRIVSVSISSGGMLVFATMLGLVSDAISEKVDSWRKGKSEVIEINHILILGWSDKLGSLLKQLAIANKSIGGGVVVVLAERDKEEMEMDIAKLEFDFMGTSVICRSGSPLILADLKKVSVSKARAIIVLASDENADQSDARALRVVLSLTGVKEGLRGHVVVEMSDLDNEPLVKLVGGELIETVVAHDVIGRLMIQCALQPGLAQIWEDILGFENAEFYIKQWPELDGMRFGDVLISFPDAVPCGVKVASKSGKILMNPDDGYVLREGDEVLVIAEDDDTYAPAPLPEVNKGFLPNIPTPPKYPEKILFCGWRRDIHDMIMVLEAFLAPGSELWMFNEVPEKEREIKLTDGGLDIGGLINIKLVHKEGNAVIRRHLESLPLETFDSVSTNYSLLEIFCTMFIQ

SEQ ID NO: 172427 - protein, 751 aa, Zea Mays
MPDSPELVVRALGKRLAQPRLGKDALIKLLKQAESALSEFSQSSSLQDPLHALSKSLVQTTLLNHKDKDVKLLVSVCLIEVMRVLAPDPPFSDEILKEIFKLFISIFADLAETSSPFLTRRMKILENVAALRCSMIMLNIGCEDLILDMVKIFFSTVKWLFGKILDPITAVKCVGMHGLQKSVHQAMLSMMTQILNEKVTQSLVDVILRNLVKDDKGASHKLAFNIIENCADKLEPIIHSFLSSCIFNKDMPVTELRRLYHKIILEIFQCAPQILFAVIPSLTHELLSDQVDIRLEAVHLIGRLLALSNLQFGQENKMVFIEFLRRFSDKSAEVRIAAIDAAKACYMDVSRDEAQHILSSLEGRLLDFDEKVRIRAVHTVCDLAKSNLSSSAKLILHAAERLRDKKASVRKNVMHKLLELYRDYCEKCSKGTATVNTHYEQIPAKLIVLCFDNDIESFRPQNMELIFAEELFPFSLSPKERATHWIAFFSYFKPEHIKALNIIFSQKRRLQLEMQTYLSLRARKEESSEEMQKRIRAAFRKMATSFPDISKAEECFENLHQMKDNNIFKDLDELINEGTSFAKGRVTRDMFLKRIGQKHPIYTFSRVLSIKCLHSIFNQEMICAILESLLSRGNELIDYVESACDLLLVIAMVFPSLFRGSEEYLLKLFLEEPILINVKTLQMLAHLAKSTHCLSTNFSNVVYPLLEQKCIEGTRAESKYAITAIAALHSDDKKFAKLFKLPHFHPSRITS

SEQ ID NO: 172428 - protein, 704 aa, Zea Mays
MPDSPELVVRALGKRLAQPRLGKDALIKLLKQAESALSEFSQSSSLQDPLHALSKSLVQTTLLNHKDKDVKLLVSVCLIEVMRVLAPDPPFSDEILKEIFKLFISIFADLAETSSPFLTRRMKILENVAALRCSMIMLNIGCEDLILDMVKIFFSTVKHGLQKSVHQAMLSMMTQILNEKVTQSLVDVILRNLVKDDKGASHKLAFNIIENCADKLEPIIHSFLSSCIFNKDMPVTELRRLYHKIILEIFQCAPQILFAVIPSLTHELLSDQVDIRLEAVHLIGRLLALSNLQFGQENKMVFIEFLRRFSDKSAEVRIAAIDAAKACYMDVSRDEAQHILSSLEGRLLDFDEKVRIRAVHTVCDLAKSNLSSSAKLILHAAERLRDKKLFLYNASPKHAFQASVRKNVMHKLLELYRDYCEKCSKGTATVNTHYEQIPAKLIVLCFDNDIESFRPQNMELIFAEELFPFSLSPKERATHWIAFFSYFKPEHIKALNIIFSQKRRLQLEMQTYLSLRARKEESSEEMQKRIRAAFRKMATSFPDISKAEECFENLHQMKDNNIFKDLDELINEGTSFAKGRVTRDMFLKRIGQKHPIYTFSRVIAMVFPSLFRGSEEYLLKLFLEEPILINVKTLQMLAHLAKSTHCLSTNFSNVVYPLLEQKCIEGTRAESKYAITAIAALHSDDKKFAKLFKLPHFHPSRITS

SEQ ID NO: 172429 - protein, 476 aa, Zea Mays
MPDSPELVVRALGKRLAQPRLGKDALIKLLKQAESALSEFSQSSSLQDPLHALSKSLVQTTLLNHKDKDVKLLVSVCLIEVMRVLAPDPPFSDEILKEIFKLFISIFADLAETSSPFLTRRMKILENVAALRCSMIMLNIGCEDLILDMVKIFFSTVKHGLQKSVHQAMLSMMTQILNEKVTQSLVDVILRNLVKDDKSDQVDIRLEAVHLIGRLLALSNLQFGQENKMVFIEFLRRFSDKSAEVRIAAIDAAKACYMDVSRDEAQHILSSLEGRLLDFDEKVRIRAVHTVCDLAKSNLSSSAKLILHAAERLRDKKLFLYNASPKHAFQASVRKNVMHKLLELYRDYCEKCSKGTATVNTHYEQIPAKLIVLCFDNDIESFRPQNMELIFAEELFPFSLSPKERATHWIAFFSYFKPEHIKALNIIFSQKRRLQLEMQTYLSLRARKEESSEEMQKRIRAAFRKMATSFPDISKA

SEQ ID NO: 172430 - protein, 499 aa, Zea Mays
MPDSPELVVRALGKRLAQPRLGKDALIKLLKQAESALSEFSQSSSLQDPLHALSKSLVQTTLLNHKDKDVKLLVSVCLIEVMRVLAPDPPFSDEILKEIFKLFISIFADLAETSSPFLTRRMKILENVAALRCSMIMLNIGCEDLILDMVKIFFSTVKWLFGKILDPITAVKCVGMHGLQKSVHQAMLSMMTQILNEKVTQSLVDVILRNLVKDDKSDQVDIRLEAVHLIGRLLALSNLQFGQENKMVFIEFLRRFSDKSAEVRIAAIDAAKACYMDVSRDEAQHILSSLEGRLLDFDEKVRIRAVHTVCDLAKSNLSSSAKLILHAAERLRDKKLFLYNASPKHAFQASVRKNVMHKLLELYRDYCEKCSKGTATVNTHYEQIPAKLIVLCFDNDIESFRPQNMELIFAEELFPFSLSPKERATHWIAFFSYFKPEHIKALNIIFSQKRRLQLEMQTYLSLRARKPACAVGGIIRRNAEENPCGIQKDGNILSRYFQS

SEQ ID NO: 172431 - protein, 539 aa, Zea Mays
MPDSPELVVRALGKRLAQPRLGKDALIKLLKQAESALSEFSQSSSLQDPLHALSKSLVQTTLLNHKDKDVKLLVSVCLIEVMRVLAPDPPFSDEILKEIFKLFISIFADLAETSSPFLTRRMKILENVAALRCSMIMLNIGCEDLILDMVKIFFSTVKHGLQKSVHQAMLSMMTQILNEKVTQSLVDVILRNLVKDDKGASHKLAFNIIENCADKLEPIIHSFLSSCIFNKDMPVTELRRLYHKIILEIFQCAPQILFAVIPSLTHELLSDQVDIRLEAVHLIGRLLALSNLQFGQENKMVFIEFLRRFSDKSAEVRIAAIDAAKACYMDVSRDEAQHILSSLEGRLLDFDEKVRIRAVHTVCDLAKSNLSSSAKLILHAAERLRDKKASVRKNVMHKLLELYRDYCEKCSKGTATVNTHYEQIPAKLIVLCFDNDIESFRPQNMELIFAEELFPFSLSPKERATHWIAFFSYFKPEHIKALNIIFSQKRRLQLEMQTYLSLRARKPACAVGGIIRRNAEENPCGIQKDGNILSRYFQS

SEQ ID NO: 172432 - protein, 733 aa, Zea Mays
MPDSPELVVRALGKRLAQPRLGKDALIKLLKQAESALSEFSQSSSLQDPLHALSKSLVQTTLLNHKDKDVKLLVSVCLIEVMRVLAPDPPFSDEILKEIFKLFISIFADLAETSSPFLTRRMKILENVAALRCSMIMLNIGCEDLILDMVKIFFSTVKHGLQKSVHQAMLSMMTQILNEKVTQSLVDVILRNLVKDDKGASHKLAFNIIENCADKLEPIIHSFLSSCIFNKDMPVTELRRLYHKIILEIFQCAPQILFAVIPSLTHELLSDQVDIRLEAVHLIGRLLALSNLQFGQENKMVFIEFLRRFSDKSAEVRIAAIDAAKACYMDVSRDEAQHILSSLEGRLLDFDEKVRIRAVHTVCDLAKSNLSSSAKLILHAAERLRDKKASVRKNVMHKLLELYRDYCEKCSKGTATVNTHYEQIPAKLIVLCFDNDIESFRPQNMELIFAEELFPFSLSPKERATHWIAFFSYFKPEHIKALNIIFSQKRRLQLEMQTYLSLRARKEESSEEMQKRIRAAFRKMATSFPDISKAEECFENLHQMKDNNIFKDLDELINEGTSFAKGRVTRDMFLKRIGQKHPIYTFSRVLSIKCLHSIFNQEMICAILESLLSRGNELIDYVESACDLLLVIAMVFPSLFRGSEEYLLKLFLEEPILINVKTLQMLAHLAKSTHCLSTNFSNVVYPLLEQKCIEGTRAESKYAITAIAALHSDDKKFAKLFKLPHFHPSRITS

SEQ ID NO: 172433 - protein, 201 aa, Zea Mays
MSSLTVAFLASYGQCGPILDPRHCNCRVAGHRPRAWWHCSSGLGCHQEPISRQQRGPCRPPRRRFSDLCIGRLLRHCVLSPDEGHCQMLFATSVSRSPIAPLFSTFFMASMSATGLIGLGLCDMLCSPPSRRLGMTSFLRSSLRGPRLPLQPHKLSTALVLADRPSLRLEPSISIARTSSPRHPALFGPPAGYGGDNRRRH

SEQ ID NO: 172434 - protein, 590 aa, Zea Mays
MLQLQPPGFLPIPRRRVTARGRRARPVIAFNSQWKIPDVDTDAVRERVRSWMSLARGAIADAGRAAREGGRHKEEPEGGKKKQRKEVTVEEQAFVAVPEVTVEPRVPQGWLSLDAVVSIEQFARLNGLTGRQVQRIFESLAPEHLHNDARSLVEYSCFRYLAKDNSDFHPNLKELAFQKLIFVTMLAWEDPYNEDSSPLSSLDNYSVLGRLVGEDAFARIAPAVAGVADVSTAHYLFRALVGAEKGLSFDLWTTYLAELLKVHHGRQTHQTGDNFLYDEKVLCIGSSKKRPVLKWEENTAWPGNLTLTDKALYFEAIGLSGTKKPMRLDLTNQNSRAEKTKVGPFGSKLFDSAVSVSSGSMSDEWTLEFVDFSGEMRRDVWLAFISEIISVYRFIREYGPGGDDPAIHNVYGAYKGKKRAVSSAANSIARLQSLQFIRRLYEDPAKLVQFSYLSNAPFGDVVLQTLAVNFWGGPLTTKARSANHRSTQWHRSSEDPSSGRTHVYDIDGSVYLRKWMTSPSWTSSHSANFWRNSSVKYGIILSKSLVVADKNLVEKAMVDCKEKSKVVERTQATIVAATIEGAYASFCNSG

SEQ ID NO: 172435 - protein, 452 aa, Zea Mays
MLAWEDPYNEDSSPLSSLDNYSVLGRLVGEDAFARIAPAVAGVADVSTAHYLFRALVGAEKGLSFDLWTTYLAELLKVHHGRQTHQTGDNFLYDEKVLCIGSSKKRPVLKWEENTAWPGNLTLTDKALYFEAIGLSGTKKPMRLDLTNQNSRAEKTKVGPFGSKLFDSAVSVSSGSMSDEWTLEFVDFSGEMRRDVWLAFISEIISVYRFIREYGPGGDDPAIHNVYGAYKGKKRAVSSAANSIARLQSLQFIRRLYEDPAKLVQFSYLSNAPFGDVVLQTLAVNFWGGPLTTKARSANHRSTQWHRSSEDPSSGRTHVYDIDGSVYLRKWMTSPSWTSSHSANFWRNSSVKYGIILSKSLVVADKNLVEKAMVDCKEKSKVVERTQATIVAATIEGIPSNIDLFKELMLPFAIVAENFKKLQRWENPRSTFCFLLLVHTVIFRTERTRPVR

SEQ ID NO: 172436 - protein, 635 aa, Zea Mays
MLAWEDPYNEDSSPLSSLDNYSVLGRLVGEDAFARIAPAVAGVADVSTAHYLFRALVGAEKGLSFDLWTTYLAELLKVHHGRQTHQTGDNFLYDEKVLCIGSSKKRPVLKWEENTAWPGNLTLTDKALYFEAIGLSGTKKPMRLDLTNQNSRAEKTKVGPFGSKLFDSAVSVSSGSMSDEWTLEFVDFSGEMRRDVWLAFISEIISVYRFIREYGPGGDDPAIHNVYGAYKGKKRAVSSAANSIARLQSLQFIRRLYEDPAKLVQFSYLSNAPFGDVVLQTLAVNFWGGPLTTKARSANHRSTQWHRSSEDPSSGRTHVYDIDGSVYLRKWMTSPSWTSSHSANFWRNSSVKYGIILSKSLVVADKNLVEKAMVDCKEKSKVVERTQATIVAATIEGIPSNIDLFKELMLPFAIVAENFKKLQRWENPRSTFCFLLLVHTVIFRNMLSYVFPFTLMTMALSMLAVKGLKEQGRLGRSFGKVTIRDQSPSNTIQKILALKEAMASVENYLQNLNVSLLKIRTILLAGQPEVTTQVAFVLLASSAVLLVFPFKYVLAFFTCDLFTRELEFRRETVRAFMNFVKERWESIHAAPVVVLPYEGAESSPKTLPAEVSGQAEPQNVQRGSGYVSSKNGISS

SEQ ID NO: 172437 - protein, 784 aa, Zea Mays
MLQLQPPGFLPIPRRRVTARGRRARPVIAFNSQWKIPDVDTDAVRERVRSWMSLARGAIADAGRAAREGGRHKEEPEGGKKKQRKEVTVEEQAFVAVPEVTVEPRVPQGWLSLDAVVSIEQFARLNGLTGRQVQRIFESLAPEHLHNDARSLVEYSCFRYLAKDNSDFHPNLKGRLVGEDAFARIAPAVAGVADVSTAHYLFRALVGAEKGLSFDLWTTYLAELLKVHHGRQTHQTGDNFLYDEKVLCIGSSKKRPVLKWEENTAWPGNLTLTDKALYFEAIGLSGTKKPMRLDLTNQNSRAEKTKVGPFGSKLFDSAVSVSSGSMSDEWTLEFVDFSGEMRRDVWLAFISEIISVYRFIREYGPGGDDPAIHNVYGAYKGKKRAVSSAANSIARLQSLQFIRRLYEDPAKLVQFSYLSNAPFGDVVLQTLAVNFWGGPLTTKARSANHRSTQWHRSSEDPSSGRTHVYDIDGSVYLRKWMTSPSWTSSHSANFWRNSSVKYGIILSKSLVVADKNLVEKAMVDCKEKSKVVERTQATIVAATIEGIPSNIDLFKELMLPFAIVAENFKKLQRWENPRSTFCFLLLVHTVIFRNMLSYVFPFTLMTMALSMLAVKGLKEQGRLGRSFGKVTIRDQSPSNTIQKILALKEAMASVENYLQNLNVSLLKIRTILLAGQPEVTTQVAFVLLASSAVLLVFPFKYVLAFFTCDLFTRELEFRRETVRAFMNFVKERWESIHAAPVVVLPYEGAESSPKTLPAEVSGQAEPQNVQRGSGYVSSKNGISS

SEQ ID NO: 172438 - protein, 265 aa, Zea Mays
MRLDLTNQNSRAEKTKVGPFGSKLFDSAVSVSSGSMSDEWTLEFVDFSGEMRRDVWLAFISEIISVYRFIREYGPGGDDPAIHNVYGAYKGKKRAVSSAANSIARLQSLQFIRRLYEDPAKLVQFSYLSNAPFGDVVLQTLAVNFWGGPLTTKARSANHRSTQWHRSSEDPSSGRTHVYDIDGSVYLRKWMTSPSWTSSHSANFWRNSSVKYGIILSKSLVVADKNLVEKAMVDCKEKSKVVERTQATIVAATIEGAYASFCNSG

SEQ ID NO: 172439 - protein, 1512 aa, Zea Mays
MEGSPADAAGSGRRTRTRGAEASGRAAVLQQLRAVRSGQIRASDAIQVKVDAPIYDTVPEEEYNVLVARRRKEAGEFIIDDDGLGYVEDGREEDWSHRALPSSSDEGSEGEDGAPRKRKQTRPPQAKRQPQQSAKVASLSAAAAKTGQQISSMFTSSVFKGRGSDRAKNLALAADSIVDDVIAEFAPDENDREERRRRVARVCAPQPVPTVSYIKPQKVILDAEMVRSENENDMVVVELKNDTEMETNLEEIPGSSAELVVNKSLEEPKQEDNGEVKIEKAHRLNAKIKAEECRNNDVTSATEGWMKICGNGENAVGEEGVAVDGNTNVDESSEFELKDGALPFYILDAYEEPFGANSGTVYLFGKVEVGKQFHSCCVIVKNIQRCIYAIPNRSVFPMDSISGIERNPTADLLPSLRATLHELASGLKSEIADKLSDLNVSNFIMTPVKRNYAFERTDLPNGEQYVLKINYPYKDPALPADLRGEHFHALLGTNNSALELFLIKRKVKGPSWLSVSKFVTRPSTQRVSWCKFEVTVDCPKDISVLTTSTNLEVPTVVVGAVNLKTIINEKHNVHEIVSASLICCHRVKIDSPMRPEDWQKRGMLSHFTVVRKLEGSIFPIGLAKEASDRNQKAGSNVLALESSERALLNRLMIELSKLDCDVLVGHNISGFDLDVLLHRAQTCKVPSSMWSKIGRLRRSLMPRLTKGSTLYGSGASPGIMSCVAGRLLCDTYLCSRDLLKEVSYSLTQLAETQLKKVRKEVSPHDIPMMFQSSGELLKLVEYGETDAWLSLELMFHLSVLPLTRQLTNISGNLWGKTLQGARAQRVEYLLLHSFHARKFIAPDKFARNKELNSTKRKMNPDTGGANADDGAADPSVDDEVHNGDQSKARKGPSYAGGLVLEPKKGLYDKYVLLLDFNSLYPSIIQEFNICFTTVERSSDGSVPNLPASKVTGVLPELLRSLVERRRMVKSWLKTASGLKKQQFDIQQQALKLTANRFYAKPLAELITLQGREILQNTVDLVQNNLNLEVIYGDTDSIMIHTGLDDISRAKAIAGKVIQEVNKKYRCLEIDLDGIYKRMLLLKKKKYAAIKVALDGSLRENIERKGLDMVRRDWSLLSKDIGDFCLKQILSGGTCDDVVESIHSSLVQVQEQMRSGQIELEKYVITKSLTKAPEDYPDAKNQPHVQVALRLKQNGYSGCSAGDTVPYIICSQQDSDNAHSVGIAQRARHPEELKRDPDKWMIDIDYYLSQQIHPVVSRLCASIQGTSPARLAECLGLDSAKFQPRLTESSNQDTSMMLLSVIDDEDERYRGCEPLRLSCPSCSGTFDCPPVSSLITSASATSVSDPIEGKDATANFWRHMRCPRCLDNTVESKFSPSMLANQMKRQADNFISLYYKGLQMCDDEGCKYSTHSVNLRVMGDSERGTVCPNYPRCNGRLVRQYKESDLYRQLSYFCYVLDATRCLEKLDQKARLPFEREFVAVGQTIKLALLEIQKIRDRCAFGWVQLKDLAVSI

SEQ ID NO: 172440 - protein, 1521 aa, Zea Mays
MEGSPADAAGSGRRTRTRGAEASGRAAVLQQLRAVRSGQIRASDAIQVKVDAPIYDTVPEEEYNVLVARRRKEAGEFIIDDDGLGYVEDGREEDWSHRALPSSSDEGSEGEDGAPRKRKQTRPPQAKRQPQQSAKVASLSAAAAKTGQQISSMFTSSVFKGRGSDRAKNLALAADSIVDDVIAEFAPDENDREERRRRVARVCAPQPVPTVSYIKPQKVILDAEMVRSENENDMVVVELKNDTEMETNLEEIPGSSAELVVNKSLEEPKQEDNGEVKIEKAHRLNAKIKAEECRNNDVTSATEGWMKICGNGENAVGEEGVAVDGNTNVDESSEFELKDGALPFYILDAYEEPFGANSGTVYLFGKVEVGKQFHSCCVIVKNIQRCIYAIPNRSVFPMDSISGIERNPTADLLPSLRATLHELASGLKSEIADKLSDLNVSNFIMTPVKRNYAFERTDLPNGEQYVLKINYPYKDPALPADLRGEHFHALLGTNNSALELFLIKRKVKGPSWLSVSKFVTRPSTQRVSWCKFEVTVDCPKDISVLTTSTNLEVPTVVVGAVNLKTIINEKHNVHEIVSASLICCHRVKIDSPMRPEDWQKRGMLSHFTVVRKLEGSIFPIGLAKEASDRNQKAGSNVLALESSERALLNRLMIELSKLDCDVLVGHNISGFDLDVLLHRAQTCKVPSSMWSKIGRLRRSLMPRLTKGSTLYGSGASPGIMSCVAGRLLCDTYLCSRDLLKEVSYSLTQLAETQLKKVRKEVSPHDIPMMFQSSGELLKLVEYGETDAWLSLELMFHLSVLPLTRQLTNISGNLWGKTLQGARAQRVEYLLLHSFHARKFIAPDKFARNKELNSTKRKMNPDTGGANADDGAADPSVDDEVHNGDQSKARKGPSYAGGLVLEPKKGLYDKYVLLLDFNSLYPSIIQEFNICFTTVERSSDGSVPNLPASKVTGVLPELLRSLVERRRMVKSWLKTASGLKKQQFDIQQQALKLTANSMYGCLGFSNSRFYAKPLAELITLQGREILQNTVDLVQNNLNLEVIYGDTDSIMIHTGLDDISRAKAIAGKVIQEVNKKYRCLEIDLDGIYKRMLLLKKKKYAAIKVALDGSLRENIERKGLDMVRRDWSLLSKDIGDFCLKQILSGGTCDDVVESIHSSLVQVQEQMRSGQIELEKYVITKSLTKAPEDYPDAKNQPHVALRLKQNGYSGCSAGDTVPYIICSQQDSDNAHSVGIAQRARHPEELKRDPDKWMIDIDYYLSQQIHPVVSRLCASIQGTSPARLAECLGLDSAKFQPRLTESSNQDTSMMLLSVIDDEDERYRGCEPLRLSCPSCSGTFDCPPVSSLITSASATSVSDPIEGKDATANFWRHMRCPRCLDNTVESKFSPSMLANQMKRQADNFISLYYKGLQMCDDEGCKYSTHSVNLRVMGDSERGTVCPNYPRCNGRLVRQYKESDLYRQLSYFCYVLDATRCLEKLDQKARLPFEREFVAVGQTIKLALLEIQKIRDRCAFGWVQLKDLAVSI

SEQ ID NO: 172441 - protein, 1539 aa, Zea Mays
MEGSPADAAGSGRRTRTRGAEASGRAAVLQQLRAVRSGQIRASDAIQVKVDAPIYDTVPEEEYNVLVARRRKEAGEFIIDDDGLGYVEDGREEDWSHRALPSSSDEGSEGEDGAPRKRKQTRPPQAKRQPQQSAKVASLSAAAAKTGQQISSMFTSSVFKGRGSDRAKNLALAADSIVDDVIAEFAPDENDREERRRRVARVCAPQPVPTVSYIKPQKVILDAEMVRSENENDMVVVELKNDTEMETNLEEIPGSSAELVVNKSLEEPKQEDNGEVKIEKAHRLNAKIKAEECRNNDVTSATEGWMKICGNGENAVGEEGVAVDGNTNVDESSEFELKDGALPFYILDAYEEPFGANSGTVYLFGKVEVGKQFHSCCVIVKNIQRCIYAIPNRSVFPMDSISGIERNPTADLLPSLRATLHELASGLKSEIADKLSDLNVSNFIMTPVKRNYAFERTDLPNGEQYVLKINYPYKDPALPADLRGEHFHALLGTNNSALELFLIKRKVKGPSWLSVSKFVTRPSTQRVSWCKFEVTVDCPKDISVLTTSTNLEVPTVVVGAVNLKTIINEKHNVHEIVSASLICCHRVKIDSPMRPEDWQKRGMLSHFTVVRKLEGSIFPIGLAKEASDRNQKAGSNVLALESSERALLNRLMIELSKLDCDVLVGHNISGFDLDVLLHRAQTCKVPSSMWSKIGRLRRSLMPRLTKGSTLYGSGASPGIMSCVAGRLLCDTYLCSRDLLKEVSYSLTQLAETQLKKVRKEVSPHDIPMMFQSSGELLKLVEYGETDAWLSLELMFHLSVLPLTRQLTNISGNLWGKTLQGARAQRVEYLLLHSFHARKFIAPDKFARNKELNSTKRKMNPDTGGANADDGAADPSVDDEVHNGDQSKARKGPSYAGGLVLEPKKGLYDKYVLLLDFNSLYPSIIQEFNICFTTVERSSDGSVPNLPASKVTGVLPELLRSLVERRRMVKSWLKTASGLKKQQFDIQQQALKLTANSMYGCLGFSNSRFYAKPLAELITLQGREILQNTVDLVQNNLNLEVIYGDTDSIMIHTGLDDISRAKAIAGKVIQEMCKLKKDGLTKNASIQVNKKYRCLEIDLDGIYKRMLLLKKKKYAAIKVALDGSLRENIERKGLDMVRRDWSLLSKDIGDFCLKQILSGGTCDDVVESIHSSLVQVQEQMRSGQIELEKYVITKSLTKAPEDYPDAKNQPHVQVALRLKQNGYSGCSAGDTVPYIICSQQDSDNAHSVGIAQRARHPEELKRDPDKWMIDIDYYLSQQIHPVVSRLCASIQGTSPARLAECLGLDSAKFQPRLTESSNQDTSMMLLSVIDDEDERYRGCEPLRLSCPSCSGTFDCPPVSSLITSASATSVSDPIEGKDATANFWRHMRCPRCLDNTVESKFSPSMLANQMKRQADNFISLYYKGLQMCDDEGCKYSTHSVNLRVMGDSERGTVCPNYPRCNGRLVRQYKESDLYRQLSYFCYVLDATRCLEKLDQKARLPFEREFVAVGQTIKLALLEIQKIRDRCAFGWVQLKDLAVSI

SEQ ID NO: 172442 - protein, 1510 aa, Zea Mays
MEGSPADAAGSGRRTRTRGAEASGRAAVLQQLRAVRSGQIRASDAIQVKVDAPIYDTVPEEEYNVLVARRRKEAGEFIIDDDGLGYVEDGREEDWSHRALPSSSDEGSEGEDGAPRKRKQTRPPQAKRQPQQSAKVASLSAAAAKTGQQISSMFTSSVFKGRGSDRAKNLALAADSIVDDVIAEFAPDENDREERRRRVARVCAPQPVPTVSYIKPQKVILDAEMVRSENENDMVVVELKNDTEMETNLEEIPGSSAELVVNKSLEEPKQEDNGEVKIEKAHRLNAKIKAEECRNNDVTSATEGWMKICGNGENAVGEEGVAVDGNTNVDESSEFELKDGALPFYILDAYEEPFGANSGTVYLFGKVEVGKQFHSCCVIVKNIQRCIYAIPNRSVFPMDSISGIERNPTADLLPSLRATLHELASGLKSEIADKLSDLNVSNFIMTPVKRNYAFERTDLPNGEQYVLKINYPYKDPALPADLRGEHFHALLGTNNSALELFLIKRKVKGPSWLSVSKFVTRPSTQRVSWCKFEVTVDCPKDISVLTTSTNLEVPTVVVGAVNLKTIINEKHNVHEIVSASLICCHRVKIDSPMRPEDWQKRGMLSHFTVVRKLEGSIFPIGLAKEASDRNQKAGSNVLALESSERALLNRLMIELSKLDCDVLVGHNISGFDLDVLLHRAQTCKVPSSMWSKIGRLRRSLMPRLTKGSTLYGSGASPGIMSCVAGRLLCDTYLCSRDLLKEVSYSLTQLAETQLKKVRKEVSPHDIPMMFQSSGELLKLVEYGETDAWLSLELMFHLSVLPLTRQLTNISGNLWGKTLQGARAQRVEYLLLHSFHARKFIAPDKFARNKELNSTKRKMNPDTGGANADDGAADPSVDDEVHNGDQSKARKGPSYAGGLVLEPKKGLYDKYVLLLDFNSLYPSIIQEFNICFTTVERSSDGSVPNLPASKVTGVLPELLRSLVERRRMVKSWLKTASGLKKQQFDIQQQALKLTANRFYAKPLAELITLQGREILQNTVDLVQNNLNLEVIYGDTDSIMIHTGLDDISRAKAIAGKVIQEVNKKYRCLEIDLDGIYKRMLLLKKKKYAAIKVALDGSLRENIERKGLDMVRRDWSLLSKDIGDFCLKQILSGGTCDDVVESIHSSLVQVQEQMRSGQIELEKYVITKSLTKAPEDYPDAKNQPHVALRLKQNGYSGCSAGDTVPYIICSQQDSDNAHSVGIAQRARHPEELKRDPDKWMIDIDYYLSQQIHPVVSRLCASIQGTSPARLAECLGLDSAKFQPRLTESSNQDTSMMLLSVIDDEDERYRGCEPLRLSCPSCSGTFDCPPVSSLITSASATSVSDPIEGKDATANFWRHMRCPRCLDNTVESKFSPSMLANQMKRQADNFISLYYKGLQMCDDEGCKYSTHSVNLRVMGDSERGTVCPNYPRCNGRLVRQYKESDLYRQLSYFCYVLDATRCLEKLDQKARLPFEREFVAVGQTIKLALLEIQKIRDRCAFGWVQLKDLAVSI

SEQ ID NO: 172443 - protein, 50 aa, Zea Mays
MSVSFSSLIISAVIKPVFVSFTEICMMIIVRDRYWDVLHDQPGLFLRYDV

SEQ ID NO: 172444 - protein, 192 aa, Zea Mays
MPVKVKYCETCMVFRPPRCSHCSICNNCVERFDHHCPWVGQCIGKRNCRYFFLFVVSSSLLCIYLFVISALYIKFLMDGDYPTVWKALKHSPASLALMIYCFISLWFVGGLTGFHTYLISTNQTTYENFRYRSDGRLNVYDQGCLSNFQEVVCAKIEPSKHKFRAHIQEEVRGPLANRAGETEEEQVGGPRA

SEQ ID NO: 172445 - protein, 52 aa, Zea Mays
MSHMQQDSMTCGARLGCLGYMRSHVIWIEEQLCAEPLWHFHTAGKHRVDALG

SEQ ID NO: 172446 - protein, 274 aa, Zea Mays
MNHCMFDGIGAMEFVNSWAETARGVAELTVPPFLDRGVLKARDPPVHTFPHHEFAEIPDVSDTAALYGAQELQYRSFCFDPDRLERVRGLALADGALGRCTTFEALSGLVWRARTKALGLAPGQRTKLLFAVDGRRRFVPPLPRGYFGNGIVLTNALATAGELLSAPVSRAAGLVQEAVRMVTDDYMRSAVDYFEATRARPSLASTLLITTWSRLEFHGADFGWGEPVMSGPVTLPEKEVILFLAHGKERKSINVLLGLPATAMDAFQELVDEI

SEQ ID NO: 172447 - protein, 78 aa, Zea Mays
MAAAEEEIAVKEPLDLIRLSLDERIYVKLRSDRELRGKLHCFLKGGPGTVVKSVSPGRTKQPLSHSPDLTHVEGSLHH

SEQ ID NO: 172448 - protein, 74 aa, Zea Mays
MAAAEEEIAVKEPLDLIRLSLDERIYVKLRSDRELRGKLHLWYWCRPGSSLPLVGNYRFKGTVFVMPWMVSFLC

SEQ ID NO: 172449 - protein, 99 aa, Zea Mays
MTRPFGPLNRQVSTRQDRLVCSTVWQATWIRFSGYDLETVSLYPPQALLAATAEESLHSGLFADHRVGELPPSLWKKLKKGRRIFPSSPRCRLVHIFVT

SEQ ID NO: 172450 - protein, 311 aa, Zea Mays
MGRGKYARTKPEDLTVVPDYVPFPTTVAHRSFEARELFKPGLVPDDSGVSEGHRFGVSIGESQIVGIRSRTELESEWLQVLGKLYKKPVIPIGLFPPPPTQDIAGHEATLRWLDRQAQGSVVYAAFGSEAKLTSAQLQTIALGLEASGLPFLWAFRPPADAAPGQGTGGLPEGFEERVNDRGLVCRGWVPQPRLLAHESVGGFLTHAGWNSIAEGLSRGVTMVLLPLMFDQGLNARLLVDKKIGIEVERDEDDGTFAPKDIADALRTAMAENQDGTRVKELAEVFGNDEANDQCLRDFLRYLSEYIRQHQG

SEQ ID NO: 172451 - protein, 191 aa, Zea Mays
MAENFQLQGRHGKSRVRVSRVWRRPAAAGGDVIVEWNVAVSIVSDCLPSYTSSDNSAIVATDSIKNTVYVKAKECTEVVSMEEFAVILGRHFTSLYPQVSEATVTIVERPWERVTVDGKPHSHGFKVGVEKHSTEVIVKKSGSLRINSGIQGYSLLKTTQSGFEGFVTDRYRLLPDTRERIVATEVTAWWR

SEQ ID NO: 172452 - protein, 66 aa, Zea Mays
MAKEVLTRFPDISSVQLRMPNLHFLPVNLGSKEAPLVKFADDVYLPTDEPHGTIEATLISRPMSKL

SEQ ID NO: 172453 - protein, 78 aa, Zea Mays
MTSLDGAASVQPSREVEMRPRSARPSQSTEVDNSGWSVETLKELLDFTPQEITKAISATESNRLLASVAIALLVVLSN

SEQ ID NO: 172454 - protein, 239 aa, Zea Mays
MDRMRHRNSVSSERFLGSFARSAAAGEQSASTAFELDEDDLFSAGSGSPEPPQPLRRPLILSSVRHANPSPVPRLRRPPEGILDALPERRRSPPQSSSSTSSSPASPAAAPPRMIPAVPRPAPAPAPYVPQSLPVNVPAARLRKPPVVMVMGEAEDEYEEMLPPHEMLARARARESPMTTFSMLEGAGRTLKGRDLRQSLRCTISGGVRLPQCSHDRAGIADWIGCLQNPVPCQKKKRR

SEQ ID NO: 172455 - protein, 186 aa, Zea Mays
MAVGLPPGYRFYPTEEELICFYLRNKLDNLRDDIERVIPVVDVYSVDPCQLPGIHELLCDGGAGAGEGEPWFYFCPRQEREARGGRPSRTTPSGYWKAAGTPGAVYSADRRAIGVKKTMVFYYGRAPSGTKTKWKMNEYRAFQFETPGPGLGLAAAGVAADGSSSSSAHHAADGPAPPPNVGPQVR

SEQ ID NO: 172456 - protein, 57 aa, Zea Mays
MRGTGVICAGMLCRTSSSGLHVLGSRLLYSAVPSLQILIGPKIGNQKRTPYPCPHGQ

SEQ ID NO: 172457 - protein, 247 aa, Zea Mays
MRHQQQLHSGNSQSVGSTGTDSSSAQNTMSQMELVSPASSAPRQEVMMVTTDDYSYKPGLAAAPAAAAPPSFQQHHPLPLQLHGGEGGGDHDKRKHGSTRKDGKLVDAKTERRLAQNREAARKSRLRKKAYVQQLETSRIRLQQVEHELQRARSQAPPCSTWSTRGGLTTTPSGWRSSEAGCRRTCWTATWDSSWRSACSTTTSCSSSRRRSRAPTSSTSSPAPGPPPPSAASSGWAASARPSCSRS

SEQ ID NO: 172458 - protein, 515 aa, Zea Mays
MVQGEESSWRMERAALPLNQALAYGVQAHAAAAAAPPTCFLDFQPAAASAAYFGFGELEEALIHGGGAASAGGGVDPGVIIKNDVAQAKSAAGYLAGAGTGRPPTLEIFPSWPMRHQQQLHSGNSQSVGSTGTDSSSAQNTMSQMELVSPASSAPRQEVMMVTTDDYSYKPGLAAAPAAAAPPSFQQHHPLPLQLHGGEGGGDHDKTERRLAQNREAARKSRLRKKAYVQQLETSRIRLQQVEHELQRARSQGLFVGGCSAAGDMSSGAAMFDMEYARWLDDDTKRLAELRGGLQAHLLDGNLGLIVEECMQHYDELFQLKAALARSDVFHLLTGSWATPAERCFFWMGGFRPSELLKILIPQLDPLTEQQLLGICNLQQSSEQAEEALAQGLHQLHQSLADTVAAGTLNDGAAAPNYMNIMAVALEKLASLENFYQQADNLRHQTLHQMRRILTTRQAARCFLSIGEYYSRLRALSNLWASRPRDNFIGTESLSPTATELQALHHQQQNQFAGF

SEQ ID NO: 172459 - protein, 99 aa, Zea Mays
MDNKKPKIKMGLAVPSEVVKEMADNLRHQTLHQMRRILTTRQAARCFLSIGEYYSRLRALSNLWASRPRDNFIGTESLSPTATELQALHHQQQNQFAGF

SEQ ID NO: 172460 - protein, 269 aa, Zea Mays
MPGSQRPPSQSLMRPVTVSSPSLASQQTPQSSSSTFRPQQRPQVSQPRPQQSQLVTPPQQNTILTQQQQQQKQQQSASHQNQQIAAPKNQPQLSQHPTARTPISMTPKPDLPAIQNVAVLQSVDTAATDANASETGTRLLTKRSIHELVAQIDPNEKLDPEVEDVLIDIAEDFVESVTTFACSLAKHRKSSTLEAKDVLLHAERSWNITLPGFSGDEIKLYKKQHINDIHRERLALIKKSMATDTRNSAAQAAANQKNQTPKPPAPASP

SEQ ID NO: 172461 - protein, 386 aa, Zea Mays
MDAPPPSQPDDAAPAPSSTLASAPSPAPTSNPPTSAAAAAPAPDSAIANPNPNLAAASSASVPAASSSAPPIPRGGVVLGVPAPRSAQTPAGYTGFVPPPPLAHQFGSMHRGPDQPPPSSSQRPPSQSLMRPVTVSSPSLASQQTPQSSSSTFRPQQRPQVSQPRPQQSQLVTPPQQNTILTQQQQQQKQQQSASHQNQQIAAPKNQPQLSQHPTARTPISMTPKPDLPAIQNVAVLQSVDTAATDANASETGTRLLTKRSIHELVAQIDPNEKLDPEVEDVLIDIAEDFVESVTTFACSLAKHRKSSTLEAKDVLLHAERSWNITLPGFSGDEIKLYKKQHINDIHRERLALIKKSMATDTRNSAAQAAANQKNQTPKPPAPASP

SEQ ID NO: 172462 - protein, 429 aa, Zea Mays
MDAPPPSQPDDAAPAPSSTLASAPSPAPTSNPPTSAAAAAPAPDSAIANPNPNLGTVANPAQTLEAPGPSSAAARPPPPRMRTPYTHLAAPITMSSSSSAATAAASSASVPAASSSAPPIPRGGVVLGVPAPRSAQTPAGYTGFVPPPPLAHQFGSMHRGPDQPPPSSSQSLMRPVTVSSPSLASQQTPQSSSSTFRPQQRPQVSQPRPQQSQLVTPPQQNTILTQQQQQQKQQQSASHQNQQIAAPKNQPQLSQHPTARTPISMTPKPDLPAIQNVAVLQSVDTAATDANASETGTRLLTKRSIHELVAQIDPNEKLDPEVEDVLIDIAEDFVESVTTFACSLAKHRKSSTLEAKDVLLHAERSWNITLPGFSGDEIKLYKKQHINDIHRERLALIKKSMATDTRNSAAQAAANQKNQTPKPPAPASP

SEQ ID NO: 172463 - protein, 1001 aa, Zea Mays
MAAAPPVAGEDIKDGVEVCLFDESADGFSRTVRAISELVDIEPETDFPEAEVERLSSSITFLREWRHFSYEPKSVTFTNGTESTSYRDDMHSVTLPQFSSASVPQITPQEDRGDNTVSFDFILYAGGNVWALDWCPRLCDKPDSSINCEYLAVSAHPPGSSYHKLGMPLTGRGIIQVWCLLAPFEDSHSHQPVNAFNNGKQRGRPRKIPCSDKLVPVPKGPRGRPKKRSYDDQLEPVPKRPRGRPRKYPLPVAKFEGSSQNGESQDIILFDPLSTSSFIPDDLSLASVMPTEKSVQSTPKRGADVELGKETTCQTASFGCSLDHTACTEFNAKLCIVAVDAALPPIDKLTCSPGTVSGDVCTAPTLTTAICTKPKRPRGRPRKYPVQINGRSVSGTVAELGQESTCQPVSFGHTVCTEFNANLSIVPVDAALPIVDKLCSSSGTVVKESVCTEPSPATATRKQPKRTRGMPRKYSDTMIDLGKDTTGHPVLFGRSMDHTACTESNSSFSIVAVDASSLFASSSTATCDDKSKGQSIRGKDKKKTISNALYCPVVSGVESQSICSTEILPNDPAVSVENALPSAQNTVSMNELCSASLLNREGNACKSALSDDSELPIHISPKSSNKRESSGRRGRGRPKTIPLSAGTGHFVASVASLPKTTCVLTSSSNLTSLNKSGGKFIVSSVSSCGCDVEKCSVHSGVLLSDDAPPAHGLQNTNCKEESNTKIGKAGSRNKPVAVEHNHFTDLNVKEQKVQTTPMSGDPVILVENCMEGQGPRKAGGQLQRIPASNKSSGASVGGGTYKIETLSTPMTKGSSKNNDMAYGAGLNQSQNAIVGCEGMEVIESNTANYTSHCNENARANQVAPSFKNSDRVIDETEAAELGPLKEPREDDNLFTCVNSNSASITSDIAQPRVVLCLAHNGKVAWDIKWKPPLLSQPEQKSRLGFLAVLLGNGALEVWEVPSPCMIQKIYSPSKVEGSDPRFLKLQPVFRCVKVKCRNRQS

SEQ ID NO: 172464 - protein, 1070 aa, Zea Mays
MAAAPPVAGEDIKDGVEVCLFDESADGFSRTVRAISELVDIEPETDFPEAEVERLSSSITFLREWRHFSYEPKSVTFTNGTESTSYRDDMHSVTLPQFSSASVPQITPQEDRGDNTVSFDFILYAGGNVWALDWCPRLCDKPDSSINCEYLAVSAHPPGSSYHKLGMPLTGRGIIQVWCLLAPFEDSHSHQPVNAFNNGKQRGRPRKIPCSDKLVPVPKGPRGRPKKRSYDDQLEPVPKRPRGRPRKYPLPVAKFEGSSQNGESQDIILFDPLSTSSFIPDDLSLASVMPTEKSVQSTPKRGRGRPRKNPSDKLTDSSGIVSEDVCTALPPTTAISTKPKRPRGRPRKYPIPMNDGSVSGADVELGKETTCQTASFGCSLDHTACTEFNAKLCIVAVDAALPPIDKLTCSPGTVSGDVCTAPTLTTAICTKPKRPRGRPRKYPVQINGRSVSGTVAELGQESTCQPVSFGHTVCTEFNANLSIVPVDAALPIVDKLCSSSGTVVKESVCTEPSPATATRKQPKRTRGMPRKYSDTMIDLGKDTTGHPVLFGRSMDHTACTESNSSFSIVAVDASSLFASSSTATCDDKSKGQSIRGKDKKKTISNALYCPVVSGVESQSICSTEILPNDPAVSVENALPSAQNTVSMNELCSASLLNREGNACKSALSDDSELPIHISPKSSNKRESSGRRGRGRPKTIPLSAGTGHFVASVASLPKTTCVLTSSSNLTSLNKSGGKFIVSSVSSCGCDVEKCSVHSGVLLSDDAPPAHGLQNTNCKEESNTKIGKAGSRNKPVAVEHNHFTDLNVKEQKVQTTPMSGDPVILVENCMEGQGPRKAGGQLQRIPASNKSSGASVGGGTYKIETLSTPMTKGSSKNNDMAYGAGLNQSQNAIVGCEGMEVIESNTANYTSHCNENARANQVAPSFKNSDRVIDETEAAELGPLKEPREDDNLFTCVNSNSASITSDIAQPRVVLCLAHNGKVAWDIKWKPPLLSQPEQKSRLGFLAVLLGNGALEVWEVPSPCMIQKIYSPSKVEGSDPRFLKLQPVFRCVKVKCRNRQSMNILFEAMTSL

SEQ ID NO: 172465 - protein, 923 aa, Zea Mays
MAAAPPVAGEDIKDGVEVCLFDESADGFSRTVRAISELVDIEPETDFPEAEVERLSSSITFLREWRHFSYEPKSVTFTNGTESTSYRDDMHSVTLPQFSSASVPQITPQEDRGDNTVSFDFILYAGGNVWALDWCPRLCDKPDSSINCEYLAVSAHPPGSSYHKLGMPLTGRGIIQVWCLLAPFEDSHSHQPVNAFNNGKQRGRPRKIPCSDKLVPVPKGPRGRPKKRSYDDQLEPVPKRPRGRPRKYPLPVAKFEGSSQNGESQDIILFDPLSTSSFIPDDLSLASVMPTEKSVQSTPKRGADVELGKETTCQTASFGCSLDHTACTEFNAKLCIVAVDAALPPIDKLTCSPGTVSGDVCTAPTLTTAICTKPKRPRGRPRKYPVQINGRSVSGTVAELGQESTCQPVSFGHTVCTEFNANLSIVPVDAALPIVDKLCSSSGTVVKESVCTEPSPATATRKQPKRTRGMPRKYSDTMIDLGKDTTGHPVLFGRSMDHTACTESNSSFSIVAVDASSLFASSSTATCDDKSKDDSELPIHISPKSSNKRESSGRRGRGRPKTIPLSAGTGHFVASVASLPKTTCVLTSSSNLTSLNKSGGKFIVSSVSSCGCDVEKCSVHSGVLLSDDAPPAHGLQNTNCKEESNTKIGKAGSRNKPVAVEHNHFTDLNVKEQKVQTTPMSGDPVILVENCMEGQGPRKAGGQLQRIPASNKSSGASVGGGTYKIETLSTPMTKGSSKNNDMAYGAGLNQSQNAIVGCEGMEVIESNTANYTSHCNENARANQVAPSFKNSDRVIDETEAAELGPLKEPREDDNLFTCVNSNSASITSDIAQPRVVLCLAHNGKVAWDIKWKPPLLSQPEQKSRLGFLAVLLGNGALEVWEVPSPCMIQKIYSPSKVEGSDPRFLKLQPVFRCVKVKCRNRQS

SEQ ID NO: 172466 - protein, 123 aa, Zea Mays
MPKIKTSRVKYPEGWELIEPTIRELDAKMREAENDPHDGKRKCEALWPIFRISHQRSRYIYDLYYRRKEISRELYEFCLDQSYADRNLIAKWKKDTSAFAAFGAYRHVTTTLQRLVSAESPSI

SEQ ID NO: 172467 - protein, 123 aa, Zea Mays
MPKIKTSRVKYPEGWELIEPTIRELDAKMREAENDPHDGKRKCEALWPIFRISHQRSRYIYDLYYRRKEISRELYEFCLDQSYADRNLIAKWKKVTSAFAAFGAYRHVTTTLQRLVSAGSPSI

SEQ ID NO: 172468 - protein, 349 aa, Zea Mays
MATDILGPGWGKYYIGPIQFLVCFGAVVGCTLLAGQSMKAIYLLANPGGTIKLYVFVAIFGVFMMILAQLPSFHSLRHVNLVSLLLCLAYSFCAVAGSIYLGNSDKAPPKDYSISGDAQNRVFGVFNAIAIIATTYGNGIIPEIQATVAAPVTGKMFRGLCLCYAVVVTTFFSVAISGYWAVGNQAQGILLSNFMVDGAAVIPKGLLLVTQLFTLLQLSAVGVVYLQPTNEVLEGLFSDAKQGQYAARNVVPRLVSRTVAVALATTVAAMLPFFGDMNSLIGAFGFLPLDFAVPALFYNVTFKPSKKGFVFWLNKTIAVVFSGLAVIASVAAVRQIALDAKTYKLFANV

SEQ ID NO: 172469 - protein, 254 aa, Zea Mays
MRPTRAASRGGWALYELYRTTSRVAAPAVLLWRRLQGLEHPTRWPERLGRPSAARPRPGSPLVWFHAVSLGEGMAALPIVRHCVRLRPGLPVLFTTTTLSSSEVIMDLLPDGVIYQFAPLDCPTAIDSFIGYWKPSLVLLLESELWPNLIMSAAAKGIAVALLNARISLKSFNHWSMPLMFPLVSLMLSKLSLVVPLVSTHGNADVIFMYIYYCCHYSFLIITEYYSSCSFSAATYTTRNHTFCWRFKICCWRC

SEQ ID NO: 172470 - protein, 395 aa, Zea Mays
MRPTRAASRGGWALYELYRTTSRVAAPAVLLWRRLQGLEHPTRWPERLGRPSAARPRPGSPLVWFHAVSLGEGMAALPIVRHCVRLRPGLPVLFTTTTLSSSEVIMDLLPDGVIYQFAPLDCPTAIDSFIGYWKPSLVLLLESELWPNLIMSAAAKGIAVALLNARISLKSFNHWSMPLMFPLVSLMLSKLSLVVPLSTIQAVRFQLLHTPPGIIHFAGDLKYAVGDVNTGENQVKEIKDLQRQFSNRPLWMAASIHRGEEEVILRIHEELVNVYPVLLLILVPRHPEDCKNISLALKKQKVNFVLRSTREVVSSITRVYMVDTLGELRMLYRVTPIAVVGGSFLPGLAGHNFSEAAAAGCAVMTGPHVGHFYHMLVEMWQINPLAVKQSVLLFI

SEQ ID NO: 172471 - protein, 235 aa, Zea Mays
MMIHVIHIAVGDVNTGENQVKEIKDLQRQFSNRPLWMAASIHRGEEEVILRIHEELVNVYPVLLLILVPRHPEDCKNISLALKKQKVNFVLRSTREVVSSITRVYMVDTLGELRMLYRVTPIAVVGGSFLPGLAGHNFSEAAAAGCAVMTGPHVGHFYHMLVEMWQINPLAVKQVSGEFELLQTLKELLGDASTLGARQRAAKDAFSIMSDGVVNRVWDLVCRLGIDSQTNTLSS

SEQ ID NO: 172472 - protein, 234 aa, Zea Mays
MIHVIHIAVGDVNTGENQVKEIKDLQRQFSNRPLWMAASIHRGEEEVILRIHEELVNVYPVLLLILVPRHPEDCKNISLALKKQKVNFVLRSTREVVSSITRVYMVDTLGELRMLYRVTPIAVVGGSFLPGLAGHNFSEAAAAGCAVMTGPHVGHFYHMLVEMWQINPLAVKQVSGEFELLQTLKELLGDASTLGARQRAAKDAFSIMSDGVVNRVWDLVCRLGIDSQTNTLSS

SEQ ID NO: 172473 - protein, 300 aa, Zea Mays
MSAAAKGIAVALLNARISLKSFNHWSMPLMFPLVSLMLSKLSLVVPLSTIQAVRFQLLHTPPGIIHFAGDLKYAVGDVNTGENQVKEIKDLQRQFSNRPLWMAASIHRGEEEVILRIHEELVNVYPVLLLILVPRHPEDCKNISLALKKQKVNFVLRSTREVVSSITRVYMVDTLGELRMLYRVTPIAVVGGSFLPGLAGHNFSEAAAAGCAVMTGPHVGHFYHMLVEMWQINPLAVKQVSGEFELLQTLKELLGDASTLGARQRAAKDAFSIMSDGVVNRVWDLVCRLGIDSQTNTLSS

SEQ ID NO: 172474 - protein, 234 aa, Zea Mays
MRPTRAASRGGWALYELYRTTSRVAAPAVLLWRRLQGLEHPTRWPERLGRPSAARPRPGSPLVWFHAVSLGEGMAALPIVRHCVRLRPGLPVLFTTTTLSSSEVIMDLLPDGVIYQFAPLDCPTAIDSFIGYWKPSLVLLLESELWPNLIMSAAAKGIAVALLNARISLKSFNHWSMPLMFPLVSLMLSKLSLVVPLSTIQAVRFQLLHTPPGIIHFAGDLKYGQGNKRFATAV

SEQ ID NO: 172475 - protein, 259 aa, Zea Mays
MRPTRAASRGGWALYELYRTTSRVAAPAVLLWRRLQGLEHPTRWPERLGRPSAARPRPGSPLVWFHAVSLGEGMAALPIVRHCVRLRPGLPVLFTTTTLSSSEVIMDLLPDGVIYQFAPLDCPTAIDSFIGYWKPSLVLLLESELWPNLIMSAAAKGIAVALLNARISLKSFNHWSMPLMFPLVSLMLSKLSLVVPLVSTHGNADVIFMYIYYCCHYSFLIITEYYSSCSFSAATYTTRNHTFCWRFKIWYTQVLSSLS

SEQ ID NO: 172476 - protein, 456 aa, Zea Mays
MRPTRAASRGGWALYELYRTTSRVAAPAVLLWRRLQGLEHPTRWPERLGRPSAARPRPGSPLVWFHAVSLGEGMAALPIVRHCVRLRPGLPVLFTTTTLSSSEVIMDLLPDGVIYQFAPLDCPTAIDSFIGYWKPSLVLLLESELWPNLIMSAAAKGIAVALLNARISLKSFNHWSMPLMFPLVSLMLSKLSLVVPLSTIQAVRFQLLHTPPGIIHFAGDLKYAVGDVNTGENQVKEIKDLQRQFSNRPLWMAASIHRGEEEVILRIHEELVNVYPVLLLILVPRHPEDCKNISLALKKQKVNFVLRSTREVVSSITRVYMVDTLGELRMLYRVTPIAVVGGSFLPGLAGHNFSEAAAAGCAVMTGELWHAGPHVGHFYHMLVEMWQINPLAVKQVSGEFELLQTLKELLGDASTLGARQRAAKDAFSIMSDGVVNRVWDLVCRLGIDSQTNTLSS

SEQ ID NO: 172477 - protein, 240 aa, Zea Mays
MIHVIHIAVGDVNTGENQVKEIKDLQRQFSNRPLWMAASIHRGEEEVILRIHEELVNVYPVLLLILVPRHPEDCKNISLALKKQKVNFVLRSTREVVSSITRVYMVDTLGELRMLYRVTPIAVVGGSFLPGLAGHNFSEAAAAGCAVMTGELWHAGPHVGHFYHMLVEMWQINPLAVKQVSGEFELLQTLKELLGDASTLGARQRAAKDAFSIMSDGVVNRVWDLVCRLGIDSQTNTLSS

SEQ ID NO: 172478 - protein, 235 aa, Zea Mays
MRPTRAASRGGWALYELYRTTSRVAAPAVLLWRRLQGLEHPTRWPERLGRPSAARPRPGSPLVWFHAVSLGEGMAALPIVRHCVRLRPGLPVLFTTTTLSSSEVIMDLLPDGVIYQFAPLDCPTAIDSFIGYWKPSLVLLLESELWPNLIMSAAAKGIAVALLNARISLKSFNHWSMPLMFPLVSLMLSKLSLVVPLSTIQAVRFQLLHTPPGIIHFAGDLKYDDSCNSHSCWRC

SEQ ID NO: 172479 - protein, 85 aa, Zea Mays
MIFYIQSHLTMNMLSFNCSFMSAALKQADPINNSALALCPSHGPMTSVVSRTSKTWVGRHRGCCTPSRECLSIIRCIQLRFRLLH

SEQ ID NO: 172480 - protein, 54 aa, Zea Mays
MVGILFHTRRPWHEPIPYPRPHRTGPNPRMVPSSFSVASALLRPSRLPLAIHTH

SEQ ID NO: 172481 - protein, 637 aa, Zea Mays
MAAPRPPPLGALGGVVGGSGGAAPAAGAPAGVSMRMFHGESFLGEMEVFPMKRDGEGGLPFPTNEIRVSHFSPASERCPPLAILQTIAPFSVRCKLQTKLTPPNPGLQRLYLTCFNEFKSAVVVVGDEELHLVAMPTKSGKVPCFWCCSARSGLYAASVGMLNLRCLAIVFDLDETLIVANTMKSFEDRIEMLSRRMDVEDDPIRIAGMSAEIKRYIEDKELLKEFIDMDTVTDNGKIVGTQKEEVQPMSGGQERVFRPVIRLPDRNAILTRINPENRDTSVFVKLRPAWEELRSYLTAKGRKRFEVYVCTMAERDYALEMWRLLDPEGNLISPQQLSERVNCVKSGSKKSLQNVFRDRRCHPKMAMVIDDRLNVWDDKDQHRVHVVPAYIPYYAPQAEMANAVPVLCVARNVACNVRGGFFREFDENLLRKVFELYYENGLLDLPYAPDVGDYLVCEDTSFVPGNKDQAPIPEGMRGTEVEKRLNGQSYRWEQREGQQMPSSIRSPDDEGMPIRGTGGVRNIQPNGGSLAITPSVYVTVLQEIGRLCDSKVEFRSTVSSVRSMLFSVEVLFNNEKIGIGVGKTRDEAQVQAAEKALQNLENSYLSSGAPVAGVPKKDSRKSPGRSVLGGPTCSISR

SEQ ID NO: 172482 - protein, 312 aa, Zea Mays
MAERDYALEMWRLLDPEGNLISPQQLSERVNCVKSGSKKSLQNVFRDRRCHPKMAMVIDDRLNVWDDKDQHRVHVVPAYIPYYAPQAEMANAVPVLCVARNVACNVRGGFFREFDENLLRKVFELYYENGLLDLPYAPDVGDYLVCEDTSFVPGNKDQAPIPEGMRGTEVEKRLNGQSYRWEQREGQQMPSSIRSPDDEGMPIRGTGGVRNIQPNGGSLAITPSVYVTVLQEIGRLCDSKVEFRSTVSSVRSMLFSVEVLFNNEKIGIGVGKTRDEAQVQAAEKALQNLESEYISSTSCVHQALLCTLKSYL

SEQ ID NO: 172483 - protein, 559 aa, Zea Mays
MAAPRPPPLGALGGVVGGSGGAAPAAGAPAGVSMRMFHGESFLGEMEVFPMKRDGEGGLPFPTNEIRVSHFSPASERCPPLAILQTIAPFSVRCKLQTKLTPPNPGLQRLYLTCFNEFKSAVVVVGDEELHLVAMPTKSGKVPCFWCCSARSGLYAASVGMLNLRCLAIVFDLDETLIVANTMKSFEDRIEMLSRRMDVEDDPIRIAGMSAEIKRYIEDKELLKEFIDMDTVTDNGKIVGTQKEEVQPMSGGQERVFRPVIRLPDRNAILTRINPENRDTSVFVKLRPAWEELRSYLTAKGRKRFEVYVCTMAERDYALEMWRLLDPEGNLISPQQLSERVNCVKSGSKKSLQNVFRDRRCHPKMAMVIDDRLNVWDDKDQHRVHVVPAYIPYYAPQAEMANAVPVLCVARNVACNVRGGFFREFDENLLRKVFELYYENGLLDLPYAPDVGDYLVCEDTSFVPGNKDQAPIPEGMRGTEVEKRLNGQSYRWEQREGQQMPSSIRSPDDEGMPIRGTGGVRNIQPNGGSLAITPSVYVTVLQEIGRLCDSKYRWNLDLL

SEQ ID NO: 172484 - protein, 731 aa, Zea Mays
MAAPRPPPLGALGGVVGGSGGAAPAAGAPAGVSMRMFHGESFLGEMEVFPMKRDGEGGLPFPTNEIRVSHFSPASERCPPLAILQTIAPFSVRCKLQTKLTPPNPGLQRLYLTCFNEFKSAVVVVGDEELHLVAMPTKSGKVPCFWCCSARSGLYAASVGMLNLRCLAIVFDLDETLIVANTMKSFEDRIEMLSRRMDVEDDPIRIAGMSAEIKRYIEDKELLKEFIDMDTVTDNGKIVGTQKEEVQPMSGGQERVFRPVIRLPDRNAILTRINPENRDTSVFVKLRPAWEELRSYLTAKGRKRFEVYVCTMAERDYALEMWRLLDPEGNLISPQQLSERVNCVKSGSKKSLQNVFRDRRCHPKMAMVIDDRLNVWDDKDQHRVHVVPAYIPYYAPQAEMANAVPVLCVARNVACNVRGGFFREFDENLLRKVFELYYENGLLDLPYAPDVGDYLVCEDTSFVPGNKDQAPIPEGMRGTEVEKRLNGQSYRWEQREGQQMPSSIRSPDDEGMPIRGTGGVRNIQPNGGSLAITPSVYVTVLQEIGRLCDSKVLFNNEKIGIGVGKTRDEAQVQAAEKALQNLENSYLSSGAPVAGVPKKDSRKSPGRSGNGFLEDATCSDNDISMREPSGSALKLDHSNNVDTLSSIMSLIREHCLEDQHVVFRDEVQNSSPARNEEYHFQVELAGLILGRGVGSDREAAKLLAAEEALKTLKSTTDPQIKKYLRPVRCNG

SEQ ID NO: 172485 - protein, 326 aa, Zea Mays
MAERDYALEMWRLLDPEGNLISPQQLSERVNCVKSGSKKSLQNVFRDRRCHPKMAMVIDDRLNVWDDKDQHRVHVVPAYIPYYAPQAEMANAVPVLCVARNVACNVRGGFFREFDENLLRKVFELYYENGLLDLPYAPDVGDYLVCEDTSFVPGNKDQAPIPEGMRGTEVEKRLNGQSYRWEQREGQQMPSSIRSPDDEGMPIRGTGGVRNIQPNGGSLAITPSVYVTVLQEIGRLCDSKVEFRSTVSSVRSMLFSVEVLFNNEKIGIGVGKTRDEAQVQAAEKALQNLENSYLSSGAPVAGVPKKDSRKSPGRSVLGGPTCSISR

SEQ ID NO: 172486 - protein, 107 aa, Zea Mays
MREPSGSALKLDHSNNVDTLSSIMSLIREHCLEDQHVVFRDEVQNSSPARNEEYHFQVELAGLILGRGVGSDREAAKLLAAEEALKTLKSTTDPQIKKYLRPVRCNG

SEQ ID NO: 172487 - protein, 87 aa, Zea Mays
MREPSGSALKLDHSNNVDTLSSIMSLIREHCLEDQHVVFRDEVQNSSPARNEEYHFQVELAGLILGRGVGSDREAAKLLVIDYPNHY

SEQ ID NO: 172488 - protein, 252 aa, Zea Mays
MPFGFALALMRVYINLPLPERIVYYTYKLMGIRLVVKGTPPPPPKKGHPGVLFVCNHRTVLDPVEVAVALRRKVSCVTYSISKFSELISPIKAVALSRERDKDAENIRRLLEEGDLVICPEGTTCREPFLLRFSALFAELTDRIVPVAINTKETMFHGSTVRGFKLMDPYFFFMNPRPTYEITFLTQLPKDLTCSGGKSPIEVANYIQKTLSGQLGFECTSITRKEKYGMLAGTDGRVPSKNKEKEKEKDKN

SEQ ID NO: 172489 - protein, 186 aa, Zea Mays
MILWGKQDAFNWWSLQSSILTSWNLQNSSYRTQKIGKDRVLQAPEKCKVLLGSTWRVILDTSVLRVLLCVILSDEVELPFQNVIDYSEISIKWPSSRIGPELLEYLESISDERIEEMIGHGREMRCLWVYAADTEPCSAMSGILTELQKKVRRFHQSPETFWLHNRTIVNRDLIEFHSWKTPVPLP

SEQ ID NO: 172490 - protein, 261 aa, Zea Mays
MRHHQACSRAHQVGALVLVSATFLLTRLFDRFLLDTYSSAPINPGRPFSSADLRIYVYAEDEIQGLRALLRGRDGTINAATCLKGQWGTQVKVHQFLLKSRFRTFNKDHANLFFVPSYVKCVRMTGALSDKEINQTYVKMPYFRRSGGRDHIFVFPSGAGAHLFRSWAIFLNRSIILTPEGDRTDKRGTSAFNTWKDIIIPGNVDDSMVKSDAPAVQPIPLTKRKYLANFLGRAQGKAGRLQLVELAKQYPDKLESPELKL

SEQ ID NO: 172491 - protein, 417 aa, Zea Mays
MRHHQACSRAHQVGALVLVSATFLLTRLFDRFLLDTYSSAPINPGRPFSSADLRIYVYAEDEIQGLRALLRGRDGTINAATCLKGQWGTQVKVHQFLLKSRFRTFNKDHANLFFVPSYVKCVRMTGALSDKEINQTYVKVLSQMPYFRRSGGRDHIFVFPSGAGAHLFRSWAIFLNRSIILTPEGDRTDKRGTSAFNTWKDIIIPGNVDDSMVKSDAPAVQPIPLTKRKYLANFLGRAQGKAGRLQLVELAKQYPDKNSSYRTQKIGKDRVLQAPEKCKVLLGSTWRVILDTSVLRVLLCVILSDEVELPFQNVIDYSEISIKWPSSRIGPELLEYLESISDERIEEMIGHGREMRCLWVYAADTEPCSAMSGILTELQKKVRRFHQSPETFWLHNRTIVNRDLIEFHSWKTPVPLP

SEQ ID NO: 172492 - protein, 190 aa, Zea Mays
MRHHQACSRAHQDEIQGLRALLRGRDGTINAATCLKGQWGTQVKVHQFLLKSRFRTFNKDHANLFFVPSYVKCVRMTGALSDKEINQTYVKVLSQMPYFRRSGGRDHIFVFPSGAGAHLFRSWAIFLNRSIILTPEGDRTDKRGTSAFNTWKDIIIPGNVDDSMGKAGRLQLVELAKQYPDKLESPELKL

SEQ ID NO: 172493 - protein, 149 aa, Zea Mays
MPQGPMGHPGALSDKEINQTYVKVLSQMPYFRRSGGRDHIFVFPSGAGAHLFRSWAIFLNRSIILTPEGDRTDKRGTSAFNTWKDIIIPGNVDDSMVKSDAPAVQPIPLTKRKYLANFLGRAQGKAGRLQLVELAKQYPDKLESPELKL

SEQ ID NO: 172494 - protein, 187 aa, Zea Mays
MRHHQACSRAHQVKVHQFLLKSRFRTFNKDHANLFFVPSYVKCVRMTGALSDKEINQTYVKVLSQMPYFRRSGGRDHIFVFPSGAGAHLFRSWAIFLNRSIILTPEGDRTDKRGTSAFNTWKDIIIPGNVDDSMVKSDAPAVQPIPLTKRKYLANFLGRAQGKAGRLQLVELAKQYPDKLESPELKL

SEQ ID NO: 172495 - protein, 119 aa, Zea Mays
MSRSGGRDHIFVFPSGAGAHLFRSWAIFLNRSIILTPEGDRTDKRGTSAFNTWKDIIIPGNVDDSMVKSDAPAVQPIPLTKRKYLANFLGRAQGKAGRLQLVELAKQYPDKLESPELKL

SEQ ID NO: 172496 - protein, 62 aa, Zea Mays
MICAASFSHRGRLPSGNLGLREDDLNSSSTTSITMMSMHICNVKHHNSSSASRVQTLLNKEE

SEQ ID NO: 172497 - protein, 155 aa, Zea Mays
MMAEAWTPVPFPPTAPCFWLHDTHSVFWRGGDAWTAAENKLFEKALAQIDRNAPDRWEKVAEVVRTKTVDDVRNHYHDLENDVGFIEAGLVPFPHYSGSVPSFGFTHEDWDGGFRRGYCLKRARGSDPERKKGVPWTEEEHNTGEGTGGTSRAST

SEQ ID NO: 172498 - protein, 348 aa, Zea Mays
MTPPGQLLPLSRLPPGLSSRCPPPAHAQARVSLLHPWAHRLHGRFMPSPHLFRSPACPPRAPTPPGLSAAAGGEAQAAAVAEFVTSERVKVAAMLGLALALCNADRVVMSVAIVPLSQAYGWTPSFAGVVQSSFLWGYLMSPIIGGALVDYYGGKRVMAYGVALWSLATFLSPWAAGRSIWLFLFTRVLLGIAEGVALPSMNNMVLRWFPRTERSSAVGIAMAGFQLGNTIGLLLSPIIMSRTGIFGPFVIFGLFGFLWVLVWIPAISGTPGEHAQISAYELKYITKGQKLVKPQIGSEKTKKVPPFSKLLSKWPTWALICANAMHSWGYFVILSWMPVYFKTYIMSI

SEQ ID NO: 172499 - protein, 118 aa, Zea Mays
MREQLSCHLRIPSAMQAARDRTSPAGHGGFSGFNSESQSDPGFSWTSTYTPRSRMVNRKARSSISFRERVAAILGSCANCFTPRPEVKKAHENPPIEAHDVSASPISRISSTSSTSNN

SEQ ID NO: 172500 - protein, 114 aa, Zea Mays
MGAAQVQGGLRSGGDGPPDAADQRCRGGGGEGDGAGSRVHGSGSRRASSNAALRRVALVRETRLAAGAAARVGRERRSEAARWLHVRAAVGYESEAGQVPELEMICCTCTMLRT

SEQ ID NO: 172501 - protein, 548 aa, Zea Mays
MATLNLPAWGYGLRYRYGLFKQHIAKEGQEEVAEDWLDKFSPWEIPRHDVVFPVRFFGHVEILPDGSRKLVGGEVLKALAYDVPIPGYKTKNAISLRLWEAKATAEDFNLFQFNDGQYESAAQLHARAQQICAVLYPGDATEEGKLLRLKQQFFLCSASLQVNGVAELHSNILKQELFADYVSIWPTKFQNKTNGITPRRWLRFCNPELSEIVTKWLKSDQWTSNLDLLTGLRKFADDEKLHAEWAAAKLSCKKRLAKHVLDVTGVTIDPTSLFDIQIKRIHEYKRQLLNILGAVYRYKKLKGMSAEEKQKVTPRTVMIGGKAFATYTNAKRIVKLVNDVGAVVNNDPEVNKYLKVVFIPNYNVSVAEVLIPGSELSQHISTAGMEASGTSNMKFSLNGCVIIGTLDGANVEIREEVGEDNFFLFGAKADEVAGLRKDRENGLFKPDPRFEEAKQFIRSGAFGSYDYEPLLDSLEGNSGFGRGDYFLVGYDFPSYIDAQDRVDAAYKDKKKWTKMSILNTAGSGKFSSDRTIAQYAKEIWDIKASPVV

SEQ ID NO: 172502 - protein, 534 aa, Zea Mays
MKDMIARFKERKSDRVSGKWSEFPTKVAVQLNDTHPTLAIPELMRLLMDEEGLGWDEAWDITYRTISYTNHTVLPEALEKWSQIVMRKLLPRHMEIIEEIDKRFKELVISKHKEMEGKIDSMKVLDNSNPQKPVVRMANLCVVSSHTVNGVAELHSNILKQELFADYVSIWPTKFQNKTNGITPRRWLRFCNPELSEIVTKWLKSDQWTSNLDLLTGLRKFADDEKLHAEWAAAKLSCKKRLAKHVLDVTGVTIDPTSLFDIQIKRIHEYKRQLLNILGAVYRYKKLKGMSAEEKQKVTPRTVMIGGKAFATYTNAKRIVKLVNDVGAVVNNDPEVNKYLKVVFIPNYNVSVAEVLIPGSELSQHISTAGMEASGTSNMKFSLNGCVIIGTLDGANVEIREEVGEDNFFLFGAKADEVAGLRKDRENGLFKPDPRFEEAKQFIRSGAFGSYDYEPLLDSLEGNSGFGRGDYFLVGYDFPSYIDAQDRVDAAYKDKKKWTKMSILNTAGSGKFSSDRTIAQYAKEIWDIKASPVV

SEQ ID NO: 172503 - protein, 326 aa, Zea Mays
MEAASNGGLLYHEVQEGKLCAVHCVNTTLQGPFFSEFDLAALAADLDQRERLVMLEGSRSPGADNATAGDFFAEGEGSHNVSLGGDFSIQKALEVWDLQVIPLDSPAAGSSQFDPEQEVAFICHLQDHWFCIRKVNGEWYNFNSLYPAPEHLSKFYLSAFIDTLKGSGWSIFAVRGNFPKECPMATEGSNGFGQWLTPDDARRITASCNQVQAPTQQVQPPLLGDRSGGMSEMDMIVAQQEEADLNAAIAASLMDTGGPFASYDADQEYSNSQDAPAAGPARSKEEADKSEPSAPPCEEETQELASGSDTKREVSSVEEKGTAREE

SEQ ID NO: 172504 - protein, 184 aa, Zea Mays
MGVRSRGVLHAQRRGPAERGKLRLDGNTDAAFVLHAPCWTHHAGRIQLCVAINVCWGDQREKVCDATEDGRSSISSRSSWLAVASARSKDLQAHEVLLLIAGFLLSYGECYMRLDRNRYQNTNSVFGLQDDRSEIIRFKHRSCWNCLVNVVEPTRPSQTRSATYQICRLGRFLQFRQTSMTSVC

SEQ ID NO: 172505 - protein, 140 aa, Zea Mays
MKPQACHGRSMPKQTGVKANGNLADDETAIRRNWTVRNGDPLVHLHIRQPAPRPRPRGGEERRLVPHRIAKLSWASDPEVFYMLNAVARQKELCVAINVCWGDQREKVCDATEDGRSSISSRSSWLAVASARSKGKVRPL

SEQ ID NO: 172506 - protein, 145 aa, Zea Mays
MKPQACHGRSMPKQTGVKANGNLADDETAIRRNWTVRNGDPLVHLHIRQPAPRPRPRGGEERRLVPHRIAKLSWASDPEVFYMLNAVARQKELCVAINVCWGDQREKVCDATEDGRSSISSRSSWLAVASARSKGKICKLMKYCY

SEQ ID NO: 172507 - protein, 84 aa, Zea Mays
MPSFKSDLERQSLWTSHARCEVNLRNVIPIRQDKARVWAGHRPCCMNSNPEATPRVPRTPTRGPTVSLKAKRWDRRFLCVARLD

SEQ ID NO: 172508 - protein, 606 aa, Zea Mays
MGSAGEEEREARSEAAFTDSASIDGSSSSSDAASTDEWLPAAPVPVPAARKPGGCASDTDVARQQHKHKRRAPSEMEMMKERFAKLLLGEDMSGSGKGVCTALAISNAITNLCATIFGQLWRLEPLPPEKKAMWRREMDWLLCISDHIVELVPTWQSFPDGTRLEIMTSRPRSDLYINLPALRKLDHMLLEILESFRDPEFWYVEQGIAAPDCDGSASFRVAFHRRDEKWWLPVPRVPPGGLHNKTRKQLQHKRDCANQILKAAMAINSNTLAEMEVPEPYLDSLPKNGRSTLGDIIYRYITSDQFSPECLLDCLDLSTEYQALEVANRVEASVYVWRRRVAAKPVNGLGRSSSARSSWGMVKDMMVDSEKRELLLAERAEGLLICLKQRFPGLTQTSLDMSKIQYNKDVGKSILESYSRVLESLASNIVTRIDDLLNIDELNGHAEHFAATGDADCKIAVSQTAVPSFPVPASGTPFMMAYTTPSFSPAQLASPSKKEKTSLTPGRRSQHSRGAGTKKGLMDRVGTEIKGMMISNGMMIDVSTTTELLCVSVQVFYWHVAFLISVPRLLLAAPVISWSWLITLSVVGRPHNPDVGMDLSNRELGT

SEQ ID NO: 172509 - protein, 117 aa, Zea Mays
MELQARCVCVVAMLLVASFAGLDTAHGAGECGRVPVDQVALKLAPCAAATQNPRAAVPPSCCAQVRAIGRVPKCLCAVMLSDTARKAGVKPAVAMTIPKRCAIANRPVGYNIYPAMR

SEQ ID NO: 172510 - protein, 185 aa, Zea Mays
MSPTLAPSSRPLCWVEHMSLDNETGLDIPGIRVRSVTCLVAADYFVPGYFFWAVLIASLARIGYEEKTMYMVVYDWRLSFQNTEVRDQTLSRIKSNIELMVATNGGNRVVVFPHSMGVLYFLHFMKWVEAPMGGGGGPNWCENHIKDVMNIGGPFLGVPKAVAGLFSSEAKDVAVARYKVIDSFI

SEQ ID NO: 172511 - protein, 103 aa, Zea Mays
MLPSEPSAAAQVPSREAEPEPHLEVEQSVSPAPSAATFYDVAVPHWFQRHVDPSELMGFASHGLIKHGKFLEEGYREFQQSATTLHTWWVSRANNAAHRWSTA

SEQ ID NO: 172512 - protein, 528 aa, Zea Mays
MADPPPVAASALPAQPDQVAASVSTPQNPNPNPLLSPQIPPSPTVSDLSAHISSPQQLDPVAAAAAASGGGGSMDYPPRPPQLQAPSPTQAGPGAAGFGQIPRSGSASRLSTASQLQQYAARMYGGQMSFSGGGGLVGQQQQLAGRTPVLGQGQLGMLQGQGNAGSAAHFGLQSQMMAQARQKGMAQGTQLNNANTAQALQGMQHMGVMGTMGMNQMRPNGTIPYGAQQRFAHAQMRPQASQQPALSPQKVPGQGLSRTASIAALNSQLSGSSQNGQMVAMSMPQQQQWLKQIQSSMGSPVSPQQQYQQQRLLFMQQLQQKTGLSQQQLLQIQQQHPHLTAQQLIQQQQILQQFQQQQLLQSPRVSASGSQKSANLTGSQPGTPLSGGTMTGGSASQGAEGTSQLLGKRKIQDLVAQVDPLGKVDPEVEDLLLEIADDFIDSVTAFACTLAKHRKSSVVEAKDVLLHLERNWHLSVPGFSREDKNPQRNSVRSHHFAITIVLRYTILHRGTIFSLVLLSLHLCYTSIQ

SEQ ID NO: 172513 - protein, 382 aa, Zea Mays
MKALGAHVVDLLRGPHLLRAAVLAFAVAVAFLVGYHWPNAYPRLVFFSSASSSLASRSSRSPAVALSPNSNISFEPSLIPTPTTPPASPAPNACPPPSLPPPTPAPPPPLLPPPPPARLGIVGEDGAMQDDFDIGSVGANDTDLASDETAPQEPSNGGASGGPPRVRIGRFLVCPESMREYIPCLDNEEEIKRLPSTERGERFERHCPAQDKGLSCLVPVPKGYKAPIPWPQSRDEVWFSNVPHTRLVDDKGGQNWITKVKDKFRFPGGGTQFIHGANRYLDQISQMVPNVAFGSHTRVVLDVGCGVASFGAYLLSRDVLTLSIAPKDVHENQIQFALERGVPAMVAAFATRRLLYPSQAFDMIHCSRCRINWTRDDVEFIS

SEQ ID NO: 172514 - protein, 379 aa, Zea Mays
MKALGAHVVDLLRGPHLLRAAVLAFAVAVAFLVGYHWPNAYPRLVFFSSASSSLASRSSRSPAVALSPNSNISFEPSLIPTPTTPPASPAPNACPPPSLPPPTPAPPPPLLPPPPPARLGIVGEDGAMQDDFDIGSVGANDTDLASDETAPQEPSNGGASGGPPRVRIGRFLVCPESMREYIPCLDNEEEIKRLPSTERGERFERHCPAQDKGLSCLVPVPKGYKAPIPWPQSRDEVWFSNVPHTRLVDDKGGQNWITKVKDKFRFPGGGTQFIHGANRYLDQISQMVPNVAFGSHTRVVLDVGCGVASFGAYLLSRDVLTLSIAPKDVHENQIQFALERGVPAMVAAFATRRLLYPSQAFDMIHCSRCRINWTRDGEL

SEQ ID NO: 172515 - protein, 406 aa, Zea Mays
MKALGAHVVDLLRGPHLLRAAVLAFAVAVAFLVGYHWPNAYPRLVFFSSASSSLASRSSRSPAVALSPNSNISFEPSLIPTPTTPPASPAPNACPPPSLPPPTPAPPPPLLPPPPPARLGIVGEDGAMQDDFDIGSVGANDTDLASDETAPQEPSNGGASGGPPRVRIGRFLVCPESMREYIPCLDNEEEIKRLPSTERGERFERHCPAQDKGLSCLVPVPKGYKAPIPWPQSRDEVWFSNVPHTRLVDDKGGQNWITKVKDKFRFPGGGTQFIHGANRYLDQISQMVPNVAFGSHTRVVLDVGCGVASFGAYLLSRDVLTLSIAPKDVHENQIQFALERGVPAMVAAFATRRLLYPSQAFDMIHCSRCRINWTRDDYLELEATLLGQHNLFISMNRPNKRHGKVC

SEQ ID NO: 172516 - protein, 192 aa, Zea Mays
MEDLTTRLCWELVKKEGYIAMWRKPLNNSCYMNRGPAVKPSLCDADDNPDVVWYVSLKACISRLPENGEAPPPVQWPARLMEPPKRLQGVEMDAYPSKNEIIKAETKFWEDIIDGYIHVFKWRKFKLRNVMDMRAGFGGFAAALISRKLDWWVMNVVPVNEPNALPVILDRGLLGVAHDCYNRSSTEREVQS

SEQ ID NO: 172517 - protein, 226 aa, Zea Mays
MQVETSLPGCLAPCRNRINDARRHGHGTAPRAQTSTGYQPQLTALNPLLPRRSPHPPRALFSSRQRKHHSAAASELTGVQSKPIRSVPVPLPTVARDGRAPLPAADAAGDSFSPECSAAPSGRKRSTRRRLGWGARGTSRCPYSRCSPRSAMSTTPRCSWRSPRGWGSPRRPGSPTPRSSARSPPPASLPTPSPYRATRAACQRPSCPMSRTPGAPSTRSSARVVI

SEQ ID NO: 172518 - protein, 87 aa, Zea Mays
MVLLGWHVYLILHNKTTIEYHEGVRATWLAEKAGNVYHHPYNLGIYENLVSVLGPNMLCWLCPISRNIGNGVRFRTSYDTPLSTSAM

SEQ ID NO: 172519 - protein, 350 aa, Zea Mays
MGDGDYALHPEPGADDVGVCWPGELDEQLVTELLSDDSLLLGALQQDPAAVDSEHYCSRDTGASSSAPAACTGGGGTVAEHQELLPQPEAVSRALCSVYTGPTIRDIEKALSTSRPPYPWSSRRYSPMHLFGAAGRAPERHTTKVRSCGGKTPSDGYRWRKYGQKSIKNNPHPRSYYKCTSSRCGAKKHVEKSMDDSEMLIVTYEGSHLHGPQPLFPRRQWLSVDLSGAGVAASKTKQQQTRSSSPAASATLASDDGGGGWPPSLQIMTRNAETRGGGLTADAGESETTPGLQSGRTGVTADSCDDGSTASVPPPPQTAPSFHCDSPPTTWSWSCLDYTLAWSPEAPLLQ

SEQ ID NO: 172520 - protein, 290 aa, Zea Mays
MLTYESATELLYMNLEEEEELRILQEAARIREQWRRSQGSIDTAMIEPRIKVSNPDDPEPNINLYVEDQANPAMQLVSEMMILCGEAVAAFGFDNNLPLPYRGHPQSNTAVSVFSHLPEGPARSFANISVLRAAEMDFQKPVPHGVLGIPGYVQFTSPIRRYVDLLAHYQVKAFLRGDSPPYSAGDLEGMTFIASMHVKVARRLHSNSLRYWLLEYLRRQPKGRKYRALILKFVKDRMGALLLVEVGMQVTTTISRGKVGDQVSVTVETAHPRDDILSVREVVEDTKDSE

SEQ ID NO: 172521 - protein, 494 aa, Zea Mays
MMGPSTMAARAAGCCSSAALAFFRLHPLRCAVRPAAALVGGCSSGLRGGCRSRLAHSIVDLVMEELRSRRRVRVSAKIGLQGTKELPDNKIVKRTLQKGLLLEFQKDPERSLLAVVERPDGKKNWMVTDQNGVMSSIKPQQVTYVVPGIMNFDYSKIDEFLEKTQNLLDPTILECAWMELSEKDKSITVEEFAEIVYGTKESLESYCAHLLLSRDVVYFVKVESRDYSMYQPRSPAQVEELLRRKLAKEAADKELEEFVHLLKSAKALPMESKPPKASWLVEEKVRQKIESLQAYAVDACDDEQRRLAGNILKAMGFTRTSSAALKLLINVGYFPVHVNLDLFRYDVRIRYTDEVLSAAEELLVDSPDTDMHIRKDLSTLKVYAIDVDEADELDDALSATRLPDGRIKVWIHVADPTCLVKPHSIIDREAMHRGTSIFLPTTTFPMFPERLAMNSMSLQQGKECKSVTVSVILNLDGRIYFRKFSHQTYLYVDI

SEQ ID NO: 172522 - protein, 356 aa, Zea Mays
MSSIKPQQVTYVVPGIMNFDYSKIDEFLEKTQNLLDPTILECAWMELSEKDKSITVEEFAEIVYGTKESLESYCAHLLLSRDVVYFVKVESRDYSMYQPRSPAQVEELLRRKLAKEAADKELEEFVHLLKSAKALPMESKPPKASWLVEEKVRQKIESLQAYAVDACDDEQRRLAGNILKAMGFTRTSSAALKLLINVGYFPVHVNLDLFRYDVRIRYTDEVLSAAEELLVDSPDTDMHIRKDLSTLKVYAIDVDEADELDDALSATRLPDGRIKVWIHVADPTCLVKPHSIIDREAMHRGTSIFLPTTTFPMFPERLAMNSMSLQQGKECKSVTVSVILNLDGRRGRTKDSSRSC

SEQ ID NO: 172523 - protein, 427 aa, Zea Mays
MSSIKPQQVTYVVPGIMNFDYSKIDEFLEKTQNLLDPTILECAWMELSEKDKSITVEEFAEIVYGTKESLESYCAHLLLSRDVVYFVKVESRDYSMYQPRSPAQVEELLRRKLAKEAADKELEEFVHLLKSAKALPMESKPPKASWLVEEKVRQKIESLQAYAVDACDDEQRRLAGNILKAMGFTRTSSAALKLLINVGYFPVHVNLDLFRYDVRIRYTDEVLSAAEELLVDSPDTDMHIRKDLSTLKVYAIDVDEADELDDALSATRLPDGRIKVWIHVADPTCLVKPHSIIDRSFLLFCSLLSITALGICYKTVSLVGREAMHRGTSIFLPTTTFPMFPERLAMNSMSLQQGKECKSVTVSVILNLDGSIAEYTLENSVIKPTYMLTYESATELLYMNLEEEEELRILQEAARIREQWRRSQTLR

SEQ ID NO: 172524 - protein, 606 aa, Zea Mays
MELSEKDKSITVEEFAEIVYGTKESLESYCAHLLLSRDVVYFVKVESRDYSMYQPRSPAQVEELLRRKLAKEAADKELEEFVHLLKSAKALPMESKPPKASWLVEEKVRQKIESLQAYAVDACDDEQRRLAGNILKAMGFTRTSSAALKLLINVGYFPVHVNLDLFRYDVRIRYTDEVLSAAEELLVDSPDTDMHIRKDLSTLKVYAIDVDEADELDDALSATRLPDGRIKVWIHVADPTCLVKPHSIIDREAMHRGTSIFLPTTTFPMFPERLAMNSMSLQQGKECKSVTVSVILNLDGSIAEYTLENSVIKPTYMLTYESATELLYMNLEEEEELRILQEAARIREQWRRSQGSIDTAMIEPRIKVSNPDDPEPNINLYVEDQANPAMQLVSEMMILCGEAVAAFGFDNNLPLPYRGHPQSNTAVSVFSHLPEGPARSFANISVLRAAEMDFQKPVPHGVLGIPGYVQFTSPIRRYVDLLAHYQVKAFLRGDSPPYSAGDLEGMTFIASMHVKVARRLHSNSLRYWLLEYLRRQPKGRKYRALILKFVKDRMGALLLVEVGMQVTTTISRGKVGDQVSVTVETAHPRDDILSVREVVEDTKDSE

SEQ ID NO: 172525 - protein, 353 aa, Zea Mays
MHRGTSIFLPTTTFPMFPERLAMNSMSLQQGKECKSVTVSVILNLDGSIAEYTLENSVIKPTYMLTYESATELLYMNLEEEEELRILQEAARIREQWRRSQGSIDTAMIEPRIKVSNPDDPEPNINLYVEDQANPAMQLVSEMMILCGEAVAAFGFDNNLPLPYRGHPQSNTAVSVFSHLPEGPARSFANISVLRAAEMDFQKPVPHGVLGIPGYVQFTSPIRRYVDLLAHYQVKAFLRGDSPPYSAGDLEGMTFIASMHVKVARRLHSNSLRYWLLEYLRRQPKGRKYRALILKFVKDRMGALLLVEVGMQVTTTISRGKVGDQVSVTVETAHPRDDILSVREVVEDTKDSE

SEQ ID NO: 172526 - protein, 466 aa, Zea Mays
MMGPSTMAARAAGCCSSAALAFFRLHPLRCAVRPAAALVGGCSSGLRGGCRSRLAHSIVDLVMEELRSRRRVRVSAKIGLQGTKELPDNKIVKRTLQKGLLLEFQKDPERSLLAVVERPDGKKNWMVTDQNGVMSSIKPQQVTYVVPGIMNFDYSKIDEFLEKTQNLLDPTILECAWMELSEKDKSITVEEFAEIVYGTKESLESYCAHLLLSRDVVYFVKVESRDYSMYQPRSPAQVEELLRRKLAKEAADKELEEFVHLLKSAKALPMESKPPKASWLVEEKVRQKIESLQAYAVDACDDEQRRLAGNILKAMGFTRTSSAALKLLINVGYFPVHVNLDLFRYDVRIRYTDEVLSAAEELLVDSPDTDMHIRKDLSTLKVYAIDVDEADELDDALSATRLPDGRIKVWIHVADPTCLVKPHSIIDREAMHRGTSIFLPTTTFPMFPERLAMNSMSLQQVLQNIL

SEQ ID NO: 172527 - protein, 502 aa, Zea Mays
MQNHAYSRLGISGTGAVVPSPPSSPRRAWGRRASAKGGWSARASADAGWGGGAVRRVARAVLAALLRRQAVFLFAPLLYVAAMLLYMGSISLDSVPRIIPRPAPGSMYRSPQLYARLRADMDADNATDALAAVWRHAYRGGVWRPCISNNTNGLPESNGYIYIEANGGLNQQRTSICNAVAVAGFLNATLVIPNFHYHSIWRDPSKFSDIYDEDYFIERLKNDVRVIDKVPEFIMERFGHNLSNAFNFKIKAWSPIQFYEDIVLPKLIEERLIRISPFANRLSFDAPPAVQRLRCLANFEALKFSKPITTISNTLISRMREKSAENNGKYVAVHLRFEEDMVAFSCCVFDGGDNEKKELDAAREKGWRGKFTRPGRVIRPGAIRMNGKCPLTPLENFSSRMAAIDYSVCVHSEVFVTTQGGNFPHFLIGHRRYLYGGHAKTIKPDKRRLAILFDSPRIGWKSLKRQLFNMRAHSDVKGIEIKRANESVYTFPCPDCMCRSNK

SEQ ID NO: 172528 - protein, 268 aa, Zea Mays
MERFGHNLSNAFNFKIKAWSPIQFYEDIVLPKLIEERLIRISPFANRLSFDAPPAVQRLRCLANFEALKFSKPITTISNTLISRMREKSAENNGKYVAVHLRFEEDMVAFSCCVFDGGDNEKKELDAAREKGWRGKFTRPGRVIRPGAIRMNGKCPLTPLENFSSRMAAIDYSVCVHSEVFVTTQGGNFPHFLIGHRRYLYGGHAKTIKPDKRRLAILFDSPRIGWKSLKRQLFNMRAHSDVKGIEIKRANESVYTFPCPDCMCRSNK

SEQ ID NO: 172529 - protein, 207 aa, Zea Mays
MQNHAYSRLGISGTGAVVPSPPSSPRRAWGRRASAKGGWSARASADAGWGGGAVRRVARAVLAALLRRQAVFLFAPLLYVAAMLLYMGSISLDSVPRIIPRPAPGSMYRSPQLYARLRADMDADNATDALAAVWRHAYRGGVWRPCISNNTNGLPESNGYIYIEANGGLNQQRTSICNAVAVAGFLNATLVIPNFHYHSIWRDPRIW

SEQ ID NO: 172530 - protein, 324 aa, Zea Mays
MERFGHNLSNAFNFKIKAWSPIQFYEDIVLPKLIEERLIRISPFANRLSFDAPPAVQRLRCLANFEALKFSKPITTISNTLISRMREKSAENNGKYVAVHLRFEEDMVAFSCCVFDGGDNEKKELDAAREKGWRGKFTRPGRVIRPGAIRMNGKCPLTPLEVGLMLRGMGFNNNTAIYLASGRIYKAEKNMSPLLEMFPLLQTKETLALDEELAPFKNFSSRMAAIDYSVCVHSEVFVTTQGGNFPHFLIGHRRYLYGGHAKTIKPDKRRLAILFDSPRIGWKSLKRQLFNMRAHSDVKGIEIKRANESVYTFPCPDCMCRSNK

SEQ ID NO: 172531 - protein, 102 aa, Zea Mays
MAAIDYSVCVHSEVFVTTQGGNFPHFLIGHRRYLYGGHAKTIKPDKRRLAILFDSPRIGWKSLKRQLFNMRAHSDVKGIEIKRANESVYTFPCPDCMCRSNK

SEQ ID NO: 172532 - protein, 617 aa, Zea Mays
MARGLGAAPVSSCLALGAAAAVLLVAAALPSPASGVDVTAVLSAFPNFADFARLLASTPVASELSGRSSLTLLAVPNANLPQSPSAFVASAGADIADVLRYHVLLEYLFPFDLARLSPSGKLVTTLFQTTGRAPSDFGAVNLTVGGNSTVVVRSPAPSPGSNATVLGAVTAVPYNLSVLAVGGLIIPSGFDLAASESRPPPPVNITRVLTDARGFNVAASMLQASGVASEFEADEHSAGITVFVPTDDAFAGLPATDRLQSLPAERKAVVLRFHVLHSYYPLGSLESSTASATSSTLIDAWGERFVALDRGSLRHPQWQEVAEVVSSRDSYSKAPKSDVQCKNRIDTLKKKYKVEKAKHDSDWRYFDRLDDLLAPVLLKPNSSSSSAAAATAAAAARSAGPMVPPRINFPQRTRTPLHSSAGAKWRMPSPLPQPSASSDSSDGFPPSAVANGKRQRVEEPAAAAADNGAESSVSRAQGLRELAQAIRRLGEVYERVESAKRDQELRMERERLDSARQLEEQRVQFSTSMPRSSRITRTAQAPPGAMTTAATRTRKLRRMRKTKRKRASDCSPLQQWNGNSTQKSGEREGKTRSKKAWRRETHPGKKRREGKTRKEIC

SEQ ID NO: 172533 - protein, 495 aa, Zea Mays
MGEDLVTTLSMENGGGGGGGHHGPCTLLSMDPSGHLSAPDDRAVGVMVQTLIGGGVGAGARAHAVSPSGAPPPDINQPWQTDLCDMLDVGLGPQVYSAEAVLSCAPKAGSRKAAKRGDSIWGAWFFFTFYFKPLLSDKCKDKVVRDNSGGVSGFDKSDLRLDMFLVQHDMENMYMWVFKERPENALGKMQLRSYMNGHSRPGEPQFPFSVDRGFVRSHRMQRLTEADLRRWADLTGRELNFIIPQEASDFGTWRTIPNSELELEKPHPVMKSNGTQNPKKTGLNLSSPSNHSGEDGMDLSPVSSKRRKELSPQAMDEEVFFPLNSCPQKTQQDVEMHSPTQPAAWLHEFTGVMRNACGPVTAAKSIYEDDQGYLIMVSLPFVDQQRVKVSWRNTLTHGIVKIVCVSTARMQHIRRHGRMFALADPSPEHCPPGDFIREIPLATRIPEDAKLEACFDEAASVLEIMVPKRGNEPEEHEVRVSLRPPHYGANDLLLT

SEQ ID NO: 172534 - protein, 248 aa, Zea Mays
MQVLISPRRRRWSKKNLQPPLACLPRRLIFALARSNPLSRRSTSRIKILARAQDLLPPCFQRRGSLPQLSHGRPCSSGPPLWRPACSLCRSPSSLLPPFLLHAPRLAVEFFARSSLSSVLSARFCSDSCSHGRVQRCSSDARAPVVSPSSALPLLWCPASSPALLGCLRVHGASSPLRTATPGSLLATCAVPCVPSVARMLPGPQHQLPVLLARVCAPLLPSSDPPRCALSSSLLSVRAPLVDLSAHV

SEQ ID NO: 172535 - protein, 125 aa, Zea Mays
MAPKAEAEKKPRAEKRVPGKEGGEKKGKKKAKKSVETYKIYIFKVLKQVHPDIGISSKAMSIMNSFINDIFEKLAAEAAKLARYNKKPTITSREIQTSVRLVLPGELAKHAVSEGTKAVTKFTSS

SEQ ID NO: 172536 - protein, 373 aa, Zea Mays
MAVAAAGSRARAEQARLQWREQEPRSPEMAAPPRPPRPRPARAAVVYYLARNGHLEHPHFMEVALSCPDGLYLRDVIDRLDALRGKGMARVYSWASKRSYRNGFVWHDLADDDYIHPVVGREYVLKGTERLHPVPPPALLDAAAASSSSSGSQETPTSSSSAGWEARGRTAHRMKSASACGAADAELGEYVAYKGEERAADAATQTEDGGRGHGHSHSQRRVLAPAAQEELSRAETTSPPTASTSPETLEALIRADGRVVAAVSGSGRARASSVLMQLISCGSVSVRDASVVPRAQAQAQAHHHHHHHHRARRPPRPPASAAVDLPSYRAKIVEDKEYFSGSIIETAKRSPADDVTSLDLAVLRRSSSYNAER

SEQ ID NO: 172537 - protein, 74 aa, Zea Mays
MPLFHVRSDRSRPVAFRSFPVPACAPTVRARRQERQVQGGGSEELGSRHWVRPWREGDGRRFYANLLAPHAASL

SEQ ID NO: 172538 - protein, 222 aa, Zea Mays
MHDLRLIHTDLKPENILLVSSESIRVPDYKVSIRPPKDGSFFKNLPKSSAIKLIDFGSTTFESQDHNYVVSTRHYRAPEVILGLGWNYPCDLWSVGCILVELCSGEALFQTHENLEHLAMMEKVLGPLPKHMIVRADRRAEKYFKRGVRLDWPEGAASRESMKAVWKLPRLQNLVMQHVDHSAGDLIDLLQGLLRYDPNERLKAHEALQHPFFTRCIRRCGF

SEQ ID NO: 172539 - protein, 258 aa, Zea Mays
MEAQWLAEYPHQGADKRPRKRARLAWDVAPTLFQPPKAIPMLYCGQELINGNFTTAFLPPPSIYYTGPPRNISPPWRPDDKDGHYVFAVGENLTPRYRILNKMGEGTFGQVLECWDLENQEAVAIKIVRSLQKYREAAMIEIDVLQRLGKHDFTGSRCVQIRNWFDYRNHICIVFEKLGPSLYDFLRKNSYRSFPIDLVREFARQILESVAFMHDLRLIHTDLKPENILLVSSESIRVPDYKVLGGTIHATCGVWVAF

SEQ ID NO: 172540 - protein, 394 aa, Zea Mays
MEAQWLAEYPHQGADKRPRKRARLAWDVAPTLFQPPKAIPMLYCGQELINGNFTTAFLPPPSIYYTGPPRNISPPWRPDDKDGHYVFAVGENLTPRYRILNKMGEGTFGQVLECWDLENQEAVAIKIVRSLQKYREAAMIEIDVLQRLGKHDFTGSRCVQIRNWFDYRNHICIVFEKLGPSLYDFLRKNSYRSFPIDLVREFARQILESVAFMHDLRLIHTDLKPENILLVSSESIRVPDYKVSIRPPKDGSFFKNLPKSSAIKLIDFGSTTFESQDHNYVVSTRHYRAPEVILGLGWNYPCDLWSVGCILVELCSGEALFQTHENLEHLAMMEKVLGPLPKHMIVRADRRAEKYFKRGVRLDWPEGAASRESMKAVWKLPRLQDFFGMILMSA

SEQ ID NO: 172541 - protein, 305 aa, Zea Mays
MEAQWLAEYPHQGADKRPRKRARLAWDVAPTLFQPPKAIPMLYCGQELINGNFTTAFLPPPSIYYTGPPRNISPPWRPDDKDGHYVFAVGENLTPRYRILNKMGEGTFGQVLECWDLENQEAVAIKIVRSLQKYREAAMIEIDVLQRLGKHDFTGSRCVQIRNWFDYRNHICIVFEKLGPSLYDFLRKNSYRSFPIDLVREFARQILESVAFMHDLRLIHTDLKPENILLVSSESIRVPDYKVSIRPPKDGSFFKNLPKSSAIKLIDFGSTTFESQDHNYVVSTRHYRAPEVILVGVLKSTSSAE

SEQ ID NO: 172542 - protein, 395 aa, Zea Mays
MLTCILFNDLKVLAGSMQKSLTRWCQLRINGIKWFHGRLEHYLMVAYSDLGSTAQGPEDVVAEYYQQQVEMLEGFSEMDTLTDRGFLPGMSKEEREKVARSETLAIRLSNFANMVLFAAKVYASVRSGSLAIIASTLDSLLDLLSGFILWFTAFSMQTPNPYRYPIGKKRMQPLGILVFASVMATLGLQIILESVRSLVSDGDEFSLTSDQEKWLVDIMLSVTLVKLALVIYCRSFTNEIVKAYAQDHFFDVITNVIGLVAALLANYIEGWIDPLGAIVLAIYTIRTWSMTVLENVHSLVGQSASPEYLQKLTYLCWNHHKAVRHIDTVRAYTFGSHYFVEVDIVLPSNMPLREAHDIGEALQEKLERLPEIERAFVHLDYEFTHRPEHALSHEK

SEQ ID NO: 172543 - protein, 320 aa, Zea Mays
MLYCGQELINGNFTTAFLPPPSIYYTGPPRNISPPWRPDDKDGHYVFAVGENLTPRYRILNKMGEGTFGQVLECWDLENQEAVAIKIVRSLQKYREAAMIEIDVLQRLGKHDFTGSRCVQIRNWFDYRNHICIVFEKLGPSLYDFLRKNSYRSFPIDLVREFARQILESVAFMHDLRLIHTDLKPENILLVSSESIRVPDYKGEALFQTHENLEHLAMMEKVLGPLPKHMIVRADRRAEKYFKRGVRLDWPEGAASRESMKAVWKLPRLQNLVMQHVDHSAGDLIDLLQGLLRYDPNERLKAHEALQHPFFTRCIRRCGF

SEQ ID NO: 172544 - protein, 325 aa, Zea Mays
MLEGFSEMDTLTDRGFLPGMSKEEREKVARSETLAIRLSNFANMVLFAAKVYASVRSGSLAIIASTLDSLLDLLSGFILWFTAFSMQTPNPYRYPIGKKRMQPLGILVFASVMATLGLQIILESVRSLVSDGDEFSLTSDQEKWLVDIMLSVTLVKLALVIYCRSFTNEIVKAYAQDHFFDVITNVIGLVAALLANYIEGWIDPLGAIVLAIYTIRTWSMTVLENVHSLVGQSASPEYLQKLTYLCWNHHKAVRHIDTVRAYTFGSHYFVEVDIVLPSNMPLREAHDIGEALQEKLERLPEIERAFVHLDYEFTHRPEHALSHEK

SEQ ID NO: 172545 - protein, 282 aa, Zea Mays
MVLFAAKVYASVRSGSLAIIASTLDSLLDLLSGFILWFTAFSMQTPNPYRYPIGKKRMQPLGILVFASVMATLGLQIILESVRSLVSDGDEFSLTSDQEKWLVDIMLSVTLVKLALVIYCRSFTNEIVKAYAQDHFFDVITNVIGLVAALLANYIEGWIDPLGAIVLAIYTIRTWSMTVLENVHSLVGQSASPEYLQKLTYLCWNHHKAVRHIDTVRAYTFGSHYFVEVDIVLPSNMPLREAHDIGEALQEKLERLPEIERAFVHLDYEFTHRPEHALSHEK

SEQ ID NO: 172546 - protein, 65 aa, Zea Mays
MPSRSCSVPRPCTSERARWRRPSSPVPSGGGEGPRFRPWRCHACEMTGAIRDDVAEVWHVAPAPR

SEQ ID NO: 172547 - protein, 294 aa, Zea Mays
MSLEIHEEDGGASGARSATKVMSVSGSGKRGRYVRQVTGRHNDTDLHVAARGGDAAALRRALLDAAAAVAATGEAPEDLEAARRAVAAEPNEAGETPLVAAAERGHLGVVVELLRHLDAEGLAAKNRSGYDALHVAAREGRHAVVQEMLNHDRMLAKTSGPANTTPLISAAMRGHIEVVELLLEQDDFGLVEMARDNGKNALHFAARQGHTGIVKALLEKDPQLARRNDKKGQTALHMAVKGTSCDVLRALVDADPAIVMLPDKNGNTALHVATRKKRAELVFFCGYQILMSMH

SEQ ID NO: 172548 - protein, 412 aa, Zea Mays
MEMLNHDRMLAKTSGPANTTPLISAAMRGHIEVVELLLEQDDFGLVEMARDNGKNALHFAARQGHTGIVKALLEKDPQLARRNDKKGQTALHMAVKGTSCDVLRALVDADPAIVMLPDKNGNTALHVATRKKRAEIVSVLLRLPDTHVNALTRDHKTAFDIAEGLPVCEESCEIKDILSQHGALRSRELNQPRDELRKTVTEIKKDVHTQLEQTRKTNKNVHGIAKELRKLHREGINNATNSVTVVAVLFATVAFAAIFTVPGGNDNNGLAVVVQTTSFKIFFIFNAVALFTSLAVVVVQITVVRGETKSERRVVEVINKLMWIASVCTTISFIASCYIVLGRHFQWAAILVSLIGGVTMAGVLGTMTYYVVKSKRQRKIRKKEKMSRRSGSSSWYDNTELSDTELNPVYAL

SEQ ID NO: 172549 - protein, 220 aa, Zea Mays
MGLAAAAAARAVLLLLAVSGVLLSPAAAEIKQESFKDDSRGSILFEKFGFGLHGMPAPTDLNPNPESSPTCVLASPYVRPLFTFAEVDDNGYHNQTFPITHPDEYSLFFANCAPETSVSMEVRTDMYNTNPDGTRDYLSVGMASVPTIYAFFAVCYVVFLAGWLYVTLHRNRLSAHRIHHLMSGLLVARMLYCISAAEDQHYIRTAGTPHGTRRRKCSWW

SEQ ID NO: 172550 - protein, 158 aa, Zea Mays
MVVIPLQVAANIAAAVVGETGPFLQGWVTWNQIFLFVDVACCCAVLFPVVWSMRALRESSKTDGKAARTLAKLMLFRQFYVAVIGYLYFTRIIVYALKTITNYKYRWVSVAAEEVATMAFYMFMFYMFRPAERNQYFALDEDDEEAAEMALREEEFEL

SEQ ID NO: 172551 - protein, 350 aa, Zea Mays
MGLAAAAAARAVLLLLAVSGVLLSPAAAEIKQESFKDDSRGSILFEKFGFGLHGMVSISVTGAKYSSKLAKPDPAQLGFFLLSDESLFEAIYDQPAPTDLNPNPESSPTCVLASPYVRPLFTFAEVDDNGYHNQTFPITHPDEYSLFFANCAPETSVSMEVRTDMYNTNPDGTRDYLSVGMASVPTIYAFFAVCYVVFLAGWLYVTLHRNRLSAHRIHHLMSGLLVARMLYCISAAEDQHYIRTAGTPHGWDVMFYLFQLVKGVILFAVIALIGTGWSFLKPFLQDKEKKVLMVVIPLQVAANIAAAVVGETGPFLQGWVTWNQIFLFVDVACCCAVLFPMALREEEFEL

SEQ ID NO: 172552 - protein, 352 aa, Zea Mays
MQKQHAADSTALAAAMGEVHRLRVQLAATARADRRQDVVEALATINELRAKLKASEEAEAQARAMHEECKQQLEASRATIDSLLTDGSKLMDSFSLVVKELEESRATVKALEDEIAETSSKAASDRCNCSGSESEAAELRAELEAAEERYQEEKILSTVETQCAYELMDQIKTESDLRHGKLAAALEGAKSEVIFLKASLFDKESELRSALDANRKLQAEARTDGSADALKQQLQGALHENGLLKQELHQYESEKGSATARTAEADAAEAAKKGEMETELRRLRVQAEQWRKAAETAMALLTVGKGGNGKVVERSESWEGGKYAGLCEELDDDAAARKNGNVLRRISGMWKK

SEQ ID NO: 172553 - protein, 242 aa, Zea Mays
MPRHWSSSPMAMRHQFGASVLLHLLVLAGAGAMVTADQESDRIRELPGQPPNVGFSQYSGYVTVNPARGRALFYWLVEAVPAAGPIAPLVLWLNGGPGCSSVGYGASEEVGPFRIRPDGQTLYLNPNSWNKAANLLFLESPAGVGFSYSNSSLDLYTAGDAKTALDAYAFLVNWLERFPQYKYREFYIAGESYAGHYVPQLAQLIYEKNKGIQNPTINFKGFMSLMTTMITLVPLSFGGLMV

SEQ ID NO: 172554 - protein, 170 aa, Zea Mays
MAASPPSPPSPAPPSLLLHSEPSTPARQRSLPAHRPPGSSPHPLTCRVLGRHGTLILRRRLIAVLLGGGEERNSSASHTLCLTKCLNQNLSSHPQFGLIMKLVQAPVLGLPNDFSKGFVLETAVFMQSKNLVAYLNKHLCPRNQASSRSVWQSLWQLLTNGGHTCSTVKS

SEQ ID NO: 172555 - protein, 221 aa, Zea Mays
MAASPPSPPSPAPPSLLLHSEPSTPARQRSLPAHRPPGRSELAHPLLGFNFGRACRPLPCSCSSPHPLTCRVLGRHGTLILRRRLIAVLVRPCRSCPTHFPTGIKSLLLFIRMFLCELGGGEERNSSASHTLCLTKCLNQNLSSHPQFGLIMLVQAPVLGLPNDFSKGFVLETAVFMQSKNLVAYLNKHLCPRNQASSRSVWQSLWQLLTNGGHTCSTVKS

SEQ ID NO: 172556 - protein, 224 aa, Zea Mays
MAASPPSPPSPAPPSLLLHSEPSTPARQRSLPAHRPPGRSELAHPLLGFNFGRACRPLPCSCSSPHPLTCRVLGRHGTLILRRRLIAVLLGGGEERNSSASHTLCLTKCLNQNLSSHPQFGLIMHYGMINGVTEEGHPIQLPPVADRTFHLLKQKLVQAPVLGLPNDFSKGFVLETAVFMQSKNLVAYLNKHLCPRNQASSRSVWQSLWQLLTNGGHTCSTVKS

SEQ ID NO: 172557 - protein, 103 aa, Zea Mays
MAASPPSPPSPAPPSLLLHSEPSTPARQRSLPAHRPPGRSELAHPLLGFNFGRACRPLPCSCSSPHPLTCRVLGRHGTLILRRRLIAVLVEKKGTLVHHTPCA

SEQ ID NO: 172558 - protein, 173 aa, Zea Mays
MAASSSEAATATPTTTVGLGGSGTPGPPPPTPSNHHAAPSSAAGVEQWQVEESERDGSPHIRTTHGGAAWRDRPSVADGPYHSAFGQYRLALGPALQCGRRRPRGRGKRCRSRRRGWMEVSLFPTGGLCVEGVQPAASVQGSIGPVSDMIFAAMIYSASFFPFGVPICNSCHV

SEQ ID NO: 172559 - protein, 133 aa, Zea Mays
MNISVEQWQVEESERDGSPHIRTTHGGAAWRDRPSVADGPYHSAFGQYRLALGPALQCGRRRPRGRGKRCRSRRRGWMEVSLFPTGGLCVEGVQPAASVQGSIGPVSDMIFAAMIYSASFFPFGVPICNSCHV

SEQ ID NO: 172560 - protein, 93 aa, Zea Mays
MARPTSAPPMAAQHGETDRLSLTVLITLPLDNIVSPLVPLSNAAGEGREAEANGAGADDEDGWRFHSFLLEDYAWRVYNQRLQFKDPLVRYRI

SEQ ID NO: 172561 - protein, 128 aa, Zea Mays
MCCYLVLNIAFFAEESCQKILHQEEISKSALQEEVTLHTTCTAESPNTACPTKALEVEDLSWLVDNNRLRSLAELKGIQDALRDPELQRMILQIDGSSESEKELEKVMEGQAFREFTDKILDIVNPQE

SEQ ID NO: 172562 - protein, 345 aa, Zea Mays
MMATEPLSPGNLVEDVETLPLDSSSTLAATTDPLLRPPPPSSTFSPTAGENHGAFLDEEDEDVVDDFTPPLAPHAATAATKSREASPWFAEITVSEPRKHAEPATGAVGVIPGSASYVSYLIATQVPDGGEFRVRRRFRDVVALADRLAETHRGLFVPARPDKSIVEGQVMQRHDFVNQRCVTLQRYLRRLAAHPVVGRNPILHAFLTEPSGIPTSDGESPRWSPAMSAATSMAASAPVTPTKSGRDFFGVFKGLKQTVTNGWVAVRPPLVEEEIDTKYLVHKAKLEDLEKHLVTASQQVSWECHSSNWLCLKRSRLRVVLRKDELLTSVILPVLLLELADHRQN

SEQ ID NO: 172563 - protein, 356 aa, Zea Mays
MMATEPLSPGNLVEDVETLPLDSSSTLAATTDPLLRPPPPSSTFSPTAGENHGAFLDEEDEDVVDDFTPPLAPHAATAATKSREASPWFAEITVSEPRKHAEPATGAVGVIPGSASYVSYLIATQVPDGGEFRVRRRFRDVVALADRLAETHRGLFVPARPDKSIVEGQVMQRHDFVNQRWSPAMSAATSMAASAPVTPTKSGRDFFGVFKGLKQTVTNGWVAVRPPLVEEEIDTKYLVHKAKLEDLEKHLVTASQQAEAFVKAFDDLRSTTGLLGMSFIKLAMFEKEQAACSSQKRRAADISNFASAVIRVSRSQTKLNTEIVKHLIYISCIPGQENLNLYQREEWIRRDQGIKR

SEQ ID NO: 172564 - protein, 725 aa, Zea Mays
MLPHAPSRTSGALRFKPHLPTKPPLLTSSSTATPASASASTRGRLCAAAAAAATRRDLLVLVPSLVAASTVLQSLPLAASAAAGDDKPAPPTPAQAQAPASPASPPPPPPADEPALSRVYDATVIGEPQAVGKEARRRVWEKLIAARVVYLGESELVPDRDDRVLELEIVRKLAAGCAEAGRSISLALEAFPCDLQEQLNRFMDGRIDGNTLRLYTSHWAPERWQEYEPLLNYCRDNGIKLVACGTPLEVVRTVQAEGIRSLSKAQRKLYAPPAGSGFVSGFTSISGRSLIDKISSTRGSPFGPSSYLSAQARVVDDYTMSQTIMKEISNGDPSGMLVVVTGASHVMYGPRGIGVPARISKKMQKKNQVVILLDPERQSIRREGEIPVADFLWYSAAKPCSRNCFDRAEIARVMNAAGRRREALPQDLQKGIDLGVVSPEILQNFFDLEKYPVMAELIHRFQGFRERLLADPKFLNRLAIEEAISITTTLLAQYEKRKGRFFEEIDYVLTDTIRGSVVDFFTVWLPAPTISLLSFADDGSGESVELLKGILGSLPDNAFQKGIVGQNWNINQRFASVLMGGLKLAGVGFISSIGAGVASDVLYGARRILKPSANMEVGRKRSPIWKSAAVYSCFLGTSANLRYQVIAGLIEHRLGENLMAYYDQPLIANLLSFVSRTVNSYWGTQHRTKDCRISNGSILHELQACKELTKSCLLLRFRAHLKCHC

SEQ ID NO: 172565 - protein, 692 aa, Zea Mays
MLPHAPSRTSGALRFKPHLPTKPPLLTSSSTATPASASASTRGRLCAAAAAAATRRDLLVLVPSLVAASTVLQSLPLAASAAAGDDKPAPPTPAQAQAPASPASPPPPPPADEPALSRVYDATVIGEPQAVGKEARRRVWEKLIAARVVYLGESELVPDRDDRVLELEIVRKLAAGCAEAGRSISLALEAFPCDLQEQLNRFMDGRIDGNTLRLYTSHWAPERWQEYEPLLNYCRDNGIKLVACGTPLEVVRTVQAEGIRSLSKAQRKLYAPPAGSGFVSGFTSISGRSLIDKISSTRGSPFGPSSYLSAQARVVDDYTMSQTIMKEISNGDPSGMLVVVTGASHVMYGPRGIGVPARISKKMQKKNQVVILLDPERQSIRREGEIPVADFLWYSAAKPCSRNCFDRAEIARVMNAAGRRREALPQDLQKGIDLGVVSPEILQNFFDLEKYPVMAELIHRFQGFRERLLADPKFLNRLAIEEAISITTTLLAQYEKRKGRFFEEIDYVLTDTIRGSVVDFFTVWLPAPTISLLSFADDGSGESVELLKGILGSLPDNAFQKGIVGQNWNINQRFASVLMGGLKLAGVGFISSIGAGVASDVLYGARRILKPSANMEVGRKRSPIWKSAAVYSCFLGTSANLRYQVIAGLIEHRLGENLMAYYDQPLIANLLSFVSRTVNSYWGTQKNLQTLS

SEQ ID NO: 172566 - protein, 276 aa, Zea Mays
MDLQKGIDLGVVSPEILQNFFDLEKYPVMAELIHRFQGFRERLLADPKFLNRLAIEEAISITTTLLAQYEKRKGRFFEEIDYVLTDTIRGSVVDFFTVWLPAPTISLLSFADDGSGESVELLKGILGSLPDNAFQKGIVGQNWNINQRFASVLMGGLKLAGVGFISSIGAGVASDVLYGARRILKPSANMEVGRKRSPIWKSAAVYSCFLGTSANLRYQVIAGLIEHRLGENLMAYYDQPLIANLLSFVSRTVNSYWGTQCSLSLNRRIYRLFLIA

SEQ ID NO: 172567 - protein, 254 aa, Zea Mays
MYPSGAMVGAAPAARPSASSRVEKATSHLLMGPDWAVNLEICDILNADVWQTKDVVKAVKKRLQNKDPKVQFFALTLLETMMKNCGEYVQFEVAEQHVLQEMVKIIQKKNDMQVRDKILLLLDSWQEAFGGPGSKYPQYHWAYLEVKTTGVVFPKRPMDAPPIFTPPATHNSETYGSPRYSAGSLSDRMSSDVETLSLGDLNKIRNVTDLLNDMVYALNPSDRMAINDEIITDLVTQCRSNQQKLLQFVSSSGY

SEQ ID NO: 172568 - protein, 85 aa, Zea Mays
MLPLVLVSRTLNGATQYSPCSRCRCHCKPRTERRTGRWQRRRTTPPALAWICHTTSTSASASASPGSTPWSAGKLLFFKPPQQTV

SEQ ID NO: 172569 - protein, 144 aa, Zea Mays
MARIPSLKSLNAFPHAEEHLLKKTYSGAVVTILGLLIMITLFVHELQFYLTTYTVHQMSVDLKRGETLPIHVNMSFPSLPCEVLSVDAIDMSGKHEVDLHTNIWKLRLDKHGHIIGTEYLSDLVEKEHGAHHDHVSMWCYWLPW

SEQ ID NO: 172570 - protein, 99 aa, Zea Mays
MSFPSLPCEVLSVDAIDMSGKHEVDLHTNIWKLRLDKHGHIIGTEYLSDLVEKEHGAHHDHDHEQEHHDEQKKHEQTFNEEAQKMIKSVKQALGNGEGC

SEQ ID NO: 172571 - protein, 169 aa, Zea Mays
MARIPSLKSLNAFPHAEEHLLKKTYSVTILGLLIMITLFVHELQFYLTTYTVHQMSVDLKRGETLPIHVNMSFPSLPCEVLSVDAIDMSGKHEVDLHTNIWKLRLDKHGHIIGTEYLSDLVEKEHGAHHDHDHEQEHHDEQKKHEQTFNEEAQKMIKSVKQALGNGEGC

SEQ ID NO: 172572 - protein, 115 aa, Zea Mays
MSVDLKRGETLPIHVNMSFPSLPCEVLSVDAIDMSGKHEVDLHTNIWKLRLDKHGHIIGTEYLSDLVEKEHGAHHDHDHEQEHHDEQKKHEQTFNEEAQKMIKSVKQALGNGEGC

SEQ ID NO: 172573 - protein, 116 aa, Zea Mays
MMSVDLKRGETLPIHVNMSFPSLPCEVLSVDAIDMSGKHEVDLHTNIWKLRLDKHGHIIGTEYLSDLVEKEHGAHHDHDHEQEHHDEQKKHEQTFNEEAQKMIKSVKQALGNGEGC

SEQ ID NO: 172574 - protein, 151 aa, Zea Mays
MQIFEGSSHVNVSHVIHELSFGPKYPGIDNPLDDTSRILHDTSGTFKYYIKVVPTEYKYLSKKILPTNQYSVTEYFLPIRPTERAWPAVYFLYDLSPITVTIKEERRNFLHFITRLCAVLGGTFAMTGMLDRWMYRLVESVTNSKTRSVLR

SEQ ID NO: 172575 - protein, 537 aa, Zea Mays
MMGCFTVLRSKKKKSHFDNPLVPSKKSVDARESTSSRLPEPEVHVPSLQSAPPSFRNRVKISESSNEVSNRNSRARVLSAPSALIVVDQFGFPYSEYRDQDDSRDKEGLTKGHRFSNPLPLPLPSREGHSFRNSGSFKASNVSGPLEMSGPLPLPLKKCDGLRIFSYEEISSACQRFSSDQCVSETLGSTSYKATFRDEFIDTRTTEATVARLLPSTQSLKEFKTQATTLASLQHPNLCKLIGYYAKEDSNERMLVYERLYHGSLDKLLFGRSDGRFMDWSKRLKVALGAARGLAFLHDEGPFQAMYSEFSTLNIQIDKGFTAKLSGYGCVGFNTEEISNAPVSAANLSVETLEKGLLTPKSNVWSFGVVLLELITGRKNLDPNYSKEERNIVNWSRPFLTDDSRLSLIMDSRIKGRFPTKAARIVADIILKCLRKDPSERPTMRDVVEALARVQEIKVPCRYPLQEPSAAPRKVMLKSTSLNGIVPHHPVITFSPSPPSHNQHLISPRSSTSALFHPRACSSTLDDPSAGGGRTIK

SEQ ID NO: 172576 - protein, 522 aa, Zea Mays
MMGCFTVLRSKKKKSHFDNPLVPSKKSVDARESTSSRLPEPEVHVPSLQSAPPSFRNRVKISESSNEVSNRNSRARVLSAPSALIVVDQFGFPYSEYRDQDDSRDKEGLTKGHRFSNPLPLPLPSREGHSFRNSGSFKASNVSGPLEMSGPLPLPLKKCDGLRIFSYEEISSACQRFSSDQCVSETLGSTSYKATFRDEFIDTRTTEATVARLLPSTQSLKEFKTQATTLASLQHPNLCKLIGYYAKEDSNERMLVYERLYHGSLDKLLFGRSDGRFMDWSKRLKVALGAARGLAFLHDEGPFQAMYSEFSTLNIQIDKANLSVETLEKGLLTPKSNVWSFGVVLLELITGRKNLDPNYSKEERNIVNWSRPFLTDDSRLSLIMDSRIKGRFPTKAARIVADIILKCLRKDPSERPTMRDVVEALARVQEIKVPCRYPLQEPSAAPRKVMLKSTSLNGIVPHHPVITFSPSPPSHNQHLISPRSSTSALFHPRACSSTLDDPSVSSIKKTPPIMRRSSVEGF

SEQ ID NO: 172577 - protein, 401 aa, Zea Mays
MSGPLPLPLKKCDGLRIFSYEEISSACQRFSSDQCVSETLGSTSYKATFRDEFIDTRTTEATVARLLPSTQSLKEFKTQATTLASLQHPNLCKLIGYYAKEDSNERMLVYERLYHGSLDKLLFGRSDGRFMDWSKRLKVALGAARGLAFLHDEGPFQAMYSEFSTLNIQIDKGFTAKLSGYGCVGFNTEEISNAPVSAANLSVETLEKGLLTPKSNVWSFGVVLLELITGRKNLDPNYSKEERNIVNWSRPFLTDDSRLSLIMDSRIKGRFPTKAARIVADIILKCLRKDPSERPTMRDVVEALARVQEIKVPCRYPLQEPSAAPRKVMLKSTSLNGIVPHHPVITFSPSPPSHNQHLISPRSSTSALFHPRACSSTLDDPSVSSIKKTPPIMRRSSVEGF

SEQ ID NO: 172578 - protein, 564 aa, Zea Mays
MMGCFTVLRSKKKKSHFDNPLVPSKKSVDARESTSSRLPEPEVHVPSLQSAPPSFRNRVKISESSNEVSNRNSRARVLSAPSALIVVDQFGFPYSEYRDQDDSRDKEGLTKGHRFSNPLPLPLPSREGHSFRNSGSFKASNVSGPLEMSGPLPLPLKKCDGLRIFSYEEISSACQRFSSDQCVSETLGSTSYKATFRDEFIDTRTTEATVARLLPSTQSLKEFKTQATTLASLQHPNLCKLIGYYAKEDSNERMLVYERLYHGSLDKLLFGRSDGRFMDWSKRLKVALGAARGLAFLHDEGPFQAMYSEFSTLNIQIDKGFTAKLSGYGCVGFNTEEISNAPVSAANLSVETLEKGLLTPKSNVWSFGVVLLELITGRKNLDPNYSKEERNIVNWSRPFLTDDSRLSLIMDSRIKGRFPTKAARIVADIILKCLRKDPSERPTMRDVVEALARVQEIKVPCRYPLQEPSAAPRKVMLKSTSLNGIVPHHPVITFSPSPPSHNQHLISPRSSTSALFHPRACSSTLDDPSNNACSCSNSIKKGQITWKRRSSPSATTCNPQQQKA

SEQ ID NO: 172579 - protein, 492 aa, Zea Mays
MATAAAVCPLLLLAALLLAVSATTSALTDDVLALVVFKMDISDPSGRLATWTEDDDRPCSWPAVGCDARTGRVTSLSLPAASLSGRLPHALLRLDALLSLALPRNNLSGPVPPNLLTALPRLRALDLSSNRLAAPVPAQLFAQCRAVRAISLAHNQLSGYIPPAVASCASLVSLNLSSNRLAGPIPDGLWSLPSLRSLDLSGNELSGSVPGGFPRTSSLREVDLSRNLLAGEIPADVGEAALLKSLGLGHNLFTGSLPDSLRRLAGLQFLGAGGNALAGELPAWIGEIRALERLDLSGNRFAGNIPYTIANCKNLVEIDLSCNALTGDLPWWVFGLPLQRVSVAGNQLNGWVKVADDAAMALRVLDLSCNAFSGEIPLRITAFAGLQSLNLSSNSFSGQLPAGIGGLRLLEVLDVSANRLEGTVPPEIGGAVALRDLRMGRNSLTGRIPAQIGNCSSLVALLQRRCRQCCRTVMSYFLFGTPNRKLWGFLTQ

SEQ ID NO: 172580 - protein, 269 aa, Zea Mays
MAATLLHAATASLQSSSQPARAGAATAFHPLASTPSIRLARSSFSSNRRLEVSLRAVSAGHCFAGRGAPRGRRVVAALAGEQTEGSEVGDDKDNSNEEIKPEEAQEAWKVMLEQFKAEALRMQALSMQAYDVYSKRAREVLLEASEKLKIQADKAQKDLSVIATEVSQEGQEYLVMAARNSPDSIKDITTTFRALGRLNWPSEYEDYHVGIPFAIALVIFFREFSVLLQNGWFPKIFIVLLSGVVAAFYFYRIATGNPKDLSSKNDSAN

SEQ ID NO: 172581 - protein, 262 aa, Zea Mays
MAATLLHAATASLQSSSQPARAGAATAFHPLASTPSIRLAQEAWKVMLEQFKAEALRMQALSMQAYDVYSKRAREVLLEASEKLKIQADKAQKDLSVIATEVSQEGQEYLVMAARNSPDSIKDITTTFRALGRLNWPSEYEDYHVGIPFGTFLTVGGFLNFMLTGSTSALRFGIVLGLALLTLGISSLRSHREGDRRPRLLVKGQAAIALVIFFREFSVLLQNGWFPKIFIVLLSGVVAAFYFYRIATGNPKDLSSKNDSAN

SEQ ID NO: 172582 - protein, 518 aa, Zea Mays
MFKFLKEVVAGSGSGLKDFPYTIGETYASAWGSWTHHRGTSKDDGSPVSIFSLSGSNPQDRHMVAGRNGVKRLRTVRHPNILSFLHSTEAEVADGPAIKHTIYIVTEPVMPLSEKLKELNLGGTQRDEYFAWGLHQISKAVSFLNNDCKLVHGNVCLASVVVTQTLDWKLHAFDVLSEFDANNEASGSPMLQFEWLVGMQYKPMELSKSDWASIRKSPPWAIDSWGLGCLIYELFSGAKLARTEDLRNTASIPKSLLPDYQRLLNSTPTRRLNPSKLIDNSEFFQNKLVETIQFMEILNLKDTFEKDSFFRKLPNIAEQLPREIVLKKLLPVLASSLEFGSAAAPALTVLLKMGSWLPTDQFSIKVLPTIVKLFASNDRAIRACLLHHIDQFGESMSAQTVDEQVFPHVATGFSDTDGTIRELTLKSMLILAPKLSQRTISGSLLKYLSKLQVDEEPGIRTNTTILLGNIASYMNDGTRKRVLINAFTVRALRDTFPPARAAVMSGPRLSRLLISSCK

SEQ ID NO: 172583 - protein, 494 aa, Zea Mays
MDTPPRYLQGSNPQDRHMVAGRNGVKRLRTVRHPNILSFLHSTEAEVADGPAIKHTIYIVTEPVMPLSEKLKELNLGGTQRDEYFAWGLHQISKAVSFLNNDCKLVHGNVCLASVVVTQTLDWKLHAFDVLSEFDANNEASGSPMLQFEWLVGMQYKPMELSKSDWASIRKSPPWAIDSWGLGCLIYELFSGAKLARTEDLRNTASIPKSLLPDYQRLLNSTPTRRLNPSKLIDNSEFFQNKLVETIQFMEILNLKDTFEKDSFFRKLPNIAEQLPREIVLKKLLPVLASSLEFGSAAAPALTVLLKMGSWLPTDQFSIKVLPTIVKLFASNDRAIRACLLHHIDQFGESMSAQTVDEQVFPHVATGFSDTDGTIRELTLKSMLILAPKLSQRTISGSLLKYLSKLQVDEEPGIRTNTTILLGNIASYMNDGTRKRVLINAFTVRALRDTFPPARAAGIMALSVTGSYYEMTEIATRILPNIVVLTFDPDRDLK

SEQ ID NO: 172584 - protein, 569 aa, Zea Mays
MFKFLKEVVAGSGSGLKDFPYTIGETYASAWGSWTHHRGTSKDDGSPVSIFSLSGSNPQDRHMVAGRNGVKRLRTVRHPNILSFLHSTEAEVADGPAIKHTIYIVTEPVMPLSEKLKELNLGGTQRDEYFAWGLHQISKAVSFLNNDCKLVHGNVCLASVVVTQTLDWKLHAFDVLSEFDANNEASGSPMLQFEWLVGMQYKPMELSKSDWASIRKSPPWAIDSWGLGCLIYELFSGAKLARTEDLRNTASIPKSLLPDYQRLLNSTPTRRLNPSKLIDNSEFFQNKLVETIQFMEILNLKDTFEKDSFFRKLPNIAEQLPREIVLKKLLPVLASSLEFGSAAAPALTVLLKMGSWLPTDQFSIKVLPTIVKLFASNDRAIRACLLHHIDQFGESMSAQTVDEQVFPHVATGFSDTDGTIRELTLKSMLILAPKLSQRTISGSLLKYLSKLQVDEEPGIRTNTTILLGNIASYMNDGTRKRVLINAFTVRALRDTFPPARAAGIMALSVTGSYYEMTEIATRILPNIVVLTFDPDSDEQLRLPQTDPTWTKELDDAYIQTPEEKEEALQ

SEQ ID NO: 172585 - protein, 503 aa, Zea Mays
MFKFLKEVVAGSGSGLKDFPYTIGETYASAWGSWTHHRGTSKDDGSPVSIFSLSGSNPQDRHMVAGRNGVKRLRTVRHPNILSFLHSTEAEVADGPAIKHTIYIVTEPVMPLSEKLKELNLGGTQRDEYFAWGLHQISKAVSFLNNDCKLVHGNVCLASVVVTQTLDWKLHAFDVLSEFDANNEASGSPMLQFEWLVGMQYKPMELSKSDWASIRKSPPWAIDSWGLGCLIYELFSGAKLARTEDLRNTASIPKSLLPDYQRLLNSTPTRRLNPSKLIDNSEFFQNKLVETIQFMEILNLKDTFEKDSFFRKLPNIAEQLPREIVLKKLLPVLASSLEFGSAAAPALTVLLKMGSWLPTDQFSIKVLPTIVKLFASNDRAIRACLLHHIDQFGESMSAQTVDEQVFPHVATGFSDTDGTIRELTLKSMLILAPKLSQRTISGSLLKYLSKLQVDEEPGIRTNTTILLGNIASYMNDGASASVFKVYVSVEDTFFTADLTGTPD

SEQ ID NO: 172586 - protein, 529 aa, Zea Mays
MEILNLKDTFEKDSFFRKLPNIAEQLPREIVLKKLLPVLASSLEFGSAAAPALTVLLKMGSWLPTDQFSIKVLPTIVKLFASNDRAIRACLLHHIDQFGESMSAQTVDEQVFPHVATGFSDTDGTIRELTLKSMLILAPKLSQRTISGSLLKYLSKLQVDEEPGIRTNTTILLGNIASYMNDGTRKRVLINAFTVRALRDTFPPARAAGIMALSVTGSYYEMTEIATRILPNIVVLTFDPDSDVRTKAFQATDQFLQIAKQHHEKLNTGDNRVAESTGVKLKPGNAGLLGWAMSSVTQKGKPSDHAPISTANANNSQASTALTAAPETQASTPAYAQSTSSSLDQAAPASARSSEDGWGELEDDNIHEENSDKDGWDDVDPFEDKPSPSLLSNIQAAQKRPVAQPKQAVANSSKSNPLKAPKSEDDPLWGPIAAAPPKSAAKPADIKPSTSHNDEDDLWGSIAAPPPKSSGKPLKPAAANSDDLWGAIAAPPPGTKARPLASSGKGRGTKPAQPKLGAQRIGRTSSTGM

SEQ ID NO: 172587 - protein, 496 aa, Zea Mays
MFKFLKEVVAGSGSGLKDFPYTIGETYASAWGSWTHHRGTSKDDGSPVSIFSLSGSNPQDRHMVAGRNGVKRLRTVRHPNILSFLHSTEAEVADGPAIKHTIYIVTEPVMPLSEKLKELNLGGTQRDEYFAWGLHQISKAVSFLNNDCKLVHGNVCLASVVVTQTLDWKLHAFDVLSEFDANNEASGSPMLQFEWLVGMQYKPMELSKSDWASIRKSPPWAIDSWGLGCLIYELFSGAKLARTEDLRNTASIPKSLLPDYQRLLNSTPTRRLNPSKLIDNSEFFQNKLVETIQFMEILNLKDTFEKDSFFRKLPNIAEQLPREIVLKKLLPVLASSLEFGSAAAPALTVLLKMGSWLPTDQFSIKVLPTIVKLFASNDRAIRACLLHHIDQFGESMSAQTVDEQVFPHVATGFSDTDGTIRELTLKSMLILAPKLSQRTISGSLLKYLSKLQVKFTFGFEKVYTAVMIDTAFCDRWMKNLESGRTLQFFLAILQAT

SEQ ID NO: 172588 - protein, 228 aa, Zea Mays
MHGNFGPQEQILWPASVLAGIVMCGAVYQMTRHVSSRCFKCYSMLNNRQKVEWNNRGFSTLHALVAAAVSFYLVMISDLFNEDAHNSIIIDRKSWLSDCMFGVSIGYFLTDLTMIMLYFPSLGGNEYLLHHGLSMYAIGLALLSGKAHMYILMVLFTEITTPFVNLRWYGYLNFPPREARSIFSLGFYSLVAVPSVVAVMNVFWFWKILKGMVKTLSRRKHSENGRTD

SEQ ID NO: 172589 - protein, 227 aa, Zea Mays
MHGNFGPQEQILWPASVLAGIVMCGAVYQMTRHVSSRCFKCYSMLNNRQKVEWNNRGFSTLHALVAAAVSFYLVMISDLFNEDAHNSIIIDRKSWLSDCMFGVSIGYFLTDLTMIMLYFPSLGGNEYLLHHGLSMYAIGLALLSGKAHMYILMVLFTEITTPFVNLRWYLDVAGQKTCNLYLYNGVALFVGWLIARIILFIYMFTHMYFHLDQVWVFEFSTPRGTTS

SEQ ID NO: 172590 - protein, 140 aa, Zea Mays
MHGNFGPQEQILWPASVLAGIVMCGAVYQMTRHVSSRCFKCYSMLNNRQKVEWNNRGFSTLHALVAAAVSFYLVMISDLFNEDAHNSIIIDRKSWLSDCMFGVSIGYFLTDLTMIMLYFPSLGGNEYVSIALSNSTCSSS

SEQ ID NO: 172591 - protein, 243 aa, Zea Mays
MHGNFGPQEQILWPASVLAGIVMCGAVYQMTRHVSSRCFKCYSMLNNRQKVEWNNRGFSTLHALVAAAVSFYLVMISDLFNEDAHNSIIIDRKSWLSDCMFGVSIGYFLTDLTMIMLYFPSLGGNEYLLHHGLSMYAIGLALLSGKAHMYILMVLFTEITTPFVNLRWYLDVAGQKTCNLYLYNGVALFVGWLARSIFSLGFYSLVAVPSVVAVMNVFWFWKILKGMVKTLSRRKHSENGRTD

SEQ ID NO: 172592 - protein, 195 aa, Zea Mays
MHGNFGPQEQILWPASVLAGIVMCGAVYQMTRHVSSRCFKCYSMLNNRQKVEWNNRGFSTLHALVAAAVSFYLVMISDLFNEDAHNSIIIDRKSWLSDCMFGVSIGYFLTDLTMIMLYFPSLGGNEYLLHHGLSMYAIGLALLSGKAHMYILMVLFTEITTPFVNLRWYLDVAGQKTCNLYLYNGVALFVGWLLP

SEQ ID NO: 172593 - protein, 590 aa, Zea Mays
MSTEDEKLLKEAKKLPWDERLQHKNWKVRNDANIDLAALCDSITDPKDARLREFGPLFKKTVADSNAPVQEKALDALLAFQRAADADASRYAKEVCDAIVAKCLTGRPKTVEKAQAAFLLWVELEAAEVFLESMEKAVKNKVAKAVVPAIDVMFQALSEFGTKVVPPKKILKMLPELFDHPDQNVRASSKGLTLELCRWIGKDPVKSILFEKMRDTMKKELEAELANVSGFAKPTRKIRSEQEKELEEEAVPETSGANTSEEAVADAPVEIDEYDLVDPVDILTPLEKSGFWDGVKATKWSERRDAVAELTKLASAKKIAPGDFHEICRTLKKLITDVNLAVSVEATQAIGNLARGLRAHFSGNARMLLSVLLEKLKEKKPTMTEALSQTLQAMHKSGCFTLIDVIEDVRVAVKNKVPLVRSSTLTWVAFCIETSNKATVLKLHKEYVPICMECLNDGTPEVRDASFSVLTAIAKMVGMKPLERSLEKLDDVRKKKLSDMIGSSSDTVLSSGTAPITTSGAATSARGVAIFFHMLFGSSSSFQVPSLMVLSVKTSDVSAFSFHHFVFSILACLSLRTHMEMEDHHQKLML

SEQ ID NO: 172594 - protein, 1781 aa, Zea Mays
MSTEDEKLLKEAKKLPWDERLQHKNWKVRNDANIDLAALCDSITDPKDARLREFGPLFKKTVADSNAPVQEKALDALLAFQRAADADASRYAKEVCDAIVAKCLTGRPKTVEKAQAAFLLWVELEAAEVFLESMEKAVKNKVAKAVVPAIDVMFQALSEFGTKVVPPKKILKMLPELFDHPDQNVRASSKGLTLELCRWIGKDPVKSILFEKMRDTMKKELEAELANVSGFAKPTRKIRSEQEKELEEEAVPETSGANTSEEAVADAPVEIDEYDLVDPVDILTPLEKSGFWDGVKATKWSERRDAVAELTKLASAKKIAPGDFHEICRTLKKLITDVNLAVSVEATQAIGNLARGLRAHFSGNARMLLSVLLEKLKEKKPTMTEALSQTLQAMHKSGCFTLIDVIEAIGILKQEVESLTELDKSAELLIRLLCAVPGWSEKNVQVQQQVIEVITYVASTVNKFPKRCVVLCLLGVSERVADIKTRTYAMKCLTAFCEAVGPGFVFDRLYKIMKEHKNPKVLSDGILWMVSAVEDFGISNLKLKDMIDFCKDIGLQSSAAVTRNATIKLIGMLHKFVGPDIKGFLSDVKPALLSALDTEYEKNPFEGAAAAPKRTVRVLDTASSVSAGLSDGLPREDISSKITPTLLKNLGSPDWKVRLESIDTVTKIMEEANKRIQPTGTAELFSALRGRLYDSNKNLVMATLSTIGGLASAMGPSVEKSSKGILADVLKCLGDNKKHMRECTLTALDSWVAAAQLEKMVPYIIVSLGDQKTGSEGRKDLFDWLSKHVSKMGDSSEALPLLKPSASSLMDKSSEVRKAAESFMNEILRICGQEVVGRNLKDLPSPTLAIVSERLKLSTVHEGFSESVKVVSTSMSLPSKAGLKNNKHGPNDRGSNVGKPVSQRGLPQRASVTMVSTQDSSQSQALFNIKDSNKEERERRVLVRKFKFEEPRREQIDELKIDLFKHFREDVSLRLWNSDFKRQIDGIELLQKALLSSGKEAIELLDILLRWIVLRFCESNTTCLLKVLDFLPELFDILKDQSYMLTEAEAAIFLPCLIEKSGHNIEKVREKMGDLIKQMVNIYSLPKLLPYILEGLRSKNNRTRIECVDIIGYFIDHHGTEVGGLMKNLPFVAALTAERDGEIRKAALNTLATAYKSLGDDVWRYVGKLSDAQRSMLDDRFKWKAREMDKRREGRPGDARAALRRSVRENGSDIAEQSGEVVSRSVTGSMISRDLGYADAHMDRHMVPRQIPAATGPADWHEALDIVALGLPEQSVEGMKVICHELTQAADPESTVLEDLIKEADRLVSCLAVMVPKTFNFSLSGASSRSCKYVLNTLMQTFQIKRLAHAVKEGTLDNLITELLLWLLDERVPLMDDGSQLLKALNVLMLKILDNAERTSSFVVLINLLRPLDPSRWPSPTPMESLAVKNQKFSDLVVKCLIKLTKVLQSTIYEVDLDRILQSIHIYLQELGMEEIRRRAGADDKPLRMVKTVLHELVKLRGTAIKGHLSMVPIDAEPQPIILAYIDLNLQTLAAARMLTPSGPMGQTHWGDAASNNPNPSTHSADAQLKQELAAVFKKIGDKQTCTIGFYELYRITQLYPKVDIFAQLQNASEAFRTYIRDGLAQVEKNAAAGRTPSSLPLSTPPPIAAIPSPKLAPSPVHTKSIGSKTDYNEDNASGETQPFRGQGDATDQQTDRYQTSGTLDALRERMKSIQAAAIGHFDGAQARPLASMNGSNMLHGGTRLDGEPQQQSNIPPMDERALSGLQARMERLKSGSMESL

SEQ ID NO: 172595 - protein, 859 aa, Zea Mays
MKCLTAFCEAVGPGFVFDRLYKIMKEHKNPKVLSDGILWMVSAVEDFGISNLKLKDMIDFCKDIGLQSSAAVTRNATIKLIGMLHKFVGPDIKGFLSDVKPALLSALDTEYEKNPFEGAAAAPKRTVRVLDTASSVSAGLSDGLPREDISSKITPTLLKNLGSPDWKVRLESIDTVTKIMEEANKRIQPTGTAELFSALRGRLYDSNKNLVMATLSTIGGLASAMGPSVEKSSKGILADVLKCLGDNKKHMRECTLTALDSWVAAAQLEKMVPYIIVSLGDQKTGSEGRKDLFDWLSKHVSKMGDSSEALPLLKPSASSLMDKSSEVRKAAESFMNEILRICGQEVVGRNLKDLPSPTLAIVSERLKLSTVHEGFSESVKVVSTSMSLPSKAGLKNNKHGPNDRGSNVGKPVSQRGLPQRASVTMVSTQDSSQSQALFNIKDSNKEERERRVLVRKFKFEEPRREQIDELKIDLFKHFREDVSLRLWNSDFKRQIDGIELLQKALLSSGKEAIELLDILLRWIVLRFCESNTTCLLKVLDFLPELFDILKDQSYMLTEAEAAIFLPCLIEKSGHNIEKVREKMGDLIKQMVNIYSLPKLLPYILEGLRSKNNRTRIECVDIIGYFIDHHGTEVGGLMKNLPFVAALTAERDGEIRKAALNTLATAYKSLGDDVWRYVGKLSDAQRSMLDDRFKWKAREMDKRREGRPGDARAALRRSVRENGSDIAEQSGEVVSRSVTGSMISRDLGYADAHMDRHMVPRQIPAATGPADWHEALDIVALGLPEQSVEGMKVICHELTQAADPESTVLEDLIKEADRLVSCLAVMLIWGFFKVLQICLKHTHADISDQTSCSCCEGGYP

SEQ ID NO: 172596 - protein, 1289 aa, Zea Mays
MKCLTAFCEAVGPGFVFDRLYKIMKEHKNPKVLSDGILWMVSAVEDFGISNLKLKDMIDFCKDIGLQSSAAVTRNATIKLIGMLHKFVGPGFLSDVKPALLSALDTEYEKNPFEGAAAAPKRTVRVLDTASSVSAGLSDGLPREDISSKITPTLLKNLGSPDWKVRLESIDTVTKIMEEANKRIQPTGTAELFSALRGRLYDSNKNLVMATLSTIGGLASAMGPSVEKSSKGILADVLKCLGDNKKHMRECTLTALDSWVAAAQLEKMVPYIIVSLGDQKTGSEGRKDLFDWLSKHVSKMGDSSEALPLLKPSASSLMDKSSEVRKAAESFMNEILRICGQEVVGRNLKDLPSPTLAIVSERLKLSTVHEGFSESVKVVSTSMSLPSKAGLKNNKHGPNDRGSNVGKPVSQRGLPQRASVTMVSTQDSSQSQALFNIKDSNKEERERRVLVRKFKFEEPRREQIDELKIDLFKHFREDVSLRLWNSDFKRQIDGIELLQKALLSSGKEAIELLDILLRWIVLRFCESNTTCLLKVLDFLPELFDILKDQSYMLTEAEAAIFLPCLIEKSGHNIEKVREKMGDLIKQMVNIYSLPKLLPYILEGLRSKNNRTRIECVDIIGYFIDHHGTEVGGLMKNLPFVAALTAERDGEIRKAALNTLATAYKSLGDDVWRYVGKLSDAQRSMLDDRFKWKAREMDKRREGRPGDARAALRRSVRENGSDIAEQSGEVVSRSVTGSMISRDLGYADAHMDRHMVPRQIPAATGPADWHEALDIVALGLPEQSVEGMKVICHELTQAADPESTVLEDLIKEADRLVSCLAVMVPKTFNFSLSGASSRSCKYVLNTLMQTFQIKRLAHAVKEGTLDNLITELLLWLLDERVPLMDDGSQLLKALNVLMLKILDNAERTSSFVVLINLLRPLDPSRWPSPTPMESLAVKNQKFSDLVVKCLIKLTKVLQSTIYEVDLDRILQSIHIYLQELGMEEIRRRAGADDKPLRMVKTVLHELVKLRGTAIKGHLSMVPIDAEPQPIILAYIDLNLQTLAAARMLTPSGPMGQTHWGDAASNNPNPSTHSADAQLKQELAAVFKKIGDKQTCTIGFYELYRITQLYPKVDIFAQLQNASEAFRTYIRDGLAQVEKNAAAGRTPSSLPLSTPPPIAAIPSPKLAPSPVHTKSIGSKTDYNEDNASGETQPFRGQGDATDQQTDRYQTSGTLDALRERMKSIQAAAIGHFDGAQARPLASMNGSNMLHGGTRLDGEPQQQSNIPPMDERALSGLQARMERLKSGSMESL

SEQ ID NO: 172597 - protein, 710 aa, Zea Mays
MGDLIKQMVNIYSLPKLLPYILEGLRSKNNRTRIECVDIIGYFIDHHGTEVGGLMKNLPFVAALTAERDGEIRKAALNTLATAYKSLGDDVWRYVGKLSDAQRSMLDDRFKWKAREMDKRREGRPGDARAALRRSVRENGSDIAEQSGEVVSRSVTGSMISRDLGYADAHMDRHMVPRQIPAATGPADWHEALDIVALGLPEQSVEGMKVICHELTQAADPESTVLEDLIKEADRLVSCLAVMVPKTFNFSLSGASSRSCKYVLNTLMQTFQIKRLAHAVKEGTLDNLITELLLWLLDERVPLMDDGSQLLKALNVLMLKILDNAERTSSFVVLINLLRPLDPSRWPSPTPMESLAVKNQKFSDLVVKCLIKLTKVLQSTIYEVDLDRILQSIHIYLQELGMEEIRRRAGADDKPLRMVKTVLHELVKLRGTAIKGHLSMVPIDAEPQPIILAYIDLNLQTLAAARMLTPSGPMGQTHWGDAASNNPNPSTHSADAQLKQELAAVFKKIGDKQTCTIGFYELYRITQLYPKVDIFAQLQNASEAFRTYIRDGLAQVEKNAAAGRTPSSLPLSTPPPIAAIPSPKLAPSPVHTKSIGSKTDYNEDNASGETQPFRGQGDATDQQTDRYQTSGTLDALRERMKSIQAAAIGHFDGAQARPLASMNGSNMLHGGTRLDGEPQQQSNIPPMDERALSGLQARMERLKSGSMESL

SEQ ID NO: 172598 - protein, 593 aa, Zea Mays
MAMVAAAEGSGRRDAEAELNLPPGFRFHPTDEELVVYYLCRKVARQQVPVPIIAEVDLYKFDPWDLPEKALFGRKEWYFFTPRDRKYPNGSRPNRTAGKGYWKATGADKSIVPMGSTRAAGIKKALVFYSGKAPRGVKTDWIMHEYRVAQADHTLGKKGSQKLDEWVLCRLYNKRNNWDKVKVEEQELEAAPRRQHHLQSAEDSMSNSFQTHDSDIDNVFELQNCYGNNMVQGQAMTPRNDIGVVTVKEDNDWFTDMNLDDLQASYNMAHTTNHSTVTFQSFFLKLHPFCPHRTTGDAHVRAAGQCGPILHGLNLGSHEPSAPHSVTHQPPLRDEVSRVTQTAVLRLASGDLRPPSPAAVLCHGPWTVVRQQQGSSLCPTACPPPASATSASGLWAPVSRLCPRRSSSGLRHQALSYSSTAPVPATARSSTPPSRTALKNRWHTLRLYTSHWAPERWQEYEPLLNYCRDNGIKLVACGTPLEVVRTVQTEGIRSLSKAQRKLYAPPAGSGFISGFTSISGRSLIDKISSTCGSPFGPSSYLSAQARVVDDYTMSETIMKEITDGDPSGMLVVVTGASHVMYGPRGIVVFFYKK

SEQ ID NO: 172599 - protein, 480 aa, Zea Mays
MGSTRAAGIKKALVFYSGKAPRGVKTDWIMHEYRVAQADHTLGKKGSQKLDEWVLCRLYNKRNNWDKVKVEEQELEAAPRRQHHLQSAEDSMSNSFQTHDSDIDNVFELQNCYGNNMVQGQAMTPRNDIGVVTVKEDNDWFTDMNLDDLQASYNMAHTTNHSTVTFQSFFLKLHPFCPHRTTGDAHVRAAGQCGPILHGLNLGSHEPSAPHSVTHQPPLRDEVSRVTQTAVLRLASGDLRPPSPAAVLCHGPWTVVRQQQGSSLCPTACPPPASATSASGLWAPVSRLCPRRSSSGLRHQALSYSSTAPVPATARSSTPPSRTALKNRWHTLRLYTSHWAPERWQEYEPLLNYCRDNGIKLVACGTPLEVVRTVQTEGIRSLSKAQRKLYAPPAGSGFISGFTSISGRSLIDKISSTCGSPFGPSSYLSAQARVVDDYTMSETIMKEITDGDPSGMLVVVTGASHVMYGPRGIVVFFYKK

SEQ ID NO: 172600 - protein, 109 aa, Zea Mays
MYPQGRMSHHFREMKVGDYLSVKGPKGRFKYHVGQVRAFGMLAGGSGITPMFQVARAILENPNDNTKVHLIYANVTYEDILLKDELDDMAKTYPGRFKIYYVLNQCFYL

SEQ ID NO: 172601 - protein, 251 aa, Zea Mays
MQSSDDYLRGCLDPENFRKFKLVEKKQISHNVARFKFALPTPTSVLGLPIGQHISCRGQDATGEEVIKPYTPTTLDSDLGYFELVIKMYPQGRMSHHFREMKVGDYLSVKGPKGRFKYHVGQVRAFGMLAGGSGITPMFQVARAILENPNDNTKVHLIYANVTYEDILLKDELDDMAKTYPGRFKIYYVLNQPPENWNGGVGFVSKEMIQSHCPAPAEDIQILRCGPPPMNKAMAAHLDELNYTKEMQFQF

SEQ ID NO: 172602 - protein, 224 aa, Zea Mays
MDFLQEQSVETTVAVAVAVAAVAAGGAFLLLRSRKPKGCLDPENFRKFKLVEKKQISHNVARFKFALPTPTSVLGLPIGQHISCRGQDATGEEVIKPYTPTTLDSDLGYFELVIKMYPQGRMSHHFREMKVGDYLSVKGPKGRFKYHVGQVRAFGMLAGGSGITPMFQVARAILENPNDNTKVHLIYANVTYEDILLKDELDDMAKTYPGRFKIYYVLNQCFYL

SEQ ID NO: 172603 - protein, 256 aa, Zea Mays
MDFLQEQSVETTVAVAVAVAAVAAGGAFLLLRSRKPKGCLDPENFRKFKLVEKKQISHNVARGQDATGEEVIKPYTPTTLDSDLGYFELVIKMYPQGRMSHHFREMKVGDYLSVKGPKGRFKYHVGQVRAFGMLAGGSGITPMFQVARAILENPNDNTKVHLIYANVTYEDILLKDELDDMAKTYPGRFKIYYVLNQPPENWNGGVGFVSKEMIQSHCPAPAEDIQILRCGPPPMNKAMAAHLDELNYTKEMQFQF

SEQ ID NO: 172604 - protein, 246 aa, Zea Mays
MAMAPPPACSLFPRVAAAAPSSVTSNSVLTSRGPGILPSPRLAFARRHLSAAWSSKAAASASVEIQDDYTDEMDAVNIAQDVTQLIGKTPMVYLNRVADGCVANIAAKLEYMGPCRSVKDRIGLSMINDAEEKGLISPDKTILVEPTTGNTGVAIASVAAARGYKLIATMPSSLDVERRILLRAFGAEIVLTDPTKGLKGAFDKAEEIVLRTPNAYMFQQFNNEANSEAQKYGKTRWVLLIYLLQA

SEQ ID NO: 172605 - protein, 172 aa, Zea Mays
MSASDLPDELWARVLELGAASSALGFRDLCSIAIASRRLGRLSVYPALWSKLLSRDFPSQSEPSTSSASTSQPPPQRLHPKSLYKTKFERHKVRMAEARRRAVFEAEARVLASRRRLVELEESIREEGERMKTAAQELDNLERESFCGIKRMATTSCSWSSEAVGSAMHSSC

SEQ ID NO: 172606 - protein, 343 aa, Zea Mays
MSHTICLRTQEISLCNLGSSLWMDEPSVDFSAEGVSSRSGLCQSTCLNPGCKHDRACWEDDYVKAVISHGQDDLAVDEIGLALTEVMHAYDDDKWSSLYEDFDDGVGDEPILPLESDSTGDFVDIDSASPTFPSDDAMESSITNSFARNCSINGTPSLVSAMKGTRVKKGITTKLSVSWAPDVYDPPITSDSHTVKGHHTSSTKGNYKYKTSKSSSTTRRKKDKKHSRHSSSNGGGSKRDKKHSYRSSASSSRAITSGSQYCDAYSGGGINSRTVPESAKISPLVVAENVTPQEMVPVLKTLEPIKCTTSCGKEKPFALLSRQFSPARYKGMFTFWNQNQLAS

SEQ ID NO: 172607 - protein, 102 aa, Zea Mays
MVCLAIFMFRFTLLLNNEYFFARCDGIFARLLPVAYGPWIVPFLHLACNPFFVLIPSNFKSPPLAAITLLCLFSSELALLASDSFYLCSTILIQSVDMNSAL

SEQ ID NO: 172608 - protein, 159 aa, Zea Mays
MLYITKQLSETGSRTDPPIGQHAPTSIPADPRGLQLLVEYLSEAYGNLPIYIQETGYATTNGSLHDTDRVDYMKTHISSTLAALRNGANVKGYFAWCFLDVFEYLSGFMSQYGLYRVDFEDEALPRQARLSARWYSKFLENKGIHVEDELDDAGSHVEQ

SEQ ID NO: 172609 - protein, 200 aa, Zea Mays
MIYQLDLPQILEDEYGGWLSPMVVEDFTAYADVCFREFGDRVSHWTTLDEVNVAAIGSYDNGQIAPGRCSDPFGTKKCTVGNSSVEPYIAAHNMLLAHASATRLYREKYQAVQKGVVGINIYTMWSYPLTNSTADLEATQRFLDFYSGWILEPLVFGDYPSVMKKNKKASVTSHWTLLLTIEVKQFVTRYMIILLLLAIL

SEQ ID NO: 172610 - protein, 368 aa, Zea Mays
MIYQLDLPQILEDEYGGWLSPMVVEDFTAYADVCFREFGDRVSHWTTLDEVNVAAIGSYDNGQIAPGRCSDPFGTKKCTVGNSSVEPYIAAHNMLLAHASATRLYREKYQAVQKGVVGINIYTMWSYPLTNSTADLEATQRFLDFYSGWILEPLVFGDYPSVMKKNVGSRLPSFSKVQSEAIRGTLDFIGINHYYSFYVNDRPLEKGIRDFSLDIAADYRGSRTDPPIGQHAPTSIPADPRGLQLLVEYLSEAYGNLPIYIQETGYATTNGSLHDTDRVDYMKTHISSTLAALRNGANVKGYFAWCFLDVFEYLSGFMSQYGLYRVDFEDEALPRQARLSARWYSKFLENKGIHVEDELDDAGSHVEQ

SEQ ID NO: 172611 - protein, 169 aa, Zea Mays
MDRDTIRLILSSLSFLSSGYATTNGSLHDTDRVDYMKTHISSTLAALSFPRTVKGTIAELSNVYQALDNFSLSVQIQVEEVFFTEIYPHPVLTCRNGANVKGYFAWCFLDVFEYLSGFMSQYGLYRVDFEDEALPRQARLSARWYSKFLENKGIHVEDELDDAGSHVEQ

SEQ ID NO: 172612 - protein, 390 aa, Zea Mays
MAATFAFIPLLLLVCVQSAAPVLGFTRSEFPEDFVFGSATSAYQYEGAVGEDGRSPSIWDTFTHAGRMPDKSNGDVAADGYNKYKDDVKLIIDNNLEAYRFSISWSRLIPNGRGAINPKGIEYYNNLIDELVTHGVQVHVMIYQLDLPQILEDEYGGWLSPMVVEDFTAYADVCFREFGDRVSHWTTLDEVNVAAIGSYDNGQIAPGRCSDPFGTKKCTVGNSSVEPYIAAHNMLLAHASATRLYREKYQAVQKGVVGINIYTMWSYPLTNSTADLEATQRFLDFYSGWILEPLVFGDYPSVMKKNVGSRLPSFSKVQSEAIRGTLDFIGINHYYSFYVNDRPLEKGIRDFSLDIAADYRGKTVCHSIHDYPFIACNSLDTFPGTSDSFI

SEQ ID NO: 172613 - protein, 133 aa, Zea Mays
MIYQLDLPQILEDEYGGWLSPMVVEDFTAYADVCFREFGDRVSHWTTLDEVNVAAIGSYDNGQIAPGRCSDPFGTKKCTVGNSSVEPYIAAHNMLLAHASATRLYREKYQVSNLVPENITCILTLVLYCFFFS

SEQ ID NO: 172614 - protein, 95 aa, Zea Mays
MAATFAFIPLLLLVCVQSAAPVLGFTRSEFPEDFVFGSATSAYQYEGAVGEDGRSPSIWDTFTHAGRMPDKSNGDVAADGYNKYKMEEVLLIQKG

SEQ ID NO: 172615 - protein, 177 aa, Zea Mays
MAATFAFIPLLLLVCVQSAAPVLGFTRSEFPEDFVFGSATSAYQYEGAVGEDGRSPSIWDTFTHAGRMPDKSNGDVAADGYNKYKDDVKLIIDNNLEAYRFSISWSRLIPNGRGAINPKGIEYYNNLIDELVTHGVQVHVMIYQLDLPQILEDEYGGWLSPMGGFHGICRCVLQGVR

SEQ ID NO: 172616 - protein, 275 aa, Zea Mays
MLLAHASATRLYREKYQAVQKGVVGINIYTMWSYPLTNSTADLEATQRFLDFYSGWILEPLVFGDYPSVMKKNVGSRLPSFSKVQSEAIRGTLDFIGINHYYSFYVNDRPLEKGIRDFSLDIAADYRGSRTDPPIGQHAPTSIPADPRGLQLLVEYLSEAYGNLPIYIQETGYATTNGSLHDTDRVDYMKTHISSTLAALRNGANVKGYFAWCFLDVFEYLSGFMSQYGLYRVDFEDEALPRQARLSARWYSKFLENKGIHVEDELDDAGSHVEQ

SEQ ID NO: 172617 - protein, 152 aa, Zea Mays
MMALVDVYCLFNRARGTELISPEDLLQACSLWEKVDVQVMLRKFDSGVKVIQTKTHSDEEVFARISSLAQKQDALQKGISPSDAAFTLGIAPALAKEHLLNAENKGLLCRDVSPDGFRFFINLFNDIDAQNIYSQKPYGPYNVWISVAMTSH

SEQ ID NO: 172618 - protein, 118 aa, Zea Mays
MSSQVMLRKFDSGVKVIQTKTHSDEEVFARISSLAQKQDALQKGISPSDAAFTLGIAPALAKEHLLNAENKGLLCRDVSPDGFRFFINLFNDIDAQNIYSQKPYGPYNVWISVAMTSH

SEQ ID NO: 172619 - protein, 314 aa, Zea Mays
MSDVASLPTVYVGAFDNEEAAARAYDLAALKYCGWGSHSTLNFPLESYRHEHENMQRMTREAYLAALRRRSSCFSRGASGYRGVAKHHHNGRWEARIGYPCGKKYVYLGTFGTQEEAARAYDLAALELRGHAAVTNFDISSYTADKDYQQRRHEPAVRTAQPKPKPKVELVDEAPLPQARRPAPTFLTPKPEPEYELGEPLALPPGPVLRDADDADHAIAEILPALCMDPADFEARYPARRARALGCPPDDQLRGLALPDSVRFEDDIETLFDAPGEVRVQFPPAAAVPDVSAADAVSYAAATISSLASGRWWP

SEQ ID NO: 172620 - protein, 101 aa, Zea Mays
MTILKPSASPSCSATTFAAYRRLPRSSTCPSSAWEQAHQCIKVTVDDLSVSTCTKNLESLNKFLNQGVRLAVSHYTAILSFIFSVMTCRVLRGKVLPVWFL

SEQ ID NO: 172621 - protein, 220 aa, Zea Mays
MAYAFLVVSPPDMSQCFEEMAAAASNKTSSWRWRMSSSGPAIVMPCWSSMPQMTVSSPISREKSQDLDPNMRDEVIYSSPNFDPKVFLSWVHKDTSAADLEAGALTLKTDPKGRTQQKKLLVKENFDCFVSCKTTIDVTLKISGVANRAFEPLFERQAQAEKIRSVQGMLQRFRTLFNLPSAIRGNIRKGEYDLAVREYQKAKSIVFPSHERFVKGGNDF

SEQ ID NO: 172622 - protein, 134 aa, Zea Mays
MLHQVALFCMCMGGIMYFLEYEPDTMAPFLRGLIRRFLASKISNPSPLPPNRNASYSYLQTLNALEQSRTQPGVERHLNDGDFVLFNRQPSLHKMSIMVFSMAFSVLSDGARIRKCSAHGRMQRISPWLQPLSI

SEQ ID NO: 172623 - protein, 150 aa, Zea Mays
MRDEVIYSSPNFDPKVFLSWVHKDTSAADLEAGALTLKTDPKGRTQQKKLLVKENFDCFVSCKTTIDVTLKISGVANRAFEPLFERQAQAEKIRSVQGMLQRFRTLFNLPSAIRGNIRKGEYDLAVREYQKAKSIVFPSHERFVKGGNDF

SEQ ID NO: 172624 - protein, 151 aa, Zea Mays
MAPFLRGLIRRFLASKISNPSPLPPNRNASYSYLQTLNALEQSRTQPGVERHLNDGDFVLFNRQPSLHKMSIMVFSMAFSVLSDGARIRKCSAHGRMQRISPWLQPLYCLVASNQMVGLFLMIWALKEMKNDITKSEGVLCWEGINGLPWK

SEQ ID NO: 172625 - protein, 214 aa, Zea Mays
MRDEVIYSSPNFDPKVFLSWVHKDTSAADLEAGALTLKTDPKGRTQQKKLLVKENFDCFVSCKTTIDVTLKISGVANRAFEPLFERQAQAEKIRSVQGMLQRFRTLFNLPSAIRGNIRKGEYDLAVREYQKAKSIVFPSHLLTRKLSIPAGVLSPYRLLILICMACNCCTARYGWRSGSNCWYDQDPSTLIIDDEATPNSRRGRTMAPSCGISG

SEQ ID NO: 172626 - protein, 246 aa, Zea Mays
MAGKQFPSPAHSRSASASSRRLLAAVAASLILLTASYFLLLSPSSHRSAPAILANPSATTSFLASLDRFLSDPHPSASAAAPVELDAAIRVQEDARLYGDPTWPAPAAGLLRVYVYEMPSKFTYDLLRLFRDSYRDTDNLTSNGSPVHRLIEQHSIDYWLWADLIALDSQRLLKSVIRVQQQEEADIFYVPFFTTISYFLLEKQECKALYRVWEHLLSFEMGHRSACLATFRRQGSCHSCSSSMVI

SEQ ID NO: 172627 - protein, 82 aa, Zea Mays
MRHRPSRHAPPRPPLSLITARSEEGGARDRCGFWQIREEAVVVRFWCPLARPIVGDELLVRGQHRAASSAPSSEEDYEEDLS

SEQ ID NO: 172628 - protein, 431 aa, Zea Mays
MGPPAMAFQALTLTPLPFSLHSSSRRVRVLAVAADQTPPPAPPSEPANSPSRLLRELAQRKKAVSPKKKHPPRRFILKPPLDDERLTRRFLSSPQLSLKALPLLSSCLPSAPLSTADRTWMDEYLLEAKQALGYPLAPSETLGEGDDCPARHFDVLFYLAFQHLDPSSERTRMRHVRNGHSRLWFLGQYVLELAFCEFFLQRYPRESPGPMRERVFALIGKKVLPRWLKAASLHNLVFPYDDLDKMIRKDREPPSKAVFWAIFGAIYLCFGMPEVYRVLFEAFGMDPDDESCQPKLRRQLEDVDYVSVEFEKRQLTWQDVAAYRPPPDALFAHPRLFRACVPPGMHRFRGNIWDFDSRPKVMTTLGYPLPMNDRIPEITEARNIELGLGLQLCFLHPSKHKFEHPRFCYERLEYVGQKIQAGGWRRSIGGR

SEQ ID NO: 172629 - protein, 195 aa, Zea Mays
MEYARWLEEHNKHVNELRLAVNAHAGDNDLRGIVGSVMAHYDEFFRLKGVAARSDVFHVLSGMWKTPAERCFMWLGGFRSSEVLKQSSQQAEDALSQGMEALQQSLAETLASGSLGPAGPSGNVANYMGQMAMAMGKLGTLENFLRQADNLRLQTLQQMQRIFNHPTIRTSPTCNKRLLLSAACFEFSLACPSRE

SEQ ID NO: 172630 - protein, 369 aa, Zea Mays
MKYVRRLYYACPSEVVSVLLDLMELDAAGFESSDMQETDSLSVNHSSDTQLSISDMKTIILKLSEKEPRLLLSVLKSVIEMIDAKEDLAYKDESRSCLPAGPSKAKGLCPLVLWLVTNIKEHKDSGYIGLVHEKGVLSSDKNAIPHFCLAKLLQKLLNLSTTSERYLIDAAWLLIEMVNDSNTKEKLRKLPVLSLGRMAKSSSLPDSRTICNEQGSVENATETLELFKVQLKRQKNGGTEGSFSTSTPKKHDRWSIAKSWTPCPIGTAPCSFSSCAVLPAFDSIGHEQNSTLEHGTFEEVDHSERFEPQPEELEDESILEMPRSSPENEISDVKELMCPLKGRLLVGGFWKMVDEEELLLIKSKMKILL

SEQ ID NO: 172631 - protein, 469 aa, Zea Mays
MRWWFVYVNPPPTSSATQELPIPVSRPPKPNLLRRTNRIGRVNKKAASDPTCRRHVRRHGRKPDRSPPPLALAVTHAHAHPSRSKCVPFGPQKRRGRPLRHLAPSAQRSAARRGVWTKEQPSRNHSAARLPSALLPPLSGAGRTRARLSSPIQPARARACSPPPPQGPGSPAAFADSAVQQRASLFFFFTTERDASPAAYIHPPGLHAAPRRARHQGLLQARARAGPPRAAAGDGAAAPRHRRRRRRGEQGAGARRQDAVRFVQAGARIGVGPLGRGGDDGRRRSRRRGAPAARPAGARAGPRPGGALAVVARGDGVRVLRAQGPLLRGRAVGASPADQVGARARRRGAQGVGCGAGRHRQRQRRPRRRAAPDDAAQELGRLAGLRVALLLLDRLPLAARGGSQPPLASCRVHARPRPRRAAYGHGGRVVPGARVRRVLVPRAGVQPRGRACRVRALVLRRAPPLPPAN

SEQ ID NO: 172632 - protein, 470 aa, Zea Mays
MRWWFVYVNPPPTSSATQELPIPVSRPPKPNLLRRTNRIGRVNKKAASDPTCRRHVRRHGRKPDRSPPPLALAVTHAHAHPSRSKCVPFGPQKRRGRPLRHLAPSAQRSAARRGVWTKEQPSRNHSAARLPSALLPPLSGAGRTRARLSSPIQPARARACSPPPPQGPGSPAAFADSAVQQRASLFFFFTTERDASPAAYIHPPGLHAAPRRARHQGLLQARARAGPPRAAAGDGAAAPRHRRRRRRGEQGAGARRQDAVRFVQAGARIGVGPLGRGGDDGRRRSRRRGAPAARPAGARAGPRPGGALAVVARGDGVRVLRAQGPLLRGRAVGASPADQVGARARRRGAQGVGCGAGRHRQRQRRPRRRAAPDDAAQELGRLAGLRVALLLLDRLPLAARGGSQPPLASCRVHARPRPRRAAYGHGGRVVPGARVRRVLVPRAGVQPRAGRACRVRALVLRRAPPLPPAN

SEQ ID NO: 172633 - protein, 251 aa, Zea Mays
MNGGLPGFHNAPASKAVVVAAGLFSVAFGFRGHSLNLGLAYQSVYEKLSVWRLITSLFAFSSTPELIFGAALLYYFRVFERQIGSNKYAVFIIFSTMVSVLLQILSLGYMKDPSLNPLTSGPYGLIFASYVPFFFDIPISMKFRIFGLSFSDKSFVYLAGLQLLFSSGRRSIVPGLSGILAGLLYRLNTFGVRRLKFPELATSLFSQLSLPFSSNPYQGLPITENDGSIPSHQAHQIELPKILRSLLLPHW

SEQ ID NO: 172634 - protein, 253 aa, Zea Mays
MNGGLPGFHNAPASKAVVVAAGLFSVAFGFRGHSLNLGLAYQSVYEKLSVWRLITSLFAFSSTPELIFGAALLYYFRVFERQIGSNKYAVFIIFSTMVSVLLQILSLGYMKDPSLNPLTSGPYGLIFASYVPFFFDIPISMKFRIFGLSFSDKSFVYLAGLQLLFSSGRRSIVPGLSGILAGLLYRLNTFGVRRLKSWQHLSSRSCHCPFQAIHIKGYRSQKMMEASLLIRHIKLRMHAQLPKILRSLLLPHW

SEQ ID NO: 172635 - protein, 195 aa, Zea Mays
MVSVLLQILSLGYMKDPSLNPLTSGPYGLIFASYVPFFFDIPISMKFRIFGLSFSDKSFVYLAGLQLLFSSGRRSIVPGLSGILAGLLYRLNTFGVRRLKFPELATSLFSQLSLPFSSNPYQGLPITENDGSIPSHQAHQIEDARAATQDPTESSIAALVTMGFDRSAAIQALALTNYDVNLASNILLEAQALQQ

SEQ ID NO: 172636 - protein, 63 aa, Zea Mays
MNQYPEARDQYRRLQACVNSLRESQAMQDRMLADSTGTDGGDFMTELEELCRDDGDAPMSTIS

SEQ ID NO: 172637 - protein, 461 aa, Zea Mays
MTRVIHDSGDGMQKEALDLVSSDVNFPKGCFPDYRIGPNNQIIDPEETHEAVPLKEVVAKETAQLLEQHRRLSVRDLKEKFEKGLSSASKLSEEAKRREAASLDRQVLLKKLRDVLDTLKGRVAGRNKDDAEEAISLVEALAVQLTQREGELIYEKAEVKKLANFLKQATVDARKVAEEERALALAEIEKARAAIEKVEKAFHVHDSTKSSREEEIEELRKEVREARRIKMLHQPIKVMDMEFELQALRTLISQKTQLCNQLNKEFCIIPRVDGAPNIANCPIQWYRVISGGSRGLISGATKFTYAPEPFDVGRLLQAEIILNADKIIVQTDGPIDNGLEHYVDSLMKRTDIEFNVVVTQMNGKDYSSNSVHVFHIGKLRIKLQKGWSTKARELYSTTMKLCGSRGGGNAAARAVFWQARKGLSYTLAFETDRDRNAAIMIARKFASNCNIALAGPGDQDT

SEQ ID NO: 172638 - protein, 357 aa, Zea Mays
MTRVIHDSGDGMQKEALDLVSSDVNFPKGCFPDYRIGPNNQIIDPEETHEAVPLKEVVAKETAQLLEQHRRLSVRDLKEKFEKGLSSASKLSEEAKRREAASLDRQVLLKKLRDVLDTLKGRVAGRNKDDAEEAISLVEALAVQLTQREGELIYEKAEVKKLANFLKQATVDARKVAEEERALALAEIEKARAAIEKVEKAFHVHDSTKSSREEEIEELRKEVREARRIKMLHQPIKVMDMEFELQALRTLISQKTQLCNQLNKEFCIIPRVDGAPNIANCPIQWYRVISGGSRGLISGATKFTYAPEPFDVGRLLQAEIILNADKIIVQTDGPIDNAAGLEHYVDSLMKRTDIEFN

SEQ ID NO: 172639 - protein, 395 aa, Zea Mays
MTRVIHDSGDGMQKEALDLVSSDVNFPKGCFPDYRIGPNNQIIDPEETHEAVPLKEVVAKETAQLLEQHRRLSVRDLKEKFEKGLSSASKLSEEAKRREAASLDRQVLLKKLRDVLDTLKGRVAGRNKDDAEEAISLVEALAVQLTQREGELIYEKAEVKKLANFLKQATVDARKVAEEERALALAEIEKARAAIEKVEKAFHVHDSTKSSREEEIEELRKEVREARRIKMLHQPIKVMDMEFELQALRTLISQKTQLCNQLNKELATIKRLEVDSSDLFELEGSNTLGSQFCIIPRVDGAPNIANCPIQWYRVISGGSRGLISGATKFTYAPEPFDVGRLLQAEIILNADKIIVQTDGPIDNAAGLEHYVDSLMKRTDIEFNQENCHLHVCLEL

SEQ ID NO: 172640 - protein, 186 aa, Zea Mays
MLHQPIKVMDMEFELQALRTLISQKTQLCNQLNKELATIKRLEVDSSDLFELEGSNTLGSQFCIIPRVDGAPNIANCPIQWYRVISGGSRGLISGATKFTYAPEPFDVGRLLQAEIILNADKIIVQTDGPIDNGSSNPNEWEGLLVEFCPCFSYWKAENKTSKRMVYKSKRVIFHHDEVMWEPWWW

SEQ ID NO: 172641 - protein, 233 aa, Zea Mays
MLHQPIKVMDMEFELQALRTLISQKTQLCNQLNKEFCIIPRVDGAPNIANCPIQWYRVISGGSRGLISGATKFTYAPEPFDVGRLLQAEIILNADKIIVQTDGPIDNAAGLEHYVDSLMKRTDIEFNVVVTQMNGKDYSSNSVHVFHIGKLRIKLQKGWSTKARELYSTTMKLCGSRGGGNAAARAVFWQARKGLSYTLAFETDRDRNAAIMIARKFASNCNIALAGPGDQDT

SEQ ID NO: 172642 - protein, 101 aa, Zea Mays
MNGKDYSSNSVHVFHIGKLRIKLQKGWSTKARELYSTTMKLCGSRGGGNAAARAVFWQARKGLSYTLAFETDRDRNAAIMIARKFASNCNIALAGPGDQDT

SEQ ID NO: 172643 - protein, 71 aa, Zea Mays
MGQYRSTKNQIRSLRYHCRCNYIIRKATVWEVFSIACLIFHWFVSLRYDHDYISQANTTQNIPISEGHINF

SEQ ID NO: 172644 - protein, 63 aa, Zea Mays
MGEEKNKRARSSVCMHVFACYTLFLPFAYGCSIHISFLNLHPSVGVLSQEQLLVTSMARSHKE

SEQ ID NO: 172645 - protein, 355 aa, Zea Mays
METASFLSVALALAALVPVSLLLVNRLLYGKLPPGPRRRPVVGNLFDVQPVRCRCYQEWARRYGPIMTVWLGTSPTVVVSTSELAKEVLKTHDQQLADRCRDRSTESFSRGGQDLIWADYGPHYIKVRKLCNLELFTQRRLEALRPIREDEVTAMVESVYKAVTAPVQEKLQEELDRVVGRDRVLSETDFPNLPYLQAVVKESLRLHPPTPLMLPHRASASVKIAGYDIPKGANVVVNVWAVARDPEVWDSPLEFRPERFLRENIDIKGADFRVLPFGAGRRVCPGAQLGINLVASMIGHMLHHFTWTLPSGTCPEDVSMMESPGLVTFMATPLQAVATPRLDKEELYRRVPSDV

SEQ ID NO: 172646 - protein, 57 aa, Zea Mays
MLRSPKFTAKAEAEPRTSPLPAAGCGRAADRPEHKIPLPIPPTSPPSVPDPLALLPE

SEQ ID NO: 172647 - protein, 377 aa, Zea Mays
MPTCTGKNVRTHDKDHSFSYSLQTPPPLGGGRERNQRRHPNRQIRLLPHAFRRSADSFAFPPHSDLTGRTVSGGRHPAPFGSRPHALGWWRESGRLFSRVPRVGLREKRSAAARFCAVYHGQCYDIPLPDPNMFIDIINPDEYVDPELVADLEKSRRSVPRKDNGVPDVWDSFIFSDKPVPVTGWGDTETSFTHGQQLSVNWDNQLEHSVEANHKQMSASWDYSVKQPSQRIGQQNSGNWEVYKEQQDQASNWGEQTNPCSTNWVMDGSQDAWKHGYGWGPAAIQTDPWDNCQYSYQVPDSQGTYGHWTHWRRRNNDLGRRNTRNRGDPISSKPMKSKYQTDEHSGANNGWRNCRVKNDMYYYSYEQADYTKQSLAM

SEQ ID NO: 172648 - protein, 341 aa, Zea Mays
MAEMRPIYREPGKPRRPPRSHGSGSFSVPLWEKKFCTDACAIPWAKLCETKRLMSLYKSVVDWDDSAALEAFNDAKARFCAVYHGQCYDIPLPDPNMFIDIINPDEYVDPELVADLEKSRRSVPRKDNGVPDVWDSFIFSDKPVPVTGWGDTETSFTHGQQLSVNWDNQLEHSVEANHKQMSASWDYSVKQPSQRIGQQNSGNWEVYKEQQDQASNWGEQTNPCSTNWVMDGSQDAWKHGYGWGPAAIQTDPWDNCQYSYQVPDSQGTYGHWTHWRRRNNDLGRRNTRNRGDPISSKPMKSKYQTDEHSGANNGWRNCRVKNDMYYYSYEQADYTKQSLAM

SEQ ID NO: 172649 - protein, 642 aa, Zea Mays
MEGLSDESSRKTHKNISSYICLPSAGASGGILVAWRRHVGVSGQKRQDTHSVSVQFCSEDRSAWWLTCVYGPPRNNEKDSFLQELRDIRTACPGPWMIAGDFNLIFKDSDKNNANLNRVMMRRFRGLIEDLALKEIPLHGRKFTWYNHQETLVLVKLDRVLCSVDWELLFPNVLLQSAASQDSDHCPLLLGLRDNKSGKRRFHFESFWTKLDGFQEVVHSGWNAVIPVPCPFKTVELKLKETAKRLQAWSEKKVGHVHSQLALTKEVLHRLEMAQDFRVLIQAEIWLKNRLKKQALLLSSLKRTMARLRSRISWLKEGDANTKLFHLHARHRKRKNFVARLVDGDYTLTSHVEKAACVDRFYTNLIGKCVDRDRVIDLEALGLPSFELSELDAPFSEQEVEDIIKRIPADEAPGPDGSTGRFYKVCWPIIKVDMMAAISAIWGRKFDNFGRLNSAYITMIPKNDGAEMVKDFRPISLVHSFAKLITKILANRLAKRLNEMVSPNQSAFIKGRFIQDNFMLVQQTSRLLHQQHKASLLYKLDITKAFDSISWPFLVEVLKQLGFGQIWRDIICGLLTSSSTQVMLNGFPGQHIIHRRGLRQGDPLSPLLFILAMDVLVYMFSKAEEEGLLQQLSNRKKLHRIS

SEQ ID NO: 172650 - protein, 761 aa, Zea Mays
MDAERDIKPFVSPIMATTIQHRRSLHGPNASQPTALASEHDGTPVLPQTQPQAACVLNKAASEVSGDVSDQSISAYETLEGTSTRRPCSAPRLSRKFWGAGDYDAAAGRSTPQPLSLQNRMCVHPEFLHSNATSHKWPFGALAELLDNAVDEIETGGATTILLDKVTDKRNGSPAILIQDGNGFKTSTMRLGADVIVFSRCTKSSGPTQSIGLLSYTFLVETGHTDVVVPVVDYKCNLMKGQTQRLERHGSEQFFSNLSALLKWSPFATEEELMQNFCDIGPHGTKIIVFNLWSNDDGNLELDFDTDPEDIMISGAPNPEEIRNSVKRANENHLANRLRYSLRVYASVLYLQLPDYFRIILRGQEVKRHRIAADLIYPECISYKPHSCGIKEATVLTTIGFLKGAPTISVHGFNIYHKNRLILPFHRVLNTSSSKGRSVSGVLEVDFIKPTHDKQDFEKSQLFQKLINRLKEMTNEYWELYSDKIGYMKKPRVSAAPLPPPVMLPIANGTAEPSDRSAPAPTQPLRSHSNYLNAVPIASAPPGFHSAPVKAESVAPGAHMGYSPSSLNAQTMQVNGIKSPSMVPATDSVDTRKRRNDDTTTMTVAFKRKATQDLAGSSCATDETKQVSGYMGMGERETKEFCFLKMENRMLREECSDFVMAEKALRLKEQNLRLEIEKAREQFKSLLNEYVSLSATPTQKRATLPAQDLCLRFNDDSSHDDEGYSLPVVHGGARRQGHVNTLEKVEGISGRKKRKQGKLET

SEQ ID NO: 172651 - protein, 701 aa, Zea Mays
MDAERDIKPFVSPIMATTIQHRRSLHGPNASQPTALASEHDGTPVLPQTQPQAACVLNKAASEVSGDVSDQSISAYETLEGTSTRRPCSAPRLSRKFWGAGDYDAAAGRSTPQPLSLQNRMCVHPEFLHSNATSHKWPFGALAELLDNAVDEIETGGATTILLDKVTDKRNGSPAILIQDGNGFKTSTMRLGADVIVFSRCTKSSGPTQSIGLLSYTFLVETGHTDVVVPVVDYKCNLMKGQTQRLERHGSEQFFSNLSALLKWSPFATEEELMQNFCDIGPHGTKIIVFNLWSNDDGNLELDFDTDPEDIMISGAPNPEEIRNSVKRANENHLANRLRYSLRVYASVLYLQLPDYFRIILRGQEVKRHRIAADLIYPECISYKPHSCGIKEATVLTTIGFLKGAPTISVHGFNIYHKNRLILPFHRVLNTSSSKGRSVSGVLEVDFIKPTHDKQDFEKSQLFQKLINRLKEMTNEYWELYSDKIGYMKKPRVSAAPLPPPVMLPIANGTAEPSDRSAPAPTQPLRSHSNYLNAVPIASAPPGFHSAPVKAESVAPGAHMGYSPSSLNAQTMQVNGIKSPSMVPATDSVDTRKRRNDDTTTMTVAFKRKATQDLAGSSCATDETKQVSGYMGMGERETKEFCFLKMENRMLREECSDFVMAEKALRLKEQNLRLEIEKAREQFKSLLNEYVSLSATPTQKR

SEQ ID NO: 172652 - protein, 731 aa, Zea Mays
MDAERDIKPFVSPIMATTIQHRRSLHGPNASQPTALASEHDGTPVLPQTQPQAACVLNKAASEVSGDVSDQSISAYETLEGTSTRRPCSAPRLSRKFWGAGDYDAAAGRSTPQPLSLQNRMCVHPEFLHSNATSHKWPFGALAELLDNAVDEIETGGATTILLDKVTDKRNGSPAILIQDDGGGMDPDSLRRCMSFGFSEKQSGSSIGQYGNGFKTSTMRLGADVIVFSRCTKSSGPTQSIGLLSYTFLVETGHTDVVVPVVDYKCNLMKGQTQRLERHGSEQFFSNLSALLKWSPFATEEELMQNFCDIGPHGTKIIVFNLWSNDDGNLELDFDTDPEDIMISGAPNPEEIRNSVKRANENHLANRLRYSLRVYASVLYLQLPDYFRIILRGQEVKRHRIAADLIYPECISYKPHSCGIKEATVLTTIGFLKGAPTISVHGFNIYHKNRLILPFHRVLNTSSSKGRSVSGVLEVDFIKPTHDKQDFEKSQLFQKLINRLKEMTNEYWELYSDKIGYMKKPRVSAAPLPPPVMLPIANGTAEPSDRSAPAPTQPLRSHSNYLNAVPIASAPPGFHSAPVKAESVAPGAHMGYSPSSLNAQTMQVNGIKSPSMVPATDSVDTRKRRNDDTTTMTVAFKRKATQDLAGSSCATDETKQVSGYMGMGERETKEFCFLKMENRMLREECSDFVMAEKALRLKEQNLRLEIEKAREQFKSLLNEYVSLSATPTQKR

SEQ ID NO: 172653 - protein, 758 aa, Zea Mays
MDAERDIKPFVSPIMATTIQHRRSLHGPNASQPTALASEHDGTPVLPQTQPQAACVLNKAASEVSGDVSDQSISAYETLEGTSTRRPCSAPRLSRKFWGAGDYDAAAGRSTPQPLSLQNRMCVHPEFLHSNATSHKWPFGALAELLDNAVDEIETGGATTILLDKVTDKRNGSPAILIQDGNGFKTSTMRLGADVIVFSRCTKSSGPTQSIGLLSYTFLVETGHTDVVVPVVDYKCNLMKGQTQRLERHGSEQFFSNLSALLKWSPFATEEELMQNFCDIGPHGTKIIVFNLWSNDDGNLELDFDTDPEDIMISGAPNPEEIRNSVKRANENHLANRLRYSLRVYASVLYLQLPDYFRIILRGQEVKRHRIAADLIYPECISYKPHSCGIKEATVLTTIGFLKGAPTISVHGFNIYHKNRLILPFHRVLNTSSSKGRSVSGVLEVDFIKPTHDKQDFEKSQLFQKLINRLKEMTNEYWELYSDKIGYMKKPRVSAAPLPPPVMLPIANGTAEPSDRSAPAPTQPLRSHSNYLNAVPIASAPPGFHSAPVKAESVAPGAHMGYSPSSLNAQTMQVNGIKSPSMVPATDSVDTRKRRNDDTTTMTVAFKRKATQDLAGSSCATDEVSGYMGMGERETKEFCFLKMENRMLREECSDFVMAEKALRLKEQNLRLEIEKAREQFKSLLNEYVSLSATPTQKRATLPAQDLCLRFNDDSSHDDEGYSLPVVHGGARRQGHVNTLEKVEGISGRKKRKQGKLET

SEQ ID NO: 172654 - protein, 636 aa, Zea Mays
MDAERDIKPFVSPIMATTIQHRRSLHGPNASQPTALASEHDGTPVLPQTQPQAACVLNKAASEVSGDVSDQSISAYETLEGTSTRRPCSAPRLSRKFWGAGDYDAAAGRSTPQPLSLQNRMCVHPEFLHSNATSHKWPFGALAELLDNAVDEIETGGATTILLDKVTDKRNGSPAILIQDGNGFKTSTMRLGADVIVFSRCTKSSGPTQSIGLLSYTFLVETGHTDVVVPVVDYKCNLMKGQTQRLERHGSEQFFSNLSALLKWSPFATEEELMQNFCDIGPHGTKIIVFNLWSNDDGNLELDFDTDPEDIMISGAPNPEEIRNSVKRANENHLANRLRYSLRLPDYFRIILRGQEVKRHRIAADLIYPECISYKPHSCGIKEATVLTTIGFLKGAPTISVHGFNIYHKNRLILPFHRVLNTSSSKGRSVSGVLEVDFIKPTHDKQDFEKSQLFQKLINRLKEMTNEYWELYSDKIGYMKKPRVSAAPLPPPVMLPIANGTAEPSDRSAPAPTQPLRSHSNYLNAVPIASAPPGFHSAPVKAESVAPGAHMGYSPSSLNAQTMQVNGIKSPSMVPATDSVDTRKRRNDDTTTMTVAFKRKATQDLAGSSCATDEVLGFCYGREGTTTQGTEFTARD

SEQ ID NO: 172655 - protein, 689 aa, Zea Mays
MDAERDIKPFVSPIMATTIQHRRSLHGPNASQPTALASEHDGTPVLPQTQPQAACVLNKAASEVSGDVSDQSISAYETLEGTSTRRPCSAPRLSRKFWGAGDYDAAAGRSTPQPLSLQNRMCVHPEFLHSNATSHKWPFGALAELLDNAVDEIETGGATTILLDKVTDKRNGSPAILIQDGNGFKTSTMRLGADVIVFSRCTKSSGPTQSIGLLSYTFLVETGHTDVVVPVVDYKCNLMKGQTQRLERHGSEQFFSNLSALLKWSPFATEEELMQNFCDIGPHGTKIIVFNLWSNDDGNLELDFDTDPEDIMISGAPNPEEIRNSVKRANENHLANRLRYSLRLPDYFRIILRGQEVKRHRIAADLIYPECISYKPHSCGIKEATVLTTIGFLKGAPTISVHGFNIYHKNRLILPFHRVLNTSSSKGRSVSGVLEVDFIKPTHDKQDFEKSQLFQKLINRLKEMTNEYWELYSDKIGYMKKPRVSAAPLPPPVMLPIANGTAEPSDRSAPAPTQPLRSHSNYLNAVPIASAPPGFHSAPVKAESVAPGAHMGYSPSSLNAQTMQVNGIKSPSMVPATDSVDTRKRRNDDTTTMTVAFKRKATQDLAGSSCATDEVSGYMGMGERETKEFCFLKMENRMLREECSDFVMAEKALRLKEQNLRLEIEKAREQFKSLLNEYVSLSATPTQKR

SEQ ID NO: 172656 - protein, 873 aa, Zea Mays
MATTHREGLTAATSTTRVRERWRQGRKGMGEEVVAVGSRGRGGMRNDPNNIVHWIWSECNLFGGFSGGYGCVGDLVVFAKLQPPPPHVHVLTNRSHRLSLNINRLEELSTDYMDAERDIKPFVSPIMATTIQHRRSLHGPNASQPTALASEHDGTPVLPQTQPQAACVLNKAASEVSGDVSDQSISAYETLEGTSTRRPCSAPRLSRKFWGAGDYDAAAGRSTPQPLSLQNRMCVHPEFLHSNATSHKWPFGALAELLDNAVDEIETGGATTILLDKVTDKRNGSPAILIQDGNGFKTSTMRLGADVIVFSRCTKSSGPTQSIGLLSYTFLVETGHTDVVVPVVDYKCNLMKGQTQRLERHGSEQFFSNLSALLKWSPFATEEELMQNFCDIGPHGTKIIVFNLWSNDDGNLELDFDTDPEDIMISGAPNPEEIRNSVKRANENHLANRLRYSLRVYASVLYLQLPDYFRIILRGQEVKRHRIAADLIYPECISYKPHSCGIKEATVLTTIGFLKGAPTISVHGFNIYHKNRLILPFHRVLNTSSSKGRSVSGVLEVDFIKPTHDKQDFEKSQLFQKLINRLKEMTNEYWELYSDKIGYMKKPRVSAAPLPPPVMLPIANGTAEPSDRSAPAPTQPLRSHSNYLNAVPIASAPPGFHSAPVKAESVAPGAHMGYSPSSLNAQTMQVNGIKSPSMVPATDSVDTRKRRNDDTTTMTVAFKRKATQDLAGSSCATDETKQVSGYMGMGERETKEFCFLKMENRMLREECSDFVMAEKALRLKEQNLRLEIEKAREQFKSLLNEYVSLSATPTQKRATLPAQDLCLRFNDDSSHDDEGYSLPVVHGGARRQGHVNTLEKVEGISGRKKRKQGKLET

SEQ ID NO: 172657 - protein, 76 aa, Zea Mays
MGWLADTLLQEQHQLIDQNDSDPISMCALPTAPSAKPKPDVVLFSSIILLNFYVDMPVIYKDRRCIPVLVWQRSFF

SEQ ID NO: 172658 - protein, 141 aa, Zea Mays
MDANWTYMDSFLTTWNEWEIRMLVLTSLALQVFLLFSAGIRKRNVSAVLSLLLWLAYLLADSIAIYALGYLSQTRVPKGVDPQSFERTHRVQAFWAPFLLLHSAARTPSPPSPPKTTSSGSATCSASSPRSPSPCMSSPSR

SEQ ID NO: 172659 - protein, 477 aa, Zea Mays
MPAQKGPLPSPTPDDSEGRVAVRHTAASGDGGRSGASHEMDGEASARQESPPHRGPRDGDPDDKEEGGCGGGDGVDTTSESSLTPSAGSMDEFMLVKLAEIRKEVQCPICLGIIRKTRTVMECLHRFCRDCIDKSMRLGNNECPSCRTHCASRRSLRDDPNYDALIAALYPDIDKYEEEELAFNEQEMTRNQKIQETIEETFRRQSQAIGKKRSIAKETGTAFARKYRRNMRTRGRGRTTTPDIAPTSSNEEDREGENVNEVTKVPSSADDHSPDLRQKRCRKTSTSQASPARNIGSSDHSFEENDELVAAKEILATSPLRGEMLAWGKNGTRSQNRHGSAGSNGRIGRSGRIAKLVDHLCNADEMDKEFQLYLVLLPVDGQTIPHLEKPYLSCQPTLSIQHLVELIALQLSRKVEELEMYIRMDGDHGSVGSMACSIGEFDGLERLREDKLLSELHPSFASSNGDLELRYALKTRD

SEQ ID NO: 172660 - protein, 441 aa, Zea Mays
MPAQKGPLPSPTPDDSEGRVAVRHTAASGDGGRSGASHEMDGEASARQESPPHRGPRDGDPDDKEEGGCGGGDGVDTTSESSLTPSAGSMDEFMLVKLAEIRKEVQCPICLGIIRKTRTVMECLHRFCRDCIDKSMRLGNNECPSCRTHCASRRSLRDDPNYDALIAALYPDIDKYEEEELAFNEQEMTRNQKIQETIEETFRRQSQAIGKKRSIAKETGTAFARKYRRNMRTRGRGRTTTPDIAPTSSNEEDREGENVNEVTKVPSSADDHSPDLRQKRCRKTSTSQASPARNIGSSDHSFEENDELVAAKEILATSPLRGEMLAWGKNGTRSQNRHGSAGSNGRIGRSGRIAKLVDHLCNADEMDKELIALQLSRKVEELEMYIRMDGDHGSVGSMACSIGEFDGLERLREDKLLSELHPSFASSNGDLELRYALKTRD

SEQ ID NO: 172661 - protein, 290 aa, Zea Mays
MTRNQKIQETIEETFRRQSQAIGKKRSIAKETGTAFARKYRRNMRTRGRGRTTTPDIAPTSSNEEDREGENVNEVTKVPSSADDHSPDLRQKRCRKTSTSQASPARNIGSSDHSFEENDELVAAKEILATSPLRGEMLAWGKNGTRSQNRHGSAGSNGRIGRSGRIAKLVDHLCNADEMDKEFQLYLVLLPVDGQTIPHLEKPYLSCQPTLSIQHLVELIALQLSRKVEELEMYIRMDGDHGSVGSMACSIGEFDGLERLREDKLLSELHPSFASSNGDLELRYALKTRD

SEQ ID NO: 172662 - protein, 73 aa, Zea Mays
MFLINLWSWCPRADHELAHWQQDIWTIARRIERAWNRVFDGMHVSAMVTAFVEMARAVAASIRSTIVHTPYQH

SEQ ID NO: 172663 - protein, 383 aa, Zea Mays
MDEFMLVKLAEIRKEVQCPICLGIIRKTRTVMECLHRFCRDCIDKSMRLGNNECPSCRTHCASRRSLRDDPNYDALIAALYPDIDKYEEEELAFNEQEMTRNQKIQETIEETFRRQSQAIGKKRSIAKETGTAFARKYRRNMRTRGRGRTTTPDIAPTSSNEEDREGENVNEVTKVPSSADDHSPDLRQKRCRKTSTSQASPARNIGSSDHSFEENDELVAAKEILATSPLRGEMLAWGKNGTRSQNRHGSAGSNGRIGRSGRIAKLVDHLCNADEMDKEFQLYLVLLPVDGQTIPHLEKPYLSCQPTLSIQHLVELSRKVEELEMYIRMDGDHGSVGSMACSIGEFDGLERLREDKLLSELHPSFASSNGDLELRYALKTRD

SEQ ID NO: 172664 - protein, 529 aa, Zea Mays
MQTHHKTNTSRNSRAPAYFLFPPKSASLPGSRIYLATSHLSPYTTPPPPPHPPRRATPPPLPPKPQRLGRVVNHRPRALAAIREPRSQGQKARMPAQKRRLPSPSSKPRDDVAATASDAAAGGGVGEGRGGRPPLPSRDAAKRWLTDPEPQQGFEDDSDAEDDGGADGDSEFSQSDGGGNDGFMLVKLAEIRKEVQCPICLGIIRKTRTVMECLHRFCRDCIDKSMRLGNNECPSCRTHCASRRSLRDDPNYDALIAALYPDIDKYEEEELAFNEQEMTRNQKIQETIEETFRRQSQAIGKKRSIAKETGTAFARKYRRNMRTRGRDLRQKRCRKTSTSQASPARNIGSSDHSFEENDELVAAKEILATSPLRGEMLAWGKNGTRSQNRHGSAGSNGRIGRSGRIAKLVDHLCNADEMDKEFQLYLVLLPVDGQTIPHLEKPYLSCQPTLSIQHLVELIALQLSRKVEELEMYIRMDGDHGSVGSMACSIGEFDGLERLREDKLLSELHPSFASSNGDLELRYALKTRD

SEQ ID NO: 172665 - protein, 176 aa, Zea Mays
MIVNEWYLPAFATLAISGASDWLDGFLARKMGINSVFGSYLDPLADKVLIGCVAVAMVEKDLLHPGLVGLVVVRDLLLVGGAFYKRASSLGWKWNSWSEFVNLDVIHREKVEPLFISKVNTVFQLMLVAAALLQPEFGTEETQNYIALLSWLVATTTITSTIGYGVKHYRIKPRSR

SEQ ID NO: 172666 - protein, 197 aa, Zea Mays
MAFLKTLNPLIRRQATPIAIPRLLLSLHTVLDSSSPTTTAAATPFANAVHTHVPIRSGGPLFLSSAPWMLSQSATPLTAAAAALGAKLHRAQALPGGRALAVAAAVGWEHMRISRGEAEVATSSGIVGYGGERFLNAPNLVSIGRMVSGPVIGWMIVNEWYLPAFATLAISGASDWLERWASILYLDHIWTLWLTRF

SEQ ID NO: 172667 - protein, 443 aa, Zea Mays
MHPMVRAMALWIASDFGTKETKWLVRAGVGLKEAPGAEKWNDAERISFMRNNILELYERPNCPLLKTLMLQGNPGLDKICDGFFQYMPSLRVLDLSHTSISELPSGISSLVELQYLDLYNTNIRSLPRELGSLSTLRFLLLSHMPLETIPGGVICSLTMLQVLYMDLSYGDWKVGASGNGVDFQELESLRRLKALDITIQSVEALERLSRSYRLAGSTRNLLIKTCSSLTKIELPSSNLWKNMTNLKRVWIVSCGNLAEVIIDSSKEAVNSNALPRSILQARAELVDEEQPILPTLHDIILQGLYKVKIVYKGGCVQNLASLFIWYCHGLEELITVSEEQDMAASGGGGQGSAAFRVITPFPNLKELYLHGLAKFRRLSSSTCTLHFPALESLKVIECPNLKKLKLSAGGLNVIQCNREWWDGLEWDDEEVKASYEPLFRPLH

SEQ ID NO: 172668 - protein, 387 aa, Zea Mays
MLAPGGRAGWRILAVLYSRRTLRGWAAGVQFSAFSDPPIEFQFQAADGIEAAAVAAGGGRGGRRRSLPGGRPRGEHAAAGTPGRRPRRGVLQREVPAGGGPGARRDADPRRQRRDHRPGAAALHVPRLPRPGLRRVDHARLAERDCGEGRLPELRPPGLRRDRAHQGQAGGRVPADRVVRGHHRHGGPGRRVPEQRAAVRRGDRPPRRQGVGGVRRRQRPPAALLQNRRPQDLLQLQGVGLEGPRRAVSHTIGRAQCTTFASDRLYNYSGHVGQDPSLNKAYAAQLREMCEPGLADDTTMVEMDPRSPYTFDLSYYRNVRANRGLFTSDQALLDDPWTSAYVERMADAASPDEFFADYAAAITNMGRIEVLTGDNGEIRSACAAYVD

SEQ ID NO: 172669 - protein, 155 aa, Zea Mays
MEGETLEADNADVISGEVEVEKVQTHNIESRSKNLIPVFDSLHTSRFQQTRLNAPDNSRCGLLQRQKSGISEDGRLSRRSSCSSLDCMSEGPKSSDDGAFSKYVVDDNSSAVINNPSVKFHAELVNNTGSLKSEAQLGFVNSEEDGGGGEQLPDL

SEQ ID NO: 172670 - protein, 552 aa, Zea Mays
MEREYTVLTSPTVAQVSGYGPLGLGPRWIAYSGNPVPVPDTGRVSPQLLSLSPSVPPPGSNGSVVAYYAKESSKQLAAGIATLGEVGYNKLSKYYADFIPNGNGTIKQRSSVYKANGVTNGHLIDSEYAGTVIVRDIVSKLLIVQFRAHTSPISALCFDPSGTLLVTASVHGQNMNVFRIIPPHGTSEAGQIGTYVHLYKLQRGITNAIIKDISFSDDSDWIMISSSRGTSHLFSISPYCGSTRFRYSDNNPVENDYTVDSSVNHTAHWSQNSATSLSLSQKTLFVSGPPVTLSVVSRIRNGSNVFKGAVHGAAAFATGASTPISGAIASTFHNRMAGDIDSDGSLRMKYYLLVFSPSGSIIQYALHLSAEQDSGLDFRTSPISYGPERETDTKFVIEALQKWDVCYKRNRRDSAESFAYSDFENGENNKLLLKAMWKGTSIYPFDCSVERQKLSADENRNLYISQSELQTHVVQTPLWSKSRIHFQVMEGETLEADNADVISGEVEVEKVQTHNIESRSKNLIPVFDSLHTSRFQQTRYIQIVHLSTFVSG

SEQ ID NO: 172671 - protein, 832 aa, Zea Mays
MRDGAPAPRAGGGFFSARSLSNCMRIVSSGASTAASTLRSAGASLVNSMASHEEDASRDQVQWAGFDKLECGGGLLRQVLLLAYKSGFQVWDVEHADDVRQLESRHDGAVSFIQVLKDPIFTTESGDRFADTRPLLALACEGTHTGSGKNHDTNVPVFDGTNGAFHSIGGENLPTVLLFYSLRTHEYVHTLRFRSAVYSIRCSPRVVAISQATQIHCFDAATMEREYTVLTSPTVAQVSGYGPLGLGPRWIAYSGNPVPVPDTGRVSPQLLSLSPSVPPPGSNGSVVAYYAKESSKQLAAGIATLGEVGYNKLSKYYADFIPNGNGTIKQRSSVYKANGVTNGHLIDSEYAGTVIVRDIVSKLLIVQFRAHTSPISALCFDPSGTLLVTASVHGQNMNVFRIIPPHGTSEAGQIGTYVHLYKLQRGITNAIIKDISFSDDSDWIMISSSRGTSHLFSISPYCGSTRFRYSDNNPVENDYTVDSSVNHTAHWSQNSATSLSLSQKTLFVSGPPVTLSVVSRIRNGSNVFKGAVHGAAAFATGASTPISGSIIQYALHLSAEQDSGLDFRTSPISYGPERETDTKFVIEALQKWDVCYKRNRRDSAESFAYSDFENGENNKLLLKAMWKGTSIYPFDCSVERQKLSADENRNLYISQSELQTHVVQTPLWSKSRIHFQVMEGETLEADNADVISGEVEVEKVQTHNIESRSKNLIPVFDSLHTSRFQQTRLNAPDNSRCGLLQRQKSGISEDGRLSRRSSCSSLDCMSEGPKSSDDGAFSKYVVDDNSSAVINNPSVKFHAELVNNTGSLKSEAQLGFVNSEEDGGGGEQLPDL

SEQ ID NO: 172672 - protein, 520 aa, Zea Mays
MILILQWQVIVRDIVSKLLIVQFRAHTSPISALCFDPSGTLLVTASVHGQNMNVFRIIPPHGTSEAGQIGTYVHLYKLQRGITNAIIKDISFSDDSDWIMISSSRGTSHLFSISPYCGSTRFRYSDNNPVENDYTVDSSVNHTAHWSQNSATSLSLSQKTLFVSGPPVTLSVVSRIRNGSNVFKGAVHGAAAFATGASTPISGAIASTFHNRMAGDIDSDGSLRMKYYLLVFSPSGSIIQYALHLSAEQDSGLDFRTSPISYGPERETDTKFVIEALQKWDVCYKRNRRDSAESFAYSDFENGENNKLLLKAMWKGTSIYPFDCSVERQKLSADENRNLYISQSELQTHVVQTPLWSKSRIHFQVMEGETLEADNADVISGEVEVEKVQTHNIESRSKNLIPVFDSLHTSRFQQTRLNAPDNSRCGLLQRQKSGISEDGRLSRRSSCSSLDCMSEGPKSSDDGAFSKYVVDDNSSAVINNPSVKFHAELVNNTGSLKSEAQLGFVNSEEDGGGGEQLPDL

SEQ ID NO: 172673 - protein, 858 aa, Zea Mays
MRDGAPAPRAGGGFFSARSLSNCMRIVSSGASTAASTLRSAGASLVNSMASHEEDASRDQVQWAGFDKLECGGGLLRQVLLLAYKSGFQVWDVEHADDVRQLESRHDGAVSFIQVLKDPIFTTESGDRFADTRPLLALACEGTHTGSGKNHDTNVPVFDGTNGAFHSIGGENLPTVLLFYSLRTHEYVHTLRFRSAVYSIRCSPRVVAISQATQIHCFDAATMEREYTVLTSPTVAQVSGYGPLGLGPRWIAYSGNPVPVPDTGRVSPQLLSLSPSVPPPGSNGSVVAYYAKESSKQLAAGIATLGEVGYNKLSKYYADFIPNGNGTIKQRSSVYKANGVTNGHLIDSEYAGTVIVRDIVSKLLIVQFRAHTSPISALCFDPSGTLLVTASVHGQNMNVFRIIPPHGTSEAGQIGTYVHLYKLQRGITNAIIKDISFSDDSDWIMISSSRGTSHLFSISPYCGSTRFRYSDNNPVENDYTVDSSVNHTAHWSQNSATSLSLSQKTLFVSGPPVTLSVVSRIRNGSNVFKGAVHGAAAFATGASTPISGAIASTFHNRMAGDIDSDGSLRMKYYLLVFSPSGSIIQYALHLSAEQDSGLDFRTSPISYGPERETDTKFVIEALQKWDVCYKRNRRDSAESFAYSDFENGENNKLLLKAMWKGTSIYPFDCSVERQKLSADENRNLYISQSELQTHVVQTPLWSKSRIHFQVMEGETLEADNADVISGEVEVEKVQTHNIESRSKNLIPVFDSLHTSRFQQTSRCGLLQRQKSGISEDGRLSRRSSCSSLDCMSEGPKSSDDGAFSKYVVDDNSSAVINNPSVKFHAELVNNTGSLKSEAQLGFVNSEEDGGGGEQLPDL

SEQ ID NO: 172674 - protein, 469 aa, Zea Mays
MNVFRIIPPHGTSEAGQIGTYVHLYKLQRGITNAIIKDISFSDDSDWIMISSSRGTSHLFSISPYCGSTRFRYSDNNPVENDYTVDSSVNHTAHWSQNSATSLSLSQKTLFVSGPPVTLSVVSRIRNGSNVFKGAVHGAAAFATGASTPISGAIASTFHNRMAGDIDSDGSLRMKYYLLVFSPSGSIIQYALHLSAEQDSGLDFRTSPISYGPERETDTKFVIEALQKWDVCYKRNRRDSAESFAYSDFENGENNKLLLKAMWKGTSIYPFDCSVERQKLSADENRNLYISQSELQTHVVQTPLWSKSRIHFQVMEGETLEADNADVISGEVEVEKVQTHNIESRSKNLIPVFDSLHTSRFQQTRLNAPDNSRCGLLQRQKSGISEDGRLSRRSSCSSLDCMSEGPKSSDDGAFSKYVVDDNSSAVINNPSVKFHAELVNNTGSLKSEAQLGFVNSEEDGGGGEQLPDL

SEQ ID NO: 172675 - protein, 129 aa, Zea Mays
MQLNQAPPPRHHHTSSFVRVHRAPPPPHPSQAKPRWGACLRQSIKRMATVPSNTLVKVAELVSTHSSPESVYGAGHGVEADARACAHVPEEAPHGVPVLGRGRCYSWRAGLHGGVPPRCLCTRWRLGMA

SEQ ID NO: 172676 - protein, 131 aa, Zea Mays
MLRRLGRGGRRDRASRQQVWPGLAHRVPRHRHHGAQRCHRHLLRSVRRLDAVHHRGIHGLQATLLTSCSVLWASFWFCVCALHLVMSGKRGRSRTGCAWALIVISNFQVLYSVNCHLHLFIYSHGEKYICS

SEQ ID NO: 172677 - protein, 692 aa, Zea Mays
MRDATRGTHAAAEALAARRPRRAMASPLLCGCALLLYLLGHLATCHAARDTITPSSPLAANETLVSGGDGNFALGFFTPPGANSTYLGVWYNKVSLRTVVWVANREAPIAGAVGDNPGATLSVSGGGTLAIAAGNGTVVWSVRSASSRRLASPAAQILDNGNLVLKDGAGGGGAVAWEGFDYPTDTLLPEMKLGIDYVKGKNRTLTSWKSPSDPSTGPVAMVMDTTGDPQVFIWNGGEKVWRSGPWDGVQFTGVPDTATYSGFTFSFINSAQEVTYSFQVHNASIISHLGVVSSGNYGLLQRSTWVEAARAWNLYWYAPKDQCDAVSPCGANGVCDTNNMPVCSCLRGFTPRTPAAWALRDGRDGCVRSTPLDCRRNGTTSTTDGFVAVRHAKVPDTERSAVDWSLTLEQCRQACLRNCSCTAYASANVSSGGGGRGGGAGGGSGCVMWTTGLTDLRVYPDFGQDLFVRLAASDLDVLEGRSRAARIRIAVGVSVSLLALLLAVAGLLIWLRKRRLTRTAGSSKWSGSRSTGRRYEGSSHGDDLELPIFDLGTIAAATDGFSINNKLGEGGFGPVYKGKLEDGMEIAVKTLSKTSAQGLDEFKNEVLLIAKLQHRNLVRLLGCSISGQERMLVYEYMANKSLDFFLFEKDTVVLDWQVRYRIIEGITRGLLYLHQDSRLWHGKNIWQRRDGN

SEQ ID NO: 172678 - protein, 830 aa, Zea Mays
MRDATRGTHAAAEALAARRPRRAMASPLLCGCALLLYLLGHLATCHAARDTITPSSPLAANETLVSGGDGNFALGFFTPPGANSTYLGVWYNKVSLRTVVWVANREAPIAGAVGDNPGATLSVSGGGTLAIAAGNGTVVWSVRSASSRRLASPAAQILDNGNLVLKDGAGGGGAVAWEGFDYPTDTLLPEMKLGIDYVKGKNRTLTSWKSPSDPSTGPVAMVMDTTGDPQVFIWNGGEKVWRSGPWDGVQFTGVPDTATYSGFTFSFINSAQEVTYSFQVHNASIISHLGVVSSGNYGLLQRSTWVEAARAWNLYWYAPKDQCDAVSPCGANGVCDTNNMPVCSCLRGFTPRTPAAWALRDGRDGCVRSTPLDCRRNGTTSTTDGFVAVRHAKVPDTERSAVDWSLTLEQCRQACLRNCSCTAYASANVSSGGGGRGGGAGGGSGCVMWTTGLTDLRVYPDFGQDLFVRLAASDLDVLEGRSRAARIRIAVGVSVSLLALLLAVAGLLIWLRKRRLTRTAGSSKWSGSRSTGRRYEGSSHGDDLELPIFDLGTIAAATDGFSINNKLGEGGFGPVYKGKLEDGMEIAVKTLSKTSAQGLDEFKNEVLLIAKLQHRNLVRLLGCSISGQERMLVYEYMANKSLDFFLFEKDTVVLDWQVRYRIIEGITRGLLYLHQDSRYRIIHRDLKAANVLLDKEMTPKISDFGMARIFGNEETEINTLKVVGTYGYMSPEYAMDGIFSVKSDVFSYGVLLLEIVSGRRNRGVYSSSNNQSLLGHAWSLWNEEKSIELADERMNGQFNSDEVQKCVRVGLLCVQENPDDRPLMSQLGEF

SEQ ID NO: 172679 - protein, 121 aa, Zea Mays
MSSRSTAQMTQPRSTPPLTFAAAYARQLQLLRHACLHCSSVRPAYTVALVASGSFIWSTTQNPSLLALAPPPQPRLVLLTQPADPSRRFHCCGDRGSNPGRQKQAGDWPVPSQYPNGPHLA

SEQ ID NO: 172680 - protein, 173 aa, Zea Mays
MVRVPLCSVFQLVNQIGVFFLPDHTAPLLPSPRHHQPALIPVPPGSQLLALNMLPTHSRCGVCPPNPCIALCRFRLIIGDGVVVPAAAHEVGSSSNLAQFRNSGGSFPGRLGCCGPANVGGVEGDLHRWRALHAHPPSPIPAASSDADSAAETTLEYCISLFIFCFDLGLNLP

SEQ ID NO: 172681 - protein, 313 aa, Zea Mays
MNIDSWHIVMRMESPKDSPCDPIAPPDLPHSLHAFRRMPKTDPQDMEYSYTYRGGFWNYFSMGMDAQVSYAFHSQRKLHPEKFKNQLSNQKTYLKLACTQGWFCASLFHPMSRNIACLAKVKIMKKSGKWETMEIPQSIRSIVCLNLPSFSGGLNPWGTPSKRKQRKRDLVMPPLVDDGLLEVVGFKDAWHGLVLLSPKGHGTRLAQAHRVRFEFLRGATDHAYMRMDGEPWKQPLPTDDGKVVVEISHAGQVKMLATKDCIAKGVHDHESCPAISTVHPESIYNDMNDDFEEERRNFGAALSFRYLSDVNKQ

SEQ ID NO: 172682 - protein, 203 aa, Zea Mays
MSRNIACLAKVKIMKKSGKWETMEIPQSIRSIVCLNLPSFSGGLNPWGTPSKRKQRKRDLVMPPLVDDGLLEVVGFKDAWHGLVLLSPKGHGTRLAQAHRVRFEFLRGATDHAYMRMDGEPWKQPLPTDDGKVVVEISHAGQVKMLATKDCIAKGVHDHESCPAISTVHPESIYNDMNDDFEEERRNFGAALSFRYLSDVNKQ

SEQ ID NO: 172683 - protein, 304 aa, Zea Mays
MRMESPKDSPCDPIAPPDLPHSLHAFRRMPKTDPQDMEYSYTYRGGFWNYFSMGMDAQVSYAFHSQRKLHPEKFKNQLSNQKTYLKLACTQGWFCASLFHPMSRNIACLAKVKIMKKSGKWETMEIPQSIRSIVCLNLPSFSGGLNPWGTPSKRKQRKRDLVMPPLVDDGLLEVVGFKDAWHGLVLLSPKGHGTRLAQAHRVRFEFLRGATDHAYMRMDGEPWKQPLPTDDGKVVVEISHAGQVKMLATKDCIAKGVHDHESCPAISTVHPESIYNDMNDDFEEERRNFGAALSFRYLSDVNKQ

SEQ ID NO: 172684 - protein, 76 aa, Zea Mays
MYELILYLNFYVKSEKTFQRSFKRLNVKKLVHNVLRFYRFNNHDEHQSCFLVLHSRFVSWSHWSTLLNELHKTRVS

SEQ ID NO: 172685 - protein, 105 aa, Zea Mays
MLHGIGGEVDCADVVAVDEGGALEGTVELVEELSQPGGLCHAVGHGAVLGLSTGARDDGLPLGGPGDEVGAQEHGVTGSGSARVWTTSPVGVGVDHEVRRRGWSK

SEQ ID NO: 172686 - protein, 66 aa, Zea Mays
MYIGINRCVLCRRCAALLPAWIGASVGGCRDESGRAAAEECSCRACRFVDECGDELLGVGAHPSFV

SEQ ID NO: 172687 - protein, 506 aa, Zea Mays
MSSNTAETVKRSRELMDSGVDPMALMSQLAGLIMDIIAGTYRLADPTCGGDGIGGRNITDAELERLQQALRILSDAEKQIRLSSERSTWFTAALLQLGSGHNSEITQSRSSSKQSAKATSETMMEAMRESSASRSTAHHLSTFPDSKKIVDLKTTSGHSSPHASLSSRMRHNENMIYAEHMSVDRALLDSAQTSISSEQKGMHSGISDNLTRIWMKCIENCHSKTLRQLLYDHGKLTSVKECEGTIVAFIAFEDNDIKFRAQRFISSIRNSMETVLKCNVEVRICLMQEFLAGGLKHETYPDETAESDVLSCSTNSERRKGVLNLSGAGGVQPNNVPMIISEETSGMHRTRGQDVSIEQLKVSAFDEQRLESAWLQAAEKPMPGMLNQGRPERNQILPQNGGQHHGRSSMATVVPSRHVDKDLSNELKALKISDSHGPHNGQDVQMESGYAISPSLLHRNNHLANCDNESVVSESGAPGCHGLFPCWKTEKTKRRKGKGQTRLRSS

SEQ ID NO: 172688 - protein, 303 aa, Zea Mays
MKEAMAVAALDEIWWREPEEEAPVEWTWSWGAGTDGQLGNGGFDDHHLPQPLLLPTRCRSRVSFVAGGGAHAIALTNNSVYGFGSARRGQVGKCASRIQKSYNVPRLIDGFPNCKIVNIYANGDHSAALDESGHLYVWGRALIGQHDDDQPSEILPSLSVSQVALGWHHALVLSAGELYTLGVYRHQKCDLPGLGNVLGQQSDTRATSSSHDCSSSLSVLETVPFLDGEQVAQIASGTEHSALVTDKGTVFTWGWGEHGQLGLGDTSDHVAPQRVNVGDNGQGMSGSFAVYCGSGFTVAVKSP

SEQ ID NO: 172689 - protein, 908 aa, Zea Mays
MSKKQTFSFESYSFRGKQRGDSEGMARRKDGWGDGDKIKIGVCVMEKKVSCSPMEQILERLRAFGEFEIIIFGDKVILEDPIESWPICDCLIAFYSSGYPLEKAEKYAALRRPFLVNELAPQYLLHDRSKVYQQLKLYGVPVPTYAVVRREYPNQELSYFLEEDDFIEIHGKRFCKPFVEKPIDGDDHNIMIYYPSSAGGGMKELFRKVGNRSSEFYPYVRKVRRDGSYIYEEFMPTGGTDVKVYTVGPVYAHAEARKSPVVDGVVTRNSDGKEVRYPVLLTPSEKQIARSICQAFRQAVCGFDLLRCDMGEATSYVCDVNGWSFVKSSYKYYDDAACILRKIFLDEKAPHIPSTIPTNLPWKISEPAQASDTARCRERVTVGLSRPSEELRCVIAVIRHGDRTPKQKVKLKVTEEKLLKLMLKYNGGKAHAEAKLKSALQLQDLLDATRILVPRARSGRESDSDIEVEHAEKLRQVRAVLEEGGHFSGIYRKVQLKPSNWVRVPKDNREGEEYPVEALMVLKYGGVLTHAGRKQAEELGRYFRNNMYPSEGPGLLRLHSTYRHDLKIYSSDEGRVQMSAAAFAKGLLDLEGELTPILVSLVSKDSSMLDGLQDGTIDINEAKAQLHDIITSSEVAHYNEPMEFPWMVDGARVPKNAAQLLTDLAELTKEITAQVKMLSDDEDEKAAIGSDSPNPPYDIAKALGKAEIDTDRLLAGLPCGSESFLLMFARWKKLERDLYNERKKRFDTTQIPDIYDSCKYDLLHNSHLNLTGLSDLFEVSQLLADSVIPNEYGINPKQKLKIGSKIARRLLGKILIDLHNTRREVAAAAAESDIYNDIMTVSSAKRKERSYYEEVKHECVERSISNKKGIDLDDSHEETKYCLDPKYANVVEPERRVRTRLYFTSMNL

SEQ ID NO: 172690 - protein, 1076 aa, Zea Mays
MSKKQTFSFESYSFRGKQRGDSEGMARRKDGWGDGDKIKIGVCVMEKKVSCSPMEQILERLRAFGEFEIIIFGDKVILEDPIESWPICDCLIAFYSSGYPLEKAEKYAALRRPFLVNELAPQYLLHDRSKVYQQLKLYGVPVPTYAVVRREYPNQELSYFLEEDDFIEIHGKRFCKPFVEKPIDGDDHNIMIYYPSSAGGGMKELFRKVGNRSSEFYPYVRKVRRDGSYIYEEFMPTGGTDVKVYTVGPVYAHAEARKSPVVDGVVTRNSDGKEVRYPVLLTPSEKQIARSICQAFRQAVCGFDLLRCDMGEATSYVCDVNGWSFVKSSYKYYDDAACILRKIFLDEKAPHIPSTIPTNLPWKISEPAQASDTARCRERVTVGLSRPSEELRCVIAVIRHGDRTPKQKVKLKVTEEKLLKLMLKYNGGKAHAEAKLKSALQLQDLLDATRILVPRARSGRESDSDIEVEHAEKLRQVRAVLEEGGHFSGIYRKVQLKPSNWVRVPKDNREGEEYPVEALMVLKYGGVLTHAGRKQAEELGRYFRNNMYPSEGPGLLRLHSTYRHDLKIYSSDEGRVQMSAAAFAKGLLDLEGELTPILVSLVSKDSSMLDGLQDGTIDINEAKAQLHDIITSSEVAHYNEPMEFPWMVDGARVPKNAAQLLTDLAELTKEITAQVKMLSDDEDEKAAIGSDSPNPPYDIAKALGKAEIDTDRLLAGLPCGSESFLLMFARWKKLERDLYNERKKRFDTTQIPDIYDSCKYDLLHNSHLNLTGLSDLFEVSQLLADSVIPNEYGINPKQKLKIGSKIARRLLGKILIDLHNTRREVAAAAAESDIYNDIMTVSSAKRKERSYYEEVKHECVERSISNKKGIDLDDSHEETKYCLDPKYANVVEPERRVRTRLYFTSESHIHSLMNVLRYCNLDESLNGEESLVCRSSLDLLFKTRELDYMSYIVLRMFENTEVPLEDPKRFRIEMTFSRGADISSLEGGGKESLLPDDHTMPIMEPERLQEVGSYITLDKFDKMARPFAMPAEDFPPAAPQPLPVRFCKDIELRGKLQHKSDMMSGVLKRKTKRLQE

SEQ ID NO: 172691 - protein, 836 aa, Zea Mays
MSKKQTFSFESYSFRGKQRGDSEGMARRKDGWGDGDKIKIGVCVMEKKVSCSPMEQILERLRAFGEFEIIIFGDKVILEDPIESWPICDCLIAFYSSGYPLEKAEKYAALRRPFLVNELAPQYLLHDRSKVYQQLKLYGVPVPTYAVVRREYPNQELSYFLEEDDFIEIHGKRFCKPFVEKPIDGDDHNIMIYYPSSAGGGMKELFRKVGNRSSEFYPYVRKVRRDGSYIYEEFMPTGGTDVKVYTVGPVYAHAEARKSPVVDGVVTRNSDGKEVRYPVLLTPSEKQIARSICQAFRQAVCGFDLLRCDMGEATSYVCDVNGWSFVKSSYKYYDDAACILRKIFLDEKAPHIPSTIPTNLPWKISEPAQASDTARCRERVTVGLSRPSEELRCVIAVIRHGDRTPKQKVKLKVTEEKLLKLMLKYNGGKAHAEAKLKSALQLQDLLDATRILVPRARSGRESDSDIEVEHAEKLRQVRAVLEEGGHFSGIYRKVQLKPSNWVRVPKDNREGEEYPVEALMVLKYGGVLTHAGRKQAEELGRYFRNNMYPSEGPGLLRLHSTYRHDLKIYSSDEGRVQMSAAAFAKGLLDLEGELTPILVSLVSKDSSMLDGLQDGTIDINEAKAQLHDIITSSEVAHYNEPMEFPWMVDGARVPKNAAQLLTDLAELTKEITAQVKMLSDDEDEKAAIGSDSPNPPYDIAKALGKAEIDTDRLLAGLPCGSESFLLMFARWKKLERDLYNERKKRFDTTQIPDIYDSCKYDLLHNSHLNLTGLSDLFEVSQLLADSVIPNEYGINPKQKLKIGSKCHLQNGRRGVTMRRLSMNVLKDLSLTRRALI

SEQ ID NO: 172692 - protein, 431 aa, Zea Mays
MARRKDGWGDGDKIKIGVCVMEKKVSCSPMEQILERLRAFGEFEIIIFGDKVILEDPIESWPICDCLIAFYSSGYPLEKAEKYAALRRPFLVNELAPQYLLHDRSKVYQQLKLYGVPVPTYAVVRREYPNQELSYFLEEDDFIEIHGKRFCKPFVEKPIDGDDHNIMIYYPSSAGGGMKELFRKVYTVGPVYAHAEARKSPVVDGVVTRNSDGKEVRYPVLLTPSEKQIARSICQAFRQAVCGFDLLRCDMGEATSYVCDVNGWSFVKSSYKYYDDAACILRKIFLDEKAPHIPSTIPTNLPWKISEPAQASDTARCRERVTVGLSRPSEELRCVIAVIRHGDRTPKQKVKLKVTEEKLLKLMLKYNGGKAHAEAKLKSALQLQDLLDATRILVPRARSGRESDSDIEVEHAEKLRQVRAVLEEVFVQICP

SEQ ID NO: 172693 - protein, 851 aa, Zea Mays
MIYYPSSAGGGMKELFRKVYTVGPVYAHAEARKSPVVDGVVTRNSDGKEVRYPVLLTPSEKQIARSICQAFRQAVCGFDLLRCDMGEATSYVCDVNGWSFVKSSYKYYDDAACILRKIFLDEKAPHIPSTIPTNLPWKISEPAQASDTARCRERVTVGLSRPSEELRCVIAVIRHGDRTPKQKVKLKVTEEKLLKLMLKYNGGKAHAEAKLKSALQLQDLLDATRILVPRARSGRESDSDIEVEHAEKLRQVRAVLEEGGHFSGIYRKVQLKPSNWVRVPKDNREGEEYPVEALMVLKYGGVLTHAGRKQAEELGRYFRNNMYPSEGPGLLRLHSTYRHDLKIYSSDEGRVQMSAAAFAKGLLDLEGELTPILVSLVSKDSSMLDGLQDGTIDINEAKAQLHDIITSSEVAHYNEPMEFPWMVDGARVPKNAAQLLTDLAELTKEITAQVKMLSDDEDEKAAIGSDSPNPPYDIAKALGKAEIDTDRLLAGLPCGSESFLLMFARWKKLERDLYNERKKRFDTTQIPDIYDSCKYDLLHNSHLNLTGLSDLFEVSQLLADSVIPNEYGINPKQKLKIGSKIARRLLGKILIDLHNTRREVAAAAAESDIYNDIMTVSSAKRKERSYYEEVKHECVERSISNKKGIDLDDSHEETKYCLDPKYANVVEPERRVRTRLYFTSESHIHSLMNVLRYCNLDESLNGEESLVCRSSLDLLFKTRELDYMSYIVLRMFENTEVPLEDPKRFRIEMTFSRGADISSLEGGGKESLLPDDHTMPIMEPERLQEVGSYITLDKFDKMARPFAMPAEDFPPAAPQPLPVRFCKDIELRGKLQHKSDMMSGVLKRKTKRLQE

SEQ ID NO: 172694 - protein, 468 aa, Zea Mays
MMIYKTTSHAAVQVCGFDLLRCDMGEATSYVCDVNGWSFVKSSYKYYDDAACILRKIFLDEKAPHIPSTIPTNLPWKISEPAQASDTARCRERVTVGLSRPSEELRCVIAVIRHGDRTPKQKVKLKVTEEKLLKLMLKYNGGKAHAEAKLKSALQLQDLLDATRILVPRARSGRESDSDIEVEHAEKLRQVRAVLEEGGHFSGIYRKVQLKPSNWVRVPKDNREGEEYPVEALMVLKYGGVLTHAGRKQAEELGRYFRNNMYPSEGPGLLRLHSTYRHDLKIYSSDEGRVQMSAAAFAKGLLDLEGELTPILVSLVSKDSSMLDGLQDGTIDINEAKAQLHDIITSSEVAHYNEPMEFPWMVDGARVPKNAAQLLTDLAELTKEITAQVKMLSDDEDEKAAIGSDSPNPPYDIAKALGKAEIDTDRLLAGLPCGSESFLLMFARWKKLERDLYNERKKRFDTTQIPDV

SEQ ID NO: 172695 - protein, 711 aa, Zea Mays
MGEATSYVCDVNGWSFVKSSYKYYDDAACILRKIFLDEKAPHIPSTIPTNLPWKISEPAQASDTARCRERVTVGLSRPSEELRCVIAVIRHGDRTPKQKVKLKVTEEKLLKLMLKYNGGKAHAEAKLKSALQLQDLLDATRILVPRARSGRESDSDIEVEHAEKLRQVRAVLEEGGHFSGIYRKVQLKPSNWVRVPKDNREGEEYPVEALMVLKYGGVLTHAGRKQAEELGRYFRNNMYPSEGPGLLRLHSTYRHDLKIYSSDEGRVQMSAAAFAKGLLDLEGELTPILVSLVSKDSSMLDGLQDGTIDINEAKAQLHDIITSSEVAHYNEPMEFPWMVDGARVPKNAAQLLTDLAELTKEITAQVKMLSDDEDEKAAIGSDSPNPPYDIAKALGKAEIDTDRLLAGLPCGSESFLLMFARWKKLERDLYNERKKRFDTTQIPDIYDSCKYDLLHNSHLNLTGLSDLFEVSQLLADSVIPNEYGINPKQKLKIGSKIARRLLGKILIDLHNTRREVAAAAAESDIYNDIMTVSSAKRKERSYYEEVKHECVERSISNKKGIDLDDSHEETKYCLDPKYANVVEPERRVRTRLYFTSVPLEDPKRFRIEMTFSRGADISSLEGGGKESLLPDDHTMPIMEPERLQEVGSYITLDKFDKMARPFAMPAEDFPPAAPQPLPVRFCKDIELRGKLQHKSDMMSGVLKRKTKRLQE

SEQ ID NO: 172696 - protein, 279 aa, Zea Mays
MLDGLQDGTIDINEAKAQLHDIITSSEVAHYNEPMEFPWMVDGARVPKNAAQLLTDLAELTKEITAQVKMLSDDEDEKAAIGSDSPNPPYDIAKALGKAEIDTDRLLAGLPCGSESFLLMFARWKKLERDLYNERKKRFDTTQIPDIYDSCKYDLLHNSHLNLTGLSDLFEVSQLLADSVIPNEYGINPKQKLKIGSKIARRLLGKILIDLHNTRREVAAAAAESDIYNDIMTVSSAKRKERSYYEEVKHECVERSISNKKGIDLDDSHEETKYCLDPK

SEQ ID NO: 172697 - protein, 865 aa, Zea Mays
MQMSPPRFVDFSLPSSNRDFCFPRSPRLLLPRKPTKIISPFLSFVENSQKSLQVPGGEGRERERERERVECERGEGAAAAAATMGIQGLLPQLKSIMAPISAVELRGQTVAVDTYSWLHKGALSCGDRLCKGIPTTRHIEYCMHRVNMLRHFGVRPILVFDGGLLPIKSYQEGKRARSRKENLERAREHEAAGNSRAAFECYQKAVDITPRIASELIEVLKKENVNYIVAPYEADAQMTFLSVNKLVDAVITEDSDLIPFGCSRIIFKMDKFGQGVEFQITRLEQNRELDFNGFTRQMLLEMCILSGCDYLPSLPGMGVKRAHALIQKLKCHEKVIKHLRYGAVSVPPQYEEDFKKAIWAFKFQRVYDPATEDIIHLSSVPQSLIEDLEFLGPWLPQNIAKGIALGNIDPLTKEPFEINPECSAPSVHKVCPTREPIAPSNGRKKLDLPVQKNILTNYFCLASLEAKRKFRAPKVTHKQQILNEALPSPQAQGSATSDSVEDTRLPTDRIQASQCSSEHLSSEPPQNDPISVGSQCSSERFSCEYPLDDSANISQCSSLDGGSDPPYKDTGNKDRKVEAGYDNKNRIPTSPCIMGNLPWTSEPFLVPHNVGPSIPVQHYTESTVASNNNGITVSSYFKTANKRICTDQGDQLDDDYDVSTGNLCGDQLRKSGMLKRRKLSGIQKFEDETLQPIHSDDSPPFVDEETSAGQDTDDPDDTNIRTEGRFGCNVSHVNTYSGIAEKSMDKFAALISSFRYPGPRASGLRAPLKDVKNTLSVRSILKAPEKDTFRRTAKKTGLGPPSKSRYTSDDKGSAASPPDISAFAYRPMKTVASDQGKTTVGRLNGSRFRETAPKATGGTSRSQFK

SEQ ID NO: 172698 - protein, 332 aa, Zea Mays
MGIQGLLPQLKSIMAPISAVELRGQTVAVDTYSWLHKGALSCGDRLCKGIPTTRHIEYCMHRVNMLRHFGVRPILVFDGGLLPIKSYQEGKRARSRKENLERAREHEAAGNSRAAFECYQKAVDITPRIASELIEVLKKENVNYIVAPYEADAQMTFLSVNKLVDAVITEDSDLIPFGCSRIIFKMDKFGQGVEFQITRLEQNRELDFNGFTRQMLLEMCILSGCDYLPSLPGMGVKRAHALIQKLKCHEKVIKHLRYGAVSVPPQYEEDFKKAIWAFKFQRVYDPATEDIIHLSSVPQSLIEDLEFLGPYPLLSLCLDVKALSYEVIHCSR

SEQ ID NO: 172699 - protein, 778 aa, Zea Mays
MGIQGLLPQLKSIMAPISAVELRGQTVAVDTYSWLHKGALSCGDRLCKGIPTTRHIEYCMHRVNMLRHFGVRPILVFDGGLLPIKSYQEGKRARSRKENLERAREHEAAGNSRAAFECYQKAVDITPRIASELIEVLKKENVNYIVAPYEADAQMTFLSVNKLVDAVITEDSDLIPFGCSRIIFKMDKFGQGVEFQITRLEQNRELDFNGFTRQMLLEMCILSGCDYLPSLPGMGVKRAHALIQKLKCHEKVIKHLRYGAVSVPPQYEEDFKKAIWAFKFQRVYDPATEDIIHLSSVPQSLIEDLEFLGPWLPQNIAKGIALGNIDPLTKEPFEINPECSAPSVHKVCPTREPIAPSNGRKKLDLPVQKNILTNYFCLASLEAKRKFRAPKVTHKQQILNEALPSPQAQGSATSDSVEDTRLPTDRIQASQCSSEHLSSEPPQNDPISVGSQCSSERFSCEYPLDDSANISQCSSLDGGSDPPYKDTGNKDRKVEAGYDNKNRIPTSPCIMGNLPWTSEPFLVPHNVGPSIPVQHYTESTVASNNNGITVSSYFKTANKRICTDQGDQLDDDYDVSTGNLCGDQLRKSGMLKRRKLSGIQKFEDPIHSDDSPPFVDEETSAGQDTDDPDDTNIRTEGRFGCNVSHVNTYSGIAEKSMDKFAALISSFRYPGPRASGLRAPLKDVKNTLSVRSILKAPEKDTFRRTAKKTGLGPPSKSRYTSDDKGSAASPPDISAFAYRPMKTVASDQGKTTVGRLNGSRFRETAPKATGGTSRSQFK

SEQ ID NO: 172700 - protein, 780 aa, Zea Mays
MGIQGLLPQLKSIMAPISAVELRGQTVAVDTYSWLHKGALSCGDRLCKGIPTTRHIEYCMHRVNMLRHFGVRPILVFDGGLLPIKSYQEGKRARSRKENLERAREHEAAGNSRAAFECYQKAVDITPRIASELIEVLKKENVNYIVAPYEADAQMTFLSVNKLVDAVITEDSDLIPFGCSRIIFKMDKFGQGVEFQITRLEQNRELDFNGFTRQMLLEMCILSGCDYLPSLPGMGVKRAHALIQKLKCHEKVIKHLRYGAVSVPPQYEEDFKKAIWAFKFQRVYDPATEDIIHLSSVPQSLIEDLEFLGPWLPQNIAKGIALGNIDPLTKEPFEINPECSAPSVHKVCPTREPIAPSNGRKKLDLPVQKNILTNYFCLASLEAKRKFRAPKVTHKQQILNEALPSPQAQGSATSDSVEDTRLPTDRIQASQCSSEHLSSEPPQNDPISVGSQCSSERFSCEYPLDDSANISQCSSLDGGSDPPYKDTGNKDRKVEAGYDNKNRIPTSPCIMGNLPWTSEPFLVPHNVGPSIPVQHYTESTVASNNNGITVSSYFKTANKRICTDQGDQLDDDYDVSTGNLCGDQLRKSGMLKRRKLSGIQKFEDETLQPIHSDDSPPFVDEGQDTDDPDDTNIRTEGRFGCNVSHVNTYSGIAEKSMDKFAALISSFRYPGPRASGLRAPLKDVKNTLSVRSILKAPEKDTFRRTAKKTGLGPPSKSRYTSDDKGSAASPPDISAFAYRPMKTVASDQGKTTAAVGRLNGSRFRETAPKATGGTSRSQFK

SEQ ID NO: 172701 - protein, 774 aa, Zea Mays
MRHIEYCMHRVNMLRHFGVRPILVFDGGLLPIKSYQEGKRARSRKENLERAREHEAAGNSRAAFECYQKAVDITPRIASELIEVLKKENVNYIVAPYEADAQMTFLSVNKLVDAVITEDSDLIPFGCSRIIFKMDKFGQGVEFQITRLEQNRELDFNGFTRQMLLEMCILSGCDYLPSLPGMGVKRAHALIQKLKCHEKVIKHLRYGAVSVPPQYEEDFKKAIWAFKFQRVYDPATEDIIHLSSVPQSLIEDLEFLGPWLPQNIAKGIALGNIDPLTKEPFEINPECSAPSVHKVCPTREPIAPSNGRKKLDLPVQKNILTNYFCLASLEAKRKFRAPKVTHKQQILNEALPSPQAQGSATSDSVEDTRLPTDRIQASQCSSEHLSSEPPQNDPISVGSQCSSERFSCEYPLDDSANISQCSSLDGGSDPPYKDTGNKDRKVEAGYDNKNRIPTSPCIMGNLPWTSEPFLVPHNVGPSIPVQHYTESTVASNNNGITVSSYFKTANKRICTDQGDQLDDDYDVSTGNLCGDQLRKSGMLKRRKLSGIQKFEDETLQPIHSDDSPPFVDEGQDTDDPDDTNIRTEGRFGCNVSHVNTYSGIAEKSMDKFAALISSFRYPGPRASGLRAPLKDVKNTLSVRSILKAPEKDTFRRTAKKTGLGPPSKSRYTSDDKGSAASPPDISAFAYRPMKTVASDQGKTTGKTTDTIDGPPDLGLLAYTSTVCCPERSKHAGNPPDLSTFAYKPVKAAVGRLNGSRFRETAPKATGGTSRSQFK

SEQ ID NO: 172702 - protein, 386 aa, Zea Mays
MGRHGVDQIGAVAAFVWVTLLPLLLVCVVWPGAQAGHTSEYRRQLGSAIDMPLDADVFRPPPGYNAPEQVHITQGNHDGTAMIISWVTTSEPGSSTVIYGTSEDNLNYTANGKHTQYTFYNYTSGYIHHCTIKKLEFDTKYYYAVGIGQTVRKFWFLTPPKSGPDVPYTLGLIGDLGQSFDSNVTLTHYESNAKAQAVLFVGDLSYADNYPYHDNVRWDTWARFVERSVAYQPWIWTAGNHEIDFAPELGETKPFKPFSHRYPTPYKASGSTAPYWYSIKRASAYIIVLASYSAYGKYTPQYKWLEAEFPKVNRSETPWLVVLMHAPWYNSYNYHYMEGETMRVMYEPWFVKYKVDVVFAGHVHAYERTDIECRIQCCEWPVHSNP

SEQ ID NO: 172703 - protein, 152 aa, Zea Mays
MHAPWYNSYNYHYMEGETMRVMYEPWFVKYKVDVVFAGHVHAYERTHRISNVAYNVVNGLCTPIPDQSAPVYITIGDGGNQEGLATNMSQPQPSYSAFREASFGHAILDIKNRTHAYYTWHRNQDGSAVAADSMWFTNRYWEPTDDSADDFQ

SEQ ID NO: 172704 - protein, 333 aa, Zea Mays
MAAADSATASSSSPPECPAAPSIPTDPDFLSCVLQPPTSSSSRLLLRRKPPSALQHRMEWRCNDNGYVAYRNFLLRRIDGGSAQSTPSNSGRWAPSPVHAILSEADSWNYMRDLRSNSGVLNQAISIGSKQSDTERHVRFAEPAYSFVGVHCIFDNCKASVTILKFGRANSDLLAYGAADGSLMVCQVSEPPSVLQKMIGHSKNITDFDFSSNNQYIASCSLDKTVRVWEISKGTCIRVVYGVSSQLCICFHPVNNNLLLVGNANKEINAINFSTGRVISKLNFDDAVTALDIDHTGQFIFAGDAQGHYLELTRTKVVRANLLLQPSSIGPSL

SEQ ID NO: 172705 - protein, 219 aa, Zea Mays
MAAADSATASSSSPPECPAAPSIPTDPDFLSCVLQPPTSSSSRLLLRRKPPSALQHRMAFLGQEWRCNDNGYVAYRNFLLRRIDGGSAQSTPSNSGRWAPSPVHAILSEADSWNYMRDLRSNSGVLNQAISIGSKQSDTERHVRFAEPAYSFVGVHCIFDNCKASVTILKFGRANSDLLAYGAADGSLMVCQVSEPPSVLQKMIGHSKNITVHSFMLSG

SEQ ID NO: 172706 - protein, 275 aa, Zea Mays
MNPTHWCSWEAFLGQEWRCNDNGYVAYRNFLLRRIDGGSAQSTPSNSGRWAPSPVHAILSEADSWNYMRDLRSNSGVLNQAISIGSKQSDTERHVRFAEPAYSFVGVHCIFDNCKASVTILKFGRANSDLLAYGAADGSLMVCQVSEPPSVLQKMIGHSKNITDFDFSSNNQYIASCSLDKTVRVWEISKGTCIRVVYGVSSQLCICFHPVNNNLLLVGNANKEINVNFFALCSFIPKNYILLFCLICCLCLLSNILESITEENKLSVFCYFFCY

SEQ ID NO: 172707 - protein, 272 aa, Zea Mays
MNPTHWCSWEAFLGQEWRCNDNGYVAYRNFLLRRIDGGSAQSTPSNSGRWAPSPVHAILSEADSWNYMRDLRSNSGVLNQAISIGSKQSDTERHVRFAEPAYSFVGVHCIFDNCKASVTILKFGRANSDLLAYGAADGSLMVCQVSEPPSVLQKMIGHSKNITDFDFSSNNQYIASCSLDKTVRVWEISKGTCIRVVYGVSSQLCICFHPVNNNLLLVGNANKEINAINFSTGRVISKLNFDDAVTALDIDHTGQFIFAGDAQCELTYRVII

SEQ ID NO: 172708 - protein, 544 aa, Zea Mays
MTRCLMFTLLFLVSSLISTVGLPVEPPAELLQLGGGDVGGGRLSVDASDIAEASRDFGGVARAEPMAVFHPRAAGDVAGLVGAAFRSARGFRVSARGHGHSISGQAQAAGGVVVDMSRGRGPGAAVARALPVHSAALGGHYVDVWGGELWVDVLNWTLSHGGLAPRSWTDYLYLSVGGTLSNAGISGQAFHHGPQISNVYELDVVTGKGEVVTCSETENPDLFFGVLGGLGQFGIITRARIALERAPKRVRWIRALYSNFSEFTADQERLISLGSGGGRRFDYVEGFVVAAEGLINNWRSSFFSPQNPVKLTSLKHHSSVLYCLEVTKNYDDETAGSVDQVGRGYAAGRAELPPWHGVHYGPAVRGLPGPRAQGGAEAARQGDVGGAAPVAQPLRAGVPHRRLRPRRLPWRAGGPHRRRRRPRPHLPHEQAQVGPEELGGDPGRGGVLPGGVPAVGAAGRAGEPGGAGAAEPADPRLLRGRGHRRQAVPAGPQGAARVGGALRRREVGPVREAQGRVRPAGHPGGGAGHLQAARLAGARGRLVT

SEQ ID NO: 172709 - protein, 305 aa, Zea Mays
MASPTHTYASSGQVRWIRALYSNFSEFTADQERLISLGSGGGRRFDYVEGFVVAAEGLINNWRSSFFSPQNPVKLTSLKHHSSVLYCLEVTKNYDDETAGSVDQDVDTLLGELNFLPGTVFTTDLPYVDFLDRVHKAELKLRAKGMWEVPHPWLNLFVPASRIADFDRGVFRGVLGGRTAGAGGPVLIYPMNKHKWDPRSSAVTPDEEVFYLVAFLRSALPGAPESLEALARQNQRILDFCAGAGIGAKQYLPGHKARHEWAEHFGAARWDRFARLKAEFDPRAILAAGQGIFRPPGSPALAADS

SEQ ID NO: 172710 - protein, 397 aa, Zea Mays
MAGTIIMDDSAASTSGLGDHNVSADSLSEWRSCEHVDNGIPSTSPPFWDTDSEDDDPGPRPSDLFGRYTWKIENFSKEKKREMKSEPFEAGGYKWYILVYPQGCDVSNHLSLFLCVANHEELLPGWGHFAQFTIAVGNLDPKKVKYSDTLHKFWKKEHDWGWKKFMELSKIQDGFLVDDVLEIIAQVQVIREKADRPFRCLDRPYRRELLRVYMTNIEQIYRRFVEERRRKLIRLIEDKMRWSSFRAFWLAIDPTTKHRMSREKSDIILKMVVKNFFVEKDVTSTLVMDALYTGLKALEACSNGKKGMVTSIDLEELSASMVHVDMDMFVLAGDFITLIERAALEPLSCQSLSPKGDKCSQTRAKYLTYLLCLPDSLDYVAHIWNWFTWYIEHPLQM

SEQ ID NO: 172711 - protein, 191 aa, Zea Mays
MAGTIIMDDSAASTSGLGDHNVSADSLSEWRSCEHVDNGIPSTSPPFWDTDSEDDDPGPRPSDLFGRYTWKIENFSKEKKREMKSEPFEAGGYKWYILVYPQGCDVSNHLSLFLCVANHEELLPGWGHFAQFTIAVGNLDPKKVKYSDTLHKFWKKEHDWGWKKFMELSKIQDGFLVDDVLEIIAQVQVIR

SEQ ID NO: 172712 - protein, 315 aa, Zea Mays
MKSEPFEAGGYKWYILVYPQGCDVSNHLSLFLCVANHEELLPGWGHFAQFTIAVGNLDPKKVKYSDTLHKFWKKEHDWGWKKFMELSKIQDGFLVDDVLEIIAQVQVIREKADRPFRCLDRPYRRELLRVYMTNIEQIYRRFVEERRRKLIRLIEDKMRWSSFRAFWLAIDPTTKHRMSREKSDIILKMVVKNFFVEKDVTSTLVMDALYTGLKALEACSNGKKGMVTSIDLEELSASMVHVDMDMFVLAGDFITLIERAALEPLSCQSLSPKGDKCSQTRAKYLTYLLCLPDSLDYVAHIWNWFTWYIEHPLQM

SEQ ID NO: 172713 - protein, 357 aa, Zea Mays
MVRRPQGSGFYTPKRDDNNPEFVTSVEITVKIPPASLAPRVGDYSGKTVRVRGTQGVSRGADNGQYPLRVALADEEEDSGNVTPPDNGWGHFAQFTIAVGNLDPKKVKYSDTLHKFWKKEHDWGWKKFMELSKIQDGFLVDDVLEIIAQVQVIREKADRPFRCLDRPYRRELLRVYMTNIEQIYRRFVEERRRKLIRLIEDKMRWSSFRAFWLAIDPTTKHRMSREKSDIILKMVVKNFFVEKDVTSTLVMDALYTGLKALEACSNGKKGMVTSIDLEELSASMVHVDMDMFVLAGDFITLIERAALEPLSCQSLSPKGDKCSQTRAKDGGTGEINKVPIELQERRLTELGQKILKY

SEQ ID NO: 172714 - protein, 418 aa, Zea Mays
MRLIQLPQNHPCHRLIQLLKLLQLHPNHQCYRLIQLLKLQQLLQNLLLHSLIKLLTSKLPPNHLHPSLMKLPHIITQYRDRFCPHLSPSLEKIRFLRGLQSLLYLELLHQCQGLQVHLCYRYQNQLCYLHRQSKFLQCFHVLGLCQPKFLQCFHVRGLCLNGRTMSLHLPPQSSQPWSAYAMATSVMAPPFERNGQLPGKQGFMFGPSRAETLDNWHSWKGNTDVNRNTWKHDFPNQQMTNCDAHLHHLKDISYQQLSSIGTEQHRLGGLQCREFLQREIPAATFVSRQQYGSVGEEFPHIDIINDLLDEDQNSAHMTVSPLHEYHTFGLPFSSGGNVADSEIPSVSSSVRFDMTDPYYGEGYRRAYNTQNALHRLDGYPNERLDSTAPPKRWAYSHPNPAVNLAYNSNVFPQQMGDY

SEQ ID NO: 172715 - protein, 110 aa, Zea Mays
MSPLSELVWSPDEGLSIKIAASSLSTRKASLRWNADTLSILISSPQRSGSGPGEKNGDTINDNLEVSEKMPSQLRIRSDSSVRVTVDSPNSTNVDALQFTSMRSQEQDSR

SEQ ID NO: 172716 - protein, 93 aa, Zea Mays
MAMPFGRHFPPWRHVSCMHLPFSSWIFWVKTYDCVVCIVFLLDGVVLKFPCHGDGGTQMATYPLGVACSCRCRLWSYHVIYLAMELFVVFVHA

SEQ ID NO: 172717 - protein, 286 aa, Zea Mays
MWFGGGPIDAAGALRGFVREAGGCAVVDGGLGTELEAHGADLHDALWSAKCLASAPHLIRKVHLDYLEAGADVIISASYQATIEGFQSRGFSRDESEELLRRSVHVAQEARRVFAAEGDRSSRRGRPPALVAASVGSYGAYRADGSEYSGDYGKSMTKEDLKNFHRRRLQVLAGAGPDLIAFETIPNKLEAQVYAELLEENGIRIPAWFSFTSKDGVNAASGDPINECAAVADSCPRVAAVGVNCTAPRFIHGLILSIKKVTSKPIVVYPNSGESYVAETNEWVVR

SEQ ID NO: 172718 - protein, 260 aa, Zea Mays
MWFGGGPIDAAGALRGFVREAGGCAVVDGGLGTELEAHGADLHDALWSAKCLASAPHLIRKVHLDYLEAGADVIISASYQATIEGFQSRGFSRDESEELLRRSVHVAQEARRVFAAEGDRSSRRGRPPALVAASVGSYGAYRADGSEYSGDYGKSMTKEDLKNFHRRRLQVLAGAGPDLIAFETIPNKLEAQVYAELLEENGIRIPAWFSFTSKDGVNAASGDPINECAAVADSCPRVAAVGVNCTAPRFIHGLILSIKK

SEQ ID NO: 172719 - protein, 131 aa, Zea Mays
MTKEDLKNFHRRRLQVLAGAGPDLIAFETIPNKLEAQVYAELLEENGIRIPAWFSFTSKDGVNAASGDPINECAAVADSCPRVAAVGVNCTAPRFIHGLILSIKKVTSKPIVVYPNSGESYVAETNEWVVR

SEQ ID NO: 172720 - protein, 249 aa, Zea Mays
MWFGGGPIDAAGALRGFVREAGGCAVVDGGLGTELEAHGADLHDALWSAKCLASAPHLIRKVHLDYLEAGADVIISASYQATIEGFQSRGFSRDESEELLRRSVHVAQEARRVFAAEGDRSSRRGRPPALVAASVGSYGAYRADGSEYSGDYGKSMTKEDLKNFHRRRLQVLAGAGPDLIAFETIPNKLEAQVYAELLEENGIRIPAWFSFTSKDGVNAASGDPINECAAVADSCPRVAAVGVNCTAPR

SEQ ID NO: 172721 - protein, 729 aa, Zea Mays
MPLLDLYDSSKGYVVNDKCIIEAEVAVRKTLDFWNYDSKRMTGYVGLKNQGATCYMNSLLQTLYHIPYFRKAVYHMPTTENDTPSGNIPLALQSLFYKLQHSDNSVATKELTKSFGWDSYDSFMQHDVQELNRVLCEKLENKMKGTTVEGAIQKLFEGHHMNYIECINVESKSTRKESFYDLALDVKGCSDVYASFDKYVAVERLEGDNKYQSEEHGLQDAKKGMLFIDFPPVLQLQLKRFEYDFVRDTMLKINDRYEFPLQLDLDRDDGKYLSPDADRSVRNLYTLHSVLVHSGGVHGGHYYAFIRPKLSDQWYKFEDERVTKEDMKRALEEQYGGEEELPHTNPGLDTAPLRFTKHSNAYMLVYIRESDKDNIICDLDDEDISEHLKVRLRKEHEEKEYKKKEKAEAHMFTALKVARDFDIKEQIGRHMHFDLVDFDRVNSFRAPKNMSINEVKEELSKEFGIPVECQRFWVWAKRQNCTYRPSRPLTSQEETSTIGVLKDATVAKLPNSEVRLFLEVHFRQENQPIAPWNTKEDILLFFKLYDPEKEDLRYVGNFFVKASGKPSDIVERLNQIAGFLSDEDIELYEEIKFEPVVMCVPIESNASFRSSQIDNGDIICYQKHCLPDSMDRYRYPTVPSFFEYIHNRQIVHFRLLEKPKEEGFSLELSKCSTYDDVVEKVAKQLRMDDPSKIRLTQHNPSSQQPKPHFIKYRSLNYLSDMLHNHNQNL

SEQ ID NO: 172722 - protein, 955 aa, Zea Mays
MPLLDLYDSSKGYVVNDKCIIEAEVAVRKTLDFWNYDSKRMTGYVGLKNQGATCYMNSLLQTLYHIPYFRKAVYHMPTTENDTPSGNIPLALQSLFYKLQHSDNSVATKELTKSFGWDSYDSFMQHDVQELNRVLCEKLENKMKGTTVEGAIQKLFEGHHMNYIECINVESKSTRKESFYDLALDVKGCSDVYASFDKYVAVERLEGDNKYQSEEHGLQDAKKGMLFIDFPPVLQLQLKRFEYDFVRDTMLKINDRYEFPLQLDLDRDDGKYLSPDADRSVRNLYTLHSVLVHSGGVHGGHYYAFIRPKLSDQWYKFEDERVTKEDMKRALEEQYGGEEELPHTNPGLDTAPLRFTKHSNAYMLVYIRESDKDNIICDLDDEDISEHLKVRLRKEHEEKEYKKKEKAEAHMFTALKVARDFDIKEQIGRHMHFDLVDFDRVNSFRAPKNMSINEVKEELSKEFGIPVECQRFWVWAKRQNCTYRPSRPLTSQEETSTIGVLKDATVAKLPNSEVRLFLEVHFRQENQPIAPWNTKEDILLFFKLYDPEKEDLRYVGNFFVKASGKPSDIVERLNQIAGFLSDEDIELYEEIKFEPVVMCVPIESNASFRSSQIDNGDIICYQKHCLPDSMDRYRYPTVPSFFEYIHNRQIVHFRLLEKPKEEGFSLELSKCSTYDDVVEKVAKQLRMDDPSKIRLTQHNPSSQQPKPHFIKYRSLNYLSDMLHNHNQMCDILYYDILDIPLPELESMRSLKVAFQNAANHEMSFHIMRLPKSNSLLDLIEDLKSKVEISCNDAEFRFFGVYLHKICKVYQPGDKIDSVNDHGPLYIEEVPEDEKNAGPHDRLVHVYHFEYNHYFGEPFFFLIRDGEALSDMKVRIQKRLQVPDEQFLKWKFAHVTFSKPEYLQDSDIVMNRFHRPVYGGWEQHLGLEHTATTPKRSYLGNNQNRHSFEKPVRIYN

SEQ ID NO: 172723 - protein, 78 aa, Zea Mays
MNDEQDMKQSCSKSSLLVMYMELLHRVVYVAIISRIFIWWMYRVRIATFPCRKLKLYIEGGFTCVNLFDPKPLGGCEP

SEQ ID NO: 172724 - protein, 376 aa, Zea Mays
MINRGSQLRISLPAHPPSARSRTLMALSPTPTAVAAPPPEPGPEPAPSAELPLPDAIAAALPPDPYEQLEVARKITAVAVASRASRLELEAARLRQRLADRDRLAAELADRAAKLEQALRDADARLRSALDDNLAKERDSLAQTSKKLARDLAKLETFKRHLMQSLGDDNSQTHHQETVDIRTYEQSVAKANSWKDGLEKNSHPVSSLSDESVEADSVNQEVTTRPFEQKLTITHITPRLTSDPAPKLRTAATSPRRYSTAVSPKLASGATSPRLEGHMAMSPWLPSSKMSSAANSPPRGQSISGRGTRVDGKEFFRQARHRLSYEQFAAFLSNIKELNAHRQSREETLRKADEIFGAENMDLFRSFQGLLSRSLS

SEQ ID NO: 172725 - protein, 817 aa, Zea Mays
MRGETAEIKVSYEAKLAESLQMMETAQKKFDEAEEKLLTAKSLEADCIRTRNTSLRRLQDIEDREDQLRRYQTSFELENASKEKEINLLRKSLDDTKKILHEKEQCLLKEQVLLNQRDDSILERLAYITSSEKRLEEEKLNLEDERKVLLEEKNKLDLNMQAIISREEAIIQKESILDKRESELLILQETIASKERAEIERLRQEEEIALVRRRQEFDTDMEIKLTSFEEEIDARKALLDQRETTINEKEDAVAQREQNLNLRFAELANKEESLVKKSDELREEEKRLSSERETLHIDLQKEKEEIHNMKLDLEKEKSFFEEEKREAIQAQENLAITQNEREDLQSLQVKLKDEIDSLRAQKVDLMADAERLLSEKERFEIEWELIDEKKEELQKEAARIAEERRVIDEHLKSEFDIIKQEKEDLRVQLKISTESLAHEHAEFMNKMQQEHASWLSRIQLEREDLKKDIDIQRTELLNSAKARQMEIDSYLREKEEEFEQKKSKELEYINSEKETISSKLEHVRLELQKLEEERKRSMLERERREEELSETKKTIDALNEQREKLQEQRKLLHSDRKSITQQMQLLNELEELKIESENRQLSLRQCGKSKHAGVENLEDNGVHLSPDEDQNASPKQTTVKKLEVSPSVSTPISWVKKCAQVIFKRSPEKSADPNNDIPPKLGNVNDCTSLATAYSDGLFACHLENGAEKVPQAIDGLKVGKKRLNNALSHGDSEISQPKRKQQKSATQILRVIGGEIDSNCLHLNRRTDLVLWTLRTRMEQMRSLTMKARTRRKRRRHRRRSCGVSSSHDLFIFVVR

SEQ ID NO: 172726 - protein, 848 aa, Zea Mays
MRGETAEIKVSYEAKLAESLQMMETAQKKFDEAEEKLLTAKSLEADCIRTRNTSLRRLQDIEDREDQLRRYQTSFELENASKEKEINLLRKSLDDTKKILHEKEQCLLKEQVLLNQRDDSILERLAYITSSEKRLEEEKLNLEDERKVLLEEKNKLDLNMQAIISREEAIIQKESILDKRESELLILQETIASKERAEIERLRQEEEIALVRRRQEFDTDMEIKLTSFEEEIDARKALLDQRETTINEKEDAVAQREQNLNLRFAELANKEESLVKKSDELREEEKRLSSERETLHIDLQKEKEEIHNMKLDLEKEKSFFEEEKREAIQAQENLAITQNEREDLQSLQVKLKDEIDSLRAQKVDLMADAERLLSEKERFEIEWELIDEKKEELQKEAARIAEERRVIDEHLKSEFDIIKQEKEDLRVQLKISTESLAHEHAEFMNKMQQEHASWLSRIQLEREDLKKDIDIQRTELLNSAKARQMEIDSYLREKEEEFEQKKSKELEYINSEKETISSKLEHVRLELQKLEEERKRSMLERERREEELSETKKTIDALNEQREKLQEQRKLLHSDRKSITQQMQLLNELEELKIESENRQLSLRQCGKSKHAGVENLEDNGVHLSPDEDQNASPKQTTVKKLEVSPSVSTPISWVKKCAQVIFKRSPEKSADPNNDIPPKLGNVNDCTSLATAYSDGLFACHLENGAEKVPQAIDGLKVGKKRLNNALSHGDSEISQPKRKQQKSATQILRVIGGEIDSNCSPSVLEEKCSKNEHDAVPVGLCGKGPQNPQAEHSEDISVSASEPSNGPGVVDSEDKDGADEESDDEGEDEEEEKTSSAKKLWRFLIT

SEQ ID NO: 172727 - protein, 421 aa, Zea Mays
MMAPLSPRLVVPVDVKKLPREQKVPLHNRWHPDIPPVADVTEGELFRVEMVDWSGGRVRDDNSADDLKFMDFTIAHYLSGPLRIVDSEGVPASPGDLLAVEICNLGPLPGDEWGYTAILERENGGGFLTDHFPSARKAIWYFEGIYACSPQIPGVRFPGLTHPGVVGTAPSLELLNIWNEREKSLSETSLETIKLCEVLHQRPLAHLPTPENCLLGKVQEGTAEWHIIANEAARTIAGRENGGNCDIKNLSRGSRIYLPVFVEGANLSTGDMHFSQGDGEISLCGAIEMSGFLELKCEIIRGGMKEYLTPVGPTPLHVSPIFEIGPVEPRFSEWLVFEGISVDESGKQHFLDASVAYKRAVLNAIEYLSKFGYSKEQDIKPKRVKGRPLGGPQLRRLPDLLSCSNHGRLPATQDRSGTSAP

SEQ ID NO: 172728 - protein, 361 aa, Zea Mays
MMAPLSPRLVVPVDVKKLPREQKVPLHNRWHPDIPPVADVTEGELFRVEMVDWSGGRVRDDNSADDLKFMDFTIAHYLSGPLRIVDSEGVPASPGDLLAVEICNLGPLPGDEWGYTAILERENGGGFLTDHFPSARKAIWYFEGIYACSPQIPGVRFPGLTHPGVVGTAPSLELLNIWNEREKSLSETSLETIKLCEVLHQRPLAHLPTPENCLLGKVQEGTAEWHIIANEAARTIAGRENGGNCDIKNLSRGSRIYLPVFVEGANLSTGDMHFSQGDGEISLCGAIEMSGFLELKCEIIRGGMKEYLTPVGPTPLHDIKPKRVKGRPLGGPQLRRLPDLLSCSNHGRLPATQDRSGTSAP

SEQ ID NO: 172729 - protein, 449 aa, Zea Mays
MMAPLSPRLVVPVDVKKLPREQKVPLHNRWHPDIPPVADVTEGELFRVEMVDWSGGRVRDDNSADDLKFMDFTIAHYLSGPLRIVDSEGVPASPGDLLAVEICNLGPLPGDEWGYTAILERENGGGFLTDHFPSARKAIWYFEGIYACSPQIPGVRFPGLTHPGVVGTAPSLELLNIWNEREKSLSETSLETIKLCEVLHQRPLAHLPTPENCLLGKVQEGTAEWHIIANEAARTIAGRENGGNCDIKNLSRGSRIYLPVFVEGANLSTGDMHFSQGDGEISLCGAIEMSGFLELKCEIIRGGMKEYLTPVGPTPLHVSPIFEIGPVEPRFSEWLVFEGISVDESGKQHFLDASVAYKRAVLNAIEYLSKFGYSKEQVYLLLSCCPCEGRISGIVDSPNAVTTLAIPTAIFDQVCCQESSPSQFSLVFFTVICTVSLLLLLSVKCSSTD

SEQ ID NO: 172730 - protein, 71 aa, Zea Mays
MVFASHPYSGYKAKTREGETTWRTTVEKTSRSSKLLKSWTPSCHPRQKWYKRALVYGNRCSINRHATVPRL

SEQ ID NO: 172731 - protein, 258 aa, Zea Mays
MEERVDRSEILTLDSIRQVLIRLEDSIIFGLLERAQFCYNADTYDSNAFHMDGFGGSLVEYMVRETEKLHAQVGRYKSPDEHPFFPEDLPEPRLPPMQYPRVLHPIADSININKEIWKMYFDELLPRLVKKGSDGNAGSSALCDTTCLQALSKRIHYGKFVAEAKFQESPEAYMPAIIAQDRDQLMHLLTYETVERAIEHRVEAKAKIFGQEVNIGVEDNGSPPVYKIVPSLVAELYSYRIMPLTKEVQIAYLLRRLD

SEQ ID NO: 172732 - protein, 85 aa, Zea Mays
MPAIIAQDRDQLMHLLTYETVERAIEHRVEAKAKIFGQEVNIGVEDNGSPPVYKIVPSLVAELYSYRIMPLTKEVQIAYLLRRLD

SEQ ID NO: 172733 - protein, 176 aa, Zea Mays
MATAARLLLVVVLLSAAIPIPSFATSFVVGDKRHRWAPNVNYTDWADRHQFHVGDWLGERDGIRGVRRQQPHPQLQPRPQLRLPAQPHGPVLLHLQPRLLLEWHEGLRARPAAAAAPVAAAGVPLPRVKRQCACAAGGRALVCGSLYLAGLGGAHAAAVVSGLEFWTSRRAHESKL

SEQ ID NO: 172734 - protein, 62 aa, Zea Mays
MATAARLLLVVVLLSAAIPIPSFATSFVVGDKRHRWAPNVNYTDWADRHQFHVGDWLDALIC

SEQ ID NO: 172735 - protein, 171 aa, Zea Mays
MEQKRQSGKILVAQCQEPGVHPLPFPCPVNWRMERWVMALWSLWVRGSSWSPSHTNLPHLRPFSVHAAPLLCPHLIPCAQARAVFASGHLCLKQHQIVPRQFLLSQGGCHTPIGRGEADDQRENYTGCLGDDFMALFGTTYFQLLHKFKQRFCQTDSFCNSLSVQLLLRIH

SEQ ID NO: 172736 - protein, 330 aa, Zea Mays
MVHDAFGSHPHSQFDRPLGNIPKVPFPGFDGENPKLWQTRCQDYFTMYSVDTSVWIRIARMHFTGSAARWLQSVECHLSRISWEQFGHMVMDRFRKDQHEVLIRQLFHVRQTTTVSDYVDRFSQLIDQLHAYSPNSDPLYYIMRFLDGLWDDIRSVVMVQRPRDLDTAYVLAQLQEEVGGRQKDARTSDVVYSTKTFHKGPLPLPLPIRQPQTSKPEGSAAVQGSKLSTMDDKLTSLMAYRKAKGFCYKCGLPYARGHRCADSVQLHVVEELWQTLQIPDQSDDVEATEELNSMCLSKAAVDGGNIPKTMIQVVASQWTRVALNPFQVIQ

SEQ ID NO: 172737 - protein, 298 aa, Zea Mays
MSRWCDRTSPGPSHFRSMHMSPKSKQLHGNASMLLMEPCPHAWLRSKQRPTQSLRGGLTSNSPWASSIRTLKGFDRSNSGLPVAGSMSVERQLHSRPPCLARRWDVHLLPQGTSKALGGTTTQTQHGREVSGILIPITSSRPMEEVGGRQKDARTSDVVYSTKTFHKGPLPLPLPIRQPQTSKPEGSAAVQGSKLSTMDDKLTSLMAYRKAKGFCYKCGLPYARGHRCADSVQLHVVEELWQTLQIPDQSDDVEATEELNSMCLSKAAVDGGNIPKTMIQVVASQWTRVALNPFQVIQ

SEQ ID NO: 172738 - protein, 639 aa, Zea Mays
MMAMSCGPDETEKPGRDSALLLRGAWFRRGAAWLCSVQVQWWCSDRSSRRPAFAFGSGCTADMERSLATGTTESPQEECFKGNKGGFRALPFIFSNEMLEKVAGFGLNTNMITYLTDKYHLSTVSSQTMLFVWSAISNFTPIPGAVLADMYLGRFMAVALGSVACLIGMVFLWLSATVPGARPPPCSGDQCAPPGTRHLAWLLAGFAFLSLGAGGVRPCSMAFGADQFSRHPRQRRASILQSYFNAYYASIGVAFTVAVTAIVYLQDNVGWSVGFAVPMGLMLLSAVSFLLGSSLYIKEKGERRMFAGIGTAVAAAIRNHGARLPDKTVDGVYHHLKDCKLAVPTDKLRFLNKACLLRATKDDAPCNGSDAAAAASERHGHDGTRLCTVDQVEQLKSAIRVLPIWSSTIFLALAMNQSFAVKQADAMDRRVGAGGFRVPSGSLAVFNMATMSLWSACYDRWVAPALQRYTGNPHGLTMKQRIGGGLLLATASTAVSAAVEGERRRLAQRGVTISAFWLVPQFALVGLAEAFGVIGEIEFLYTELPKSMASFSMSLLYMAFGVGNLAGALIVKVVQVASGQGVGTGWLVDNLNVGRYDYYYWLLTGYGVANFVYFAWCCWLYGEEGKNVEWEEEDNTEQP

SEQ ID NO: 172739 - protein, 132 aa, Zea Mays
MSPGTLALMCDEEAFEKMCDEQDTMFTTSQNAAPQQTVIVNHNQSALYAEQENVVLTEFRDCLRKFVRYGRMKGKWCFSSTIFKSRCACCKNISTEFQQSSCCWKTCYWPFGQKLKPWRSRFLLGVLQGSRE

SEQ ID NO: 172740 - protein, 369 aa, Zea Mays
MASQGSSVFAALEQAPEDPILGVTVAYNKDPSPVKVNLGVGAYRTEEGKPLVLNVVRRAEQMLINNPSRVKEYLPITGLAEFNKLSAKLIFGADSPAIQENRVATVQCLSGTGSLRVGGEFLARHYHERTIYIPQPTWGNHPKVFTLSGLNVRSYRYYDPATCSLHFEGLLEDLGSAPSGSIVLLHACAHNPTGVDPTIEQWEQIRQLMRSKSLLPFFDSAYQGFASGSLDKDAQSVRMFVADGGELLMAQSYAKNMGLYGERVGALSIVCKSADVAVRVESQLKLVIRPMYSNPPLHGASIVATILRDSEMFNEWTLELKAMADRIINMRQEYHIYMTSDGRISMAGLSMRTVPHLADAIHAAVTQLK

SEQ ID NO: 172741 - protein, 402 aa, Zea Mays
MASQGSSVFAALEQAPEDPILGVTVAYNKDPSPVKVNLGVGAYRTEEGKPLVLNVVRRAEQMLINNPSRVKEYLPITGLAEFNKLSAKLIFGADRVATVQCLSGTGSLRVGGEFLARHYHERTIYIPQPTWGNHPKVFTLSGLNVRSYRYYDPATCSLHFEGLLEDLGSAPSGSIVLLHACAHNPTGVDPTIEQWEQIRQLMRSKSLLPFFDSAYQGFASGSLDKDAQSVRMFVADGGELLMAQSYAKNMGLYGERVGALSIVCKSADVAVRVESQLKLVIRPMYSNPPLHGASIVATILRDSEMFNEWTLELKAMADRIINMRQQLFNALKSRGTPGDWSHIIKQIGMFTFTGLNSEQVAFMRQEYHIYMTSDGRISMAGLSMRTVPHLADAIHAAVTQLK

SEQ ID NO: 172742 - protein, 158 aa, Zea Mays
MDYFEKLGLGQACAVANALIAVYSRCGRMEDAKRVFDSMHPWDAISWNSMIGGCFSNGWHGTAVDFFSKMWSQGLDSVQSGIDDAALGSKLVFMYVKCGDMGSARRVLDAMSSKGNVHVWNLIMGGYAKVGEFEETLAFLCKCMSLESPPMNMSFLAF

SEQ ID NO: 172743 - protein, 188 aa, Zea Mays
MIRPLDVGLDNEAQIARNWSSSTRPSNGRRGRNGANQFAAPIKYLHIHECESFSMGIFCMPPSSVIPLHNHPGMTVLSKLLYGRLHAESYDWVDIPDHPIDQLQSGNIHTFRAITPCALFDVLSPPYSAEDGRHCSYFRKSQMNQPPVVLPAEIDSSQVVWLEELEDHQPPEGFVVARGLYKGPVIRR

SEQ ID NO: 172744 - protein, 243 aa, Zea Mays
MPKIKSLSNACRVSFSPEGPISEEALERVRALLDMIRPLDVGLDNEAQIARNWSSSTRPSNGRRGRNGANQFAAPIKYLHIHECESFSMGIFCMPPSSVIPLHNHPGMTVLSKLLYGRLHAESYDWVDIPDHPIDQLQTKLVKDCEMTAPETTILYPNAGGNIHTFRAITPCALFDVLSPPYSAEDGRHCSYFRKSQMNQPPVVLPAEIDSSQVVWLEELEDHQPPEGFVVARGLYKGPVIRR

SEQ ID NO: 172745 - protein, 169 aa, Zea Mays
MPKIKSLSNACRVSFSPEGPISEEALERVRALLDMIRPLDVGLDNEAQIARNWSSSTRPSNGRRGRNGANQFAAPIKYLHIHECESFSMGIFCMPPSSVIPLHNHPGMTVLSKLLYGRLHAESYDWVDIPDHPIDQLQKPLHLVLSLTFFLHHTPLRMGDTVHTSESLR

SEQ ID NO: 172746 - protein, 208 aa, Zea Mays
MQRDTSSSDVSASHVGRVRRRKHPTEATTDGNRANGQPLLVNDQNKYKSMLTRTYSTVWMIGGFAFIIYMGHLYIWAMVVVIQIYMARELFNLLRKSSEEKQLPGFRVLNWHFFFTAMLYTYGRFLSRQLVNTVTSDHLLYKVVSGLIKYQMFICYFLYIAGFVWFILTLKKKTYKYQFKQYAWTHMILLTVFAQSAFTVANIFEGIF

SEQ ID NO: 172747 - protein, 244 aa, Zea Mays
MILLTVFAQSAFTVANIFEGIFWFLLPASLIVINDIFAYLFGFFLGRTPLIKLSPKKTWEGFIGASVTTIISAFLLANVMGHSQWLTCPRKDLLTGWLYCDPGPMFKPEHYSLGEWVPHWFPWKELAIMPVQWHALALGLFASIIAPFGGFFASGFKRAFKIKDFGDSIPGHGGITDRMDCQMVMAVFAYIYHQSFIAPQNFSVEIILDQIIRNLTYEEQKYVYEQLGEMFRERQLAHWLKAES

SEQ ID NO: 172748 - protein, 154 aa, Zea Mays
MFCLRNYWSPAFASVKEGPVRHHIKFNCVVVCGARGPRPRYPRVWKTRKKIGTISKSQKLVECIKGLSNVKEEVYGALDSFVAWELEFPLIVVKKALKKLEDEKEWKRIIQVIKWMFNKGQGKTMGSYYTLLNALIEDGRIEEAEELFRMCWRA

SEQ ID NO: 172749 - protein, 312 aa, Zea Mays
MDDVPPGPAAFSRREGWGTSAAAAAATTNSRKTMPRSRGNEPPLRTSQRAPLHLKTTACSEANGAHHRPVADRSSPRVSPRSPLPEKRAAGTRVAELEGKLGKVQEELKKLREQLASAEAAKKDAQVALEEAKKRVGTKGSPASTTTTTPLSPPSPGVEIAKKTEELKLPQPAAEEESSINVPATDVFEVVRAESGDKENQSAAEVCEVVSCGGGKAAVDVAENEETEEEETKKMIGEDNSAAVESDGADKESPEVVELKAKLAEKDTEIAALTAENAELKKPRNGTRVPNFATVSSLSPPACQLEQLHPLH

SEQ ID NO: 172750 - protein, 80 aa, Zea Mays
MSAGELRLELDELRRLESLAKHPRVQILLANEIRNVEAKIYVSLEGVEQEKVETTFKPTSVDIKFHDVKGKNYRVLKATG

SEQ ID NO: 172751 - protein, 126 aa, Zea Mays
MSAGELRLELDELRRLESLAKHPRVQILLANEIRNVEAKLAKATEPSPEPLAAASAPAPAPAARPVLSYVTLGSFSWEQDNEKIRIYVSLEGVEQEKVETTFKPTSVDIKFHDVKGKNYRVLKATG

SEQ ID NO: 172752 - protein, 351 aa, Zea Mays
MEDDILPVATDIINDAASECPEAGSDGVVLTDELRNRIVKQVEYYFSDENLPTDEFLLNYVKKNNKGFVPIEIIASFRRMKKLVQDLSVIEAALRTSSKLVVSSNGKRVRRLHPLPHKELKDSKKSTVLVENLPPDFSMESIQEKFATVGKVVNITINDPESVKEFSTAKKPDFNLSFKAHVLVEYEAVEAAEKAVTALSDESNWRTGMKVRLLSKQSVMGPGKYKKPSKENQDAVSKMIDQNQHSKEDQLKTLEKISGADAVGITKDRDNLKPVFITETEHQDQKPNARGRKGWYKGQGQMQQNANKQGSCGSESLNKPISGPRMPDGTRGFTLGRGRSLPLQKSEKAEE

SEQ ID NO: 172753 - protein, 484 aa, Zea Mays
MDGQAPPLLDAVVLEPLAVGDELHPRRPVEVEDAPAAAPPSGMDGQVPPLYNVTRDPLTVSDELQPTGEVVDDALLVAPDIVKGEVMEDDILPVATDIINDAASECPEAGSDGVVLTDELRNRIVKQVEYYFSDENLPTDEFLLNYVKKNNKGFGCEFYDYYSGVRDNVFGVPVLSFFSRDSNFTQAYAFIVCVSALDIGAFPIEIIASFRRMKKLVQDLSVIEAALRTSSKLVVSSNGKRVRRLHPLPHKELKDSKKSTVLVENLPPDFSMESIQEKFATVGKVVNITINDPESVKEFSTAKKPDFNLSFKAHVLVEYEAVEAAEKAVTALSDESNWRTGMKVRLLSKQSVMGPGKYKKPSKENQDAVSKMIDQNQHSKEDQLKTLEKISGADAVGITKDRDNLKPVFITETEHQDQKPNARGRKGWYKGQGQMQQNANKQGSCGSESLNKPISGPRMPDGTRGFTLGRGRSLPLQKSEKAEE

SEQ ID NO: 172754 - protein, 398 aa, Zea Mays
MDGQAPPLLDAVVLEPLAVGDELHPRRPVEVEDAPAAAPPSGMDGQVPPLYNVTRDPLTVSDELQPTGEVVDDALLVAPDIVKGEVMEDDILPVATDIINDAASECPEAGSDGVVLTDELRNRIVKQVEYYFSDENLPTDEFLLNYVKKNNKGFVPIEIIASFRRMKKLVQDLSVIEAALRTSSKLVVSSNGKRVRRLHPLPHKELKDSKKSTVLVENLPPDFSMESIQEKFATVGKVVNITINDPESVKEFSTAKKPDFNLSFKAHVLVEYEAVEAAEKAVTALSDESNWRTGMKVRLLSKQSVMGPGKYKKPSKENQDAVSKMIDQNQHSKEDQLKTLEKISGADAVGITKDRDNLKPVFITETEHQDQKPNARGRKGWYKGQGQMQQNANKQDEF

SEQ ID NO: 172755 - protein, 143 aa, Zea Mays
MKVRLLSKQSVMGPGKYKKPSKENQDAVSKMIDQNQHSKEDQLKTLEKISGADAVGITKDRDNLKPVFITETEHQDQKPNARGRKGWYKGQGQMQQNANKQGSCGSESLNKPISGPRMPDGTRGFTLGRGRSLPLQKSEKAEE

SEQ ID NO: 172756 - protein, 174 aa, Zea Mays
MESIQEKFATVGKVVNITINDPESVKEFSTAKKPDFNLSFKAHVLVEYEAVEAAEKAVTALSDESNWRTGMKVRLLSKQSVMGPGKYKKPSKENQDAVSKMIDQNQHSKEDQLKTLEKISGADAVGITKDRDNLKPVFITETEHQDQKPNARGRKGWYKGQGQMQQNANKQDEF

SEQ ID NO: 172757 - protein, 549 aa, Zea Mays
MDESRKRAVSTANDEDFGNDFLSSWKLPKSGKDTIDFSVDSVPKSSKKFSFDNLDDFGLNGAFDKLPSFQMGMSDLDFSSPDKKKVKHTSSNADLFEKKKETDKDNFSFSFDFNELGKFSLDGKLGIEEKSTNRFNGKSDPVSSEVKKDTQRGLLAKGNAILEENNSKDKMHTLDTRTSRPSHLTNHENVKNASQPTSNIDVADSSDKMQEHTSVNPATMEQTKVDSVLNDNPGEHPKEIYAMKAAVNIPSQDFSCGAISSEDPTQGPADHVNSKDAPIVNCGKVHVSRESNDDEQSNGLQSRDTSIINSNVSRRPSGQFNSQNEVLEESVSLNEGSQDNQSFSGAPKKFLKKTSHGTTNTEEEISGPKILSCSVQREIRSVEPAPMKERGSFSLLSKSVHMKATRVELTSETALNQSSSASKVIKKMTTHPTDLKREHMQANAVPHKSKTALSKTYSKLASNGLLATSMNAKVDTNAKLGLEPPISGKSSLLNARSSTPHSAGHKVVASHVLLKASNTSDSLQGVPSKDNKSSTISQLTGARNQKSEI

SEQ ID NO: 172758 - protein, 554 aa, Zea Mays
MDESRKRAVSTANDEDFGNDFLSSWKLPKSGKDTIDFSVDSVPKSSKKFSFDNLDDFGLNGAFDKLPSFQMGMSDLDFSSPDKKKVKHTSSNADLFEKKKETDKDNFSFSFDFNELGKFSLDGKLGIEEKSTNRFNGKSDPVSSEVKKDTQRGLLAKGNAILEENNSKDKMHTLDTRTSRPSHLTNHENVKNASQPTSNIDVADSSDKMQEHTSVNPATMEQTKVDSVLNDNPGEHPKEIYAMKAAVNIPSQDFSCGAISSEDPTQGPADHVNSKDAPIVNCGKVHVSRESNDDEQSNGLQSRDTSIINSNVSRRPSGQFNSQNEVLEESVSLNEGSQDNQSFSGAPKKFLKKTSHGTTNTEEEISGPKILSCSVQREIRSVEPAPMKERGSFSLLSKSVHMKATRVELTSETALNQSSSASKVIKKMTTHPTDLKREHMQANAVPHKSKTALSKTYSKLASNGLLATSMNAKVDTNAKLGLEPPISGKSSLLNARSSTPHSAGHKVVASHVLLKASNTSDSLQGVPSKDNKSSTISQLTGARYNIPLQILFSF

SEQ ID NO: 172759 - protein, 710 aa, Zea Mays
MDESRKRAVSTANDEDFGNDFLSSWKLPKSGKDTIDFSVDSVPKSSKKFSFDNLDDFGLNGAFDKLPSFQMGMSDLDFSSPDKKKVKHTSSNADLFEKKKETDKDNFSFSFDFNELGKFSLDGKLGIEEKSTNRFNGKSDPVSSEVKKDTQRGLLAKGNAILEENNSKDKMHTLDTRTSRPSHLTNHENVKNASQPTSNIDVADSSDKMQEHTSVNPATMEQTKVDSVLNDNPGEHPKEIYAMKAAVNIPSQDFSCGAISSEDPTQGPADHVNSKDAPIVNCGKVHVSRESNDDEQSNGLQSRDTSIINSNVSRRPSGQFNSQNEVLEESVSLNEGSQDNQSFSGAPKKFLKKTSHGTTNTEEEISGPKILSCSVQREIRSVEPAPMKERGSFSLLSKSVHMKATRVELTSETALNQSSSASKVIKKMTTHPTDLKREHMQANAVPHKSKTALSKTYSKLASNGLLATSMNAKVDTNAKLGLEPPISGKSSLLNARSSTPHSAGHKVVASHVLLKASNTSDSLQGVPSKDNKSSTISQLTGARITKLGIRSLKSDMALEKESVQVSGTKCSPVTTSRILDSIPEGKPALPSPSIMQKVPEESALNPKAPKVLKHIMRSPAVRKSPRTVPELGNEMICILLKRKHAEAKELAVRAIVNNNTMLMLNHPMIEEKIYSIQKFANDLKSKKYLFEEVGTINSGANDLSSGAWVM

SEQ ID NO: 172760 - protein, 565 aa, Zea Mays
MWSEFVDSMDESRKRAVSTANGKNISSSLDEDFGNDFLSSWKLPKSGKDTIDFSVDSVPKSSKKFSFDNLDDFGLNGAFDKLPSFQMGMSDLDFSSPDKKKVKHTSSNADLFEKKKETDKDNFSFSFDFNELGKFSLDGKLGIEEKSTNRFNGKSDPVSSEVKKDTQRGLLAKGNAILEENNSKDKMHTLDTRTSRPSHLTNHENVKNASQPTSNIDVADSSDKMQEHTSVNPATMEQTKVDSVLNDNPGEHPKEIYAMKAAVNIPSQDFSCGAISSEDPTQGPADHVNSKDAPIVNCGKVHVSRESNDDEQSNGLQSRDTSIINSNVSRRPSGQFNSQNEVLEESVSLNEGSQDNQSFSGAPKKFLKKTSHGTTNTEEEISGPKILSCSVQREIRSVEPAPMKERGSFSLLSKSVHMKATRVELTSETALNQSSSASKVIKKMTTHPTDLKREHMQANAVPHKSKTALSKTYSKLASNGLLATSMNAKVDTNAKLGLEPPISGKSSLLNARSSTPHSAGHKVVASHVLLKASNTSDSLQGVPSKDNKSSTISQLTGARNQKSEI

SEQ ID NO: 172761 - protein, 778 aa, Zea Mays
MWSEFVDSMDESRKRAVSTANGKNISSSLDEDFGNDFLSSWKLPKSGKDTIDFSVDSVPKSSKKFSFDNLDDFGLNGAFDKLPSFQMGMSDLDFSSPDKKKVKHTSSNADLFEKKKETDKDNFSFSFDFNELGKFSLDGKLGIEEKSTNRFNGKSDPVSSEVKKDTQRGLLAKGNAILEENNSKDKMHTLDTRTSRPSHLTNHENVKNASQPTSNIDVADSSDKMQEHTSVNPATMEQTKVDSVLNDNPGEHPKEIYAMKAAVNIPSQDFSCGAISSEDPTQGPADHVNSKDAPIVNCGKVHVSRESNDDEQSNGLQSRDTSIINSNVSRRPSGQFNSQNEVLEESVSLNEGSQDNQSFSGAPKKFLKKTSHGTTNTEEEISGPKILSCSVQREIRSVEPAPMKERGSFSLLSKSVHMKATRVELTSETALNQSSSASKVIKKMTTHPTDLKREHMQANAVPHKSKTALSKTYSKLASNGLLATSMNAKVDTNAKLGLEPPISGKSSLLNARSSTPHSAGHKVVASHVLLKASNTSDSLQGVPSKDNKSSTISQLTGARITKLGIRSLKSDMALEKESVQVSGTKCSPVTTSRILDSIPEGKPALPSPSIMQKVPEESALNPKAPKVLKHIMRSPAVRKSPRTVPELGNEMILGSGTPKAHVDNAISSRMPPGMGAISDLELPVLENDGNIEKAEACRKELEDICILLKRKHAEAKELAVRAIVNNNTMLMLNHPMIEEKIYSIQKFANDLKSKKYLFEEVGTINSGANDLSSGAWVM

SEQ ID NO: 172762 - protein, 726 aa, Zea Mays
MWSEFVDSMDESRKRAVSTANGKNISSSLDEDFGNDFLSSWKLPKSGKDTIDFSVDSVPKSSKKFSFDNLDDFGLNGAFDKLPSFQMGMSDLDFSSPDKKKVKHTSSNADLFEKKKETDKDNFSFSFDFNELGKFSLDGKLGIEEKSTNRFNGKSDPVSSEVKKDTQRGLLAKGNAILEENNSKDKMHTLDTRTSRPSHLTNHENVKNASQPTSNIDVADSSDKMQEHTSVNPATMEQTKVDSVLNDNPGEHPKEIYAMKAAVNIPSQDFSCGAISSEDPTQGPADHVNSKDAPIVNCGKVHVSRESNDDEQSNGLQSRDTSIINSNVSRRPSGQFNSQNEVLEESVSLNEGSQDNQSFSGAPKKFLKKTSHGTTNTEEEISGPKILSCSVQREIRSVEPAPMKERGSFSLLSKSVHMKATRVELTSETALNQSSSASKVIKKMTTHPTDLKREHMQANAVPHKSKTALSKTYSKLASNGLLATSMNAKVDTNAKLGLEPPISGKSSLLNARSSTPHSAGHKVVASHVLLKASNTSDSLQGVPSKDNKSSTISQLTGARITKLGIRSLKSDMALEKESVQVSGTKCSPVTTSRILDSIPEGKPALPSPSIMQKVPEESALNPKAPKVLKHIMRSPAVRKSPRTVPELGNEMICILLKRKHAEAKELAVRAIVNNNTMLMLNHPMIEEKIYSIQKFANDLKSKKYLFEEVGTINSGANDLSSGAWVM

SEQ ID NO: 172763 - protein, 685 aa, Zea Mays
MGIDLNMADGESQERRPPPAVCRELWHACAGPVVALPRRGSLVVYLPQGHLAAAGGGNVAVDLPPHVACRVADVELCADAATDEVYARLALVAEGEAFGRNLRGGGVDGDDDMEDFDVERKSRMLHMFCKTLTASDTSTHGGFSVPRRAAEDCFPPLDYNQLRPSQELVAKDLHGAKWKFRHIYRGQPRRHLLTTGWSSFVNKKKLVSGDAVLFLRGDDGELRLGVRRAIQLKNEALFDDFSCDSTKRHTLLAVADSLKHKSVFHISYNPRATASEYIIPHHKFLKSLNLPFCIGARINLQCHNEDVSERRSGMVVHVSEIDPMKWPGSKWRSLLVRWEDGVECNGQDRVSPWEIEIAGGSVSVAHSVSASSSKRTKLCPQGNLDVPTMWNGNGCTDSVETGKFPRVLQGQDLMSFRTRHVPSAPQTVEAAKLQSSGASRFLSNARGCALGGPTSRLAVHNSDFTYQSVGFNESIGFSEVLQGQEISRAVPMFQGMMSEACSLKGGYGLHSYMRTPVAVTGLSATTQECSLTLSTPPGAQVPSVYPDNIFNRTVVRQLGLASKFDGGATNAQQSVPFDRPREIWSKPQHEISDQTKMDHFETRRASAPGDDAAKHGSGGEVVRKTSCRLFGFSLTEKILPADDDGIKEVTYEPECQNPRMLDLFGYNCSAPSAALPALCAAPFGM

SEQ ID NO: 172764 - protein, 497 aa, Zea Mays
MPGMPTDGGGAMVPFTGEPGQGAPPPAPVRPIRHGVAPPIFRIYVSWSSGNLLQVACLRPPNSDGGGGTEEVVGSVVEVNLGDGGSGGSEAEEKIDEAEMRRIEYGSVPAFALLQSRKNTLADVATMSHVPSVPDHAEWWQYVLEYSKTIGSLLGNPDPSGFMIEEPKTILKVREKPTSLRAAWELLEIFYVDKRLQGWLPERLVDWLADFDSLLSTMASTVYSKLSNFQKKLVNLQIVEDDPDYWNGLSAALSVGWLDIVVNMLRFHGSYQLDQMDSRETENGLVEAVAVLVSMMPRMRPNLPTGKLGQCCKTRPDFIKAWEKWRGQVTKLECSAFWIQCGHQKTRDGLKNLLHIMMGNIKEITAATSHWLELFASHFLYIKPFTVGFEGMHHLAQKCIQLMPSSGTNGLTGLIIGVMSENPEVVLAECTKNFGPWLVTHAMELLTADNDYADIMLHEERPNLGGISIEELHRLVYAQVLCCHPLTWQSCRREGAT

SEQ ID NO: 172765 - protein, 727 aa, Zea Mays
MPGMPTDGGGAMVPFTGEPGQGAPPPAPVRPIRHGVAPPIFRIYVSWSSGNLLQVACLRPPNSDGGGGTEEVVGSVVEVNLGDGGSGGSEAEEKIDEAEMRRIEYGSVPAFALLQSRKNTLADVATMSHVPSVPDHAEWWQYVLEYSKTIGSLLGNPDPSGFMIEEPKTILKVREKPTSLRAAWELLEIFYVDKRLQGWLPERLVDWLADFDSLLSTMASTVYSKLSNFQKKLVNLQIVEDDPDYWNGLSAALSVGWLDIVVNMLRFHGSYQLDQMDSRETENGLVEAVAVLVSMMPRMRPNLPTGKLGQCCKTRPDFIKAWEKWRGQVTKLECSAFWIQCGHQKTRDGLKNLLHIMMGNIKEITAATSHWLELFASHFLYIKPFTVGFEGMHHLAQKCIQLMPSSGTNGLTGLIIGVMSENPEVVLAECTKNFGPWLVTHAMELLTADNDYADIMLHEERPNLGGISIEELHRLVYAQVLCCHPLTWQIAPTYLSSCLNQGLGLLEILLLKQPIQDNCLVLKTLEICRLYELENVSTIIMKIAGIYRWKHGRKGTGVYWFQQARDKVCLDRIAQQLFEHIGKSVTDDSFKQWEGLLELLGSDIGSAGGLEFLHRSLQQALDRRCGEAARQTVDFLIQLMKNPSTPQRFWLPLLHDSVELLNSKLSPLMDVAETTLLLNKLQELSMAKLRPDFSSNHLPSHAMSSVRLALASNLARAVLEDRSPSTL

SEQ ID NO: 172766 - protein, 494 aa, Zea Mays
MPGMPTDGGGAMVPFTGEPGQGAPPPAPVRPIRHGVAPPIFRIYVSWSSGNLLQVACLRPPNSDGGGGTEEVVGSVVEVNLGDGGSGGSEAEEKIDEAEMRRIEYGSVPAFALLQSRKNTLADVATMSHVPSVPDHAEWWQYVLEYSKTIGSLLGNPDPSGFMIEEPKTILKVREKPTSLRAAWELLEIFYVDKRLQGWLPERLVDWLADFDSLLSTMASTVYSKLSNFQKKLVNLQIVEDDPDYWNGLSAALSVGWLDIVVNMLRFHGSYQLDQMDSRETENGLVEAVAVLVSMMPRMRPNLPTGKLGQCCKTRPDFIKAWEKWRGQVTKLECSAFWIQCGHQKTRDGLKNLLHIMMGNIKEITAATSHWLELFASHFLYIKPFTVGFEGMHHLAQKCIQLMPSSGTNGLTGLIIGVMSENPEVVLAECTKNFGPWLVTHAMELLTADNDYADIMLHEERPNLGGISIEELHRLVYAQVLCCHPLTWQHGSIQ

SEQ ID NO: 172767 - protein, 516 aa, Zea Mays
MASTVYSKLSNFQKKLVNLQIVEDDPDYWNGLSAALSVGWLDIVVNMLRFHGSYQLDQMDSRETENGLVEAVAVLVSMMPRMRPNLPTGKLGQCCKTRPDFIKAWEKWRGQVTKLECSAFWIQCGHQKTRDGLKNLLHIMMGNIKEITAATSHWLELFASHFLYIKPFTVGFEGMHHLAQKCIQLMPSSGTNGLTGLIIGVMSENPEVVLAECTKNFGPWLVTHAMELLTADNDYADIMLHEERPNLGGISIEELHRLVYAQVLCCHPLTWQIAPTYLSSCLNQGLGLLEILLLKQPIQDNCLVLKTLEICRLYELENVSTIIMKIAGIYRWKHGRKGTGVYWFQQARDKVCLDRIAQQLFEHIGKSVTDDSFKQWEGLLELLGSDIGSAGGLEFLHRYRDFKRSLQQALDRRCGEAARQTVDFLIQLMKNPSTPQRFWLPLLHDSVELLNSKLSPLMDVAETTLLLNKLQELSMAKLRPDFSSNHLPSHAMSSVRLALASNLARAVLEDRSPSTL

SEQ ID NO: 172768 - protein, 607 aa, Zea Mays
MSHVPSVPDHAEWWQYVLEYSKTIGSLLGNPDPSGFMIEEPKTILKVREKPTSLRAAWELLEIFYVDKRLQGWLPERLVDWLADFDSLLSTMASTVYSKLSNFQKKLVNLQIVEDDPDYWNGLSAALSVGWLDIVVNMLRFHGSYQLDQMDSRETENGLVEAVAVLVSMMPRMRPNLPTGKLGQCCKTRPDFIKAWEKWRGQVTKLECSAFWIQCGHQKTRDGLKNLLHIMMGNIKEITAATSHWLELFASHFLYIKPFTVGFEGMHHLAQKCIQLMPSSGTNGLTGLIIGVMSENPEVVLAECTKNFGPWLVTHAMELLTADNDYADIMLHEERPNLGGISIEELHRLVYAQVLCCHPLTWQIAPTYLSSCLNQGLGLLEILLLKQPIQDNCLVLKTLEICRLYELENVSTIIMKIAGIYRWKHGRKGTGVYWFQQARDKVCLDRIAQQLFEHIGKSVTDDSFKQWEGLLELLGSDIGSAGGLEFLHRYRDFKRSLQQALDRRCGEAARQTVDFLIQLMKNPSTPQRFWLPLLHDSVELLNSKLSPLMDVAETTLLLNKLQELSMAKLRPDFSSNHLPSHAMSSVRLALASNLARAVLEDRSPSTL

SEQ ID NO: 172769 - protein, 210 aa, Zea Mays
MDINVLAFLVPAGIVSCFLPLSDASSFLVLYLVTSVYFSGVMVRLMLVLAPAACILSGIALSEAFGVLTRSMKFQRPTLDDGSFTAGDGSSDTPTNSEMGLKEKTSKKNRKKDKESEGSSPVDHRTEEKLLVLPCGPSAVGIMLLTILSGFYVLMDGCAITQMQMTRLHLGGTMVIRQLQWQTELLLWTIIHGITRTLQQLGLQWHLQKK

SEQ ID NO: 172770 - protein, 465 aa, Zea Mays
MTFVITVGLAVCFAAAAILIALIASSPTKGWSGRSLSLLDPTYASKYIPIIASVSEHQPPTWPSYFMDINVLAFLVPAGIVSCFLPLSDASSFLVLYLVTSVYFSGVMVRLMLVLAPAACILSGIALSEAFGVLTRSMKFQRPTLDDGSFTAGDGSSDTPTNSEMGLKEKTSKKNRKKDKESEGSSPVDHRTEEKLLVLPCGPSAVGIMLLTILSGFYVIHCVWAAAEAYSAPSIVLTSRSHDGFHVFDDFREAYGWLRHNTDADDKVASWWDYGYQTTAMANRTVIVDNNTWNNTHIATVGTAMASPEKVAWEIFNSLDVKYVLVIFGGLIGYPSDDINKFLWMVRIGGGVFPQIKEADYLKDGNYRVDAHSTPTMLNSLMYKLCYYRFVETDGKGFDRVRRYEIGKKHFKLTHFEEVFTTHHWLVRIYKLKPQKNRVRGKLKFKSSLKASFMRKTGGKKSPWK

SEQ ID NO: 172771 - protein, 166 aa, Zea Mays
MPGTRLFLRRFSVSGGVHTNPLGEHSYVEVAVQTRSGKSVRVVVELSFRAEFEVARASAGYRALVTALPEVFVGRADRLRGVVKVMCAAAKQCMKDNNMHMGPWRKHKYMQAKWLGTPERGAAAVAAAETPVVAVPSVTVGSPEKQTKFRASMLTFDFGRTALEVA

SEQ ID NO: 172772 - protein, 362 aa, Zea Mays
MQAAVNTTTVGAHPHPTKSSFLRPSPPCRVYFHASPRPNLRAIAMASKSQLQDQLIITRPDDWHLHLREGGVLEAVVPHSARHFGRAIIMPNLKPPVTTTARAVEYREEIMRALPPGSSFEPLMTLYLTDNTSPEEIKLARKSGIIFAVKLYPAGATTNSQDGVTDIFGKCLPVLEEMVRQEMPLLVHGEVTDPHVDTFDREKVFIDKILAPLVQKLPQLKIVMEHITTMDAVNFIESCEEGQAIVSAVTNGSRRYFLGTDSAPHDKRNKECSCGCAGIYSAPVALSLYVKVFEEAGALDKLEAFTSFNGPDFYGLPRNTSKIILRKNAWKVPATYKHSSGEIVPMFNGSTLEWLPSDQPKE

SEQ ID NO: 172773 - protein, 74 aa, Zea Mays
MKFRAIILWFSFTFSISKFLRGQHKPPDSVYNYFLLFFPYTDPRNNHLDQHKTISSEQYSVNHSVLTKIWNRVT

SEQ ID NO: 172774 - protein, 148 aa, Zea Mays
MAAASLALASPLRLLLRVRHPRGAIAVPCYFISRARDLAVKGSVDRNSAEEVRNILNMAERASQRRNVFHTNFLTPPIVKEAMLALEKFADTKAVAQGGYPQAERCRISVGHPDVMTSNPDVVAALRNNKGESWRYSFAGGTRCPGPC

SEQ ID NO: 172775 - protein, 148 aa, Zea Mays
MAAASLALASPLRLLLRVRHPRGAIAVPCYFISRGRYSTAIAVAAARDLAVKGSVDRNSAEEVRNILNMAERASQRRNVFHTNFLTPPIVKEAMLALEKFADTKAVAQGGYPQAERCRISVGHPDVMTSNPDVVAALREFPVGILFSW

SEQ ID NO: 172776 - protein, 236 aa, Zea Mays
MAERASQRRNVFHTNFLTPPIVKEAMLALEKFADTKAVAQGGYPQAERCRISVGHPDVMTSNPDVVAALSISGNFRLESCSHGDFLGAILGTGITREKVGDILLQGERGAQVLVDPELVDYLISTLEKVGKVGVSCTQIPLLALEYEPPRTNSFKTVESSLRVDALASAGFKISRTKLASLISSGDVRVNWTPTTKNGVTLKSGDVVSVSGMGRLKIGEIVTTRKGKYAVELIRYL

SEQ ID NO: 172777 - protein, 211 aa, Zea Mays
MLALEKFADTKAVAQGGYPQAERCRISVGHPDVMTSNPDVVAALSISGNFRLESCSHGDFLGAILGTGITREKVGDILLQGERGAQVLVDPELVDYLISTLEKVGKVGVSCTQIPLLALEYEPPRTNSFKTVESSLRVDALASAGFKISRTKLASLISSGDVRVNWTPTTKNGVTLKSGDVVSVSGMGRLKIGEIVTTRKGKYAVELIRYL

SEQ ID NO: 172778 - protein, 334 aa, Zea Mays
MSLTGSALEAALQAVGRGLDAAGDHRLLYCKGGGRLVALEEDRARDLPLPDGGVLPSVPPDVEVEQCRRDPERIRPFPSGPSSAAADGPFVCSFDKMAEYFNRKSCLSETVPLGSFNSLFSFTGSWKNDAAATKALAIDGYSLPLFRVKIRSSELTLLESVKHAIPNVWDPSALASFIENYGTHIIISVTVGGKDEVYIKQHSSSQLSGLEFKNYVREIGRERFSDVENKSNATPINYSEKDITVIFRRRGGCDLVQSFSDWKGTVASAPDVIGMTFLSIVSLVDDVPGKKHLARAVELYLTCKICFRLLSFVLCSYATQELIHHIEYSIFIMP

SEQ ID NO: 172779 - protein, 358 aa, Zea Mays
MFGIHQHWLGLEFKNYVREIGRERFSDVENKSNATPINYSEKDITVIFRRRGGCDLVQSFSDWKGTVASAPDVIGMTFLSIVSLVDDVPGKKHLARAVELYLTYKPPIEELQYFLDFQVPLVWAPAPPGIASHHRKEPVCPSLQFSLMGPKLFISTEQISVGRRPVVGLKLLLEGAKQNRLAIHLQHLVSLPKIFLPHWDSHITIGPPKWQGPEEQDSRWFEPIKWKNFAHVSTAPIEYTETNITDLSGVYIVTGAQLGVWDFGAKSVLHLKLLFSRVPGCTIRRSVWDHSPSSSSIHKADESSSSSSDNAKLLKIIDMTETLKGPQDAPGHWLITGAKLGVEKGRIVVRAKYSLLNY

SEQ ID NO: 172780 - protein, 605 aa, Zea Mays
MPSSTIRSISITVSDDDGAAAAPSRRPRAGRRKAVARSLGQRAVRLVARWWPVLLLLPAVALLLFEASRLRASSPGPSPPVSSLGRLDPTTRLVHGVREPCLKLLSPKSLANVVFPEGTRLDSVVSRITYKTDDDDYDTYHSEANSTYLLQHAEATRFDLFTGFQTLAEREDSFKVNETVSVHCGFYSDNGGFKISEEDRRYMRACKVVVSTCAFGGGDDLYQPIGMANSSIGRVCYVAFWDEVTLAAQEAEGKVIGDDSMIGRWRIIVVRSLPFVDQRLNGKIPKMLTHRLFTEARYSIWVDSKYQLRRDPIGMLEALLWRTNSTFAISEHGARSNIYDEGKAIVQKHKATPEEVEVQLTRYRQDGMPDTKRLHGLKALAEASVIVRELTPATNHFMCAWFNEVVRFTSRDQLSFPYVLWRLNMHGLSMFPVCTRRDLVNSLGHTRKDIWNTTWYPKAADHVTTEKTWYVVDATDKILGRLASTIAVHIRGKNEPTYTPSVDMGAFVIVVNADKVAVSGKKRSQKLYRRHSGRPGGMKEETFDQLQKRIPERIIEHAVRGMLPKGRLGRRLFTHLKVYKGTEHPHEAQKPVPLPIRDKRIQKTG

SEQ ID NO: 172781 - protein, 387 aa, Zea Mays
MPSSTIRSISITVSDDDGAAAAPSRRPRAGRRKAVARSLGQRAVRLVARWWPVLLLLPAVALLLFEASRLRASSPGPSPPVSSLGRLDPTTRLVHGVREPCLKLLSPKSLANVVFPEGTRLDSVVSRITYKTDDDDYDTYHSEANSTYLLQHAEATRFDLFTGFQTLAEREDSFKVNETVSVHCGFYSDNGGFKISEEDRRYMRACKVVVSTCAFGGGDDLYQPIGMANSSIGRVCYVAFWDEVTLAAQEAEGKVIGDDSMIGRWRIIVVRSLPFVDQRLNGKIPKMLTHRLFTEARYSIWVDSKYQLRRDPIGMLEALLWRTNSTFAISEHGARSNIYDEGKAIVQKHKATPEEVEVQLTRYRQDGMPDTKRLHGLKGHMEYNLVS

SEQ ID NO: 172782 - protein, 471 aa, Zea Mays
MPSSTIRSISITVSDDDGAAAAPSRRPRAGRRKAVARSLGQRAVRLVARWWPVLLLLPAVALLLFEASRLRASSPGPSPPVSSLGRLDPTTRLVHGVRELFVSLILTACLKLLSPKSLANVVFPEGTRLDSVVSRITYKTDDDDYDTYHSEANSTYLLQHAEATRFDLFTGFQTLAEREDSFKVNETVSVHCGFYSDNGGFKISEEDRRYMRACKVVVSTCAFGGGDDLYQPIGMANSSIGRVCYVAFWDEVTLAAQEAEGKVIGDDSMIGRWRIIVVRSLPFVDQRLNGKIPKMLTHRLFTEARYSIWVDSKYQLRRDPIGMLEALLWRTNSTFAISEHGARSNIYDEGKAIVQKHKATPEEVEVQLTRYRQDGMPDTKRLHGLKALAEASVIVRELTPATNHFMCAWFNEVVRFTSRDQLSFPYVLWRLNMHGLSMFPVCTRRDLVNSLGHTRKVKPLTQTNSGSSTTS

SEQ ID NO: 172783 - protein, 261 aa, Zea Mays
MRACKVVVSTCAFGGGDDLYQPIGMANSSIGRVCYVAFWDEVTLAAQEAEGKVIGDDSMIGRWRIIVVRSLPFVDQRLNGKIPKMLTHRLFTEARYSIWVDSKYQLRRDPIGMLEALLWRTNSTFAISEHGARSNIYDEGKAIVQKHKATPEEVEVQLTRYRQDGMPDTKRLHGLKALAEASVIVRELTPATNHFMCAWFNEVVRFTSRDQLSFPYVLWRLNMHGLSMFPVCTRRDLVNSLGHTRKVKPLTQTNSGSSTTS

SEQ ID NO: 172784 - protein, 438 aa, Zea Mays
MGDCVVEDGHVHHPSDEVEGAVPLTVAVELDERAGESREEGGGQRKKVGGIRREPSFSRWCRDTSVAAASNTAVAAAISDSDSDDSEEFDLPLLPSSSGGGSSPMDIEAGATVRSDDLPISPRLLAKVIGLIACWYTLSTCLTLYNKEMLGKHMWKFPAPFLMNTVHFTMQAVASRAIVWFQQRGLEGGPNKMSWKDYCLRVVPTALATALDINLSNISLVFITVTFATMCKSASPIFILLFAFMFRLEKPSFSLLGIMLVVSFGVLLTVAKETEFNLWGFIFIMLAAVMSGFRWSMTQILLQKEEYGLKNPFTLMSHVTPVMAIVTAIISIVMDPWHDFRASHFFDSSAHIIRSSLLLLLGGALAFFMVLTEYVLVSVTSAVTVTVAGIVKEAVTILVAVLFFNDPFTWLKALGLAIIIFGVSLFNIYKKHVFICNA

SEQ ID NO: 172785 - protein, 399 aa, Zea Mays
MGDCVVEDGHVHHPSDEVEGAVPLTVAVELDERAGESREEGGGQRKKVGGIRREPSFSRWCRDTSVAAASNTAVAAAISDSDSDDSEEFDLPLLPSSSGGGSSPMDIEAGATVRSDDLPISPRLLAKVIGLIACWYTLSTCLTLYNKEMLGKHMWKFPAPFLMNTVHFTMQAVASRAIVWFQQRGLEGGPNKMSWKDYCLRVVPTALATALDINLSNISLVFITVTFATMCKSASPIFILLFAFMFRLEKPSFSLLGIMLVVSFGVLLTVAKETEFNLWGFIFIMLAAVMSGFRWSMTQILLQKEEYGLKNPFTLMSHVTPVMAIVTAIISIVMDPWHDFRASHFFDSSAHIIRSSLLLLLGGALAFFMVLTEYVLVSVTSAVTVTVAGIVKEAVTILV

SEQ ID NO: 172786 - protein, 155 aa, Zea Mays
MSHVTPVMAIVTAIISIVMDPWHDFRASHFFDSSAHIIRSSLLLLLGGALAFFMVLTEYVLVSVTSAVTVTVAGIVKEAVTILVAVLFFNDPFTWLKALGLAIIIFGVSLFNIYKYKRFKKGHYNENAGTNTQSSNWTSKYVILDEDTEAQDDTG

SEQ ID NO: 172787 - protein, 266 aa, Zea Mays
MGRYGPFPAAAGDGGGCLPLPIVAAEGALAVLDGAIATAAFVQLARIHRHNQLQGWTRQKIFHFMIGLSNIVFLVYFVSTIIATCQRWICWVHGCGFVLMASPQILLLASFLLLLSFWVDLCHQTNDEDEEDGRSQSHHEALLDRTKAKPGIHPVNIRQRCCPGIQLGSRQKFVILVLLLSFVVMLAFAILIWVGRGDNPIDSSLLKRVYLDVFSVVVIVLGGALACYGAVLFSKMSKVRSETVSTEKWKMWTSSTMLLFCLYITS

SEQ ID NO: 172788 - protein, 173 aa, Zea Mays
MPRQGWRCRWQRRCWRRRRGHKPRIAASPSPSHASIVRRRLQCAGRAEDGGDDADGGEGVGGGDGGGRGRGKAQIRLRCRGQGGRGRRLGGSMRECGEGRIQRRRGQASCGREGGGVRGEISGERRGEGGTRVRVVDALLILLRNCRDIVRSQGRDSFNRSGLGTAVVTRSRS

SEQ ID NO: 172789 - protein, 131 aa, Zea Mays
MGMSTTTDLSAPPHSATLPCRMASSSSSSSVAPWPRPDKHRGAGALVRRAQLVLSREVGWCGQRAWRKLLRRLAQETRCVCSSPTAAATGRPITFGYDAASYAKNFDDGRSPAPRRVVVGANAGDKPSGNN

SEQ ID NO: 172790 - protein, 70 aa, Zea Mays
MGQVRHQSKQALIVRENWFYSTIGHHFQKTPLKRFPSRQISPNKNTNRELFPCYFLKIMFFRCYKTISPY

SEQ ID NO: 172791 - protein, 429 aa, Zea Mays
MSSLLDSIVRHVPSPKADLEAPFQMLVSMMERDFYLGRILTGRVRSGVVRVGDKVHGLRSTDDGVHKIEDGKVVKLMKKKGTNMVTVEAAGAGDIISMAGLAAPAIGHTVANSEILSALPTIELDPPTISMTFGVNDSPLAGRDGTHLTGAKIGNRLMAEAETNLAINVLPGPLSESYEVQGRGELQLGILIENMRREGFELSVSPPKVMYKTERGERLEPIEEVTVEVGEEHVGFVLETITHRKGEVVDMGPVPGTTGRTRIFMTCPSRGLVGVKGIFSSFTRGTGFMHRAFQAYAKYRGPLGSVRKGVLISVGKGLITSHALMSLEARGILFVSPGMEAYEGMIVGEHSRDSDLEVNPVRTKELTNIRAPGKDENVRLSPPRLMSLEEAIGYVAADELIEVTPKVVRLRKKYLDSTKRKMMKNKPMN

SEQ ID NO: 172792 - protein, 341 aa, Zea Mays
MSSLLDSIVRHVPSPKADLEAPFQMLVSMMERDFYLGRILTGRVRSGVVRVGDKVHGLRSTDDGVHKIEDGKVVKLMKKKGTNMVTVEAAGAGDIISMAGLAAPAIGHTVANSEILSALPTIELDPPTISMTFGVNDSPLAGRDGTHLTGAKIGNRLMAEAETNLAINVLPGPLSESYEVQGRGELQLGIFSSFTRGTGFMHRAFQAYAKYRGPLGSVRKGVLISVGKGLITSHALMSLEARGILFVSPGMEAYEGMIVGEHSRDSDLEVNPVRTKELTNIRAPGKDENVRLSPPRLMSLEEAIGYVAADELIEVTPKVVRLRKKYLDSTKRKMMKNKPMN

SEQ ID NO: 172793 - protein, 547 aa, Zea Mays
MVDTPGHADFGGEVERVVGMVEGAVLVVDAGEGPLAQTKFVLSKALKYGLRPILLLNKVDRPSVSEETCDEVESLVFDLFANLGATEEQLDFPVLYASAKEGWASLTFTKSPPDNAKNMSSLLDSIVRHVPSPKADLEAPFQMLVSMMERDFYLGRILTGRVRSGVVRVGDKVHGLRSTDDGVHKIEDGKVVKLMKKKGTNMVTVEAAGAGDIISMAGLAAPAIGHTVANSEILSALPTIELDPPTISMTFGVNDSPLAGRDGTHLTGAKIGNRLMAEAETNLAINVLPGPLSESYEVQGRGELQLGILIENMRREGFELSVSPPKVMYKTERGERLEPIEEVTVEVGEEHVGFVLETITHRKGEVVDMGPVPGTTGRTRIFMTCPSRGLVGVKGIFSSFTRGTGFMHRAFQAYAKYRGPLGSVRKGVLISVGKGLITSHALMSLEARGILFVSPGMEAYEGMIVGEHSRDSDLEVNPVRTKELTNIRAPGKDENVRLSPPRLMSLEEAIGYVAADELIEVTPKVVRLRKKYLDSTKRKMMKNKPMN

SEQ ID NO: 172794 - protein, 645 aa, Zea Mays
MAAALLLRSLRPSVSRAHIHLLSHASSPTALGSPLLPRLYSSAAASTAASPVFTPGGVMDPSRIRNVAVIAHVDHGKTTLMDRLLRQCGADIPHERAMDSISLERERGITIASKVTSVSWKENELNMVDTPGHADFGGEVERVVGMVEGAVLVVDAGEGPLAQTKFVLSKALKYGLRPILLLNKVDRPSVSEETCDEVESLVFDLFANLGATEEQLDFPVLYASAKEGWASLTFTKSPPDNAKNMSSLLDSIVRHVPSPKADLEAPFQMLVSMMERDFYLGRILTGRVRSGVVRVGDKVHGLRSTDDGVHKIEDGKVVKLMKKKGTNMVTVEAAGAGDIISMAGLAAPAIGHTVANSEILSALPTIELDPPTISMTFGVNDSPLAGRDGTHLTGAKIGNRLMAEAETNLAINVLPGPLSESYEVQGRGELQLGILIENMRREGFELSVSPPKVMYKTERGERLEPIEEVTVEVGEEHVGFVLETITHRKGEVVDMGPVPGTTGRTRIFMTCPSRGLVGVKGIFSSFTRGTGFMHRAFQAYAKYRGPLGSVRKGVLISVGKGLITSHALMSLEARGILFVSPGMEAYEGMIVGEHSRDSDLEMSLEEAIGYVAADELIEVTPKVVRLRKKYLDSTKRKMMKNKPMN

SEQ ID NO: 172795 - protein, 272 aa, Zea Mays
MAEAETNLAINVLPGPLSESYEVQGRGELQLGILIENMRREGFELSVSPPKVMYKTERGERLEPIEEVTVEVGEEHVGFVLETITHRKGEVVDMGPVPGTTGRTRIFMTCPSRGLVGVKGIFSSFTRGTGFMHRAFQAYAKYRGPLGSVRKGVLISVGKGLITSHALMSLEARGILFVSPGMEAYEGMIVGEHSRDSDLEVNPVRTKELTNIRAPGKDENVRLSPPRLMSLEEAIGYVAADELIEVTPKVVRLRKKYLDSTKRKMMKNKPMN

SEQ ID NO: 172796 - protein, 118 aa, Zea Mays
MVEAKADTLCVFRPGVDTTYLLYVNGIVLTTSSPDLLRRIISSLQQEFTMKTWVSCTTSWGSPSTAAPRACSSTSASTLSTSSSALAWLTVSPARLRWTLMARCAFICTLRGSHISPP

SEQ ID NO: 172797 - protein, 126 aa, Zea Mays
MAFDRVMSPVLRGCVESHPQAGRHVPGPLVFPRTVIASLAIEPLLSPTPPSNHVRAPLALSAHPAVSPPSPSPTNWVVDSEASFHTTPTNSSLFHSHPPHPSHTSSIVVGNSSTLSVTSVGASVLP

SEQ ID NO: 172798 - protein, 207 aa, Zea Mays
MAFDRVMSPVLRGCVESHPQAGRHVPGPLVFPRTVIASLAIEPLLSPTPPSNHRLCHACQLGRHSRLPFSTFTSRAVQAFDLVHCDLWTSLVLSLSGYKYYLVILDDYSHFLWTFPLRLKSDTFTTLTHFFTWVSTRFRLPVRALQCDNGSEFDNNASRSFFLTHGVQLRLSCPYTSPQNARAEQIIRTTTNMIRCLLFQTSLPASY

SEQ ID NO: 172799 - protein, 529 aa, Zea Mays
MVRLTQEKENAENTIVSLQQEIQILSRMHEQYRERKETEARQMEEHLSIRLKEAELLLTQSKKKAEEIESASQLKSQLWSRKANIFWSFMDNQKLSIKDIRISSQSIKQEMFALQMKWRDEISNIGHDLKGLVDAADNYHKVLAENQKLFNEVQELKGNIRVYCRVRPFLPGQDGKTTVIDYIGENGDILITNPFKQGKDACRMFKFNKVFNTRASQVEVFSDIQPLIRSVLDGFNVCIFAYGQTGSGKTYTMSGPGTSKEDWGVNYRALNDLFYISLSRRNAFSYEVGVQMVEIYNEQVRDLLSNDIAQKRLGIWSTSQPNGLVVPDASLHPVKSTLDVLELMEIGQTNRAVGSTALNERSSRSHSILTVHVRGVDLKNGSTSRGCLHLIDLAGSERVERSEAIGDRLKEAQYINKSLSALGDVIFALAQKNAHVPYRNSKLTQVLQSSLGGQAKTLMFVQINPDTESYSETISTLKFAERVSGVELGAARSNKEGFISERHNITERYGNRSTPEGQSQVTKFINRYK

SEQ ID NO: 172800 - protein, 353 aa, Zea Mays
MVEIYNEQVRDLLSNDIAQKRLGIWSTSQPNGLVVPDASLHPVKSTLDVLELMEIGQTNRAVGSTALNERSSRSHSILTVHVRGVDLKNGSTSRGCLHLIDLAGSERVERSEAIGDRLKEAQYINKSLSALGDVIFALAQKNAHVPYRNSKLTQVLQSSLGGQAKTLMFVQINPDTESYSETISTLKFAERVSGVELGAARSNKEGKDIKELLEQVSYLKDTISRKDMEIDQLLKDKAKSPSSSTDINDSSQQIRRLSGAAGSGEAECEDNMSDDGCSVAGTECSVGGASEATAERMQKAPSRIGRLFLTKNGQPANSKPKPRESALKPSGRTTSTGSQATGGGSSVKPPKRR

SEQ ID NO: 172801 - protein, 441 aa, Zea Mays
MFKFNKVFNTRASQVEVFSDIQPLIRSVLDGFNVCIFAYGQTGSGKTYTMSGPGTSKEDWGVNYRALNDLFYISLSRRNAFSYEVGVQMVEIYNEQVRDLLSNDIAQKRLGIWSTSQPNGLVVPDASLHPVKSTLDVLELMEIGQTNRAVGSTALNERSSRSHSILTVHVRGVDLKNGSTSRGCLHLIDLAGSERVERSEAIGDRLKEAQYINKSLSALGDVIFALAQKNAHVPYRNSKLTQVLQSSLGGQAKTLMFVQINPDTESYSETISTLKFAERVSGVELGAARSNKEGKDIKELLEQVSYLKDTISRKDMEIDQLLKDKAKSPSSSTDINDSSQQIRRLSGAAGSGEAECEDNMSDDGCSVAGTECSVGGASEATAERMQKAPSRIGRLFLTKNGQPANSKPKPRESALKPSGRTTSTGSQATGGGSSVKPPKRR

SEQ ID NO: 172802 - protein, 639 aa, Zea Mays
MVRLTQEKENAENTIVSLQQEIQILSRMHEQYRERKETEARQMEEHLSIRLKEAELLLTQSKKKAEEIESASQLKSQLWSRKANIFWSFMDNQKLSIKDIRISSQSIKQEMFALQMKWRDEISNIGHDLKGLVDAADNYHKVLAENQKLFNEVQELKGNIRVYCRVRPFLPGQDGKTTVIDYIGENGDILITNPFKQGKDACRMFKFNKVFNTRASQVEVFSDIQPLIRSVLDGFNVCIFAYGQTGSGKTYTMSGPGTSKEDWGVNYRALNDLFYISLSRRNAFSYEVGVQMVEIYNEQVRDLLSNDIAQKRLGIWSTSQPNGLVVPDASLHPVKSTLDVLELMEIGQTNRAVGSTALNERSSRSHSILTVHVRGVDLKNGSTSRGCLHLIDLAGSERVERSEAIGDRLKEAQYINKSLSALGDVIFALAQKNAHVPYRNSKLTQVLQSSLGGQAKTLMFVQINPDTESYSETISTLKFAERVSGVELGAARSNKEGKDIKELLEQVSYLKDTISRKDMEIDQLLKDKAKSPSSSTDINDSSQQIRRLSGEAECEDNMSDDGCSVAGTECSVGGASEATAERMQKAPSRIGRLFLTKNGQPANSKPKPRESALKPSGRTTSTGSQATGGGSSVKPPKRR

SEQ ID NO: 172803 - protein, 326 aa, Zea Mays
MFKFNKVFNTRASQVEVFSDIQPLIRSVLDGFNVCIFAYGQTGSGKTYTMSGPGTSKEDWGVNYRALNDLFYISLSRRNAFSYEVGVQMVEIYNEQVRDLLSNDIAQKRLGIWSTSQPNGLVVPDASLHPVKSTLDVLELMEIGQTNRAVGSTALNERSSRSHSILTVHVRGVDLKNGSTSRGCLHLIDLAGSERVERSEAIGDRLKEAQYINKSLSALGDVIFALAQKNAHVPYRNSKLTQVLQSSLGGQAKTLMFVQINPDTESYSETISTLKFAERVSGVELGAARSNKEGFISERHNITERYGNRSTPEGQSQVTKFINRYK

SEQ ID NO: 172804 - protein, 626 aa, Zea Mays
MVRLTQEKENAENTIVSLQQEIQILSRMHEQYRERKETEARQMEEHLSIRLKEAELLLTQSKKKAEEIESASQLKSQLWSRKANIFWSFMDNQKLSIKDIRISSQSIKQEMFALQMKWRDEISNIGHDLKGLVDAADNYHKVLAENQKLFNEVQELKGNIRVYCRVRPFLPGQDGKTTVIDYIGENGDILITNPFKQGKDACRMFKFNKVFNTRASQVEVFSDIQPLIRSVLDGFNVCIFAYGQTGSGKTYTMSGPGTSKEDWGVNYRALNDLFYISLSRRNAFSYEVGVQMVEIYNEQVRDLLSNDIAQKRLGIWSTSQPNGLVVPDASLHPVKSTLDVLELMEIGQTNRAVGSTALNERSSRSHSILTVHVRGVDLKNGSTSRGCLHLIDLAGSERVERSEAIGDRLKEAQYINKSLSALGDVIFALAQKNAHVPYRNSKLTQVLQSSLGGQAKTLMFVQINPDTESYSETISTLKFAERVSGVELGAARSNKEGKDIKELLEQVSYLKDTISRKDMEIDQLLKDKAKSPSSSTDINDSSQQIRRLSGAAGSGEAECEDNMSDDGCSVAGTECSVGGASEATAERMQKAPSRIGRLFLTKNGQPANSKPKPRESALKPSGTLET

SEQ ID NO: 172805 - protein, 435 aa, Zea Mays
MFKFNKVFNTRASQVEVFSDIQPLIRSVLDGFNVCIFAYGQTGSGKTYTMSGPGTSKEDWGVNYRALNDLFYISLSRRNAFSYEVGVQMVEIYNEQVRDLLSNDIAQKRSQPNGLVVPDASLHPVKSTLDVLELMEIGQTNRAVGSTALNERSSRSHSILTVHVRGVDLKNGSTSRGCLHLIDLAGSERVERSEAIGDRLKEAQYINKSLSALGDVIFALAQKNAHVPYRNSKLTQVLQSSLGGQAKTLMFVQINPDTESYSETISTLKFAERVSGVELGAARSNKEGKDIKELLEQVSYLKDTISRKDMEIDQLLKDKAKSPSSSTDINDSSQQIRRLSGAAGSGEAECEDNMSDDGCSVAGTECSVGGASEATAERMQKAPSRIGRLFLTKNGQPANSKPKPRESALKPSGRTTSTGSQATGGGSSVKPPKRR

SEQ ID NO: 172806 - protein, 273 aa, Zea Mays
MAEILKIQQLYDGSSCIFSHGQQRFRLLRHWLDVDGVPWGEVQIIEEDTPQRTPRDAFAQLAAPNSFRQCASSIMPSLHVYCSTQLDHVDSDMDRDSLSPTSTSSDHSITDKRIYLLGSRSSGLVRCGIADESSNEGQNSVHEQSCQSHDSVKEIDGYGQPDKNTNTGDEDNLCFISSKSFQRTRKKDTKQQKHYFTTKNASQAPLSFWPHWAYEMYDSYSLSRRAADLWRQVILNPSMDDHVRKPNYLSYCIGSKLPISESLRQELLEIDGV

SEQ ID NO: 172807 - protein, 428 aa, Zea Mays
MNSAATSTAGAASGASCGRGEMAERDRVLERERRQMEQILELDMEELQVEEVDDDGSSSSSDVDTFLRNTHGDGGINTYEELSIDTSTVSLQDHTYLGAKVDGARGKFAFLHGDRVLNLPMFYLQGVVLFPEASLHLRVFQPRLVEAIDKAINHVDAPCMIGVVYVYRHTNDGHYTIASVGTMAEILKIQQLYDGSSCIFSHGQQRFRLLRHWLDVDGVPWGEVQIIEEDTPQRTPRDAFAQLAAPNSFRDSLSPTSTSSDHSITDKRIYLLGSRSSGLVRCGIADESSNEGQNSVHEQSCQSHDSVKEIDGYGQPDKNTNTGDEDNLCFISSKSFQRTRKKDTKQQKHYFTTKNASQAPLSFWPHWAYEMYDSYSLSRRAADLWRQVILNPSMDDHVRKPNYLSYCIGSKLPISESLRQELLEIDGV

SEQ ID NO: 172808 - protein, 362 aa, Zea Mays
MAERDRVLERERRQMEQILELDMEELQVEEVDDDGSSSSSDVDTFLRNTHGDGGINTYEELSIDTSTVSLQDHTYLGAKVDGARGKFAFLHGDRVLNLPMFYLQGVVLFPEASLHLRVFQPRLVEAIDKAINHVDAPCMIGVVYVYRHTNDGHYTIASVGTMAEILKIQQLYDGSSCIFSHGQQRFRLLRHWLDVDGVPWGEVQIIEEDTPQRTPRDAFAQLAAPNSFRDSLSPTSTSSDHSITDKRIYLLGSRSSGLVRCGIADESSNEGQNSVHEQSCQSHDSVKEIDGYGQPDKNTNTGDEDNLCFISSKSFQRTRKKDTKQQKHYFTTKNASQAPLSFWPHWAYEMYDSYSLSRRAAD

SEQ ID NO: 172809 - protein, 387 aa, Zea Mays
MAERDRVLERERRQMEQILELDMEELQVEEVDDDGSSSSSDVDTFLRNTHGDGGINTYEELSIDTSTVSLQDHTYLGAKVDGARGKFAFLHGDRVLNLPMFYLQGVVLFPEASLHLRVFQPRLVEAIDKAINHVDAPCMIGVVYVYRHTNDGHYTIASVGTMAERFRLLRHWLDVDGVPWGEVQIIEEDTPQRTPRDAFAQLAAPNSFRDSLSPTSTSSDHSITDKRIYLLGSRSSGLVRCGIADESSNEGQNSVHEQSCQSHDSVKEIDGYGQPDKNTNTGDEDNLCFISSKSFQRTRKKDTKQQKHYFTTKNASQAPLSFWPHWAYEMYDSYSLSRRAADLWRQVILNPSMDDHVRKPNYLSYCIGSKLPISESLRQELLEIDGV

SEQ ID NO: 172810 - protein, 376 aa, Zea Mays
MAERDRVLERERRQMEQILELDMEELQVEEVDDDGSSSSSDVDTFLRNTHGDGGINTYEELSIDTSTVSLQDHTYLGAKVDGARGKFAFLHGDRVLNLPMFYLQGVVLFPEASLHLRVFQPRLVEAIDKAINHVDAPCMIGVVYVYRHTNDGHYTIASVGTMAERFRLLRHWLDVDGVPWGEVQIIEEDTPQRTPRDAFAQLAAPNSFRQCASSIMPSLHVYCSTQLDHVDSDMDRDSLSPTSTSSDHSITDKRIYLLGSRSSGLVRCGIADESSNEGQNSVHEQSCQSHDSVKEIDGYGQPDKNTNTGDEDNLCFISSKSFQRTRKKDTKQQKHYFTTKNASQAPLSFWPHWAYEMYDSYSLSRRAAGKLYIFIL

SEQ ID NO: 172811 - protein, 362 aa, Zea Mays
MAERDRVLERERRQMEQILELDMEELQVEEVDDDGSSSSSDVDTFLRNTHGDGGINTYEELSIDTSTVSLQDHTYLGAKVDGARGKFAFLHGDRVLNLPMFYLQGVVLFPEASLHLRVFQPRLVEAIDKAINHVDAPCMIGVVYVYRHTNDGHYTIASVGTMAEILKIQQLYDGSSCIFSHGQQRFRLLRHWLDVDGVPWGEVQIIEEDTPQRTPRDAFAQLAAPNSFSTSSDHSITDKRIYLLGSRSSGLVRCGIADESSNEGQNSVHEQSCQSHDSVKEIDGYGQPDKNTNTGDEDNLCFISSKSFQRTRKKDTKQQKHYFTTKNASQAPLSFWPHWAYEMYDSYSLSRRAAGKLYIFIL

SEQ ID NO: 172812 - protein, 342 aa, Zea Mays
MAEILKIQQLYDGSSCIFSHGQQRFRLLRHWLDVDGVPWGEVQIIEEDTPQRTPRDAFAQLAAPNSFRDSLSPTSTSSDHSITDKRIYLLGSRSSGLVRCGIADESSNEGQNSVHEQSCQSHDSVKEIDGYGQPDKNTNTGDEDNLCFISSKSFQRTRKKDTKQQKHYFTTKNASQAPLSFWPHWAYEMYDSYSLSRRAAEALSQIDGVSYRLQREIQLLKAFNIIRCRNCLIRIARRSDMVVTSSDSPMSLHSRPHGFVKEIITVYNATGLALRGDPSKTHSWFPEYTWTIALCNACQSNIGWLFRVDDKNLHPRSFWAIRSSQISDDTQSRDRTDQTIHV

SEQ ID NO: 172813 - protein, 364 aa, Zea Mays
MAERDRVLERERRQMEQILELDMEELQVEEVDDDGSSSSSDVDTFLRNTHGDGGINTYEELSIDTSTVSLQDHTYLGAKVDGARGKFAFLHGDRVLNLPMFYLQGVVLFPEASLHLRVFQPRLVEAIDKAINHVDAPCMIGVVYVYRHTNDGHYTIASVGTMAEILKIQQLYDGSSCIFSHGQQRFRLLRHWLDVDGVPWGEVQIIEEDTPQRTPRDAFAQLAAPNSFRDSLSPTSTSSDHSITDKRIYLLGSRSSGLVRCGIADESSNEGQNSVHEQSCQSHDSVKEIDGYGQPDKNTNTGDEDNLCFISSKSFQRTRKKDTKQQKHYFTTKNASQAPLSFWPHWAYEMYDSYSLSRRAAGKE

SEQ ID NO: 172814 - protein, 303 aa, Zea Mays
MSRALLSHVLHRPPHFAYTCLRSGVGARGGVLASGIHPLRRLNCSAVEAVPGPTEEAPAPQARKKRVVSGVQPTGSVHLGNYLGAIKNWVALQDSYETFFFIVDLHAITLPYEAPLLSKATRSTAAIYLACGVDSSKASIFVQSHVRAHVELMWLLSSSTPIGWLNRMIQFKEKSRKAGDENVGVALLTYPVLMASDILLYQSDLVPVGEDQTQHLELTREIAERVNNLYGGRKWKKLGGRGGLLFKVPEALIPPAGARVMSLTDGLSKVIDRTASLDMHLIIECPSLLLQTSLVLTFLTQKM

SEQ ID NO: 172815 - protein, 205 aa, Zea Mays
MSRALLSHVLHRPPHFAYTCLRSGVGARGGVLASGIHPLRRLNCSAVEAVPGPTEEAPAPQARKKRVVSGVQPTGSVHLGNYLGAIKNWVALQDSYETFFFIVDLHAITLPYEAPLLSKATRSTAAIYLACGVDSSKASIFVQSHVRAHVELMWLLSSSTPIGWLNRMIQFKEKSRKAGDENVGVALLTYPVLMASDILLYQLQQ

SEQ ID NO: 172816 - protein, 403 aa, Zea Mays
MSRALLSHVLHRPPHFAYTWSGVGARGGVLASGIHPLRRLNCSAVEAVPGPTEEAPAPQARKKRVVSGVQPTGSVHLGNYLGAIKNWVALQDSYETFFFIVDLHAITLPYEAPLLSKATRSTAAIYLACGVDSSKASIFVQSHVRAHVELMWLLSSSTPIGWLNRMIQFKEKSRKAGDENVGVALLTYPVLMASDILLYQSDLVPVGEDQTQHLELTREIAERVNNLYGGRKWKKLGGRGGLLFKVPEALIPPAGARVMSLTDGLSKMSKSAPSDQSRINLLDPKDVIANKIKRCKTDSFPGMEFDNPERPECRNLLSIYQIITEKTKEEVVSECQHMNWGTFKTTLTEALIDHLQPIQVRYEEIMSDPAYLDNVLLEGAVKAAEIADITLNNVYQAMGFLRR

SEQ ID NO: 172817 - protein, 454 aa, Zea Mays
MPLLHSLSVLFLPVTVIELLKFPPPTIYPLRLPYLATVPHPHLPRPSSFRTRCEIRNGHATSTIVGPHCRGGRRAPRADDDVRGGRALAGAAARRRARPAAAVVAVPGERDARGGDRAAVRGVGAVRGRAPAQHVPARGRPRVPLLLARGGQGPRARRLHDHPGRRRLAPGHQPRPRRHQGQRRHLHGEGDRLGDARVHHPGGRRRGQDGRAVGRHRGLADRAQGPAPRHVQLGVLRRERAVLPGKEHHFQEHVAGAEAWGGGEAGGGAAGVGGQRGVRGVQVPGRAGHAVRPLGPPLLQGLLHPRVRGLHLRQRAVAVRGLPRARDRAGLRGADGAEPAEHAGGHGVLVRQLPGDGVRRALPGPRLGHLLPRRLRLHPHGRHHRPQRVVQLGRPQPRAVRRPHLSILCCCLRHCLLMGLADAMPGVQKRTQREGTLTAPAPFHSIPLPVNHPS

SEQ ID NO: 172818 - protein, 391 aa, Zea Mays
MGTPRARLLARIAVAAVVLLAPTTTCGVAGHSRALRPGGGRGQQQPSSLFPANATRAEAIERQFVEWVRYVGGLRHSTFQHAVARASPSYSLVVDKDPALGDFTTIQAAVDSLPAINLVRVVIRVNAGTYTEKVTVSAMRAFITLEGAGADKTVVQWGDTADSPTGPKGRPLGTFNSASFAVNAQYFLARNITFKNTSPVPKPGAAGKQAVALRVSADNAAFVGCRFLGAQDTLYDHSGRHYYKDCYIQGSVDFIFGNALSLYEDCHVHAIARDYGALTAQNRQSMLEDTGFSFVNCRVTGSGALYLGRAWGTFSRVVFAYTHMDDIIVPNGWFNWGDPNRELTVFYGQYKCTGPGATYAGRVAWSHELTDDEAKPFISLSFIDGTEWVRL

SEQ ID NO: 172819 - protein, 138 aa, Zea Mays
MSAMHHDTSHDLKHLGAKLKDILGVPDTSLEARYITLHVCDLVAERGARLAAAGIYGILKKLGKDKLLGDFSQQRTVVAIDGGLYEHYKKFSACLEATLTDLLGEEVASSVVVKLANDGSGIGAALLAASHSQYAEAA

SEQ ID NO: 172820 - protein, 616 aa, Zea Mays
MPRCSSPCSTPRRATSRPTPRPARGTPSCVRTAPASRPAPTSPTPPTPSPPPRRPPSPIPPPPMSRLRRTRASPCRRLAGRRSDRRDRERLWRSTCSAAARPGPGTTFSPMSASKGTQWNHYRVGSGRAWMPSRLPMPWPAPTPSPRERCTTSHSTQFLDRHMLKPTPPAPAPAPTDYTLSGTPDYHSSKFPYGWVIGSMGVALALIVIAVLALVLWKFFGYKPQDRNGQRKSPDRHKFQLLKSGSFCYGSGRYLCCQFGNAKPTRADGGEHHINVPKGVAADVFDREKPIVFTHEEILISTDSFSDANLLGHGTYGSVYYGVLREQEVAIKRMMATKTKEFIVEMKVLCKVHHASLVELIGYAAGKDELFLVYEYSQNGSLKNHLHDPERKGCSSLSWIFRVQIALDAARGLEYIHEHTKDHYVHRDIKSSNILLDGSFRAKISDFGLAKLVVKSNDAEASVTKVVGTFGYLAPEYLRDGLATTKSDVYAFGVVLFELISGKEAITRAEGMGASSNSERCSLASVMLAAVRKCPNSTYMGNLKDCIDHNLRDLYPYDCAYKMAMLAKQCVDEDPVLRPDMKQVVITLSQILLSSIEWEATQAGNSQVFSGLVAGR

SEQ ID NO: 172821 - protein, 476 aa, Zea Mays
MPRCSSPCSTPRRATSRPTPRPARGTPSCVRTAPASRPAPTSPTPPTPSPPPRRPPSPIPPPPMSRLRRTRASPCRRLAGRRSDRRDRERLWRSTCSAAARPGPGTTFSPMSASKGTQWNHYRVGSGRAWMPSRLPMPWPAPTPSPRERCTTSHSTQFLDRHMLKPTPPAPAPAPTDYTLSGTPDYHSSKFPYGWVIGSMGVALALIVIAVLALVLWKFFGYKPQDRNGQRKSPDRHKFQLLKSGSFCYGSGRYLCCQFGNAKPTRADGGEHHINVPKGVAADVFDREKPIVFTHEEILISTDSFSDANLLGHGTYGSVYYGVLREQEVAIKRMMATKTKEFIVEMKVLCKVHHASLVELIGYAAGKDELFLVYEYSQNGSLKNHLHDPERKGCSSLSWIFRVQIALDAARGLEYIHEHTKDHYVHRDIKSSNILLDGSFRAKISDFGLAKLVVKSNDAEASVTKIPAGWPGNYEE

SEQ ID NO: 172822 - protein, 274 aa, Zea Mays
MPGIPALPVSARDGETILKAMGGDVAPPKWQGGDGAPVYRLGPGPAVLNLTYIGNETLATIENVFAVIEGKEEPDRYVIIGNHRDAWTFGAVDPNSGTAAMLEIAERLSKLQAKGWRPRRTIILCSWDAEEFALIGSTEWAEENMDTLASRAIAYLNVDISVFGPGGLMPRATPQLDELIKEASKMVPDPDEPSQTLYDTMMRHHPPITRVAGAGTDFAAFVQHIGVPSLDMSYGLFEEYPVYHSLYDDYVWVERFGDPLFHRHVAGVHKRYRR

SEQ ID NO: 172823 - protein, 189 aa, Zea Mays
MRFGDPLFHRHVAVASVWGLIALKLADDEIIPFNYVSYASELEECTKDIVDKCKGFPVSFSPLQNSIKQLESAATKIYKEKKLLQAENWSLKTSKYTLKVREINDRLMMAERAFTNREGLVGRPWYKHMIYASSDQDDWGTKAFPGIVSAMDKAKKSNTTETWRLLQHEIYRVARAVSKASAVLDGKLT

SEQ ID NO: 172824 - protein, 499 aa, Zea Mays
MSHLDAASLLAPSPPLAKPHPRSRFLCLISSMLAVLGASLAGLLLFALHPAPNPVPNYASLFLSLGSNDTAASHLRALTLHPHVAGTKANALTARYVFDALSALSFPTHITPYSVLLSYPVHRSLSLSAPGRGVVTSFSLKQETYPNDPYAAAAAETIPTFYAYSASGSVSAEAVYANYGREEDFSYLASRGVDVAGKVAFARYGRIHCEDIAHNARAAGAAAAVVYTDPLQYGGAPGEGWFPDSRWLPPSGVQVGSLFRGVGDPTTPMWASSEGCERVSLEEAMNTDDMPLIPALPVSAQDAMEIHRAMGGAVAPEDWQGREDGPVYRLGPGPAVLNLTYLGNDSMATIENVFAIIEGAEEPDRYVILGNHRDAWTFGASDPNSGTAAMIELAKRFSMLQKQGWRPRRTIIFCSWDAEEYGLTGSTEWVEENREMLYSRAVAYLNIDVSVVGPGFLPSTTPQLDELLQQVTKVVQDPDNSSQTVYDSWIKSSTPLRTR

SEQ ID NO: 172825 - protein, 443 aa, Zea Mays
MSHLDAASLLAPSPPLAKPHPRSRFLCLISSMLAVLGASLAGLLLFALHPAPNPVPNYASLFLSLGSNDTAASHLRALTLHPHVAGTKANALTARYVFDALSALSFPTHITPYSVLLSYPVHRSLSLSAPGRGVVTSFSLKQETYPNDPYAAAAAETIPTFYAYSASGSVSAEAVYANYGREEDFSYLASRGVDVAGKVAFARYGRIHCEDIAHNARAAGAAAAVVYTDPLQYGGAPGEGWFPDSRWLPPSGVQVGSLFRGVGDPTTPMWASSEGCERVSLEEAMNTDDMPLIPALPVSAQDAMEIHRAMGGAVAPEDWQGREDGPVYRLGPGPAVLNLTYLGNDSMATIENVFAIIEGAEEPDRYVILGNHRDAWTFGASDPNSGTAAMIELAKRFSMLQKQGWRPRRTIIFCSWDAEEYGLGQLNGLKKTGRCCILELLLI

SEQ ID NO: 172826 - protein, 625 aa, Zea Mays
MSHLDAASLLAPSPPLAKPHPRSRFLCLISSMLAVLGASLAGLLLFALHPAPNPVPNYASLFLSLGSNDTAASHLRALTLHPHVAGTKANALTARYVFDALSALSFPTHITPYSVLLSYPVHRSLSLSAPGRGVVTSFSLKQETYPNDPYAAAAAETIPTFYAYSASGSVSAEAVYANYGREEDFSYLASRGVDVAGKVAFARYGRIHCEDWQGREDGPVYRLGPGPAVLNLTYLGNDSMATIENVFAIIEGAEEPDRYVILGNHRDAWTFGASDPNSGTAAMIELAKRFSMLQKQGWRPRRTIIFCSWDAEEYGLTGSTEWVEENREMLYSRAVAYLNIDVSVVGPGFLPSTTPQLDELLQQVTKVVQDPDNSSQTVYDSWIKSSTPLRVLRLGDGGSDYSAFVQHVGIPSMNIIFGEGPGYPVYHSLYDDYVWMAKFGDPAFRRHVAAASIWGMMALRLANEDILPFNYMSYAIELEAYTKTVENEVKGTTVTCSPLYNSIRTLGAAATKVNNEQKELQKLLLSKQLNKDSLKIRQLNDRLMQTERAFTSREGIFKLEWFKHLVYGPSDQNDWDTAVYPGIANAIASARSSNTSESWKFVQHEIYRVARAVTQASAILSGRLT

SEQ ID NO: 172827 - protein, 264 aa, Zea Mays
MWFQEDRPLRLPDKLYNITHYSLHISCVKVLRLGDGGSDYSAFVQHVGIPSMNIIFGEGPGYPVYHSLYDDYVWMAKFGDPAFRRHVAAASIWGMMALRLANEDILPFNYMSYAIELEAYTKTVENEVKGTTVTCSPLYNSIRTLGAAATKVNNEQKELQKLLLSKQLNKDSLKIRQLNDRLMQTERAFTSREGIFKLEWFKHLVYGPSDQNDWDTAVYPGIANAIASARSSNTSESWKFVQHEIYRVARAVTQASAILSGRLT

SEQ ID NO: 172828 - protein, 262 aa, Zea Mays
MWFQEDRPLRLPDKLYNITHYSLHISCVKVLRLGDGGSDYSAFVQHVGIPSMNIIFGEGYPVYHSLYDDYVWMAKFGDPAFRRHVAAASIWGMMALRLANEDILPFNYMSYAIELEAYTKTVENEVKGTTVTCSPLYNSIRTLGAAATKVNNEQKELQKLLLSKQLNKDSLKIRQLNDRLMQTERAFTSREGIFKLEWFKHLVYGPSDQNDWDTAVYPGIANAIASARSSNTSESWKFVQHEIYRVARAVTQASAILSGRLT

SEQ ID NO: 172829 - protein, 66 aa, Zea Mays
MHPIFPALFYACERVIRKFHENDYHSGIVSNLSGRCALYSHEEASGFQVLKWNASFFCKIPGTPSL

SEQ ID NO: 172830 - protein, 75 aa, Zea Mays
MGDIEILKEYLGKVRTMVKPGCSWEILKAAISSMVSVTDVLTVMSHPLNAELPLYHFKLHIFNIMNAWTKIYVGV

SEQ ID NO: 172831 - protein, 69 aa, Zea Mays
MGRYSGFIAMYATLANRMWARLLSSTNQPSFLSQKDIDAAREADKAANRMKSREDAKKQSTPVLANGEK

SEQ ID NO: 172832 - protein, 555 aa, Zea Mays
MASSHIILPKEEEEEAAAAAVAEVGLGAAVEADHDHRPYQEQGPGKAALPFSATCVRISRDSYPNLRALRNASTMTLHDDDAAFVKLEEGDYGYVLDDVPHLTDYLPDLPTFPNPLQDHPAYSTVKQYFVNADDTVPEKVVVQKNSPRGVHFRRAGPRQRVYFESEEAKACIVTCGGLCPGLNTVIRELVCGLSHMYNVSNVFGIQNGYKGFYSSNYLPMTPKSVNDIHKRGGTVLGTSRGGHDTKKIVDNIQDRGINQVFIIGGDGTQKGAYEIYKEIRRRGLQVAVAGIPKTIDNDIAVIDKSFGFDTAVEEAQRAINAAHVEASSAENGIGLVKLMGRYSGFIAMYATLASRDVDCCLIPESPFYLEGEGGLFEYIDRRLKENNHTVIVVAEGAGQDLIAQSIPAADQQDASGNKLLLDVGLWLTHKIKDYCKSKKMEMTIKYIDPTYMIRAIPSNASDNVYCTLLAHSAIHGAMAGYSFTVGMVNGRHAYIPFHAPTASKRNSPRRYSHSSRQPMVLCHNLQDPTSTTRRHLMQVIRRKHEPRGPTLQAEP

SEQ ID NO: 172833 - protein, 75 aa, Zea Mays
MAIEHASNSLSSPIKTPARCIEAIPAFPPSPPHTTLSSSLTYSSVASRSTPTQRLAPRLFIATSAPRHRHDTAGV

SEQ ID NO: 172834 - protein, 298 aa, Zea Mays
MAAQNAGIIIDCRQAMSPDPPAVELEVIGSSSPSITPCPAAAAPADADFDHDGCTAELSSSTDRELQDHIRQWEGSYGQGVLRRMPDGGEKMHSRVLRMKKELERRRARQRMDVTPLRQTVQAKRTGGSSGEIYNLKSDDETMDSTASKHYPNSSCTTSTKTYTQVKGAAYEEQSSLSHGKYAYPKNGGQISKESLRHQSKTWNLAKNKASPLEIKKDVVLLDDDDDIEPARSADVQISNKWEESNIHYPSSTDPEAVELTYSDMKCLEPEEYLKSPVINFYLQVPQEGKTSQGFTHV

SEQ ID NO: 172835 - protein, 153 aa, Zea Mays
MAAQNAGIIIDCRQAMSPDPPAVELEVIGSSSPSITPCPAAAAPADADFDHDGCTAELSSSTDRELQDHIRQWEGSYGQGVLRRMPDGGEKMHSRVLRMKKELERRRARQRMDVTPLRQTVQAKRTGGSSGEIYNLSGTLPKIRPHPWRLKRM

SEQ ID NO: 172836 - protein, 118 aa, Zea Mays
MHWSLIIVCMPTKEADSGPIILHLDSLGLHSSQKLFDIVARYIQAERWHLGMDSSYDIPFSGRIWRRLSKNINREKIEVPRQRNEYDCGLFMLYYIDRFIQDAPERLTKEGLGMMVQP

SEQ ID NO: 172837 - protein, 112 aa, Zea Mays
MHWSLIIVCMPTKEADSGPIILHLDSLGLHSSQKLFDIVARYIQAERWHLGMDSSYDIPFSGRIWRRLSKNINREKIEVYSRCAREVDKRGPWHDGSTMKRLQRFGEGYGRY

SEQ ID NO: 172838 - protein, 289 aa, Zea Mays
MQDHDRDKLHKLVENHKSDGKAADVLNESNLKREMAHSMDDSNEGAEKDLEGIKIHCMGEFEEGAEKNLEEAKLPAGNKMIGPSISFSLSDIKKEYKNATLPAHWKVFDTVIFREKEDGLHASSKIAAFDFDGCLANTSMKRVGADQWSLQHKSIPEKLQRLYDDGYKLVIFTNESNIERWKNKRQQAVDSKVGRLDNFIECVKAPIQVFIACGLGKGKGIPDDPYRKPNPGMWWLMAQHFNSGIKIDMDQSFYVGDAAGRENDHSDADIEFAKAIGLKFHVPEEYFGF

SEQ ID NO: 172839 - protein, 498 aa, Zea Mays
MVVVPFSLRIARNPIRLRLLPVSAARFTRLAMSTTPPAAATISVEYAKSGRSICKGCSGVIASGALRLGASARDPRGFGATKWYHVSCLPSSSYPLGPIGSIKGFDSIKDHDRAELRELEKNHKRDNTAVSPPEEQRPKKARIQMFSPAEGVPDNVTVSVEYAKSGRSTCKGCSENIAKGALRLGASFPDPRGYENTKWYHVVCFPTSSYPLFPMSNLKGFDSIEDHDRDKLHKLVENHKSDGKAADVLNESNLKREMAHSMDDSNEGAEKDLEGIKIHCMGEFEEGAEKNLEEAKLPAGNKMIGPSISFSLSDIKKEYKNATLPAHWKVFDTVIFREKEDGLHASSKIAAFDFDGCLANTSMKRVGADQWSLQHKSIPEKLQRLYDDGYKLVIFTNESNIERWKNKRQQAVDSKVGRLDNFIECVKAPIQVFIACGLGKGKGIPDDPYRKPNPGMWWLMAQHFNSGIKIDMDQSFYVGDAAGRENDHSDADIEFAKL

SEQ ID NO: 172840 - protein, 243 aa, Zea Mays
MKVEARVGDIYRSLFGAAPNTKSIMLELWRDQHIEYLTPGLRHMGPAFHVLDANRPWLCYWMVHPLALLDEALDDDLENDIIDFLARCQDKDGGYSGGPGQLPHLATTYAAVNTLVTIGSERALSSINRGNLYNFMLQMKDVSGAFRMHDGGEIDVRASYTAISVASLVNILDFKLAKGVGDYIARCQTYEGGIAGEPYAEAHGGAGWLFVKEWNADFKDELINWLMVATPFGRELPLLSHKS

SEQ ID NO: 172841 - protein, 246 aa, Zea Mays
MRPLIRTARCWLLRARVRAMATLPMASPAAAIPSSATRPVASPSSRSHRPLTRFFSVAPAPVGAKGLRAAASAVEVGGVKIAREDVVKEDDPTNNVPDTIFAKIGLQLHRRENHPLGILKNTIYDYFDKNFTGQFDKFDDLCPLVSVKQNFDDVLVPSDHVSRSYNDTYYVDDQTVLRCHTSAHQAELLRDGRTHFLVTGDVYRRDSIDSTHYPVFHQVLAWMGQHMQLQNSRKHWKDWQDIYLVL

SEQ ID NO: 172842 - protein, 258 aa, Zea Mays
MRPLIRTARCWLLRARVRAMATLPMASPAAAIPSSATRPVASPSSRSHRPLTRFFSVAPAPVGAKGLRAAASAVEVGGVKIAREDVVKEDDPTNNVPDTIFAKIGLQLHRRENHPLGILKNTIYDYFDKNFTGQFDKFDDLCPLVSVKQNFDDVLVPSDHVSRSYNDTYYVDDQTVLRCHTSAHQAELLRDGRTHFLVTGDVYRRDSIDSTHYPVFHQMEGFRVFSPDEWSGSGLDGTAYAAAELKKTLEGLARHLFG

SEQ ID NO: 172843 - protein, 454 aa, Zea Mays
MRPLIRTARCWLLRARVRAMATLPMASPAAAIPSSATRPVASPSSRSHRPLTRFFSVAPAPVGAKGLRAAASAVEVGGVKIAREDVVKEDDPTNNVPDTIFAKIGLQLHRRENHPLGILKNTIYDYFDKNFTGQFDKFDDLCPLVSVKQNFDDVLVPSDHVSRSYNDTYYVDDQTVLRCHTSAHQAELLRDGRTHFLVTGDVYRRDSIDSTHYPVFHQGSVCSLLMNGQVLAWMGQHMQLQNSRKHWKDWQDIYLINYRKMSSAGAVEMRWVDTYFPFTNPSFELEIYFQDDWLEVLGCGVTEQEILKRNGRRDHVAWAFGLGLERLAMVLFDIPDIRLFWSNDKRFTSQFSEGKLGVKFKPFSKFPPCYKDMSFWINGAFTENNLCEVVRGIAGDLVEEVKLIDNFTNKKGMTSHCYRIAYRSMERSLTDEEINNLQLNVREAVKDKLKVELR

SEQ ID NO: 172844 - protein, 265 aa, Zea Mays
MTQKFEMSMMGELKYFLGFQVKQLQEGTFISQTKYTQDILTKFGMKDAKPIKTPMGTNGHLDLDTGGKSVDQKVYRSMIGSLLYLCASRPDIMLSVCMCARFQADPKETHLTAVKRILRYLAYTPKFGLWYPRGSTFDLIGYSDADWAGCKINRKSTSGTCQFLGRSLVSWASKKQNSVALSTAEAKYIAAGHCCAQLLWMRQTLRDYGYKLTKVPLLCDNESAIKMADNPVEHSRTKHIAIQYHFLRDHQQKGDIEISYINTKD

SEQ ID NO: 172845 - protein, 606 aa, Zea Mays
MDAAERVGREAERGGCPAVDVLSMDSFDPSRLPSERFVVFVVSTTGQGDPPDSMKGFWRYMLRKDLDRQWLEGIHHAVFGLGDSGYQKYNFAAKKLDRRLLHLGAEPVLEIGLGDDQHPSGYEGALDPWLLSMWKSLNEINPSLLPRVSDINDPNLSFLGDPKVHVIYYSSNEVTQDPILLDSNKIISSARSMSPALRFHADGEPPYMLQMVKKQCLTKEGTDRDVRHFELEDPSSAMAINYKIGDALEILPSQNPSAVDAFIERCNLDPDCYITIRVRSGDKVFKGSVEQMDRIKLRTFVALTMDVVSASPRRYFFEVMSFFATSEREKERLQYFASPEGRDDLYQYNQKESRTVLEVLEDFPSVQMPFEWLVQLTPPLKKRAFSISSSPLAHPNQIHLTVSVVAWVTPFKRTRRGLCSTWLAGLNPNKGNLIPCWIHQGSLPPPRPLVPLVLIGPGTGCAPFRAFVEERAAQAAAEPTAPVLFFFGCRNQENDFLYKDFWLTHAQDEGVLSSKRGGGFFVAFSRDQPQKVYVQHKIMEQSSRVWNLLLSDAVIYIAGSSTKMPADVTAALEEVICKEGGVKQADASKWLRDLERAGRLNIETWS

SEQ ID NO: 172846 - protein, 546 aa, Zea Mays
MLRKDLDRQWLEGIHHAVFGLGDSGYQKYNFAAKKLDRRLLHLGAEPVLEIGLGDDQHPSGYEGALDPWLLSMWKSLNEINPSLLPRVSDINDPNLSFLGDPKVHVIYYSSNEVTQDPILLDSNKIISSARSMSPALRFHADGEPPYMLQMVKKQCLTKEGTDRDVRHFELEDPSSAMAINYKIGDALEILPSQNPSAVDAFIERCNLDPDCYITIRVRSGDKVFKGSVEQMDRIKLRTFVALTMDVVSASPRRYFFEVMSFFATSEREKERLQYFASPEGRDDLYQYNQKESRTVLEVLEDFPSVQMPFEWLVQLTPPLKKRAFSISSSPLAHPNQIHLTVSVVAWVTPFKRTRRGLCSTWLAGLNPNKGNLIPCWIHQGSLPPPRPLVPLVLIGPGTGCAPFRAFVEERAAQAAAEPTAPVLFFFGCRNQENDFLYKDFWLTHAQDEGVLSSKRGGGFFVAFSRDQPQKVYVQHKIMEQSSRVWNLLLSDAVIYIAGSSTKMPADVTAALEEVICKEGGVKQADASKWLRDLERAGRLNIETWS

SEQ ID NO: 172847 - protein, 503 aa, Zea Mays
MLRKDLDRQWLEGIHHAVFGLGDSGYQKYNFAAKKLDRRLLHLGAEPVLEIGLGDDQHPSGYEGALDPWLLSMWKSLNEINPSLLPRVSDINDPNLSFLGDPKVHVIYYSSNEVTQDPILLDSNKIISSARSMSPALRFHADGEPPYMLQMVKKQCLTKEGTDRDVRHFELEDPSSAMAINYKIGDALEILPSQNPSAVDAFIERCNLDPDCYITVMSFFATSEREKERLQYFASPEGRDDLYQYNQKESRTVLEVLEDFPSVQMPFEWLVQLTPPLKKRAFSISSSPLAHPNQIHLTVSVVAWVTPFKRTRRGLCSTWLAGLNPNKGNLIPCWIHQGSLPPPRPLVPLVLIGPGTGCAPFRAFVEERAAQAAAEPTAPVLFFFGCRNQENDFLYKDFWLTHAQDEGVLSSKRGGGFFVAFSRDQPQKVYVQHKIMEQSSRVWNLLLSDAVIYIAGSSTKMPADVTAALEEVICKEGGVKQADASKWLRDLERAGRLNIETWS

SEQ ID NO: 172848 - protein, 396 aa, Zea Mays
MVKKQCLTKEGTDRDVRHFELEDPSSAMAINYKIGDALEILPSQNPSAVDAFIERCNLDPDCYITIRVRSGDKVFKGSVEQMDRIKLRTFVALTMDVVSASPRRYFFEVMSFFATSEREKERLQYFASPEGRDDLYQYNQKESRTVLEVLEDFPSVQMPFEWLVQLTPPLKKRAFSISSSPLAHPNQIHLTVSVVAWVTPFKRTRRGLCSTWLAGLNPNKGNLIPCWIHQGSLPPPRPLVPLVLIGPGTGCAPFRAFVEERAAQAAAEPTAPVLFFFGCRNQENDFLYKDFWLTHAQDEGVLSSKRGGGFFVAFSRDQPQKVYVQHKIMEQSSRVWNLLLSDAVIYIAGSSTKMPADVTAALEEVICKEGGVKQADASKWLRDLERAGRLNIETWS

SEQ ID NO: 172849 - protein, 369 aa, Zea Mays
MAINYKIGDALEILPSQNPSAVDAFIERCNLDPDCYITIRVRSGDKVFKGSVEQMDRIKLRTFVALTMDVVSASPRRYFFEVMSFFATSEREKERLQYFASPEGRDDLYQYNQKESRTVLEVLEDFPSVQMPFEWLVQLTPPLKKRAFSISSSPLAHPNQIHLTVSVVAWVTPFKRTRRGLCSTWLAGLNPNKGNLIPCWIHQGSLPPPRPLVPLVLIGPGTGCAPFRAFVEERAAQAAAEPTAPVLFFFGCRNQENDFLYKDFWLTHAQDEGVLSSKRGGGFFVAFSRDQPQKVYVQHKIMEQSSRVWNLLLSDAVIYIAGSSTKMPADVTAALEEVICKEGGVKQADASKWLRDLERAGRLNIETWS

SEQ ID NO: 172850 - protein, 239 aa, Zea Mays
MPFEWLVQLTPPLKKRAFSISSSPLAHPNQIHLTVSVVAWVTPFKRTRRGLCSTWLAGLNPNKGNLIPCWIHQGSLPPPRPLVPLVLIGPGTGCAPFRAFVEERAAQAAAEPTAPVLFFFGCRNQENDFLYKDFWLTHAQDEGVLSSKRGGGFFVAFSRDQPQKVYVQHKIMEQSSRVWNLLLSDAVIYIAGSSTKMPADVTAALEEVICKEGGVKQADASKWLRDLERAGRLNIETWS

SEQ ID NO: 172851 - protein, 81 aa, Zea Mays
MEVDNEVTELPLVNEMNSHLIKRSLSKNFNEEEDTMLVSSYLNVSKDPISKRDKKKVYFGKEYGNTITRTGHSSPIVIGHH

SEQ ID NO: 172852 - protein, 847 aa, Zea Mays
MPAPDRATAGGGAGGHFRGHAHLTNCIHLRHHHAHAHAGAGGASSSGRRRSPASASLMRDLLALQRSRSLRDPSTRRSVESSRVAADPDDGTDDDDDDDADLPAKSRRSAGALKTLLDQLAENPHPKPGRRPPRRFKRRAGRRAAAASKPPDRAAALSVNSSSQEAVCGNKYLFHGGGGGDDDGDGVVELQQHLPQDSRNVCGIPWNWSRLHHRGKSILDMAGRSLSCGLSDSKSAAGRKSEAPAASGVRPLFPVKSERLASSTSSDSDALPLLVEEAATSGARKRIGVISSGSYSGELGIFSNQTSEMDSDLLSESQSGHKSLASRSQHGRGRHRSLTQKFAPKTFKDVVGQSLVVQALSNAILRRKIGLVYVFYGPHGTGKTSCARVFAKALNCLSSEHPRPCDSCTSCIAHNLGKSRSLMEIGPVGNIDMEGIVDVLDNVMLSPAPSHYRVFIFDDCDTLPADTWSAISKVVDRAPRRVVFILVSPNLELPHIILSRCQKFFFPKLRESDIVNTLQWICTSESLDVDKDAMKLIASRSDGSLRDAEMTLDQLSLLGQRISLSLVQELVGLVSDDKLVDLLDLALSADMVNTVKTLRDITETGVEPLALMSQLATIITDILAGSYAFTRERPRRKFFKRPTLSKEDMEKLRQALKTLSEAEKQLRVSSDKTTWLTAALLQLAPDKQYLLPSSSTSTSLNHGVLVGPFPDRGVGRAPAVENKGNLAGTSYGEKRTVEHTENGHVLSTSSVRANEGTKLRKAENEMVWQAVLESIQSDTLRKMMAKEARLNSISLGTEPTVQLIISSHISHTPSMFPYPENDSTLRRSFTKHSPLSSGDGCNLIPTY

SEQ ID NO: 172853 - protein, 975 aa, Zea Mays
MPAPDRATAGGGAGGHFRGHAHLTNCIHLRHHHAHAHAGAGGASSSGRRRSPASASLMRDLLALQRSRSLRDPSTRRSVESSRVAADPDDGTDDDDDDDADLPAKSRRSAGALKTLLDQLAENPHPKPGRRPPRRFKRRAGRRAAAASKPPDRAAALSVNSSSQEAVCGNKYLFHGGGGGDDDGDGVVELQQHLPQDSRNVCGIPWNWSRLHHRGKSILDMAGRSLSCGLSDSKSAAGRKSEAPAASGVRPLFPVKSERLASSTSSDSDALPLLVEEAATSGARKRIGVISSGSYSGELGIFSNQTSEMDSDLLSESQSGHKSLASRSQHGRGRHRSLTQKFAPKTFKDVVGQSLVVQALSNAILRRKIGLVYVFYGPHGTGKTSCARVFAKALNCLSSEHPRPCDSCTSCIAHNLGKSRSLMEIGPVGNIDMEGIVDVLDNVMLSPAPSHYRVFIFDDCDTLPADTWSAISKVVDRAPRRVVFILVSPNLELPHIILSRCQKFFFPKLRESDIVNTLQWICTSESLDVDKDAMKLIASRSDGSLRDAEMTLDQLSLLGQRISLSLVQELVGLVSDDKLVDLLDLALSADMVNTVKTLRDITETGVEPLALMSQLATIITDILAGSYAFTRERPRRKFFKRPTLSKEDMEKLRQALKTLSEAEKQLRVSSDKTTWLTAALLQLAPDKQYLLPSSSTSTSLNHGVLVGPFPDRGVGRAPAVENKGNLAGTSYGEKRTVEHTENGHVLSTSSVRANEGTKLRKAENEMVWQAVLESIQSDTLRKMMAKEARLNSISLGTEPTVQLIISSHISHTPSMFPYPENDSTLRRSFTKHSPLSSGGEILISRFKKDSVVKGANSSKTRWMQSDPHILTEGEIIEVGPSRMHWHAQTNNDVLDVNERRKENTWEEETSSSPNQESVTNPKGRNGNRQNRQNSIVRGKVSLAHVIGRAEACSQRGGWSRRKAISIAEKLEQENL

SEQ ID NO: 172854 - protein, 75 aa, Zea Mays
MPFVMNVGCTSPGRLQLTLMYTGLLSLMVSCASSSLLTTTWCQVSGWKHRSSCQKSDKCSAQTSRRKIGIVHFYI

SEQ ID NO: 172855 - protein, 243 aa, Zea Mays
MCSLLPIYALLKRSSVQRHHLLPSRSIGLDYRQPPSSSSQSDMPLLVLRVPLASTNNTSTCSGAAPPVAVAPAAEHSDGLLFDGLALGHGDDVDDKAEADGDDAATVKLEWLRSQIIGAEAEFASPFGTRRITYADHTASGRCLRFVEEFVLRNVLPFYGAFGVRDSLLHNLTIASEDVHQKNQIRGPNHASPPGLRDGGLGGLCRRRGGQGQGRIGPRGAVAVPGSGDAGRLRGESWVQVVP

SEQ ID NO: 172856 - protein, 179 aa, Zea Mays
MCSLLPIYALLKRSSVQRHHLLPSRSIGLDYRQPPSSSSQSDMPLLVLRVPLASTNNTSTCSGAAPPVAVAPAAEHSDGLLFDGLALGHGDDVDDKAEADGDDAATVKLEWLRSQIIGAEAEFASPFGTRRITYADHTASGRCLRFVEEFVLRNVLPFYAEEQAPKINNYQWSRLRSAL

SEQ ID NO: 172857 - protein, 503 aa, Zea Mays
MLAAMDDAVGDGVDVLSVSIGSSGAPPRFADDGIALGALHAAARGVVVSCSGGNSGPRPATVSNLAPWMLTVAASSIDRAFHAPVRLGNGVTVMGQTVTPYQLPGDKPYPLVYAADAVVPGTPANVSNQCLPNSLASDKVRGKIVVCLRGAGLRVGKGLEVKRAGGAAILLGNPAASGSEVPVDAHVLPGTAVAAADADTILRYINSSSSPTAVLDPSRTVVDVRPSPVMAQFSSRGPNVLEPSILKPDITAPGLNILAAWSGASSPTKLDGDHRVVQYNIMSGTSMSCPHASAAAALVKAAHPDWSSAAIRSAIMTTATTSDAEGGPLMNGDGSVAGPMDYGSGHIRPRHALDPGLVYDTSYHDYLLFACAASSAGSGSQLDRSVPCPPRPPPPHQLNHPSVAVRGLNGSVTVRRTVTNVGPGAARYAVAVVEPAGVSVTVSPRRLRFARAGEKRAFRIKLEAASRGRSGARVARGQVVAGSYAWSDGGAHVVRSPIVVIFD

SEQ ID NO: 172858 - protein, 81 aa, Zea Mays
MGNSLWYTKTCGEVRRKGRVKTFYAIPEFVIKKEKNRHWTCIKKIEVSIDSLTKHMLIRTYSLYTMTNHLQQDIHLHLSPS

SEQ ID NO: 172859 - protein, 72 aa, Zea Mays
MFQIAYFNSSVCYCLMNIGFPICKIQPIFQASLIFKQLHARVCQSTFCLMECTTTAHILTNKSVPSFEEKHY

SEQ ID NO: 172860 - protein, 112 aa, Zea Mays
MADSKATSAVTLRTRKFMTNRLLARKQFVLEVIHPGRANVSKAELKERLAKAYEVKDPNTIFVFKFRTHFGGGKSTGFGLIYDNLEAAKKFEPKYRLIRVTHYSSSEGKSIK

SEQ ID NO: 172861 - protein, 114 aa, Zea Mays
MKPLLCLQGLASKPLGICSSTAASLPEYAITSLYDSSPLSEHKSRGNYAAFRVWSPYCSYCCDGPCDFESCFNFCSLIGCGFKMNELNIQNMFANTLQGRYFTPKMIKESEVAH

SEQ ID NO: 172862 - protein, 384 aa, Zea Mays
MGPAAGDGDRGPGAAAEHKVNLSARQPFVESVRTCLAETFFPDDPFRGLGSRPPAARAWGALKYFVPALEWAPRYTAGKFKYDLLAGVTIASLAIPQGISYAKLANLPPIIGLYSSFVPPLLYAVFGSSNNLAVGTVAAASLLLASIIETEVPPEENPQLYLQLFYTAAFFTGVFQTALGVFSLSLSVKVRADSGFPVAVDDHRVHGRHGDDHHLAAAQGDAGDEALHAKDRPRLRHALHLLLQARVEVAEFSSWHMLPPALAVKQALEEEETKSVLGVGHCAFPDRGHRRRLRLPGQRRRAWHPDSRRSEERDQPAVYFAADVYRQARQYGNESGVLVRDPGAGSTNMFPLMHLSARLAWDFVCLLSAMALRKGSPSDGAWRW

SEQ ID NO: 172863 - protein, 77 aa, Zea Mays
MHCYGCAKKVQKHISKMDGVTSFEVDLEKKKVVVIGDVTPYEVLASISKVKFAELWVAPQQPQAASRCGKAPAGGVV

SEQ ID NO: 172864 - protein, 62 aa, Zea Mays
MLTFPLLRTPLVPKRPLMESDSSALRRPPKLHAKHPSLTRSLEPYTNCIVKGELGYAETMTN

SEQ ID NO: 172865 - protein, 326 aa, Zea Mays
MATLNPFELLGADDNDDPTQLIAAAAAAAQKAEAKKSAVAPAGKAAQPAATTKFPTKPAPPSQTVRDARGGGSSARGGFGRGERGRGRGGRGYGQNRGFSGDNGNEFQGGYGGGGYGDGAVTGGSEGERERETRPPYRGGGRRGGYRNVEFADDSERPPRRNYERHSGTGHGYEMKRDGAGRGNWGTATDELIAQDAEDSPKMEEAAPVAEKQGEQNDAPAADENKDNKDATANEEEEKEEDKEMTLEEFEKIREEKRKALLALKAEERKVEVDKDLQSLQPLSNKKENDEVFIKLGSDKDKKKENAERDERAKKVCIVVANQSSF

SEQ ID NO: 172866 - protein, 337 aa, Zea Mays
MATLNPFELLGADDNDDPTQLIAAAAAAAQKAEAKKSAVAPAGKAAQPAATTKFPTKPAPPSQTARGGFGRGERGRGRGGRGYGQNRGFSGDNGNEFQGGRRGGYRNVEFADDSERPPRRNYERHSGTGHGYEMKRDGAGRGNWGTATDELIAQDAEDSPKMEEAAPVAEKQGEQNDAPAADENKDNKDATANEEEEKEEDKEMTLEEFEKIREEKRKALLALKAEERKVEVDKDLQSLQPLSNKKENDEVFIKLGSDKDKKKENAERDERAKKSVSINEFLKPAEGERYYGGRGRGRGRGDRGGFRGGYGGGYSRGPAAAAPSIEDQAQFPSLGGK

SEQ ID NO: 172867 - protein, 85 aa, Zea Mays
MTHWMFSNSTPPLQMQCNSMRCEEPDAEVVENLLQSIEKHTLASHLVWGLWGIISDHVNDIDFDYKEYARQRFEQYWHKSAILTS

SEQ ID NO: 172868 - protein, 60 aa, Zea Mays
MCVQDYLELSYSPRLYIPEALSSSKESCSSASASVKVRALCSFFEEKTSTSAMYTAVTGR

SEQ ID NO: 172869 - protein, 59 aa, Zea Mays
MEFIATKVAKVIANSKRGTFALSTESKQRLTQTATSHAWGILCGSRNHTQHEMIFHIVV

SEQ ID NO: 172870 - protein, 474 aa, Zea Mays
MGKSPGKWIKSVLLGKKSTKSGPTKSNESARRSFRALKGIVRLQALIRGYLVRRQAVSTLRATWLIVKFQALVRGRNVRLSGSRMQLNVKFGQSNFGGVRSSDAWKEKLSSNAYVRKLLSSPIVLEPLHFQYDKRDPNSTYNWFERWTIGCIWKPAFQPKRVADGKPLVKKASYAMETQSAKLKRNIRKGSAAIAGSFHTSGESDKVKRNPKNFSSFPADSVPDSQLSELEKVKRNLRKVTDSMAEASKISSSRVDSSKVCNSTAEVPKESNPVAEISKIRSLLNGISDHQDIQCENTRESSFPLGTQEDSDNDHLLRYSNMDSLDLVPGLKSDQEIQLDSVSIGENVDDPTVVAPAVEEMSPQNIDTEDNVLCKKEEARSKEEHLSNGSLRTSKRKSSFPNKSEYVENGTHATPVQPRQPSYMAATESAKAKLRAQNSPSLDSDSAAEKNGFTRRHSLPSSTKSRALKAEWKR

SEQ ID NO: 172871 - protein, 390 aa, Zea Mays
MQLNVKFGQSNFGGVRSSDAWKEKLSSNAYVRKLLSSPIVLEPLHFQYDKRDPNSTYNWFERWTIGCIWKPAFQPKRVADGKPLVKKASYAMETQSAKLKRNIRKGSAAIAGSFHTSGESDKVKRNPKNFSSFPADSVPDSQLSELEKVKRNLRKVTDSMAEASKISSSRVDSSKVCNSTAEVPKESNPVAEISKIRSLLNGISDHQDIQCENTRESSFPLGTQEDSDNDHLLRYSNMDSLDLVPGLKSDQEIQLDSVSIGENVDDPTVVAPAVEEMSPQNIDTEDNVLCKKEEARSKEEHLSNGSLRTSKRKSSFPNKSEYVENGTHATPVQPRQPSYMAATESAKAKLRAQNSPSLDSDSAAEKNGFTRRHSLPSSTKSRALKAEWKR

SEQ ID NO: 172872 - protein, 362 aa, Zea Mays
MEREAIFKCLCSEEPLHFQYDKRDPNSTYNWFERWTIGCIWKPAFQPKRVADGKPLVKKASYAMETQSAKLKRNIRKGSAAIAGSFHTSGESDKVKRNPKNFSSFPADSVPDSQLSELEKVKRNLRKVTDSMAEASKISSSRVDSSKVCNSTAEVPKESNPVAEISKIRSLLNGISDHQDIQCENTRESSFPLGTQEDSDNDHLLRYSNMDSLDLVPGLKSDQEIQLDSVSIGENVDDPTVVAPAVEEMSPQNIDTEDNVLCKKEEARSKEEHLSNGSLRTSKRKSSFPNKSEYVENGTHATPVQPRQPSYMAATESAKAKLRAQNSPSLDSDSAAEKNGFTRRHSLPSSTKSRALKAEWKR

SEQ ID NO: 172873 - protein, 319 aa, Zea Mays
MISWPTIYHVLEETVPLYVAMIVAYLSIQWWKLFTPEQCSGINKFVAKFSIPLLSFQILSTNNPYSMNLKLIFSDVLQKSLSLLGFAVASRVCCEEKFDWLITGFSLSTLPNTLIVGIPLLKGMYGDEAVKLLSQIVALQSLIWYTLLLFLFEFRAARGMAITTSSEAIESGTPGPMQQGHEEGQAKGVSARCYGAFHFLLVVSRKLVTNPNMYASLAGLIWALISFRWRIQLPSIVNNSIRILSDGGLGMAMFSLGVFTALQTKIVACGTKRMLLSLGIRFFLGPGLMVISSYLIGMRGTLLKVAIIQALRRQLYLKE

SEQ ID NO: 172874 - protein, 218 aa, Zea Mays
MQLPHASRSGPNSSPPVVVAGSSSSAPASRQQQSEAPRGRTLAPWPRFAAPRSLLSTMDVDNICDIDNNVSNEDEIHGIGGGGDVNGNDSDHMEEEDHVLTPTGSEVNVRKNKSIDGDNRVVKRLLATKSTSTSTSKFMASAFKATRSNKSTDLVPQPQVSKVAQDASASASENASIAASVQISTEDDCDEELDVKKKKLTSWVWEHFTSNKQCEESV

SEQ ID NO: 172875 - protein, 448 aa, Zea Mays
MQLPHASRSGPNSSPPVVVAGSSSSAPASRQQQSEAPRGRTLAPWPRFAAPRSLLSTMDVDNICDIDNNVSNEDEIHGIGGGGDVNGNDSDHMEEEDHVLTPTGSEVNVRKNKSIDGDNRVVKRLLATKSTSTSTSKFMASAFKATRSNKSTDLVPQPQVSKVAQDASASASENASIAASVQISTEDDCDEELDVKKKKLTSWVWEHFTSDPIICTMAYSMRDKFDKYWEMNNMALAVGAFLDPRYKHRMVELYMSKMYDSEMAELEKMTFMNVINELFAFYSSTINAKSTNKGTSSKDSVASKNVVLMDDDDENEVNLDELYAATNNVKKVSELDLYMSDGLVKANEGDAPFDALSWWKGQVTNFPILSSLARDVLSMQVSTVASESAFSSGGRVVDSFRSKLKPKIIEALVCTKDWKLASDKDLEGEIKTISEAMNAMEVDDEVAT

SEQ ID NO: 172876 - protein, 2356 aa, Zea Mays
MINEGKSNSILVSGESGAGKTETTKLLMGYLAYLGGRSGTGERTVEQQVLESNPVLEAFGNAKTVRNNNSSRFGKFVEIQFDKSGKISGAAIRTYLLERSRVCQINSPERNYHCFYFLCAAPSEDLKKYKLGDPSLFHYLNQSACIKVDGINDAEEYLATRKAMDTVGITDQEQEAIFRVVAAVLHLGNINFTKGREADSSIIKDDKSRFHLNTAGELLMCDCEKLENALIKREINTPEGVITTTVGPNSATISRDGLAKQIYSRLFDWLVNRINASIGQDPNSNKLIGVLDIYGFESFKTNSFEQLCINFTNEKLQQHFNQNVFKMEQEEYTREQINWSYIEFVDNQDVLDLIERKPGGIIALLDEACMFPKSTHETLSQKLYEKFKNHKRFTKPKLSRTAFTIQHYAGDVTYQSDQFLDKNKDYVVAEHQELLNASKCSFVSGLFPQATEENTKSSKSSIATRFKIQLHELMETLSSTEPHYIRCIKPNSVLKPGIFENTNVLQQLRCSGVLEAIRISCAGYPTRKLFHDFLHRFRVLAPEILKEKNDEKVSCQKVLDKMGLQGYQIGRTKVFLRAGQMADLDARRTEMRNNAAKGVQSQFRTHVAREQFLVLRDTSIYLQSFVRARLACKQHEFLRQQAAALRIQKNARWYFAWKTYYQLRLSAITLQAGLRSMAARNEFTFRKKNKASVHIQSQWRCHRDYSNYMNLKRAALTYQCAWRRRVARKELRKLKLAARDTQALKVAKEKLEERVEELTSRLDREKKLRADLEKSKADEVSKLKEALHEMEQRVEEVKAMQEQESAKKAVEEALAQEREKISLLTTEIEGLKVLLVAEREENDKMKKAHANALETNEELNKEVSDADEKIKQFSDTVRRLEGTVSEHEGLLLTERQQNEAANAALAESQARNEALVSKLEDAVKQNDLLHEADQRFQEATKNLESSLTFEKQRHEANLIELAEAREKIEELQREVGDTDEKFTLLQTSIQSVEERLREKDALLTTERLESEATKKSLNESEDRNQDLLLKIEIAQKDIAHFQETVRRHEENMAALETSLRSERQQNDAIMKQLAESQGEIGELQRKLEDADARNGLLQDSLQRHEENMAALETSLRSERQQNDAIMKQLAESQGEIGELQRKLEDADARNGLLQDSLQRHEENMAALETSLRSERQQNDAIMKQLAESQGEIGELQRKLEDADARNGLLQDSLQRLEDDATTREALMETERKETEMTKKTLTEALDQIEELVKEVECANHSVHQLQDSMQRMEQTAVAREATLLAEHQEKDATSKALAEAQGRIEGLLKEIYSANRKNDQLQSTIERLEEGATTTDALYLAERKGHDQTKKSLSEAQETNKELLKKIEKAEKNIDQLLENVERLEKDAITRESLLLTTKQSYGDTAKLLLESQEKNQELVHKVEDSDSKIVLLEDSVKRLEESTADKDSLLAIERHENSETKKELVGSQKKIAELLTEVQDTRANVAELEDLIRRLEGKLAITEALLLTEKEQNASTLKLLAEAQLRIEELIKKLEGSDRKSDSLQDTITRLEQDVTAKEALLLTEKEAHDATRKTLTEAQEESGELLKKIHDNDKHILQLQFTIQRLEETTVANENLLLREREQNDITTKAHNESQEKYEELLSKFVDVDRKIDLLQGTIERLGENTTKDSLLLSERHEKDAIKKALTEAQEKNEELLMKVEDANEKIEQLQTTIDMLEDNVAAKDVSLEAAMKENDAIRRSLTEAQERNDELLKKISDSEYRIHLLQDTIQKLQVDAISRLSSFVMEKQESDASKRAVTEAHERNEDLLKRNEDLLKRNDDLIKKIEDSSKIVTQLQEALQRLEGKACNLEAENQVLRQQATSTPPTSAKSPASRAKISRIHRSPENGHNLNGDIRQTEMKPSTGTSEAITSAANVPDLGDQKDFEHGEKLQRIPKQKYQPSHHQQPQDDQQWLLACIPQHLGFSGSKPVAALLIYQCLLHWKSFEAMKTGVFDSILHAINSATEAQNDMRTLAYWLSNLSTLTVLLQRSFKTTRTAISTPQRRRFSSERIFHGNQTSNAGLAYLSGQSVVGSAGLPQVEAKYPALLFKQQLVDLIEKVYGMISDSVKKELNPLLELCIQDPRTSHSSIAKGNLNGMGQQNQLTYWLGIVKILTSYLDVLRVNHVPSILVHKLFTQIFSLIDVQLFNRLLLRRECCSFSNGEYVRAGLTELKHWSDNATREFAGSAWEALRHIRQAVDFLVISLKPMRTLREIHTDVCPALSIQQLERIVSMYWDDVNGTNTISAEFTSSLKSAVRDESNMATSFSILLDDDSSIPFSLDDITKTLPVIEVADDDFVPFVHENPSFAFLLQRGE

SEQ ID NO: 172877 - protein, 1872 aa, Zea Mays
MAARNEFTFRKKNKASVHIQSQWRCHRDYSNYMNLKRAALTYQCAWRRRVARKELRKLKLAARDTQALKVAKEKLEERVEELTSRLDREKKLRADLEKSKADEVSKLKEALHEMEQRVEEVKAMQEQESAKKAVEEALAQEREKISLLTTEIEGLKVLLVAEREENDKMKKAHANALETNEELNKEVSDADEKIKQFSDTVRRLEGTVSEHEGLLLTERQQNEAANAALAESQARNEALVSKLEDAVKQNDLLHEADQRFQEATKNLESSLTFEKQRHEANLIELAEAREKIEELQREVGDTDEKFTLLQTSIQSVEERLREKDALLTTERLESEATKKSLNESEDRNQDLLLKIEIAQKDIAHFQETVRRHEENMAALETSLRSERQQNDAIMKQLAESQGEIGELQRKLEDADARNGLLQDSLQRHEENMAALETSLRSERQQNDAIMKQLAESQGEIGELQRKLEDADARNGLLQDSLQRHEENMAALETSLRSERQQNDAIMKQLAESQGEIGELQRKLEDADARNGLLQDSLQRLEDDATTREALMETERKETEMTKKTLTEALDQIEELVKEVECANHSVHQLQDSMQRMEQTAVAREATLLAEHQEKDATSKALAEAQGRIEGLLKEIYSANRKNDQLQSTIERLEEGATTTDALYLAERKGHDQTKKSLSEAQETNKELLKKIEKAEKNIDQLLENVERLEKDAITRESLLLTTKQSYGDTAKLLLESQEKNQELVHKVEDSDSKIVLLEDSVKRLEESTADKDSLLAIERHENSETKKELVGSQKKIAELLTEVQDTRANVAELEDLIRRLEGKLAITEALLLTEKEQNASTLKLLAEAQLRIEELIKKLEGSDRKSDSLQDTITRLEQDVTAKEALLLTEKEAHDATRKTLTEAQEESGELLKKIHDNDKHILQLQFTIQRLEETTVANENLLLREREQNDITTKAHNESQEKYEELLSKFVDVDRKIDLLQGTIERLGENTTKDSLLLSERHEKDAIKKALTEAQEKNEELLMKVEDANEKIEQLQTTIDMLEDNVAAKDVSLEAAMKENDAIRRSLTEAQERNDELLKKISDSEYRIHLLQDTIQKLQVDAISRLSSFVMEKQESDASKRAVTEAHERNEDLLKRNEDLLKRNDDLIKKIEDSSKIVTQLQEALQRLEGKACNLEAENQVLRQQATSTPPTSAKSPASRAKISRIHRSPENGHNLNGDIRQTEMKPSTGTSEAITSAANVPDLGDQKDFEHGEKLQRIPKQKYQPSHHQQPQDDQQWLLACIPQHLGFSGSKPVAALLIYQCLLHWKSFEAMKTGVFDSILHAINSATEAQNDMRTLAYWLSNLSTLTVLLQRSFKTTRTAISTPQRRRFSSERIFHGNQTSNAGLAYLSGQSVVGSAGLPQVEAKYPALLFKQQLVDLIEKVYGMISDSVKKELNPLLELCIQDPRTSHSSIAKGNLNGMGQQNQLTYWLGIVKILTSYLDVLRVNHVPSILVHKLFTQIFSLIDVQLFNRLLLRRECCSFSNGEYVRAGLTELKHWSDNATREFAGSAWEALRHIRQAVDFLVRLPVLARLGPQADSHPIVAPFSKTRAPVRQPEDILSKVISAAQGSPLLTMQALRGPQDLSHPPNESGSIKPAPAISPEKPRRICSEEITSGFSTVGAGPEEPRCDCSCPLGTGNCKDWASQSGECFEEAGHPQASTVEQPLLAAPIDVPTLSDQQGIGLSIEQIPEQHIEDQGIYLNDDQSTEQNPEQHIEDQGLILYDDQSTEQNSEQNIEQQTSLIPSGLNLLNSQPVTTQLNVQDDRRLLQAYPLVYSRRRRHSRSPPPLTKTPQETPEVAAVRKLMKASKAIEALLPQPVIHKQKPKLQAP

SEQ ID NO: 172878 - protein, 2137 aa, Zea Mays
MASTLNIVIGSHVWVEDKDLSWVDGEVSRIDGKKAHVRTTKGKTVIANISDIHPKDTEAPPDGVDDMTRLSYLHEPGVLDNLAVRYAKNIIYTYTGNILIAINPFQRLPNLVDARTMEKYKGANLGDLDPHVFAIADVSYRQMINEGKSNSILVSGESGAGKTETTKLLMGYLAYLGGRSGTGERTVEQQVLESNPVLEAFGNAKTVRNNNSSRFGKFVEIQFDKSGKISGAAIRTYLLERSRVCQINSPERNYHCFYFLCAAPSEDLKKYKLGDPSLFHYLNQSACIKVDGINDAEEYLATRKAMDTVGITDQEQEAIFRVVAAVLHLGNINFTKGREADSSIIKDDKSRFHLNTAGELLMCDCEKLENALIKREINTPEGVITTTVGPNSATISRDGLAKQIYSRLFDWLVNRINASIGQDPNSNKLIGVLDIYGFESFKTNSFEQLCINFTNEKLQQHFNQNVFKMEQEEYTREQINWSYIEFVDNQDVLDLIERKPGGIIALLDEACMFPKSTHETLSQKLYEKFKNHKRFTKPKLSRTAFTIQHYAGDVTYQSDQFLDKNKDYVVAEHQELLNASKCSFVSGLFPQATEENTKSSKSSIATRFKIQLHELMETLSSTEPHYIRCIKPNSVLKPGIFENTNVLQQLRCSGVLEAIRISCAGYPTRKLFHDFLHRFRVLAPEILKEKNDEKVSCQKVLDKMGLQGYQIGRTKVFLRAGQMADLDARRTEMRNNAAKGVQSQFRTHVAREQFLVLRDTSIYLQSFVRARLACKQHEFLRQQAAALRIQKNARWYFAWKTYYQLRLSAITLQAGLRSMAARNEFTFRKKNKASVHIQSQWRCHRDYSNYMNLKRAALTYQCAWRRRVARKELRKLKLAARDTQALKVAKEKLEERVEELTSRLDREKKLRADLEKSKADEVSKLKEALHEMEQRVEEVKAMQEQESAKKAVEEALAQEREKISLLTTEIEGLKVLLVAEREENDKMKKAHANALETNEELNKEVSDADEKIKQFSDTVRRLEGTVSEHEGLLLTERQQNEAANAALAESQARNEALVSKLEDAVKQNDLLHEADQRFQEATKNLESSLTFEKQRHEANLIELAEAREKIEELQREVGDTDEKFTLLQTSIQSVEERLREKDALLTTERLESEATKKSLNESEDRNQDLLLKIEIAQKDIAHFQETVRRHEENMAALETSLRSERQQNDAIMKQLAESQGEIGELQRKLEDADARNGLLQDSLQRHEENMAALETSLRSERQQNDAIMKQLAESQGEIGELQRKLEDADARNGLLQDSLQRHEENMAALETSLRSERQQNDAIMKQLAESQGEIGELQRKLEDADARNGLLQDSLQRLEDDATTREALMETERKETEMTKKTLTEALDQIEELVKEVECANHSVHQLQDSMQRMEQTAVAREATLLAEHQEKDATSKALAEAQGRIEGLLKEIYSANRKNDQLQSTIERLEEGATTTDALYLAERKGHDQTKKSLSEAQETNKELLKKIEKAEKNIDQLLENVERLEKDAITRESLLLTTKQSYGDTAKLLLESQEKNQELVHKVEDSDSKIVLLEDSVKRLEESTADKDSLLAIERHENSETKKELVGSQKKIAELLTEVQDTRANVAELEDLIRRLEGKLAITEALLLTEKEQNASTLKLLAEAQLRIEELIKKLEGSDRKSDSLQDTITRLEQDVTAKEALLLTEKEAHDATRKTLTEAQEESGELLKKIHDNDKHILQLQFTIQRLEETTVANENLLLREREQNDITTKAHNESQEKYEELLSKFVDVDRKIDLLQGTIERLGENTTKDSLLLSERHEKDAIKKALTEAQEKNEELLMKVEDANEKIEQLQTTIDMLEDNVAAKDVSLEAAMKENDAIRRSLTEAQERNDELLKKISDSEYRIHLLQDTIQKLQVDAISRLSSFVMEKQESDASKRAVTEAHERNEDLLKRNEDLLKRNDDLIKKIEDSSKIVTQLQEALQRLEGKACNLEAENQVLRQQATSTPPTSAKSPASRAKISRIHRSPENGHNLNGDIRQTEMKPSTGTSEAITSAANVPDLGDQKDFEHGEKLQRIPKQKYQPSHHQQPQDDQQWLLACIPQHLGFSGSKPVAALLIYQCLLHWKSFEAMKTGSK

SEQ ID NO: 172879 - protein, 2505 aa, Zea Mays
MASTLNIVIGSHVWVEDKDLSWVDGEVSRIDGKKAHVRTTKGKTVIANISDIHPKDTEAPPDGVDDMTRLSYLHEPGVLDNLAVRYAKNIIYTYTGNILIAINPFQRLPNLVDARTMEKYKGANLGDLDPHVFAIADVSYRQMINEGKSNSILVSGESGAGKTETTKLLMGYLAYLGGRSGTGERTVEQQVLESNPVLEAFGNAKTVRNNNSSRFGKFVEIQFDKSGKISGAAIRTYLLERSRVCQINSPERNYHCFYFLCAAPSEDLKKYKLGDPSLFHYLNQSACIKVDGINDAEEYLATRKAMDTVGITDQEQEAIFRVVAAVLHLGNINFTKGREADSSIIKDDKSRFHLNTAGELLMCDCEKLENALIKREINTPEGVITTTVGPNSATISRDGLAKQIYSRLFDWLVNRINASIGQDPNSNKLIGVLDIYGFESFKTNSFEQLCINFTNEKLQQHFNQNVFKMEQEEYTREQINWSYIEFVDNQDVLDLIERKPGGIIALLDEACMFPKSTHETLSQKLYEKFKNHKRFTKPKLSRTAFTIQHYAGDVTYQSDQFLDKNKDYVVAEHQELLNASKCSFVSGLFPQATEENTKSSKSSIATRFKIQLHELMETLSSTEPHYIRCIKPNSVLKPGIFENTNVLQQLRCSGVLEAIRISCAGYPTRKLFHDFLHRFRVLAPEILKEKNDEKVSCQKVLDKMGLQGYQIGRTKVFLRAGQMADLDARRTEMRNNAAKGVQSQFRTHVAREQFLVLRDTSIYLQSFVRARLACKQHEFLRQQAAALRIQKNARWYFAWKTYYQLRLSAITLQAGLRSMAARNEFTFRKKNKASVHIQSQWRCHRDYSNYMNLKRAALTYQCAWRRRVARKELRKLKLAARDTQALKVAKEKLEERVEELTSRLDREKKLRADLEKSKADEVSKLKEALHEMEQRVEEVKAMQEQESAKKAVEEALAQEREKISLLTTEIEGLKVLLVAEREENDKMKKAHANALETNEELNKEVSDADEKIKQFSDTVRRLEGTVSEHEGLLLTERQQNEAANAALAESQARNEALVSKLEDAVKQNDLLHEADQRFQEATKNLESSLTFEKQRHEANLIELAEAREKIEELQREVGDTDEKFTLLQTSIQSVEERLREKDALLTTERLESEATKKSLNESEDRNQDLLLKIEIAQKDIAHFQETVRRHEENMAALETSLRSERQQNDAIMKQLAESQGEIGELQRKLEDADARNGLLQDSLQRHEENMAALETSLRSERQQNDAIMKQLAESQGEIGELQRKLEDADARNGLLQDSLQRHEENMAALETSLRSERQQNDAIMKQLAESQGEIGELQRKLEDADARNGLLQDSLQRLEDDATTREALMETERKETEMTKKTLTEALDQIEELVKEVECANHSVHQLQDSMQRMEQTAVAREATLLAEHQEKDATSKALAEAQGRIEGLLKEIYSANRKNDQLQSTIERLEEGATTTDALYLAERKGHDQTKKSLSEAQETNKELLKKIEKAEKNIDQLLENVERLEKDAITRESLLLTTKQSYGDTAKLLLESQEKNQELVHKVEDSDSKIVLLEDSVKRFNHFSYRLEESTADKDSLLAIERHENSETKKELVGSQKKIAELLTEVQDTRANVAELEDLIRRLEGKLAITEALLLTEKEQNASTLKLLAEAQLRIEELIKKLEGSDRKSDSLQDTITRLEQDVTAKEALLLTEKEAHDATRKTLTEAQEESGELLKKIHDNDKHILQLQFTIQRLEETTVANENLLLREREQNDITTKAHNESQEKYEELLSKFVDVDRKIDLLQGTIERLGENTTKDSLLLSERHEKDAIKKALTEAQEKNEELLMKVEDANEKIEQLQTTIDMLEDNVAAKDVSLEAAMKENDAIRRSLTEAQERNDELLKKISDSEYRIHLLQDTIQKLQVDAISRLSSFVMEKQESDASKRAVTEAHERNEDLLKRNEDLLKRNDDLIKKIEDSSKIVTQLQEALQRLEGKACNLEAENQVLRQQATSTPPTSAKSPASRAKISRIHRSPENGHNLNGDIRQTEMKPSTGTSEAITSAANVPDLGDQKDFEHGEKLQRIPKQKYQPSHHQQPQDDQQWLLACIPQHLGFSGSKPVAALLIYQCLLHWKSFEAMKTGVFDSILHAINSATEAQNDMRTLAYWLSNLSTLTVLLQRSFKTTRTAISTPQRRRFSSERIFHGNQTSNAGLAYLSGQSVVGSAGLPQVEAKYPALLFKQQLVDLIEKVYGMISDSVKKELNPLLELCIQDPRTSHSSIAKGNLNGMGQQNQLTYWLGIVKILTSYLDVLRVNHVPSILVHKLFTQIFSLIDVQLFNRLLLRRECCSFSNGEYVRAGLTELKHWSDNATREFAGSAWEALRHIRQAVDFLVISLKPMRTLREIHTDVCPALSIQQLERIVSMYWDDVNGTNTISAEFTSSLKSAVRDESNMATSFSILLDDDSSIPFSLDDITKTLPVIEVADDDFVPFVHENPSFAFLLQRGE

SEQ ID NO: 172880 - protein, 2274 aa, Zea Mays
MASTLNIVIGSHVWVEDKDLSWVDGEVSRIDGKKAHVRTTKGKTVIANISDIHPKDTEAPPDGVDDMTRLSYLHEPGVLDNLAVRYAKNIIYTYTGNILIAINPFQRLPNLVDARTMEKYKGANLGDLDPHVFAIADVSYRQMINEGKSNSILVSGESGAGKTETTKLLMGYLAYLGGRSGTGERTVEQQVLESNPVLEAFGNAKTVRNNNSSRFGKFVEIQFDKSGKISGAAIRTYLLERSRVCQINSPERNYHCFYFLCAAPSEDLKKYKLGDPSLFHYLNQSACIKVDGINDAEEYLATRKAMDTVGITDQEQEAIFRVVAAVLHLGNINFTKGREADSSIIKDDKSRFHLNTAGELLMCDCEKLENALIKREINTPEGVITTTVGPNSATISRDGLAKQIYSRLFDWLVNRINASIGQDPNSNKLIGVLDIYGFESFKTNSFEQLCINFTNEKLQQHFNQNVFKMEQEEYTREQINWSYIEFVDNQDVLDLIERKPGGIIALLDEACMFPKSTHETLSQKLYEKFKNHKRFTKPKLSRTAFTIQHYAGDVTYQSDQFLDKNKDYVVAEHQELLNASKCSFVSGLFPQATEENTKSSKSSIATRFKIQLHELMETLSSTEPHYIRCIKPNSVLKPGIFENTNVLQQLRCSGVLEAIRISCAGYPTRKLFHDFLHRFRVLAPEILKEKNDEKVSCQKVLDKMGLQGYQIGRTKVFLRAGQMADLDARRTEMRNNAAKGVQSQFRTHVAREQFLVLRDTSIYLQSFVRARLACKQHEFLRQQAAALRIQKNARWYFAWKTYYQLRLSAITLQAGLRSMAARNEFTFRKKNKASVHIQSQWRCHRDYSNYMNLKRAALTYQCAWRRRVARKELRKLKLAARDTQALKVAKEKLEERVEELTSRLDREKKLRADLEKSKADEVSKLKEALHEMEQRVEEVKAMQEQESAKKAVEEALAQEREKISLLTTEIEGLKVLLVAEREENDKMKKAHANALETNEELNKEVSDADEKIKQFSDTVRRLEGTVSEHEGLLLTERQQNEAANAALAESQARNEALVSKLEDAVKQNDLLHEADQRFQEATKNLESSLTFEKQRHEANLIELAEAREKIEELQREVGDTDEKFTLLQTSIQSVEERLREKDALLTTERLESEATKKSLNESEDRNQDLLLKIEIAQKDIAHFQETVRRHEENMAALETSLRSERQQNDAIMKQLAESQGEIGELQRKLEDADARNGLLQDSLQRHEENMAALETSLRSERQQNDAIMKQLAESQGEIGELQRKLEDADARNGLLQDSLQRHEENMAALETSLRSERQQNDAIMKQLAESQGEIGELQRKLEDADARNGLLQDSLQRLEDDATTREALMETERKETEMTKKTLTEALDQIEELVKEVECANHSVHQLQDSMQRMEQTAVAREATLLAEHQEKDATSKALAEAQGRIEGLLKEIYSANRKNDQLQSTIERLEQDVTAKEALLLTEKEAHDATRKTLTEAQEESGELLKKIHDNDKHILQLQFTIQRLEETTVANENLLLREREQNDITTKAHNESQEKYEELLSKFVDVDRKIDLLQGTIERLGENTTKDSLLLSERHEKDAIKKALTEAQEKNEELLMKVEDANEKIEQLQTTIDMLEDNVAAKDVSLEAAMKENDAIRRSLTEAQERNDELLKKISDSEYRIHLLQDTIQKLQVDAISRLSSFVMEKQESDASKRAVTEAHERNEDLLKRNEDLLKRNDDLIKKIEDSSKIVTQLQEALQRLEGKACNLEAENQVLRQQATSTPPTSAKSPASRAKISRIHRSPENGHNLNGDIRQTEMKPSTGTSEAITSAANVPDLGDQKDFEHGEKLQRIPKQKYQPSHHQQPQDDQQWLLACIPQHLGFSGSKPVAALLIYQCLLHWKSFEAMKTGVFDSILHAINSATEAQNDMRTLAYWLSNLSTLTVLLQRSFKTTRTAISTPQRRRFSSERIFHGNQTSNAGLAYLSGQSVVGSAGLPQVEAKYPALLFKQQLVDLIEKVYGMISDSVKKELNPLLELCIQDPRTSHSSIAKGNLNGMGQQNQLTYWLGIVKILTSYLDVLRVNHVPSILVHKLFTQIFSLIDVQLFNRLLLRRECCSFSNGEYVRAGLTELKHWSDNATREFAGSAWEALRHIRQAVDFLVISLKPMRTLREIHTDVCPALSIQQLERIVSMYWDDVNGTNTISAEFTSSLKSAVRDESNMATSFSILLDDDSSIPFSLDDITKTLPVIEVADDDFVPFVHENPSFAFLLQRGE

SEQ ID NO: 172881 - protein, 1912 aa, Zea Mays
MASTLNIVIGSHVWVEDKDLSWVDGEVSRIDGKKAHVRTTKGKTVIANISDIHPKDTEAPPDGVDDMTRLSYLHEPGVLDNLAVRYAKNIIYTYTGNILIAINPFQRLPNLVDARTMEKYKGANLGDLDPHVFAIADVSYRQMINEGKSNSILVSGESGAGKTETTKLLMGYLAYLGGRSGTGERTVEQQVLESNPVLEAFGNAKTVRNNNSSRFGKFVEIQFDKSGKISGAAIRTYLLERSRVCQINSPERNYHCFYFLCAAPSEDLKKYKLGDPSLFHYLNQSACIKVDGINDAEEYLATRKAMDTVGITDQEQEAIFRVVAAVLHLGNINFTKGREADSSIIKDDKSRFHLNTAGELLMCDCEKLENALIKREINTPEGVITTTVGPNSATISRDGLAKQIYSRLFDWLVNRINASIGQDPNSNKLIGVLDIYGFESFKTNSFEQLCINFTNEKLQQHFNQNVFKMEQEEYTREQINWSYIEFVDNQDVLDLIERKPGGIIALLDEACMFPKSTHETLSQKLYEKFKNHKRFTKPKLSRTAFTIQHYAGDVTYQSDQFLDKNKDYVVAEHQELLNASKCSFVSGLFPQATEENTKSSKSSIATRFKIQLHELMETLSSTEPHYIRCIKPNSVLKPGIFENTNVLQQLRCSGVLEAIRISCAGYPTRKLFHDFLHRFRVLAPEILKEKNDEKVSCQKVLDKMGLQGYQIGRTKVFLRAGQMADLDARRTEMRNNAAKGVQSQFRTHVAREQFLVLRDTSIYLQSFVRARLACKQHEFLRQQAAALRIQKNARWYFAWKTYYQLRLSAITLQAGLRSMAARNEFTFRKKNKASVHIQSQWRCHRDYSNYMNLKRAALTYQCAWRRRVARKELRKLKLAARDTQALKVAKEKLEERVEELTSRLDREKKLRADLEKSKADEVSKLKEALHEMEQRVEEVKAMQEQESAKKAVEEALAQEREKISLLTTEIEGLKVLLVAEREENDKMKKAHANALETNEELNKEVSDADEKIKQFSDTVRRLEGTVSEHEGLLLTERQQNEAANAALAESQARNEALVSKLEDAVKQNDLLHEADQRFQEATKNLESSLTFEKQRHEANLIELAEAREKIEELQREVGDTDEKFTLLQTSIQSVEERLREKDALLTTERLESEATKKSLNESEDRNQDLLLKIEIAQKDIAHFQETVRRHEENMAALETSLRSERQQNDAIMKQLAESQGEIGELQRKLEDADARNGLLQDSLQRHEENMAALETSLRSERQQNDAIMKQLAESQGEIGELQRKLEDADARNGLLQDSLQRHEENMAALETSLRSERQQNDAIMKQLAESQGEIGELQRKLEDADARNGLLQDSLQRLEDDATTREALMETERKETEMTKKTLTEALDQIEELVKEVECANHSVHQLQDSMQRMEQTAVAREATLLAEHQEKDATSKALAEAQGRIEGLLKEIYSANRKNDQLQSTIERLEQDVTAKEALLLTEKEAHDATRKTLTEAQEESGELLKKIHDNDKHILQLQFTIQRLEETTVANENLLLREREQNDITTKAHNESQEKYEELLSKFVDVDRKIDLLQGTIERLGENTTKDSLLLSERHEKDAIKKALTEAQEKNEELLMKVEDANEKIEQLQTTIDMLEDNVAAKDVSLEAAMKENDAIRRSLTEAQERNDELLKKISDSEYRIHLLQDTIQKLQVDAISRLSSFVMEKQESDASKRAVTEAHERNEDLLKRNEDLLKRNDDLIKKIEDSSKIVTQLQEALQRLEGKACNLEAENQVLRQQATSTPPTSAKSPASRAKISRIHRSPENGHNLNGDIRQTEMKPSTGTSEAITSAVSLTMLMFLTWATKKILNMEKNCKEYQNRNISLLITSSPRTISSGYSLVFHNILDFLGANQLQLSLYTNAFSIGNHLKP

SEQ ID NO: 172882 - protein, 1186 aa, Zea Mays
MAEDGASATQAMVAQTRPTGPCNGEGCPGGAVHGGEGGRSRFGKFVEIQFDKSGKISGAAIRTYLLERSRVCQINSPERNYHCFYFLCAAPSEDLKKYKLGDPSLFHYLNQSACIKVDGINDAEEYLATRKAMDTVGITDQEQEAIFRVVAAVLHLGNINFTKGREADSSIIKDDKSRFHLNTAGELLMCDCEKLENALIKREINTPEGVITTTVGPNSATISRDGLAKQIYSRLFDWLVNRINASIGQDPNSNKLIGVLDIYGFESFKTNSFEQLCINFTNEKLQQHFNQNVFKMEQEEYTREQINWSYIEFVDNQDVLDLIERKPGGIIALLDEACMFPKSTHETLSQKLYEKFKNHKRFTKPKLSRTAFTIQHYAGDVTYQSDQFLDKNKDYVVAEHQELLNASKCSFVSGLFPQATEENTKSSKSSIATRFKIQLHELMETLSSTEPHYIRCIKPNSVLKPGIFENTNVLQQLRCSGVLEAIRISCAGYPTRKLFHDFLHRFRVLAPEILKEKNDEKVSCQKVLDKMGLQGYQIGRTKVFLRAGQMADLDARRTEMRNNAAKGVQSQFRTHVAREQFLVLRDTSIYLQSFVRARLACKQHEFLRQQAAALRIQKNARWYFAWKTYYQLRLSAITLQAGLRSMAARNEFTFRKKNKASVHIQSQWRCHRDYSNYMNLKRAALTYQCAWRRRVARKELRKLKLAARDTQALKVAKEKLEERVEELTSRLDREKKLRADLEKSKADEVSKLKEALHEMEQRVEEVKAMQEQESAKKAVEEALAQEREKISLLTTEIEGLKVLLVAEREENDKMKKAHANALETNEELNKEVSDADEKIKQFSDTVRRLEGTVSEHEGLLLTERQQNEAANAALAESQARNEALVSKLEDAVKQNDLLHEADQRFQEATKNLESSLTFEKQRHEANLIELAEAREKIEELQREVGDTDEKFTLLQTSIQSVEERLREKDALLTTERLESEATKKSLNESEDRNQDLLLKIEIAQKDIAHFQETVRRHEENMAALETSLRSERQQNDAIMKQLAESQGEIGELQRKLEDADARNGLLQDSLQRLEDDATTREALMETERKETEMTKKTLTEALDQIEELVKEVECANHSVHQLQDSMQRMEQTAVAREATLLAEHQEKDATSKALAEAQGRIEGLLKEIYSANRKNDQLQSTIERTG

SEQ ID NO: 172883 - protein, 2517 aa, Zea Mays
MAEDGASATQAMVAQTRPTGPCNGEGCPGGAVHGGEGGRSRFGKFVEIQFDKSGKISGAAIRTYLLERSRVCQINSPERNYHCFYFLCAAPSEDLKKYKLGDPSLFHYLNQSACIKVDGINDAEEYLATRKAMDTVGITDQEQEAIFRVVAAVLHLGNINFTKGREADSSIIKDDKSRFHLNTAGELLMCDCEKLENALIKREINTPEGVITTTVGPNSATISRDGLAKQIYSRLFDWLVNRINASIGQDPNSNKLIGVLDIYGFESFKTNSFEQLCINFTNEKLQQHFNQNVFKMEQEEYTREQINWSYIEFVDNQDVLDLIERKPGGIIALLDEACMFPKSTHETLSQKLYEKFKNHKRFTKPKLSRTAFTIQHYAGDVTYQSDQFLDKNKDYVVAEHQELLNASKCSFVSGLFPQATEENTKSSKSSIATRFKIQLHELMETLSSTEPHYIRCIKPNSVLKPGIFENTNVLQQLRCSGVLEAIRISCAGYPTRKLFHDFLHRFRVLAPEILKEKNDEKVSCQKVLDKMGLQGYQIGRTKVFLRAGQMADLDARRTEMRNNAAKGVQSQFRTHVAREQFLVLRDTSIYLQSFVRARLACKQHEFLRQQAAALRIQKNARWYFAWKTYYQLRLSAITLQAGLRSMAARNEFTFRKKNKASVHIQSQWRCHRDYSNYMNLKRAALTYQCAWRRRVARKELRKLKLAARDTQALKVAKEKLEERVEELTSRLDREKKLRADLEKSKADEVSKLKEALHEMEQRVEEVKAMQEQESAKKAVEEALAQEREKISLLTTEIEGLKVLLVAEREENDKMKKAHANALETNEELNKEVSDADEKIKQFSDTVRRLEGTVSEHEGLLLTERQQNEAANAALAESQARNEALVSKLEDAVKQNDLLHEADQRFQEATKNLESSLTFEKQRHEANLIELAEAREKIEELQREVGDTDEKFTLLQTSIQSVEERLREKDALLTTERLESEATKKSLNESEDRNQDLLLKIEIAQKDIAHFQETVRRHEENMAALETSLRSERQQNDAIMKQLAESQGEIGELQRKLEDADARNGLLQDSLQRHEENMAALETSLRSERQQNDAIMKQLAESQGEIGELQRKLEDADARNGLLQDSLQRHEENMAALETSLRSERQQNDAIMKQLAESQGEIGELQRKLEDADARNGLLQDSLQRLEDDATTREALMETERKETEMTKKTLTEALDQIEELVKEVECANHSVHQLQDSMQRMEQTAVAREATLLAEHQEKDATSKALAEAQGRIEGLLKEIYSANRKNDQLQSTIERLEEGATTTDALYLAERKGHDQTKKSLSEAQETNKELLKKIEKAEKNIDQLLENVERLEKDAITRESLLLTTKQSYGDTAKLLLESQEKNQELVHKVEDSDSKIVLLEDSVKRLEESTADKDSLLAIERHENSETKKELVGSQKKIAELLTEVQDTRANVAELEDLIRRLEGKLAITEALLLTEKEQNASTLKLLAEAQLRIEELIKKLEGSDRKSDSLQDTITRLEQDVTAKEALLLTEKEAHDATRKTLTEAQEESGELLKKIHDNDKHILQLQFTIQRLEETTVANENLLLREREQNDITTKAHNESQEKYEELLSKFVDVDRKIDLLQGTIERLGENTTKDSLLLSERHEKDAIKKALTEAQEKNEELLMKVEDANEKIEQLQTTIDMLEDNVAAKDVSLEAAMKENDAIRRSLTEAQERNDELLKKISDSEYRIHLLQDTIQKLQVDAISRLSSFVMEKQESDASKRAVTEAHERNEDLLKRNEDLLKRNDDLIKKIEDSSKIVTQLQEALQRLEGKACNLEAENQVLRQQATSTPPTSAKSPASRAKISRIHRSPENGHNLNGDIRQTEMKPSTGTSEAITSAANVPDLGDQKDFEHGEKLQRIPKQKYQPSHHQQPQDDQQWLLACIPQHLGFSGSKPVAALLIYQCLLHWKSFEAMKTGVFDSILHAINSATEAQNDMRTLAYWLSNLSTLTVLLQRSFKTTRTAISTPQRRRFSSERIFHGNQTSNAGLAYLSGQSVVGSAGLPQVEAKYPALLFKQQLVDLIEKVYGMISDSVKKELNPLLELCIQDPRTSHSSIAKGNLNGMGQQNQLTYWLGIVKILTSYLDVLRVNHVPSILVHKLFTQIFSLIDVQLFNRLLLRRECCSFSNGEYVRAGLTELKHWSDNATREFAGSAWEALRHIRQAVDFLVRLPVLARLGPQADSHPIVAPFSKTRAPVRQPEDILSKVISAAQGSPLLTMQALRGPQDLSHPPNESGSIKPAPAISPEKPRRICSEEITSGFSTVGAGPEEPRCDCSCPLGTGNCKDWASQSGECFEEAGHPQASTVEQPLLAAPIDVPTLSDQQGIGLSIEQIPEQHIEDQGIYLNDDQSTEQNPEQHIEDQGLILYDDQSTEQNSEQNIEQQTSLIPSGLNLLNSQPVTTQLNVQDDRRLLQAYPLVYSRRRRHSRSPPPLTKTPQETPEVAAVRKLMKASKAIEALLPQPVIHKQKPKLQAP

SEQ ID NO: 172884 - protein, 2101 aa, Zea Mays
MAEDGASATQAMVAQTRPTGPCNGEGCPGGAVHGGEGGRSRFGKFVEIQFDKSGKISGAAIRTYLLERSRVCQINSPERNYHCFYFLCAAPSEDLKKYKLGDPSLFHYLNQSACIKVDGINDAEEYLATRKAMDTVGITDQEQEAIFRVVAAVLHLGNINFTKGREADSSIIKDDKSRFHLNTAGELLMCDCEKLENALIKREINTPEGVITTTVGPNSATISRDGLAKQIYSRLFDWLVNRINASIGQDPNSNKLIGVLDIYGFESFKTNSFEQLCINFTNEKLQQHFNQNVFKMEQEEYTREQINWSYIEFVDNQDVLDLIERKPGGIIALLDEACMFPKSTHETLSQKLYEKFKNHKRFTKPKLSRTAFTIQHYAGDVTYQSDQFLDKNKDYVVAEHQELLNASKCSFVSGLFPQATEENTKSSKSSIATRFKIQLHELMETLSSTEPHYIRCIKPNSVLKPGIFENTNVLQQLRCSGVLEAIRISCAGYPTRKLFHDFLHRFRVLAPEILKEKNDEKVSCQKVLDKMGLQGYQIGRTKVFLRAGQMADLDARRTEMRNNAAKGVQSQFRTHVAREQFLVLRDTSIYLQSFVRARLACKQHEFLRQQAAALRIQKNARWYFAWKTYYQLRLSAITLQAGLRSMAARNEFTFRKKNKASVHIQSQWRCHRDYSNYMNLKRAALTYQCAWRRRVARKELRKLKLAARDTQALKVAKEKLEERVEELTSRLDREKKLRADLEKSKADEVSKLKEALHEMEQRVEEVKAMQEQESAKKAVEEALAQEREKISLLTTEIEGLKVLLVAEREENDKMKKAHANALETNEELNKEVSDADEKIKQFSDTVRRLEGTVSEHEGLLLTERQQNEAANAALAESQARNEALVSKLEDAVKQNDLLHEADQRFQEATKNLESSLTFEKQRHEANLIELAEAREKIEELQREVGDTDEKFTLLQTSIQSVEERLREKDALLTTERLESEATKKSLNESEDRNQDLLLKIEIAQKDIAHFQETVRRHEENMAALETSLRSERQQNDAIMKQLAESQGEIGELQRKLEDADARNGLLQDSLQRHEENMAALETSLRSERQQNDAIMKQLAESQGEIGELQRKLEDADARNGLLQDSLQRHEENMAALETSLRSERQQNDAIMKQLAESQGEIGELQRKLEDADARNGLLQDSLQRLEDDATTREALMETERKETEMTKKTLTEALDQIEELVKEVECANHSVHQLQDSMQRMEQTAVAREATLLAEHQEKDATSKALAEAQGRIEGLLKEIYSANRKNDQLQSTIERLEQDVTAKEALLLTEKEAHDATRKTLTEAQEESGELLKKIHDNDKHILQLQFTIQRLEETTVANENLLLREREQNDITTKAHNESQEKYEELLSKFVDVDRKIDLLQGTIERLGENTTKDSLLLSERHEKDAIKKALTEAQEKNEELLMKVEDANEKIEQLQTTIDMLEDNVAAKDVSLEAAMKENDAIRRSLTEAQERNDELLKKISDSEYRIHLLQDTIQKLQVDAISRLSSFVMEKQESDASKRAVTEAHERNEDLLKRNEDLLKRNDDLIKKIEDSSKIVTQLQEALQRLEGKACNLEAENQVLRQQATSTPPTSAKSPASRAKISRIHRSPENGHNLNGDIRQTEMKPSTGTSEAITSAANVPDLGDQKDFEHGEKLQRIPKQKYQPSHHQQPQDDQQWLLACIPQHLGFSGSKPVAALLIYQCLLHWKSFEAMKTGVFDSILHAINSATEAQNDMRTLAYWLSNLSTLTVLLQRSFKTTRTAISTPQRRRFSSERIFHGNQTSNAGLAYLSGQSVVGSAGLPQVEAKYPALLFKQQLVDLIEKVYGMISDSVKKELNPLLELCIQDPRTSHSSIAKGNLNGMGQQNQLTYWLGIVKILTSYLDVLRVNHVPSILVHKLFTQIFSLIDVQLFNRLLLRRECCSFSNGEYVRAGLTELKHWSDNATREFAGSAWEALRHIRQAVDFLVISLKPMRTLREIHTDVCPALSIQQLERIVSMYWDDVNGTNTISAEFTSSLKSAVRDESNMATSFSILLDDDSSIPFSLDDITKTLPVIEVADDDFVPFVHENPSFAFLLQRGE

SEQ ID NO: 172885 - protein, 2269 aa, Zea Mays
MAEDGASATQAMVAQTRPTGPCNGEGCPGGAVHGGEGGRSRFGKFVEIQFDKSGKISGAAIRTYLLERSRVCQINSPERNYHCFYFLCAAPSEDLKKYKLGDPSLFHYLNQSACIKVDGINDAEEYLATRKAMDTVGITDQEQEAIFRVVAAVLHLGNINFTKGREADSSIIKDDKSRFHLNTAGELLMCDCEKLENALIKREINTPEGVITTTVGPNSATISRDGLAKQIYSRLFDWLVNRINASIGQDPNSNKLIGVLDIYGFESFKTNSFEQLCINFTNEKLQQHFNQNVFKMEQEEYTREQINWSYIEFVDNQDVLDLIERKPGGIIALLDEACMFPKSTHETLSQKLYEKFKNHKRFTKPKLSRTAFTIQHYAGDVTYQSDQFLDKNKDYVVAEHQELLNASKCSFVSGLFPQATEENTKSSKSSIATRFKIQLHELMETLSSTEPHYIRCIKPNSVLKPGIFENTNVLQQLRCSGVLEAIRISCAGYPTRKLFHDFLHRFRVLAPEILKEKNDEKVSCQKVLDKMGLQGYQIGRTKVFLRAGQMADLDARRTEMRNNAAKGVQSQFRTHVAREQFLVLRDTSIYLQSFVRARLACKQHEFLRQQAAALRIQKNARWYFAWKTYYQLRLSAITLQAGLRSMAARNEFTFRKKNKASVHIQSQWRCHRDYSNYMNLKRAALTYQCAWRRRVARKELRKLKLAARDTQALKVAKEKLEERVEELTSRLDREKKLRADLEKSKADEVSKLKEALHEMEQRVEEVKAMQEQESAKKAVEEALAQEREKISLLTTEIEGLKVLLVAEREENDKMKKAHANALETNEELNKEVSDADEKIKQFSDTVRRLEGTVSEHEGLLLTERQQNEAANAALAESQARNEALVSKLEDAVKQNDLLHEADQRFQEATKNLESSLTFEKQRHEANLIELAEAREKIEELQREVGDTDEKFTLLQTSIQSVEERLREKDALLTTERLESEATKKSLNESEDRNQDLLLKIEIAQKDIAHFQETVRRHEENMAALETSLRSERQQNDAIMKQLAESQGEIGELQRKLEDADARNGLLQDSLQRHEENMAALETSLRSERQQNDAIMKQLAESQGEIGELQRKLEDADARNGLLQDSLQRHEENMAALETSLRSERQQNDAIMKQLAESQGEIGELQRKLEDADARNGLLQDSLQRLEDDATTREALMETERKETEMTKKTLTEALDQIEELVKEVECANHSVHQLQDSMQRMEQTAVAREATLLAEHQEKDATSKALAEAQGRIEGLLKEIYSANRKNDQLQSTIERLEKDAITRESLLLTTKQSYGDTAKLLLESQEKNQELVHKVEDSDSKIVLLEDSVKRLEESTADKDSLLAIERHENSETKKELVGSQKKIAELLTEVQDTRANVAELEDLIRRLEGKLAITEALLLTEKEQNASTLKLLAEAQLRIEELIKKLEGSDRKSDSLQDTITRLEQDVTAKEALLLTEKEAHDATRKTLTEAQEESGELLKKIHDNDKHILQLQFTIQRLEETTVANENLLLREREQNDITTKAHNESQEKYEELLSKFVDVDRKIDLLQGTIERLGENTTKDSLLLSERHEKDAIKKALTEAQEKNEELLMKVEDANEKIEQLQTTIDMLEDNVAAKDVSLEAAMKENDAIRRSLTEAQERNDELLKKISDSEYRIHLLQDTIQKLQVDAISRLSSFVMEKQESDASKRAVTEAHERNEDLLKRNEDLLKRNDDLIKKIEDSSKIVTQLQEALQRLEGKACNLEAENQVLRQQATSTPPTSAKSPASRAKISRIHRSPENGHNLNGDIRQTEMKPSTGTSEAITSAANVPDLGDQKDFEHGEKLQRIPKQKYQPSHHQQPQDDQQWLLACIPQHLGFSGSKPVAALLIYQCLLHWKSFEAMKTGVFDSILHAINSATEAQNDMRTLAYWLSNLSTLTVLLQRSFKTTRTAISTPQRRRFSSERIFHGNQTSNAGLAYLSGQSVVGSAGLPQVEAKYPALLFKQQLVDLIEKVYGMISDSVKKELNPLLELCIQDPRTSHSSIAKGNLNGMGQQNQLTYWLGIVKILTSYLDVLRVNHVPSILVHKLFTQIFSLIDVQLFNRLLLRRECCSFSNGEYVRAGLTELKHWSDNATREFAGSAWEALRHIRQAVDFLVISLKPMRTLREIHTDVCPALSIQQLERIVSMYWDDVNGTNTISAEFTSSLKSAVRDESNMATSFSILLDDDSSIPFSLDDITKTLPVIEVADDDFVPFVHENPSFAFLLQRGE

SEQ ID NO: 172886 - protein, 924 aa, Zea Mays
MLVNSYGLEDDATTREALMETERKETEMTKKTLTEALDQIEELVKEVECANHSVHQLQDSMQRMEQTAVAREATLLAEHQEKDATSKALAEAQGRIEGLLKEIYSANRKNDQLQSTIERLEQDVTAKEALLLTEKEAHDATRKTLTEAQEESGELLKKIHDNDKHILQLQFTIQRLEETTVANENLLLREREQNDITTKAHNESQEKYEELLSKFVDVDRKIDLLQGTIERLGENTTKDSLLLSERHEKDAIKKALTEAQEKNEELLMKVEDANEKIEQLQTTIDMLEDNVAAKDVSLEAAMKENDAIRRSLTEAQERNDELLKKISDSEYRIHLLQDTIQKLQVDAISRLSSFVMEKQESDASKRAVTEAHERNEDLLKRNEDLLKRNDDLIKKIEDSSKIVTQLQEALQRLEGKACNLEAENQVLRQQATSTPPTSAKSPASRAKISRIHRSPENGHNLNGDIRQTEMKPSTGTSEAITSAANVPDLGDQKDFEHGEKLQRIPKQKYQPSHHQQPQDDQQWLLACIPQHLGFSGSKPVAALLIYQCLLHWKSFEAMKTGVFDSILHAINSATEAQNDMRTLAYWLSNLSTLTVLLQRSFKTTRTAISTPQRRRFSSERIFHGNQTSNAGLAYLSGQSVVGSAGLPQVEAKYPALLFKQQLVDLIEKVYGMISDSVKKELNPLLELCIQDPRTSHSSIAKGNLNGMGQQNQLTYWLGIVKILTSYLDVLRVNHVPSILVHKLFTQIFSLIDVQLFNRLLLRRECCSFSNGEYVRAGLTELKHWSDNATREFAGSAWEALRHIRQAVDFLVISLKPMRTLREIHTDVCPALSIQQLERIVSMYWDDVNGTNTISAEFTSSLKSAVRDESNMATSFSILLDDDSSIPFSLDDITKTLPVIEVADDDFVPFVHENPSFAFLLQRGE

SEQ ID NO: 172887 - protein, 906 aa, Zea Mays
METERKETEMTKKTLTEALDQIEELVKEVECANHSVHQLQDSMQRMEQTAVAREATLLAEHQEKDATSKALAEAQGRIEGLLKEIYSANRKNDQLQSTIERLEQDVTAKEALLLTEKEAHDATRKTLTEAQEESGELLKKIHDNDKHILQLQFTIQRLEETTVANENLLLREREQNDITTKAHNESQEKYEELLSKFVDVDRKIDLLQGTIERLGENTTKDSLLLSERHEKDAIKKALTEAQEKNEELLMKVEDANEKIEQLQTTIDMLEDNVAAKDVSLEAAMKENDAIRRSLTEAQERNDELLKKISDSEYRIHLLQDTIQKLQVDAISRLSSFVMEKQESDASKRAVTEAHERNEDLLKRNEDLLKRNDDLIKKIEDSSKIVTQLQEALQRLEGKACNLEAENQVLRQQATSTPPTSAKSPASRAKISRIHRSPENGHNLNGDIRQTEMKPSTGTSEAITSAANVPDLGDQKDFEHGEKLQRIPKQKYQPSHHQQPQDDQQWLLACIPQHLGFSGSKPVAALLIYQCLLHWKSFEAMKTGVFDSILHAINSATEAQNDMRTLAYWLSNLSTLTVLLQRSFKTTRTAISTPQRRRFSSERIFHGNQTSNAGLAYLSGQSVVGSAGLPQVEAKYPALLFKQQLVDLIEKVYGMISDSVKKELNPLLELCIQDPRTSHSSIAKGNLNGMGQQNQLTYWLGIVKILTSYLDVLRVNHVPSILVHKLFTQIFSLIDVQLFNRLLLRRECCSFSNGEYVRAGLTELKHWSDNATREFAGSAWEALRHIRQAVDFLVISLKPMRTLREIHTDVCPALSIQQLERIVSMYWDDVNGTNTISAEFTSSLKSAVRDESNMATSFSILLDDDSSIPFSLDDITKTLPVIEVADDDFVPFVHENPSFAFLLQRGE

SEQ ID NO: 172888 - protein, 900 aa, Zea Mays
MAPTLAAGRLEEGATTTDALYLAERKGHDQTKKSLSEAQETNKELLKKIEKAEKNIDQLLENVERLEKDAITRESLLLTTKQSYGDTAKLLLESQEKNQELVHKVEDSDSKIVLLEDSVKRFNHFSYRLEESTADKDSLLAIERHENSETKKELVGSQKKIAELLTEVQDTRANVAELEDLIRRLEQDVTAKEALLLTEKEAHDATRKTLTEAQEESGELLKKIHDNDKHILQLQFTIQRLEETTVANENLLLREREQNDITTKAHNESQEKYEELLSKFVDVDRKIDLLQGTIERLGENTTKDSLLLSERHEKDAIKKALTEAQEKNEELLMKVEDANEKIEQLQTTIDMLEDNVAAKDVSLEAAMKENDAIRRSLTEAQERNDELLKKISDSEYRIHLLQDTIQKLQVDAISRLSSFVMEKQESDASKRAVTEAHERNEDLLKRNEDLLKRNDDLIKKIEDSSKIVTQLQEALQRLEGKACNLEAENQVLRQQATSTPPTSAKSPASRAKISRIHRSPENGHNLNGDIRQTEMKPSTGTSEAITSAANVPDLGDQKDFEHGEKLQRIPKQKYQPSHHQQPQDDQQWLLACIPQHLGFSGSKPVAALLIYQCLLHWKSFEAMKTGVFDSILHAINSATEAQNDMRTLAYWLSNLSTLTVLLQRSFKTTRTAISTPQRRRFSSERIFHGNQTSNAGLAYLSGQSVVGSAGLPQVEAKYPALLFKQQLVDLIEKVYGMISDSVKKELNPLLELCIQDPRTSHSSIAKGNLNGMGQQNQLTYWLGIVKILTSYLDVLRVNHVPSILVHKLFTQIFSLIDVQLFNRLLLRRECCSFSNGEYVRAGLTELKHWSDNATREFAGSAWEALRHIRQAVDFLQHDLASLDNPFTEEELWAAVKDLPP

SEQ ID NO: 172889 - protein, 163 aa, Zea Mays
MLPRRTQLLRLLRNKSKKNKGRKKLPKLVDIGFVATVEVLVILCQGLLGRYRITRNWYKAYPEHKACPMMFLHMMLLMKFPLLPTGVLFMSTSFGVLWSVQALPELTGTRASDDELRKKIYNKLKTYSIVTVTMVRFSSPLVSIHMLRYTCSDVCDIVGMTCS

SEQ ID NO: 172890 - protein, 440 aa, Zea Mays
MVQVCIRLLLMWEIIEKEKAGPVSAMVGNRLESRPISASPSFSSSLVAYKGSAKTFNLVEMERATLGFDESRIIGEGGFGRVYEGILEDGERVAIKVLKRDDQQGTREFLAEVEMLSRLHHRNLVKLIGICTEGHSRCLVYELVPNGSVESHLHDKGAAQFDWNARLKIALGAARALAYLHEDSSPRVIHRDFKSSNILLEHDFTPKVSDFGLARTALGEGNEHISTRVMGTFGYLAPEYAMTGHLLVKSDVYSYGVVLLELLTGRKPVDMLRPPGQENLVAWAGSLLTSRDGLESIIDHSLGRSIPFDSIAKVAAIASMCVQPEVDQRPFMGEVVQALKLVCNEGGEFNESTFSQDLHIQDVEVMSRASTDVDVDPTLSAELFTSSARYDAIDAPGSFRRYSSSGPLRVGRTGLNKERGLSTGSSSEHVGLQRFRIDGE

SEQ ID NO: 172891 - protein, 679 aa, Zea Mays
MFDAGSPRPAPHKSNSTSAPSHGYPGSTAPAPVRLPPPKGKGEGNFAHAPNHPNQYHSTSYSPGSALPPAHPPDIPAFRKPKILAPAPSQSLLPPPTNSYCTTPCSDPLTNSPPGMTCLCVLPIKVELRFGIALYTFFTLVPELAQDIASGVFMNQSQVRVMGANAAPDDPEKTIVFIDLVPLGPKFDNATAFSVFERFCNKQVIINHNHFGKYDVLYVLYQGLPPSPPAASMNNGLSNVNGPSLHPLAADVGNYRERKGPVSAMVGNRLESRPISASPSFSSSLVAYKGSAKTFNLVEMERATLGFDESRIIGEGGFGRVYEGILEDGERVAIKVLKRDDQQGTREFLAEVEMLSRLHHRNLVKLIGICTEGHSRCLVYELVPNGSVESHLHDKGAAQFDWNARLKIALGAARALAYLHEDSSPRVIHRDFKSSNILLEHDFTPKVSDFGLARTALGEGNEHISTRVMGTFGYLAPEYAMTGHLLVKSDVYSYGVVLLELLTGRKPVDMLRPPGQENLVAWAGSLLTSRDGLESIIDHSLGRSIPFDSIAKVAAIASMCVQPEVDQRPFMGEVVQALKLVCNEGGEFNESTFSQDLHIQDVEVMSRASTDVDVDPTLSAELFTSSARYDAIDAPGSFRRYSSSGPLRVGRTGLNKERGLSTGSSSEHVGLQRFRIDGE

SEQ ID NO: 172892 - protein, 644 aa, Zea Mays
MFDAGSPRPAPHKSNSTSAPSHGYPGSTAPAPVRLPPPKGKGEGNFAHAPNHPNQYHSTSYSPGSALPPAHPPDIPAFRKPKILAPAPSQSLLPPPTNSYCTTPCSDPLTNSPPGMTCLCVLPIKVELRFGIALYTFFTLVPELAQDIASGVFMNQSQVRVMGANAAPDDPEKTIVFIDLVPLGPKFDNATAFSVFERFCNKQVIINHNHFGKYDVLYVLYQGPVSAMVGNRLESRPISASPSFSSSLVAYKGSAKTFNLVEMERATLGFDESRIIGEGGFGRVYEGILEDGERVAIKVLKRDDQQGTREFLAEVEMLSRLHHRNLVKLIGICTEGHSRCLVYELVPNGSVESHLHGSDKGAAQFDWNARLKIALGAARALAYLHEDSSPRVIHRDFKSSNILLEHDFTPKVSDFGLARTALGEGNEHISTRVMGTFGYLAPEYAMTGHLLVKSDVYSYGVVLLELLTGRKPVDMLRPPGQENLVAWAGSLLTSRDGLESIIDHSLGRSIPFDSIAKVAAIASMCVQPEVDQRPFMGEVVQALKLVCNEGGEFNESTFSQDLHIQDVEVMSRASTDVDVDPTLSAELFTSSARYDAIDAPGSFRRYSSSGPLRVGRTGLNKERGLSTGSSSEHVGLQRFRIDGE

SEQ ID NO: 172893 - protein, 330 aa, Zea Mays
MVQVCIRLLLMWEIIEKEKAGPVSAMVGNRLESRPISASPSFSSSLVAYKGSAKTFNLVEMERATLGFDESRIIGEGGFGRVYEGILEDGERVAIKVLKRDDQQGTREFLAEVEMLSRLHHRNLVKLIGICTEGHSRCLVYELVPNGSVESHLHGRKPVDMLRPPGQENLVAWAGSLLTSRDGLESIIDHSLGRSIPFDSIAKVAAIASMCVQPEVDQRPFMGEVVQALKLVCNEGGEFNESTFSQDLHIQDVEVMSRASTDVDVDPTLSAELFTSSARYDAIDAPGSFRRYSSSGPLRVGRTGLNKERGLSTGSSSEHVGLQRFRIDGE

SEQ ID NO: 172894 - protein, 192 aa, Zea Mays
MPDDSLGGPWNYTNAASFIRYTVSKGYDVHGWELGNELSGSGVRARIDADQYAADVIALKHIVDSAYQGKPSKPLVLASGGFFDAVWFTQLVSKTKPDQMDAITHHIYNLGPGVDDHLVQKILDPSYLDGKASTFSNFQQPSGDTQVRRHVRCRLGWRGWRHVSGSALVRHKELLQTDLGWRQLWPAQHKYI

SEQ ID NO: 172895 - protein, 241 aa, Zea Mays
MARVRETQPWRHRPQAQALAAARHQAPVPPAGVVLLGCLPLRRWDELNVFLQKTRPRIVFGLNALNGRVPMPDDSLGGPWNYTNAASFIRYTVSKGYDVHGWELGNELSGSGVRARIDADQYAADVIALKHIVDSAYQGKPSKPLVLASGGFFDAVWFTQLVSKTKPDQMDAITHHIYNLGPGVDDHLVQKILDPSYLDGKASTFSNFQQPSGDTQVRRHVRCRLGWRGWRHVQQLPPPCH

SEQ ID NO: 172896 - protein, 128 aa, Zea Mays
MARVRETQPWRHRPQAQALAAARHQAPVPPAGVVLLGCLPLRRWDELNVFLQKTRPRIVFGLNALNGRVPMPDDSLGGPWNYTNAASFIRYTVSKGYDVHGWELGMLILSYLVDCVGFVRKKEPHVTR

SEQ ID NO: 172897 - protein, 116 aa, Zea Mays
MGTKVLSTTFNSTNKIRAYAHCVKNSVRRSGTCDGKLLLTVRCLNHARFNMFLGRDRSAPDQPGRHQHEPHLRDEPRRARPERKEEGERDLRRPHHPCRARRSSSRAHETGVPSDS

SEQ ID NO: 172898 - protein, 175 aa, Zea Mays
MELHERSFFHSLHREQGIRCTWMGARALWPKHTEIVAAGNELSGSGVRARIDADQYAADVIALKHIVDSAYQGKPSKPLVLASGGFFDAVWFTQLVSKTKPDQMDAITHHIYNLGPGVDDHLVQKILDPSYLDGKASTFSNFQQPSGDTQVRRHVRCRLGWRGWRHVQQLPPPCH

SEQ ID NO: 172899 - protein, 171 aa, Zea Mays
MPDDSLGGPWNYTNAASFIRYTVSKGYDVHGWELGNELSGSGVRARIDADQYAADVIALKHIVDSAYQGKPSKPLVLASGGFFDAVWFTQLVSKTKPDQMDAITHHIYNLGPGVDDHLVQKILDPSYLDGKASTFSNFQQPSGDTQVRRHVRCRLGWRGWRHVQQLPPPCH

SEQ ID NO: 172900 - protein, 346 aa, Zea Mays
MPDDSLGGPWNYTNAASFIRYTVSKGYDVHGWELGNELSGSGVRARIDADQYAADVIALKHIVDSAYQGKPSKPLVLASGGFFDAVWFTQLVSKTKPDQMDAITHHIYNLGPGVDDHLVQKILDPSYLDGKASTFSNFQQPSGDTQVRRHVRCRLGWRGWRHVSGSALVRHKELLQTDLGWRQLWPAQHNALLWHRLMGTKVLSTTFNSTNKIRAYAHCVKNSEGIALLLINLDGISTNRIYVTSQGAHAQSERKKGSGTSDVHIIPVGLGEAAAALTRQEYHLTPKDGNLQSQQLLLNGNVLATDADGEIPELEPVQVEGTQPITVGPYSTVFAHVPSFYAPTCL

SEQ ID NO: 172901 - protein, 636 aa, Zea Mays
MGAEGEGAVEEATGFEVCIVLPKLSRAAATGPTEDCVARLVRELEGAGLLVERVRGVPAEFIKLAAPMGTLGRAAADMQMKKLTYIGMELQFQWDQVAAFVRQPDGSLFSWRERYCCFRYLIYGIVNKTNSEIAIKFDGKEFHWKQSESLLTMLEAEGVVKRIFPLHDEIKRKQLLRNWALNWLDFTWQPIDEIYSYFGTKIATYFAFLGMYTRWLFFPAVFGLTTQLIDFGSLQWLVLPAFFIFVISWAVFFLQFWKRKNSALLARWGINCSLSEYKNLGIELSSLSDSLTVEEKKFCDVSAEKSKLQRNEWFGVLLRIRNNAIIVLAIICLQLPFELAYAHLYEITETEAMKYLLTAVYLVAIQYYTRIGGKVSVNLIKYENNQGEESSSASLVYKVFGLYFMQSYIGLFYHASLYRDILALRQVLIQRLIVSQVLENLIENSIPYLKYSYKKYIAVHKKKHEKESPVGRSVRLSTRVEKEYLKPSYTASIGAELEDGLFDDFLELALQFGMIMMFACAFPLIFCFAALNNVTEIRADALKLLVMLKRPEPRAAATIGAWLNIFQEGKWRIEPGLAAILIMEHALLLIKFGFSHFVPEEPAWVKANRVRYVAQAQNVCSKQLLRSISKFDGKLD

SEQ ID NO: 172902 - protein, 73 aa, Zea Mays
MSHYSLVKIIVARTPRIWGNESKNVSVSLWHNYTHVSLRLMYFHCSLTIAICCHYSSCSNNKAFVSGESRTKN

SEQ ID NO: 172903 - protein, 104 aa, Zea Mays
MKSRRWATEEEIFNPQLGRTQDLHWMRDFGGGCNWRSASLRCCESQAATAAGGRGRGRRVAAPGGWSEFGALNSRGVSNPPMPSMTMLGARAIACFSPLKETTC

SEQ ID NO: 172904 - protein, 96 aa, Zea Mays
MKSRRWATEEEIFNPQLGRTQDLHWMRDFGGGCNWRSASLRCCESQAATAAGGRGRGRRVAAPGGWSEFGALNSRGVSNPPMPSMTMLGARIRIEI

SEQ ID NO: 172905 - protein, 243 aa, Zea Mays
MPVKTKAMQHPLPQIHLSMASVRLSILKLDWNMEVQQHHLLLDLVMTGITHLIDPLQEKNTVTLSGDDKGKETGTTTEASYSKEEKSENNSVSTEAENSRGDSSSGVNGSSETSTNGGEQVDPKTETSTSTSNEHNESQGADGSSGSNNCNGPEQTIDTAEVQLCISQDRLSAMLIAYAMISRQVVSERVIIAVRLMMQAHNTGKSGRGKVLGKNEERHRTPAFLQQSTGTGTDRHAESLTLV

SEQ ID NO: 172906 - protein, 361 aa, Zea Mays
MACGDGAEEKFREPLRLASDTTPGAADFLNPMRPTPALVAGGRMVTSFLSATEWMLPSPATQVHTISVLPSRRDFAFSNLTMLLRNSGGNEGESGSTKFHVVRDDLLHPLANGNKARKLDALLPILRRCGVTDIVTCGGCQSAHAAAIAVHCAEWGIRPHILLRGEQLDVPTGYNLISLMFGNVTYVSRSLYAQRDEMLYEHAIKVAGYSGTVMWADEVIGKGLGVDEDTTDGNGSRRVMIVKEGAGSVQALLGVMRLLKYLSGLTLFRKDEKVHIVVDSGTGTTAVGLALGAVCLGLQWRVTAVMLADTLEGYKQRERSLLSDFEKVFPEIYHGMVEDATHDNLVQWVERFSPRSIKVAC

SEQ ID NO: 172907 - protein, 262 aa, Zea Mays
MACGDGAEEKFREPLRLASDTTPGAADFLNPMRPTPALVAGGRMVTSFLSATEWMLPSPATQVHTISVLPSRRDFAFSNLTMLLRNSGGNEGESGSTKFHVVRDDLLHPLANGNKARKLDALLPILRRCGVTDIVTCGGCQSAHAAAIAVHCAEWGIRPHILLRGEQLDVPTGYNLISLMFGNVTYVSRSLYAQRDEMLYEHAIKVAGYSGTVMWADEVIGKGLGVDEDTTDGNGSRRVMIVKEGAGSVQALLERMRKFISW

SEQ ID NO: 172908 - protein, 136 aa, Zea Mays
MWGLPERPCRSYRGSLCRMGNQATYTAERRATGCSHRVAGYSGTVMWADEVIGKGLGVDEDTTDGNGSRRVMIVKEGAGSVQALLGVMRLLKYLSGLTLFRKDEKVHIVVDSGTGTTAVGLALGATPVEGYCCYAC

SEQ ID NO: 172909 - protein, 292 aa, Zea Mays
MACGDGAEEKFREPLRLASDTTPGAADFLNPMRPTPALVAGGRMVTSFLSATEWMLPSPATQVHTISVLPSRRDFAFSNLTMLLRNSGGNEGESGSTKFHVVRDDLLHPLANGNKARKLDALLPILRRCGVTDIVTCGGCQSAHAAAIAVHCAEWGIRPHILLRGEQLDVPTGYNLISLMFGNVTYVSRSLYAQRDEMLYEHAIKVAGYSGTVMWADEVIGKGLGVDEDTTDGNGSRRVMIVKEGAGVMRLLKYLSGLTLFRKDEKVHIVVDSGTGTTAVGLALGAVCLGCV

SEQ ID NO: 172910 - protein, 424 aa, Zea Mays
MACGDGAEEKFREPLRLASDTTPGAADFLNPMRPTPALVAGGRMVTSFLSATEWMLPSPATQVHTISVLPSRRDFAFSNLTMLLRNSGGNEGESGSTKFHVVRDDLLHPLANGNKARKLDALLPILRRCGVTDIVTCGGCQSAHAAAIAVHCAEWGIRPHILLRGEQLDVPTGYNLISLMFGNVTYVSRSLYAQRDEMLYEHAIKVAGYSGTVMWADEVIGKGLGVDEDTTDGNGSRRVMIVKEGAGVMRLLKYLSGLTLFRKDEKVHIVVDSGTGTTAVGLALGAVCLGLQWRVTAVMLADTLEGYKQRERSLLSDFEKVFPEIYHGMVEDATHDNLVQWVERFSPRRFGKVLDGEIAMCRQVAQQTGILLDPMYTLAAWEQAVDICCGDSEAKVLMIHTGGTLGLFGLAQRYSSQFNTGEQP

SEQ ID NO: 172911 - protein, 174 aa, Zea Mays
MACGDGAEEKFREPLRLASDTTPGAADFLNPMRPTPALVAGGRMVTSFLSATEWMLPSPATQVHTISVLPSRRDFAFSNLTMLLRNSGGNEGESGSTKFHVVRDDLLHPLANGNKARKLDALLPILRRCGVTDIVTCGGCQSAHAAAIAVHCAEWGIRPHILLRGEQLDVPTGI

SEQ ID NO: 172912 - protein, 263 aa, Zea Mays
MWGLPERPCRSYRGSLCRMGNQATYTAERRATGCSHRVAGYSGTVMWADEVIGKGLGVDEDTTDGNGSRRVMIVKEGAGSVQALLGVMRLLKYLSGLTLFRKDEKVHIVVDSGTGTTAVGLALGAVCLGLQWRVTAVMLADTLEGYKQRERSLLSDFEKVFPEIYHGMVEDATHDNLVQWVERFSPRRFGKVLDGEIAMCRQVAQQTGILLDPMYTLAAWEQAVDICCGDSEAKVLMIHTGGTLGLFGLAQRYSSQFNTGEQP

SEQ ID NO: 172913 - protein, 180 aa, Zea Mays
MACGDGAEEKFREPLRLASDTTPGAADFLNPMRPTPALVAGGRMVTSFLSATEWMLPSPATQVHTISVLPSRRDFAFSNLTMLLRNSGGNEGESGSTKFHVVRDDLLHPLANGNKARKLDALLPILRRCGVTDIVTCGGCQSAHAAAIAVHCAEWGIRPHILLRGEQLDVPTGLQDIVAQ

SEQ ID NO: 172914 - protein, 297 aa, Zea Mays
MACGDGAEEKFREPLRLASDTTPGAADFLNPMRPTPALVAGGRMVTSFLSATEWMLPSPATQVHTISVLPSRRDFAFSNLTMLLRNSGGNEGESGSTKFHVVRDDLLHPLANGNKARKLDALLPILRRCGVTDIVTCGGCQSAHAAAIAVHCAEWGIRPHILLRGEQLDVPTGYNLISLMFGNVTYVSRSLYAQRDEMLYEHAIKVAGYSGTVMWADEVIGKGLGVDEDTTDGNGSRRVMIVKEGAGVMRLLKYLSGLTLFRKDEKVHIVVDSGTGTTAVGLALGATPVEGYCCYAC

SEQ ID NO: 172915 - protein, 346 aa, Zea Mays
MPVKRSASALALPPVGRRARARLCIRLAAPLSFLLLFVALFHAQPLLGVPPAAQPPSAGPGKVAFLFLVRAGVPLDFLWDAFFRNGEEGKFSVYVHSAPGFQLDRTTTGSPYFYGRQLARSVKVVWGEATMVEAERMLFAAALQDPANQRFVLLSDSCVPLYNFSSIYTYLMASPKSFVDSFVDKTEKRYNQNMSPAIPKDKWRKGSQMVVTKSLFRRRPNARQLGFTFRRKQILKGVAQQEHDCIPDEHYVQTLFSIKGLEDELERRTLTYTSWNQSSNPKDKMTWHPMKFEYDTSSPEHINAIKRIDHVNYQMEHRTEWCQCNAVATETWSIRVLTATRMRLDS

SEQ ID NO: 172916 - protein, 1115 aa, Zea Mays
MGNIFLKENDFHIDKYTLHTGKNWRFDTSRSSQFHPSLDPAILEADAHRALLLLLDILRTAYAHRGSFLVGTINSLAAVVKIRPIYYDRVLPVLLDFDPGLETAKGAHSASLRYAVRAAFLGFLRSPHQAMIESKDILVRRLRVLSPGEAMEQNIRQAEKMSRNIERASRASKDESTSWEMPYGDINRKKPAVRSSDTFTTSDGIAKRARFDMSATSNLPVLGLSDYSDMQADNDASVGHSSDPAILNNEVSPVEKMIEMIGALLAEGERGAESLGILVSTVEADVMADIVIETMKHLPEASFHLATNNGVQQLNFKYSSGLVTQNLPANSDSTLFTAQSTPTADGVSISPSDAFVMTSVHDAKRDPRRDPRRLDPRRIVSSSAVNSIQVKMETNSVHQTDNLSNTLYSNSRKAENYSDYQGDLHKNEGEQQSASQPNQTIAKDKLELLDVVTEPEPTFEVEAPVDVRIHSSDVDEDIVKPMSSVVNSLDESDSMDLEVDPFLPAPKAPTPDDTNDDLPIITSQLELSEKGKISINKLAIGRILDDYKKNSFNARFSLLAHLIAQSAADDNIMDLIQRHIIFHSHDQEGYELAMHVLYQLQSISVANSPESSTSTSKHYEKFFISLARSLIDSLPASDKSFSKLLCDAPYLPESLFRLLEDLCMSEDNSQQLKDGDGDRVTQGLGTVWSLILGRPPLRHVCLDIALKCAAHSQDEVRGKAVRLVAKRLYDLTYATEKIEQFAIESLVGVANEHTVDTDINSKSLKESTAEIEVGSQGTSVSGSQIPDTEFSENGPFKTSSVSTKQSAVSVSEAKRRTSLFFALCTKRSSLLQHLFNAYGRSPKVVKQCIHWHMPNLIRNLGPSCPELLNIIHNPPEGSEHLITLTLQTLTEDSNPSADLVAAVKQLYNTKLKDASILIPLLPSFPKEEVLPIFPRLVDLPLERFQDVLARILQGTAHTGPALTPAEVLIAIHDINPEKDKVALKKVTDACTACFEQRTVFTQQVLEKSLNQLVDRIPIPLLFMRTVIQALDAFPALVDFVMGILSRLIDKQIWKMPKLWVGFLKLSFQTQPRSFDVLLQLPPPQLEFMLNKYPNLRTPLSSFVNQRNMHNTLPRF

SEQ ID NO: 172917 - protein, 128 aa, Zea Mays
MQAVGQLVSYFKIPLSQVVVMYDDLDLPFAKLRLLPKGGHGGHNGMRSIVNHLKQSRDFPRLRIGIGRPPGKMDPANFVLRPFNKKEQQELDFALHRGLEAVRIMVPEGFNKSATYVNTAQSSEMLNR

SEQ ID NO: 172918 - protein, 128 aa, Zea Mays
MRLPSAASASRLPSSLFLQPRARTRCVPSSSLACRASSSSAAGAGDGGSRKPWLFVGLGNPGKVYQGTRHNVGFEMIDVIAEAEGISLSSMQFKAMVGKGRIGDASIMLAKPQTFMNASAGFIFQDTT

SEQ ID NO: 172919 - protein, 532 aa, Zea Mays
MATFTAASSLSLLFSHPHSHSRQPSAQGPTASSHLHLHPRASRARCASSDTTATKHRRPAEENIREEAARLRGPAQGFSAWYEPFPPAPGGDPNERYSLDEVVYRSSSGGLLDVRHDMEALARYPGSYWRDLFDSRVGRTAWPYGSGVWSKKEFVLPEIDSDHIVSLFEGNSNLFWAERLGREHLGGMNDLWVKHCGISHTGSFKDLGMTVLVSQVNRLRRAPLSRPIAGVGCASTGDTSAALSAYCAAAGIPAIVFLPADRISLQQLIQPIANGATVLSLDTDFDGCMRLIREVTAELPIYLANSLNPLRLEGQKTAAIEILQQFNWQVPDWVIVPGGNLGNIYAFYKGFEMCRVLGLVDRVPRLVCAQAANANPLYRYYKSGWTEFEPQTAETTFASAIQIGDPVSVDRAVVALKATDGIVEEATEEELMDATALADRTGMFACPHTGVALAALFKLQGQRIIGPNDRTVVVSTAHGLKFTQSKIDYHDKNIKDMVCQYANPPISVKADFGSVMDVLQKNLNVSLMAGEC

SEQ ID NO: 172920 - protein, 200 aa, Zea Mays
MVGRGGRGAEGDRSHRERPCLSRRVTVQEQISSSFMDSPPPPHLDAPLFGADLIPSGRLRRMRGWRHSPGGLEEEIRMFQTRVLLGGMNMYDRYQDWRLDVDNMTYEELLELGDKIGYVNTGLRDDEITRNLRKVKHPSFSSLRFATEMERKCSICQEEFETNEEMGRLDCGHSYHVYCIKQWLSQKNICPVCKTAVSKN

SEQ ID NO: 172921 - protein, 162 aa, Zea Mays
MAAAGGGVGDSELRLLGKSSSPWVFRVRVALGLRGLSYEYIEEDLGNKSELLLRSNPVHKKVPVLIHGGRPVCESLVILQYVDEIWRGTGPPLLPSDPYDRATARFWAAYVDDKVEDGRAESGGAPERPPRGGDVGAGVHGVLQGEAFGAVQGVSGQMDCRC

SEQ ID NO: 172922 - protein, 106 aa, Zea Mays
MHLCTGFGPEALPVGIRWTMDERDPGCLYGDLAELPCWGFFSLIVHPLLGEARCRRAGVLLRKVLDICNNLIFHTTLTMWSFSKHIMAKVATFGFGGPTKLHENSY

SEQ ID NO: 172923 - protein, 170 aa, Zea Mays
MRYRSTSGPLSPSMESPPNHVVPDDTANATGVASLVGRRHLICFFLYRRAISSGGDELHLLLMSGTDQELIPVFGALVMHLCTGFGPEALPVGIRWTMDERDPGCLYGDLAELPCWGFFSLIVHPLLGEARCRRAGVLLRKVLDICNNLIFHTTLTMWSFSKHVSFYVYC

SEQ ID NO: 172924 - protein, 242 aa, Zea Mays
MAAGGELQLLSSWYSPYVIRAKVALGLKGLIYEFIEEDLFSKSDLLLKLNPVHKKVPVLVHGGRPVCESLVIVQYVDETWAAGTGTPLLPADAHDRATARFWAAYVDDKFCKEWIKLYRSTTAEKAAEALGGVVPVVETLEQAFRECSRGKPFFGGDAVGLVDIALGSFVVWIRVVDEAAGVKVVDEAAGVKLLDEAKFPALTAWAERFLAVDAVKEVMPDAGRLLEHYKGFLAKRSPPAGY

SEQ ID NO: 172925 - protein, 70 aa, Zea Mays
MSLNSPSPNGVTFHICGVVFTHSVTDYMVGPSMHPSKGTIDVSSGSVFYLNFVLTLDRASWYLVQQIGTN

SEQ ID NO: 172926 - protein, 1522 aa, Zea Mays
MAMGATVRAAAADAMVTFLWVLCASALDVSIAAVTSYQGLQEGTGHYALLVTTSLLSVLLFTFDLLYGVLGGASFNFTDFATSYSAGLDSPSLFSVALHFLARTVVVVKRTTLRVARKDAYMAELDLFAKGLHERLVPFLGHCLDKEEEKVHVYRFVQNGDLSSALHKKSREEDEGLQSLDWIKRLKIATGVAEALCYLHHECSPPMVHRDVQASSILLDDKFDVRLGSLSELPAIESVLNAMKSNTNQRVSPIFALVLCPTRELAIQLTAEANVLLKYHEGIGVQSLIGGTRFKLDQRRLESDPCQPDHLLDETNRAGSKIRVERAERSSYTFQSQLDGGAQFCVSQEASRLTSLFLVFMPTAQDNTTTPMELEDFIRLDSIWMRWTLLAEDRTPKPGSQPRKPGDRRRQVENTLGGRSQAASESRGGVAVLAHGGGHSRRRSGMATPTPMPGSEGTLVAVMPRSPSPTPAEAGTSATETPVLIFLYFHKAIRAELEALHGAAVLLATERTGDVAALAERCRFFFSIYKHHCDAEDAVIFPALDIRVKNVAGTYSLEHKGESDLFSQLFDLLELDIQNDDALRRELASCTGFSFLPLPASVLLFIRLVFPLLTKKFSCEEQADLVWQFLCNIPVNMVAEFLPWLSTSVTSDEHQDIRDCLCKVVPDEKLLQQVVFTWMEGKAAREVAESFATESNGSQADRHPIDDILYWHNAIRMELHDIKKETRRVQQSGNFSDISAFNERLQFIADVCIYHSIAEDQVVFPAVDSELSFVQEHAEEEHRFNNFRCLIQQFQIAGAKSTALDFYSKLCSHADKILETIEKHFSNEETKVLPQARMFFSPEKQRELSYKSLCVMPLKLLERVLPWLVSKLSDEQATSFLQNIRLAASPSETALVTLISGWACKGRDKSKSGEYLCLTSGTARCLSDDVDDQGKCRSFCPCASHNSSDLSLQLQTENGSRPGKRGKDAVSFPGTNGSYCSQTADIDASPCSKKPCCIPGLRVKSSNLGIGSLASVKSFRSLPYNSTAPSIYSSLFSWETDASLSCSDGISRPIDTIFKFHKAIRKDLEYLDVESGRLIDGDESCLRQFIGRFRLLWGLYRAHSNAEDEIVFPALESRETLHNVSHSYTLDHKQEEQLFEDISDVLFQLSQLHDSQGHAQTKVNEVKQSCFHSSNDVDFTRKYNELATKLQAMCKSIRVALTNHVHREELELWPLFDKHFSVEEQDKLVGRIIGSTGAEVLQSMVPWVTSALTQEEQNKMLDTWKQATKNTMFGEWLNEWWKGAGTSDSSAEAPSAPEDSHLQDKLEQNDQMFKPGWKDIFRMNQSELEAEVRKVSRDPTLDPRRKAYLIQNLMTSRWIAAQQKLPEPNSEECSDDASIPGCAPSYRDQEKEIYGCEHYKRNCKLVAACCNKLFTCRFCHDKVSDHTMERKATQEMMCMVCLKIQPVGPFCQTPSCNRLSMAKYYCNICKFFDDERFAFKSGKMTRLVVAGAQIYHVCYCNFILVIGDLETYFIVYLCCMVM

SEQ ID NO: 172927 - protein, 1613 aa, Zea Mays
MAMGATVRAAAADAMVTFLWVLCASALDVSIAAVTSYQGLQEGTGHYALLVTTSLLSVLLFTFDLLYGVLGGASFNFTDFATSYSAGLDSPSLFSVALHFLARTVVVVKRTTLRVARKDAYMAELDLFAKGLHERLVPFLGHCLDKEEEKVHVYRFVQNGDLSSALHKKSREEDEGLQSLDWIKRLKIATGVAEALCYLHHECSPPMVHRDVQASSILLDDKFDVRLGSLSELPAIESVLNAMKSNTNQRVSPIFALVLCPTRELAIQLTAEANVLLKYHEGIGVQSLIGGTRFKLDQRRLESDPCQPDHLLDETNRAGSKIRVERAERSSYTFQSQLDGGAQFCVSQEASRLTSLFLVFMPTAQDNTTTPMELEDFIRLDSIWMRWTLLAEDRTPKPGSQPRKPGDRRRQVENTLGGRSQAASESRGGVAVLAHGGGHSRRRSGMATPTPMPGSEGTLVAVMPRSPSPTPAEAGTSATETPVLIFLYFHKAIRAELEALHGAAVLLATERTGDVAALAERCRFFFSIYKHHCDAEDAVIFPALDIRVKNVAGTYSLEHKGESDLFSQLFDLLELDIQNDDALRRELASCTGFSFLPLPASVLLFIRLVFPLLTKKFSCEEQADLVWQFLCNIPVNMVAEFLPWLSTSVTSDEHQDIRDCLCKVVPDEKLLQQVVFTWMEGKAAREVAESFATGNLVRNHSAEDVSDHGEIYVCSQQESKLGSKNCAESNGSQADRHPIDDILYWHNAIRMELHDIKKETRRVQQSGNFSDISAFNERLQFIADVCIYHSIAEDQVVFPAVDSELSFVQEHAEEEHRFNNFRCLIQQFQIAGAKSTALDFYSKLCSHADKILETIEKHFSNEETKVLPQARMFFSPEKQRELSYKSLCVMPLKLLERVLPWLVSKLSDEQATSFLQNIRLAASPSETALVTLISGWACKGRDKSKSGEYLCLTSGTARCLSDDVDDQGKCRSFCPCASHNSSDLSLQLQTENGSRPGKRGKDAVSFPGTNGSYCSQTADIDASPCSKKPCCIPGLRVKSSNLGIGSLASVKSFRSLPYNSTAPSIYSSLFSWETDASLSCSDGISRPIDTIFKFHKAIRKDLEYLDVESGRLIDGDESCLRQFIGRFRLLWGLYRAHSNAEDEIVFPALESRETLHNVSHSYTLDHKQEEQLFEDISDVLFQLSQLHDSQGHAQTKVNEVKQSCFHSSNDVDFTRKYNELATKLQAMCKSIRVALTNHVHREELELWPLFDKHFSVEEQDKLVGRIIGSTGAEVLQSMVPWVTSALTQEEQNKMLDTWKQATKNTMFGEWLNEWWKGAGTSDSSAEAPSAPEDSHLQDKLEQNDQMFKPGWKDIFRMNQSELEAEVRKVSRDPTLDPRRKAYLIQNLMTSRWIAAQQKLPEPNSEECSDDASIPGCAPSYRDQEKEIYGCEHYKRNCKLVAACCNKLFTCRFCHDKVSDHTMERKATQEMMCMVCLKIQPVGPFCQTPSCNRLSMAKYYCNICKFFDDERTVYHCPFCNLCRLGKGLGVDFFHCMKCNCCLGMKLTEHKCREKGLETNCPICCDFLFTSSAAVRALPCGHFMHSACFQAYTCSHYTCPICCKSLGDMAFFFDS

SEQ ID NO: 172928 - protein, 1613 aa, Zea Mays
MAMGATVRAAAADAMVTFLWVLCASALDVSIAAVTSYQGLQEGTGHYALLVTTSLLSVLLFTFDLLYGVLGGASFNFTDFATSYSAGLDSPSLFSVALHFLARTVVVVKRTTLRVARKDAYMAELDLFAKGLHERLVPFLGHCLDKEEEKVHVYRFVQNGDLSSALHKKSREEDEGLQSLDWIKRLKIATGVAEALCYLHHECSPPMVHRDVQASSILLDDKFDVRLGSLSELPAIESVLNAMKSNTNQRVSPIFALVLCPTRELAIQLTAEANVLLKYHEGIGVQSLIGGTRFKLDQRRLESDPCQPDHLLDETNRAGSKIRVERAERSSYTFQSQLDGGAQFCVSQEASRLTSLFLVFMPTAQDNTTTPMELEDFIRLDSIWMRWTLLAEDRTPKPGSQPRKPGDRRRQVENTLGGRSQAASESRGGVAVLAHGGGHSRRRSGMATPTPMPGSEGTLVAVMPRSPSPTPAEAGTSATETPVLIFLYFHKAIRAELEALHGAAVLLATERTGDVAALAERCRFFFSIYKHHCDAEDAVIFPALDIRVKNVAGTYSLEHKGESDLFSQLFDLLELDIQNDDALRRELASCTGAIQTCLSQHMSKEEEQVFPLLTKKFSCEEQADLVWQFLCNIPVNMVAEFLPWLSTSVTSDEHQDIRDCLCKVVPDEKLLQQVVFTWMEGKAAREVAESFATGNLVRNHSAEDVSDHGEIYVCSQQESKLGSKNCAESNGSQADRHPIDDILYWHNAIRMELHDIKKETRRVQQSGNFSDISAFNERLQFIADVCIYHSIAEDQVVFPAVDSELSFVQEHAEEEHRFNNFRCLIQQFQIAGAKSTALDFYSKLCSHADKILETIEKHFSNEETKVLPQARMFFSPEKQRELSYKSLCVMPLKLLERVLPWLVSKLSDEQATSFLQNIRLAASPSETALVTLISGWACKGRDKSKSGEYLCLTSGTARCLSDDVDDQGKCRSFCPCASHNSSDLSLQLQTENGSRPGKRGKDAVSFPGTNGSYCSQTADIDASPCSKKPCCIPGLRVKSSNLGIGSLASVKSFRSLPYNSTAPSIYSSLFSWETDASLSCSDGISRPIDTIFKFHKAIRKDLEYLDVESGRLIDGDESCLRQFIGRFRLLWGLYRAHSNAEDEIVFPALESRETLHNVSHSYTLDHKQEEQLFEDISDVLFQLSQLHDSQGHAQTKVNEVKQSCFHSSNDVDFTRKYNELATKLQAMCKSIRVALTNHVHREELELWPLFDKHFSVEEQDKLVGRIIGSTGAEVLQSMVPWVTSALTQEEQNKMLDTWKQATKNTMFGEWLNEWWKGAGTSDSSAEAPSAPEDSHLQDKLEQNDQMFKPGWKDIFRMNQSELEAEVRKVSRDPTLDPRRKAYLIQNLMTSRWIAAQQKLPEPNSEECSDDASIPGCAPSYRDQEKEIYGCEHYKRNCKLVAACCNKLFTCRFCHDKVSDHTMERKATQEMMCMVCLKIQPVGPFCQTPSCNRLSMAKYYCNICKFFDDERTVYHCPFCNLCRLGKGLGVDFFHCMKCNCCLGMKLTEHKCREKGLETNCPICCDFLFTSSAAVRALPCGHFMHSACFQAYTCSHYTCPICCKSLGDMAFFFDS

SEQ ID NO: 172929 - protein, 1642 aa, Zea Mays
MAMGATVRAAAADAMVTFLWVLCASALDVSIAAVTSYQGLQEGTGHYALLVTTSLLSVLLFTFDLLYGVLGGASFNFTDFATSYSAGLDSPSLFSVALHFLARTVVVVKRTTLRVARKDAYMAELDLFAKGLHERLVPFLGHCLDKEEEKVHVYRFVQNGDLSSALHKKSREEDEGLQSLDWIKRLKIATGVAEALCYLHHECSPPMVHRDVQASSILLDDKFDVRLGSLSELPAIESVLNAMKSNTNQRVSPIFALVLCPTRELAIQLTAEANVLLKYHEGIGVQSLIGGTRFKLDQRRLESDPCQPDHLLDETNRAGSKIRVERAERSSYTFQSQLDGGAQFCVSQEASRLTSLFLVFMPTAQDNTTTPMELEDFIRLDSIWMRWTLLAEDRTPKPGSQPRKPGDRRRQVENTLGGRSQAASESRGGVAVLAHGGGHSRRRSGMATPTPMPGSEGTLVAVMPRSPSPTPAEAGTSATETPVLIFLYFHKAIRAELEALHGAAVLLATERTGDVAALAERCRFFFSIYKHHCDAEDAVIFPALDIRVKNVAGTYSLEHKGESDLFSQLFDLLELDIQNDDALRRELASCTGFSFLPLPASVLLFIRLVFPLLTKKFSCEEQADLVWQFLCNIPVNMVAEFLPWLSTSVTSDEHQDIRDCLCKVVPDEKLLQQVVFTWMEGKAAREVAESFATESNGSQADRHPIDDILYWHNAIRMELHDIKKETRRVQQSGNFSDISAFNERLQFIADVCIYHSIAEDQVVFPAVDSELSFVQEHAEEEHRFNNFRCLIQQFQIAGAKSTALDFYSKLCSHADKILETIEKHFSNEETKVLPQARMFFSPEKQRELSYKSLCVMPLKLLERVLPWLVSKLSDEQATSFLQNIRLAASPSETALVTLISGWACKGRDKSKSGEYLCLTSGTARCLSDDVDDQGKCRSFCPCASHNSSDLSLQLQTENGSRPGKRGKDAVSFPGTNGSYCSQTADIDASPCSKKPCCIPGLRVKSSNLGIGSLASVKSFRSLPYNSTAPSIYSSLFSWETDASLSCSDGISRPIDTIFKFHKAIRKDLEYLDVESGRLIDGDESCLRQFIGRFRLLWGLYRAHSNAEDEIVFPALESRETLHNVSHSYTLDHKQEEQLFEDISDVLFQLSQLHDSQGHAQTKVNEVKQSCFHSSNDVDFTRKYNELATKLQAMCKSIRVALTNHVHREELELWPLFDKHFSVEEQDKLVGRIIGSTGAEVLQSMVPWVTSALTQEEQNKMLDTWKQATKNTMFGEWLNEWWKGAGTSDSSAEAPSAPEDSHLQDKLEQNDQMFKPGWKDIFRMNQSELEAEVRKVSRDPTLDPRRKAYLIQNLMTSRWIAAQQKLPEPNSEECSDDASIPGCAPSYRDQEKEIYGCEHYKRNCKLVAACCNKLFTCRFCHDKVSDHTMERKATQEMMCMVCLKIQPVGPFCQTPSCNRLSMAKYYCNICKFFDDERTVYHCPFCNLCRLGKGLGVDFFHCMKCNCCLGMKLTEHKCREKGLETNCPICCDFLFTSSAAVRALPCGHFMHSACFQAYTCSHYTCPICCKSLGDMAVYFGMLDALLAAEELPEEYRDRCQDILCNDCERKGRCRFHWLYHKCGSCGSYNTRVIKTDTADCSTPN

SEQ ID NO: 172930 - protein, 1642 aa, Zea Mays
MAMGATVRAAAADAMVTFLWVLCASALDVSIAAVTSYQGLQEGTGHYALLVTTSLLSVLLFTFDLLYGVLGGASFNFTDFATSYSAGLDSPSLFSVALHFLARTVVVVKRTTLRVARKDAYMAELDLFAKGLHERLVPFLGHCLDKEEEKVHVYRFVQNGDLSSALHKKSREEDEGLQSLDWIKRLKIATGVAEALCYLHHECSPPMVHRDVQASSILLDDKFDVRLGSLSELPAIESVLNAMKSNTNQRVSPIFALVLCPTRELAIQLTAEANVLLKYHEGIGVQSLIGGTRFKLDQRRLESDPCQPDHLLDETNRAGSKIRVERAERSSYTFQSQLDGGAQFCVSQEASRLTSLFLVFMPTAQDNTTTPMELEDFIRLDSIWMRWTLLAEDRTPKPGSQPRKPGDRRRQVENTLGGRSQAASESRGGVAVLAHGGGHSRRRSGMATPTPMPGSEGTLVAVMPRSPSPTPAEAGTSATETPVLIFLYFHKAIRAELEALHGAAVLLATERTGDVAALAERCRFFFSIYKHHCDAEDAVIFPALDIRVKNVAGTYSLEHKGESDLFSQLFDLLELDIQNDDALRRELASCTGAIQTCLSQHMSKEEEQVFPLLTKKFSCEEQADLVWQFLCNIPVNMVAEFLPWLSTSVTSDEHQDIRDCLCKVVPDEKLLQQVVFTWMEGKAAREVAESFATESNGSQADRHPIDDILYWHNAIRMELHDIKKETRRVQQSGNFSDISAFNERLQFIADVCIYHSIAEDQVVFPAVDSELSFVQEHAEEEHRFNNFRCLIQQFQIAGAKSTALDFYSKLCSHADKILETIEKHFSNEETKVLPQARMFFSPEKQRELSYKSLCVMPLKLLERVLPWLVSKLSDEQATSFLQNIRLAASPSETALVTLISGWACKGRDKSKSGEYLCLTSGTARCLSDDVDDQGKCRSFCPCASHNSSDLSLQLQTENGSRPGKRGKDAVSFPGTNGSYCSQTADIDASPCSKKPCCIPGLRVKSSNLGIGSLASVKSFRSLPYNSTAPSIYSSLFSWETDASLSCSDGISRPIDTIFKFHKAIRKDLEYLDVESGRLIDGDESCLRQFIGRFRLLWGLYRAHSNAEDEIVFPALESRETLHNVSHSYTLDHKQEEQLFEDISDVLFQLSQLHDSQGHAQTKVNEVKQSCFHSSNDVDFTRKYNELATKLQAMCKSIRVALTNHVHREELELWPLFDKHFSVEEQDKLVGRIIGSTGAEVLQSMVPWVTSALTQEEQNKMLDTWKQATKNTMFGEWLNEWWKGAGTSDSSAEAPSAPEDSHLQDKLEQNDQMFKPGWKDIFRMNQSELEAEVRKVSRDPTLDPRRKAYLIQNLMTSRWIAAQQKLPEPNSEECSDDASIPGCAPSYRDQEKEIYGCEHYKRNCKLVAACCNKLFTCRFCHDKVSDHTMERKATQEMMCMVCLKIQPVGPFCQTPSCNRLSMAKYYCNICKFFDDERTVYHCPFCNLCRLGKGLGVDFFHCMKCNCCLGMKLTEHKCREKGLETNCPICCDFLFTSSAAVRALPCGHFMHSACFQAYTCSHYTCPICCKSLGDMAVYFGMLDALLAAEELPEEYRDRCQDILCNDCERKGRCRFHWLYHKCGSCGSYNTRVIKTDTADCSTPN

SEQ ID NO: 172931 - protein, 1519 aa, Zea Mays
MAMGATVRAAAADAMVTFLWVLCASALDVSIAAVTSYQGLQEGTGHYALLVTTSLLSVLLFTFDLLYGVLGGASFNFTDFATSYSAGLDSPSLFSVALHFLARTVVVVKRTTLRVARKDAYMAELDLFAKGLHERLVPFLGHCLDKEEEKVHVYRFVQNGDLSSALHKKSREEDEGLQSLDWIKRLKIATGVAEALCYLHHECSPPMVHRDVQASSILLDDKFDVRLGSLSELPAIESVLNAMKSNTNQRVSPIFALVLCPTRELAIQLTAEANVLLKYHEGIGVQSLIGGTRFKLDQRRLESDPCQPDHLLDETNRAGSKIRVERAERSSYTFQSQLDGGAQFCVSQEASRLTSLFLVFMPTAQDNTTTPMELEDFIRLDSIWMRWTLLAEDRTPKPGSQPRKPGDRRRQVENTLGGRSQAASESRGGVAVLAHGGGHSRRRSGMATPTPMPGSEGTLVAVMPRSPSPTPAEAGTSATETPVLIFLYFHKAIRAELEALHGAAVLLATERTGDVAALAERCRFFFSIYKHHCDAEDAVIFPALDIRVKNVAGTYSLEHKGESDLFSQLFDLLELDIQNDDALRRELASCTGAIQTCLSQHMSKEEEQVFPLLTKKFSCEEQADLVWQFLCNIPVNMVAEFLPWLSTSVTSDEHQDIRDCLCKVVPDEKLLQQVVFTWMEGKAAREVAESFATGNLVRNHSAEDVSDHGEIYVCSQQESKLGSKNCAESNGSQADRHPIDDILYWHNAIRMELHDIKKETRRVQQSGNFSDISAFNERLQFIADVCIYHSIAEDQVVFPAVDSELSFVQEHAEEEHRFNNFRCLIQQFQIAGAKSTALDFYSKLCSHADKILETIEKHFSNEETKVLPQARMFFSPEKQRELSYKSLCVMPLKLLERVLPWLVSKLSDEQATSFLQNIRLAASPSETALVTLISGWACKGRDKSKSGEYLCLTSGTARCLSDDVDDQGKCRSFCPCASHNSSDLSLQLQTENGSRPGKRGKDAVSFPGTNGSYCSQTADIDASPCSKKPCCIPGLRVKSSNLGIGSLASVKSFRSLPYNSTAPSIYSSLFSWETDASLSCSDGISRPIDTIFKFHKAIRKDLEYLDVESGRLIDGDESCLRQFIGRFRLLWGLYRAHSNAEDEIVFPALESRETLHNVSHSYTLDHKQEEQLFEDISDVLFQLSQLHDSQGHAQTKVNEVKQSCFHSSNDVDFTRKYNELATKLQAMCKSIRVALTNHVHREELELWPLFDKHFSVEEQDKLVGRIIGSTGAEVLQSMVPWVTSALTQEEQNKMLDTWKQATKNTMFGEWLNEWWKGAGTSDSSAEAPSAPEDSHLQDKLEQNDQMFKPGWKDIFRMNQSELEAEVRKVSRDPTLDPRRKAYLIQNLMTSRWIAAQQKLPEPNSEECSDDASIPGCAPSYRDQEKEIYGCEHYKRNCKLVAACCNKLFTCRFCHDKVSDHTMERKATQEMMCMVCLKIQPVGPFCQTPSCNRLSMAKYYCNICKFFDDERARDKLSNML

SEQ ID NO: 172932 - protein, 1519 aa, Zea Mays
MAMGATVRAAAADAMVTFLWVLCASALDVSIAAVTSYQGLQEGTGHYALLVTTSLLSVLLFTFDLLYGVLGGASFNFTDFATSYSAGLDSPSLFSVALHFLARTVVVVKRTTLRVARKDAYMAELDLFAKGLHERLVPFLGHCLDKEEEKVHVYRFVQNGDLSSALHKKSREEDEGLQSLDWIKRLKIATGVAEALCYLHHECSPPMVHRDVQASSILLDDKFDVRLGSLSELPAIESVLNAMKSNTNQRVSPIFALVLCPTRELAIQLTAEANVLLKYHEGIGVQSLIGGTRFKLDQRRLESDPCQPDHLLDETNRAGSKIRVERAERSSYTFQSQLDGGAQFCVSQEASRLTSLFLVFMPTAQDNTTTPMELEDFIRLDSIWMRWTLLAEDRTPKPGSQPRKPGDRRRQVENTLGGRSQAASESRGGVAVLAHGGGHSRRRSGMATPTPMPGSEGTLVAVMPRSPSPTPAEAGTSATETPVLIFLYFHKAIRAELEALHGAAVLLATERTGDVAALAERCRFFFSIYKHHCDAEDAVIFPALDIRVKNVAGTYSLEHKGESDLFSQLFDLLELDIQNDDALRRELASCTGFSFLPLPASVLLFIRLVFPLLTKKFSCEEQADLVWQFLCNIPVNMVAEFLPWLSTSVTSDEHQDIRDCLCKVVPDEKLLQQVVFTWMEGKAAREVAESFATGNLVRNHSAEDVSDHGEIYVCSQQESKLGSKNCAESNGSQADRHPIDDILYWHNAIRMELHDIKKETRRVQQSGNFSDISAFNERLQFIADVCIYHSIAEDQVVFPAVDSELSFVQEHAEEEHRFNNFRCLIQQFQIAGAKSTALDFYSKLCSHADKILETIEKHFSNEETKVLPQARMFFSPEKQRELSYKSLCVMPLKLLERVLPWLVSKLSDEQATSFLQNIRLAASPSETALVTLISGWACKGRDKSKSGEYLCLTSGTARCLSDDVDDQGKCRSFCPCASHNSSDLSLQLQTENGSRPGKRGKDAVSFPGTNGSYCSQTADIDASPCSKKPCCIPGLRVKSSNLGIGSLASVKSFRSLPYNSTAPSIYSSLFSWETDASLSCSDGISRPIDTIFKFHKAIRKDLEYLDVESGRLIDGDESCLRQFIGRFRLLWGLYRAHSNAEDEIVFPALESRETLHNVSHSYTLDHKQEEQLFEDISDVLFQLSQLHDSQGHAQTKVNEVKQSCFHSSNDVDFTRKYNELATKLQAMCKSIRVALTNHVHREELELWPLFDKHFSVEEQDKLVGRIIGSTGAEVLQSMVPWVTSALTQEEQNKMLDTWKQATKNTMFGEWLNEWWKGAGTSDSSAEAPSAPEDSHLQDKLEQNDQMFKPGWKDIFRMNQSELEAEVRKVSRDPTLDPRRKAYLIQNLMTSRWIAAQQKLPEPNSEECSDDASIPGCAPSYRDQEKEIYGCEHYKRNCKLVAACCNKLFTCRFCHDKVSDHTMERKATQEMMCMVCLKIQPVGPFCQTPSCNRLSMAKYYCNICKFFDDERARDKLSNML

SEQ ID NO: 172933 - protein, 338 aa, Zea Mays
MSSSGSLPATGTHNTRSTPFHVIHILGNFMRIWSVYSLYSSLSNSGDSIVGFIFSCLVPSSIIFLVLQKPWRGRPLPNSQVVPTVVNGGIMAFYFVLWEYAGAVLGVLSAALYGRKVNIWKKIGGLAAMLVAYYLLSIGWSTRTHSPLYSFGSEPIEKARQTFGVKEMVVPITAGILSALRRVLARRVSLKNQLKRRLHAITIASATCFLFPFAMWDTILGSASDSIVKFQLPNWAYLSTVLFGMVLIFYVDNVTEEKLHLVFSSPRHLMVSTGCIIVLEIVYQMDFSLFGFLVCSVILGLGIFETTSLERSKKSPLETHELSNGVFHNQLPITELPS

SEQ ID NO: 172934 - protein, 210 aa, Zea Mays
MLVAYYLLSIGWSTRTHSPLYSFGSEPIEKARQTFGVKEMVVPITAGILSALRRVLARRVSLKNQLKRRLHAITIASATCFLFPFAMWDTILGSASDSIVKFQLPNWAYLSTVLFGMVLIFYVDNVTEEKLHLVFSSPRHLMVSTGCIIVLEIVYQMDFSLFGFLVCSVILGLGIFETTSLERSKKSPLETHELSNGVFHNQLPITELPS

SEQ ID NO: 172935 - protein, 252 aa, Zea Mays
MGALLAEYAGAVLGVLSAALYGRKVNIWKKIGGLAAMLVAYYLLSIGWSTRTHSPLCILLHRDSFGSEPIEKARQTFGVKEMVVPITAGILSALRRVLARRVSLKNQLKRRLHAITIASATCFLFPFAMWDTILGSASDSIVKFQLPNWAYLSTVLFGMVLIFYVDNVTEEKLHLVFSSPRHLMVSTGCIIVLEIVYQMDFSLFGFLVCSVILGLGIFETTSLERSKKSPLETHELSNGVFHNQLPITELPS

SEQ ID NO: 172936 - protein, 176 aa, Zea Mays
MIKECLGDSSMRLGVPFIAPRQLGVVGTQQGRQFLPSVGWRTGQSGAPPDSHCSMSGADLLPFLAQPTVGSSAWLAHRTLSGAHRTVRCPCRPLERVTRRPRIWRPTVALAAVGSPDSPVNYSRTPPQFPESGQFTGDQSGAPDTVRCARLRRVLAASSQVLLFFFSLILALGQIY

SEQ ID NO: 172937 - protein, 199 aa, Zea Mays
MHLRNLFTTKYGKEFVAGAMELRPDSSVNRTIIEKLSVKAPSGDSKLKVLKAIAQEYNIEWDSSNTEAEFNKKYEDLLDGSGSSVHQIQTPIIEGSVSSPVVSAPRDKTPALNSPVIDAEKHQVRESPTSPAGGARAGVVTKGNVVTMGHHSPAEEMPSTSPSSSDALEKARAAIAAATRASAAARAAAELAKVKITNQ

SEQ ID NO: 172938 - protein, 204 aa, Zea Mays
MTSIELEKLNYKTCLNLVISRIKLLRNRRELQLINMRKEMVQYLQTGQESIARIRVEHIIREQNILAAYEIVELFCEFVLARVPIVEVQKECPLELREAIASIIFASGRCSDLPELMHLRNLFTTKYGKEFVAGAMELRPDSSVNRTIIEKLSVKAPSGDSKLKVLKAIAQEYNIEWDSSNTEAEFNKKYEDLLVAFANSLLIP

SEQ ID NO: 172939 - protein, 69 aa, Zea Mays
MRMMRLYLVYLQLHLLMLKLVGTSLKPIMKTGKLKTQNLMNLAAPSSAIKYWPCKKVPGGIGLRSCGRI

SEQ ID NO: 172940 - protein, 815 aa, Zea Mays
MASLLSSPDDSKSLSVTTSSLFLSSIASLPSSHAFSIFTSASTPLPPVPVSVPPAALIPGSRFLVDAFRHAGNFSVAYFLSHFHSDHYSGLGPSWRRGLVFCSAPTARLVSSVLSVPPQLVVSLDIGVRITVDGWGVTAVDANHCPGAVQFLFASPGPRAERYVHTGDFRYTESMTRDPNLLEFVRADAVFLDTTYCNPKFTFPSQEDSVDYIVNAIKRVKEESSVSGERVLCLIATYAVGKEKILLEVAQRCGCSIHVDSRKMKILTLLGFGGKNSVFTEDATGTDVHVLGWNLLGETSPYFQPNFVKLKEIMMERGYAKAVGFVPTGWMYETKKEGFAVRVKDSLEIHLVPYSEHSSYNELRDYVKFLHPKSVIPTAGVDAGKLDSKEAVALQKHFAGLVDETANKQEFLMAFHRRSIDATRSCKDVVVNCSSQLDGEDAALLPAISSASEQQDKLMENTMQETLKELSDFLPSWVSQEQITDLLMSSEGDVVKAASIFFERERDFFEEANVSCNGTPKTEKNHSSNHGSSADVSSQQESSLFSQKPVEYSAKLVNLSPMRMKPNTPKKVNKRGSSNTNKPKKKGRLTSSTESGGRKQSTITNYFIRATEAAFKRCRPERVTVEAHQNNVENSDQLADTEKTQDQIVDQLLQIVDGSMSREYAVYLLEKANGDVAVAVDIFYSSSEGNNVIEVDKNIMLQNAQGETADNCSETDMASGYSQATPKMSNLHVGTSLAHGDSANTSLLIEKYLPIEHVVTTLEESLGTSRSKIHEMYKTYGDLGTVAQECRQNQTLIAPPRSLSICDVYSTLRKL

SEQ ID NO: 172941 - protein, 876 aa, Zea Mays
MASLLSSPDDSKSLSVTTSSLFLSSIASLPSSHAFSIFTSASTPLPPVPVSVPPAALIPGSRFLVDAFRHAGNFSVAYFLSHFHSDHYSGLGPSWRRGLVFCSAPTARLVSSVLSVPPQLVVSLDIGVRITVDGWGVTAVDANHCPGAVQFLFASPGPRAERYVHTGDFRYTESMTRDPNLLEFVRADAVFLDTTYCNPKFTFPSQEDSVDYIVNAIKRVKEESSVSGERVLCLIATYAVGKEKILLEVAQRCGCSIHVDSRKMKILTLLGFGGKNSVFTEDATGTDVHVLGWNLLGETSPYFQPNFVKLKEIMMERGYAKAVGFVPTGWMYETKKEGFAVRVKDSLEIHLVPYSEHSSYNELRDYVKFLHPKSVIPTAGVDAGKLDSKEAVALQKHFAGLVDETANKQEFLMAFHRRSIDATRSCKDVVVNCSSQLDGEDAALLPAISSASEQQDKLMENTMQETLKELSDFLPSWVSQEQITDLLMSSEGDVVKAASIFFERERDFFEEANVSCNGTPKTEKNHSSNHGSSADVSSQQESSLFSQKPVEYSAKLVNLSPMRMKPNTPKKVNKRGSSNTNKPKKKGRLTSSTESGGRKQSTITNYFIRATEAAFKRCRPERVTVEAHQNNVENSDQLADTEKTQDQIVDQLLQIVDGSMSREYAVYLLEKANGDVAVAVDIFYSSSEGNNVIEVDKNIMLQNAQGETADNCSETDMASGYSQATPKMSNLHVGTSLAHGDSANTSLLIEKYLPIEHACWIAGQPAPYLHLARTFDLVEKEKGKIKTIAIFCNMFRSLLALSPDDVLPAVYLCTNKISPDHENMELNIGGSLVVTTLEESLGTSRSKIHEMYKTYGDLVQYQVVEVLGGEKILSCI

SEQ ID NO: 172942 - protein, 1147 aa, Zea Mays
MASLLSSPDDSKSLSVTTSSLFLSSIASLPSSHAFSIFTSASTPLPPVPVSVPPAALIPGSRFLVDAFRHAGNFSVAYFLSHFHSDHYSGLGPSWRRGLVFCSAPTARLVSSVLSVPPQLVVSLDIGVRITVDGWGVTAVDANHCPGAVQFLFASPGPRAERYVHTGDFRYTESMTRDPNLLEFVRADAVFLDTTYCNPKFTFPSQEDSVDYIVNAIKRVKEESSVSGERVLCLIATYAVGKEKILLEVAQRCGCSIHVDSRKMKILTLLGFGGKNSVFTEDATGTDVHVLGWNLLGETSPYFQPNFVKLKEIMMERGYAKAVGFVPTGWMYETKKEGFAVRVKDSLEIHLVPYSEHSSYNELRDYVKFLHPKSVIPTAGVDAGKLDSKEAVALQKHFAGLVDETANKQEFLMAFHRRSIDATRSCKDVVVNCSSQLDGEDAALLPAISSASEQQDKLMENTMQETLKELSDFLPSWVSQEQITDLLMSSEGDVVKAASIFFERERDFFEEANVSCNGTPKTEKNHSSNHGSSADVSSQQESSLFSQKPVEYSAKLVNLSPMRMKPNTPKKVNKRGSSNTNKPKKKGRLTSSTESGGRKQSTITNYFIRATEAAFKRCRPERVTVEAHQNNVENSDQLADTEKTQDQIVDQLLQIVDGSMSREYAVYLLEKANGDVAVAVDIFYSSSEGNNVIEVDKNIMLQNAQGETADNCSETDMASGYSQATPKMSNLHVGTSLAHGDSANTSLLIEKYLPIEHACWIAGQPAPYLHLARTFDLVEKEKGKIKTIAIFCNMFRSLLALSPDDVLPAVYLCTNKISPDHENMELNIGGSLVVTTLEESLGTSRSKIHEMYKTYGDLGTVAQECRQNQTLIAPPRSLSICDVYSTLRKLSAISGSGSAGRRKNLVLHLIRSCRETEMKFLVRTLVRNLRIGAMMKTILPALAHAVVFDRNCAADPAVSLEGIKSQLQSLSTEVAEAYNVTPNLDLLIPSLLREGTAFSASSLAMVPGTPIPPMLARITNGLTQSLKAFHGRSFTCEYKYDGQRAQIHKALDGSVRIFSRQMKESTSRFPDLVNMIKELCKPEVSSFILDAEVVGINRKKGNELMSFQELSSRERGNKHSSISIENIKVDICVFVFDIMFHDGERHS

SEQ ID NO: 172943 - protein, 1058 aa, Zea Mays
MASLLSSPDDSKSLSVTTSSLFLSSIASLPSSHAFSIFTSASTPLPPVPVSVPPAALIPGSRFLVDAFRHAGNFSVAYFLSHFHSDHYSGLGPSWRRGLVFCSAPTARLVSSVLSVPPQLVVSLDIGVRITVDGWGVTAVDANHCPGAVQFLFASPGPRAERYVHTGDFRYTESMTRDPNLLEFVRADAVFLDTTYCNPKFTFPSQEDSVDYIVNAIKRVKEESSVSGERVLCLIATYAVGKEKILLEVAQRCGCSIHVDSRKMKILTLLGFGGKNSVFTEDATGTDVHVLGWNLLGETSPYFQPNFVKLKEIMMERGYAKAVGFVPTGWMYETKKEGFAVRVKDSLEIHLVPYSEHSSYNELRDYVKFLHPKSVIPTAGVDAGKLDSKEAVALQKHFAGLVDETANKQEFLMAFHRRSIDATRSCKDVVVNCSSQLDGEDAALLPAISSASEQQDKLMENTMQETLKELSDFLPSWVSQEQITDLLMSSEGDVVKAASIFFERERDFFEEANVSCNGTPKTEKNHSSNHGSSADVSSQQESSLFSQKPVEYSAKLVNLSPMRMKPNTPKKVNKRGSSNTNKPKKKGRLTSSTESGGRKQSTITNYFIRATEAAFKRCRPERVTVEAHQNNVENSDQLADTEKTQDQIVDQLLQIVDGSMSREYAVYLLEKANGDVAVAVDIFYSSSEGNNVIEVDKNIMLQNAQGETADNCSETDMASGYSQATPKMSNLHVGTSLAHGDSANTSLLIEKYLPIEHACWIAGQPAPYLHLARTFDLVEKEKGKIKTIAIFCNMFRSLLALSPDDVLPAVYLCTNKISPDHENMELNIGGSLVVTTLEESLGTSRSKIHEMYKTYGDLGTVAQECRQNQTLIAPPRSLSICDVYSTLRKLSAISGSGSAGRRKNLVLHLIRSCRETEMKFLVRTLVRNLRIGAMMKTILPALAHAVVFDRNCAADPAVSLEGIKSQLQSLSTEVAEAYNVTPNLDLLIPSLLREGTAFSASSLAMVPGTPIPPMLARITNGLTQSLKAFHGRSFTCMMVSVPRFTKHLMDPCEYFQGK

SEQ ID NO: 172944 - protein, 1053 aa, Zea Mays
MASLLSSPDDSKSLSVTTSSLFLSSIASLPSSHAFSIFTSASTPLPPVPVSVPPAALIPGSRFLVDAFRHAGNFSVAYFLSHFHSDHYSGLGPSWRRGLVFCSAPTARLVSSVLSVPPQLVVSLDIGVRITVDGWGVTAVDANHCPGAVQFLFASPGPRAERYVHTGDFRYTESMTRDPNLLEFVRADAVFLDTTYCNPKFTFPSQEDSVDYIVNAIKRVKEESSVSGERVLCLIATYAVGKEKILLEVAQRCGCSIHVDSRKMKILTLLGFGGKNSVFTEDATGTDVHVLGWNLLGETSPYFQPNFVKLKEIMMERGYAKAVGFVPTGWMYETKKEGFAVRVKDSLEIHLVPYSEHSSYNELRDYVKFLHPKSVIPTAGVDAGKLDSKEAVALQKHFAGLVDETANKQEFLMAFHRRSIDATRSCKDVVVNCSSQLDGEDAALLPAISSASEQQDKLMENTMQETLKELSDFLPSWVSQEQITDLLMSSEGDVVKAASIFFERERDFFEEANVSCNGTPKTEKNHSSNHGSSADVSSQQESSLFSQKPVEYSAKLVNLSPMRMKPNTPKKVNKRGSSNTNKPKKKGRLTSSTESGGRKQSTITNYFIRATEAAFKRCRPERVTVEAHQNNVENSDQLADTEKTQDQIVDQLLQIVDGSMSREYAVYLLEKANGDVAVAVDIFYSSSEGNNVIEVDKNIMLQNAQGETADNCSETDMASGYSQATPKMSNLHVGTSLAHGDSANTSLLIEKYLPIEHACWIAGQPAPYLHLARTFDLVEKEKGKIKTIAIFCNMFRSLLALSPDDVLPAVYLCTNKISPDHENMELNIGGSLVVTTLEESLGTSRSKIHEMYKTYGDLECRQNQTLIAPPRSLSICDVYSTLRKLSAISGSGSAGRRKNLVLHLIRSCRETEMKFLVRTLVRNLRIGAMMKTILPALAHAVVFDRNCAADPAVSLEGIKSQLQSLSTEVAEAYNVTPNLDLLIPSLLREGTAFSASSLAMVPGTPIPPMLARITNGLTQSLKAFHGRSFTCMMVSVPRFTKHLMDPCEYFQGK

SEQ ID NO: 172945 - protein, 771 aa, Zea Mays
MASLLSSPDDSKSLSVTTSSLFLSSIASLPSSHAFSIFTSASTPLPPVPVSVPPAALIPGSRFLVDAFRHAGNFSVAYFLSHFHSDHYSGLGPSWRRGLVFCSAPTARLVSSVLSVPPQLVVSLDIGVRITVDGWGVTAVDANHCPGAVQFLFASPGPRAERYVHTGDFRYTESMTRDPNLLEFVRADAVFLDTTYCNPKFTFPSQEDSVDYIVNAIKRVKEESSVSGERVLCLIATYAVGKEKILLEVAQRCGCSIHVDSRKMKILTLLGFGGKNSVFTEDATGTDVHVLGWNLLGETSPYFQPNFVKLKEIMMERGYAKAVGFVPTGWMYETKKEGFAVRVKDSLEIHLVPYSEHSSYNELRDYVKFLHPKSVIPTAGVDAGKLDSKEAVALQKHFAGLVDETANKQEFLMAFHRRSIDATRSCKDVVVNCSSQLDGEDAALLPAISSASEQQDKLMENTMQETLKELSDFLPSWVSQEQITDLLMSSEGDVVKAASIFFERERDFFEEANVSCNGTPKTEKNHSSNHGSSADVSSQQESSLFSQKPVEYSAKLVNLSPMRMKPNTPKKVNKRGSSNTNKPKKKGRLTSSTESGGRKQSTITNYFIRATEAAFKRCRPERVTVEAHQNNVENSDQLADTEKTQDQIVDQLLQIVDGSMSREYAVYLLEKANGDVAVAVDIFYSSSEGNNVIEVDKNIMLQNAQGETADNCSETDMASGYSQATPKMSNLHVGTSLAHGDSANTSLLIEKYLPIEHGCNYSGGIIRNQQI

SEQ ID NO: 172946 - protein, 1364 aa, Zea Mays
MASLLSSPDDSKSLSVTTSSLFLSSIASLPSSHAFSIFTSASTPLPPVPVSVPPAALIPGSRFLVDAFRHAGNFSVAYFLSHFHSDHYSGLGPSWRRGLVFCSAPTARLVSSVLSVPPQLVVSLDIGVRITVDGWGVTAVDANHCPGAVQFLFASPGPRAERYVHTGDFRYTESMTRDPNLLEFVRADAVFLDTTYCNPKFTFPSQEDSVDYIVNAIKRVKEESSVSGERVLCLIATYAVGKEKILLEVAQRCGCSIHVDSRKMKILTLLGFGGKNSVFTEDATGTDVHVLGWNLLGETSPYFQPNFVKLKEIMMERGYAKAVGFVPTGWMYETKKEGFAVRVKDSLEIHLVPYSEHSSYNELRDYVKFLHPKSVIPTAGVDAGKLDSKEAVALQKHFAGLVDETANKQEFLMAFHRRSIDATRSCKDVVVNCSSQLDGEDAALLPAISSASEQQDKLMENTMQETLKELSDFLPSWVSQEQITDLLMSSEGDVVKAASIFFERERDFFEEANVSCNGTPKTEKNHSSNHGSSADVSSQQESSLFSQKPVEYSAKLVNLSPMRMKPNTPKKVNKRGSSNTNKPKKKGRLTSSTESGGRKQSTITNYFIRATEAAFKRCRPERVTVEAHQNNVENSDQLADTEKTQDQIVDQLLQIVDGSMSREYAVYLLEKANGDVAVAVDIFYSSSEGNNVIEVDKNIMLQNAQGTSLAHGDSANTSLLIEKYLPIEHACWIAGQPAPYLHLARTFDLVEKEKGKIKTIAIFCNMFRSLLALSPDDVLPAVYLCTNKISPDHENMELNIGGSLVVTTLEESLGTSRSKIHEMYKTYGDLECRQNQTLIAPPRSLSICDVYSTLRKLSAISGSGSAGRRKNLVLHLIRSCRETEMKFLVRTLVRNLRIGAMMKTILPALAHAVVFDRNCAADPAVSLEGIKSQLQSLSTEVAEAYNVTPNLDLLIPSLLREGTAFSASSLAMVPGTPIPPMLARITNGLTQSLKAFHGRSFTCEYKYDGQRAQIHKALDGSVRIFSRQMKESTSRFPDLVNMIKELCKPEVSSFILDAEVVGINRKKGNELMSFQELSSRERGNKHSSISIENIKVDICVFVFDIMFHDGERLLDCPLRQRRKYIHDLFHEKPGYFELAQQLNIEACEASPDNSSTLARMDTFFRNACQSSCEGIMLKTLDVDAGYSASKRCDSWLKVKRDYVQGLGDSLDLVPIGAWYGNGRKAGWYSPFLMACYNPETEEFQSVCRVMSGFSDEFYKEMKEFYSGERILPKKPVYYKTDEQPELWFTAEQIWEIRGADLTLSPVHHAAIGLVHPSRGISVRMPRYIRSVPDRSPEDCGTAADIASMFKAQTRKMDVSSEGQE

SEQ ID NO: 172947 - protein, 1395 aa, Zea Mays
MASLLSSPDDSKSLSVTTSSLFLSSIASLPSSHAFSIFTSASTPLPPVPVSVPPAALIPGSRFLVDAFRHAGNFSVAYFLSHFHSDHYSGLGPSWRRGLVFCSAPTARLVSSVLSVPPQLVVSLDIGVRITVDGWGVTAVDANHCPGAVQFLFASPGPRAERYVHTGDFRYTESMTRDPNLLEFVRADAVFLDTTYCNPKFTFPSQEDSVDYIVNAIKRVKEESSVSGERVLCLIATYAVGKEKILLEVAQRCGCSIHVDSRKMKILTLLGFGGKNSVFTEDATGTDVHVLGWNLLGETSPYFQPNFVKLKEIMMERGYAKAVGFVPTGWMYETKKEGFAVRVKDSLEIHLVPYSEHSSYNELRDYVKFLHPKSVIPTAGVDAGKLDSKEAVALQKHFAGLVDETANKQEFLMAFHRRSIDATRSCKDVVVNCSSQLDGEDAALLPAISSASEQQDKLMENTMQETLKELSDFLPSWVSQEQITDLLMSSEGDVVKAASIFFERERDFFEEANVSCNGTPKTEKNHSSNHGSSADVSSQQESSLFSQKPVEYSAKLVNLSPMRMKPNTPKKVNKRGSSNTNKPKKKGRLTSSTESGGRKQSTITNYFIRATEAAFKRCRPERVTVEAHQNNVENSDQLADTEKTQDQIVDQLLQIVDGSMSREYAVYLLEKANGDVAVAVDIFYSSSEGNNVIEVDKNIMLQNAQGETADNCSETDMASGYSQATPKMSNLHVGTSLAHGDSANTSLLIEKYLPIEHACWIAGQPAPYLHLARTFDLVEKEKGKIKTIAIFCNMFRSLLALSPDDVLPAVYLCTNKISPDHENMELNIGGSLVVTTLEESLGTSRSKIHEMYKTYGDLGTVAQECRQNQTLIAPPRSLSICDVYSTLRKLSAISGSGSAGRRKNLVLHLIRSCRETEMKFLVRTLVRNLRIGAMMKTILPALAHAVVFDRNCAADPAVSLEGIKSQLQSLSTEVAEAYNVTPNLDLLIPSLLREGTAFSASSLAMVPGTPIPPMLARITNGLTQSLKAFHGRSFTCEYKYDGQRAQIHKALDGSVRIFSRQMKESTSRFPDLVNMIKELCKPEVSSFILDAEVVGINRKKGNELMSFQELSSRERGNKHSSISIENIKVDICVFVFDIMFHDGERLLDCPLRQRRKYIHDLFHEKPGYFELAQQLNIEACEASPDNSSTLARMDTFFRNACQSSCEGIMLKTLDVDAGYSASKRCDSWLKVKRDYVQGLGDSLDLVPIGAWYGNGRKAGCPFLMACYNPETEEFQSVCRVMSGFSDEFYKEMKEFYSGERILPKKPVYYKTDEQPELWFTAEQIWEIRGADLTLSPVHHAAIGLVHPSRGISVRMPRYIRSVPDRSPEDCGTAADIASMFKAQTRKMDVSSEGQE

SEQ ID NO: 172948 - protein, 205 aa, Zea Mays
MDTFFRNACQSSCEGIMLKTLDVDAGYSASKRCDSWLKVKRDYVQGLGDSLDLVPIGAWYGNGRKAGWYSPFLMACYNPETEEFQSVCRVMSGFSDEFYKEMKEFYSGERILPKKPVYYKTDEQPELWFTAEQIWEIRGADLTLSPVHHAAIGLVHPSRGISVRMPRYIRSVPDRSPEDCGTAADIASMFKAQTRKMDVSSEGQE

SEQ ID NO: 172949 - protein, 394 aa, Zea Mays
MKSLAKQETQPKSRLIVRLGVFLASHHILFSVICCYAGIIALLLLPSLAKNTYLSENALIPGSANPLFSTEDAIEANRFMKAIEAVARDSSSVIGMANFIAQQIEDLGAEVCYQKFLPHGKNFHPLKFFTSMTNDIAIQPNGTATNFGINTIGILRAPRGDGKEAIVLVTPYNSQRVQSNELLSLALGFSVFSLLSRAAWLSKDVVWLSADSQFGEYAAVSAWLNQYHNPVFLSHSVVSHTKMYGANNIYDGNSEKTEATAFKRAGTMAAALIFKVGETRRYSDRDSVTIYAEASNGQMPNLDLLNVVHYLAVHRQVPDYVEGTANLANSMYNQALGVPTGSHGAFRDYQVDAVSLEFSPTFHVKNENAKSLFLLKGGRYPNVFQLCCLMLHRY

SEQ ID NO: 172950 - protein, 452 aa, Zea Mays
MKSLAKQETQPKSRLIVRLGVFLASHHILFSVICCYAGIIALLLLPSLAKNTYLSENALIPGSANPLFSTEDAIEANRFMKAIEAVARDSSSVIGMANFIAQQIEDLGAEVCYQKFLPHGKNFHPLKFFTSMTNDIAIQPNGTATNFGINTIGILRAPRGDGKEAIVLVTPYNSQRVQSNELLSLALGFSVFSLLSRAAWLSKDVVWLSADSQFGEYAAVSAWLNQYHNPVFLSHSVVSHTKMYGANNIYDGNSEKTEATAFKRAGTMAAALIFKVGETRRYSDRDSVTIYAEASNGQMPNLDLLNVVHYLAVHRQGFRVNIAAFSSLLSSAWLRVIAEILHTIGSVLRKINPDWKLDIAVPDYVEGTANLANSMYNQALGVPTGSHGAFRDYQVDAVSLEFSPTFHVKNENAKSLFLLKGGRSKQVHFGWCVYDSVCIAFGTSPNSCCCPC

SEQ ID NO: 172951 - protein, 674 aa, Zea Mays
MKSLAKQETQPKSRLIVRLGVFLASHHILFSVICCYAGIIALLLLPSLAKNTYLSENALIPGSANPLFSTEDAIEANRFMKAIEAVARDSSSVIGMANFIAQQIEDLGAEVCYQKFLPHGKNFHPLKFFTSMTNDIAIQPNGTATNFGINTIGILRAPRGDGKEAIVLVTPYNSQRVQSNELLSLALGFSVFSLLSRAAWLSKDVVWLSADSQFGEYAAVSAWLNQYHNPVFLSHSVVSHTKMYGANNIYDGNSEKTEATAFKRAGTMAAALIFKVGETRRYSDRDSVTIYAEASNGQMPNLDLLNVVHYLAVHRQVPDYVEGTANLANSMYNQALGVPTGSHGAFRDYQVDAVSLEFSPTFHVKNENAKSLFLLKGGRLIEGVARSVNNLLEKFHQSFFLYFLTGPSKFISVGVYMIPFALLLAPLPIVAAALADGSRSMEKTADKLIGDGKTDGIADISQNKGGSWKWLRAAKVLLVVQLWAVLVSLLPYYITQIPDATPTQSTLIWVVLSIVVLISLSVLFGSPYSTGVEWKLLKATMITSISIGLGLMSIINFATAQLGALIVIPMCLFSRPLKASGMNFLPRAVLLASNVAFAVLGFPPVALLIMKGVSKGSRSWTIDVGDFWVWMEFLWERSSATYLYLFLVHLPCWLLCVLVFLHPCHQSEYKLKQE

SEQ ID NO: 172952 - protein, 2004 aa, Zea Mays
MSTAQGTALRSAPLGAGRWARRGRPVAAPYRSGWQAYGGVSLEGSGFLGRVHRTEERVAPRAPHAAARDAEVVRPLSKLPNSSIGLYDSSFERDACGVGFVAELSGDYKRETVNDAIEMLERMAHRGACGCEKNTGDGAGIMVALPHDFFKEVAKDAGFELPPPGEYAVGMFFMPTDEKRREKGKAEFMKVAESLGHVILGWRLVPTDNSDLGESALETEPVIEQVFVTKSSRSEAEFEQQLYILRRLSIISVRASLNIKRGGERDFYMCSLSSRTIVYKGQLKPSQLKGYYYADLGHENFMSYMALVHSRFSTNTFPSWDRAQPMRVLGHNGEINTLRGNKNWMTAREGLLEAEKLGLSKEQLSRILPIVDATSSDSGAFDNVLELLVRGGRSLPEAVMMMIPEAWQNDVNMDPEKKALYEFLSALMEPWDGPALISFTDGRYLGATLDRNGLRPGRFYVTHSGRVIMGSEVGVVDVPPEDVLRKGRLNPGMMLLVDFENHTVVDDEALKAQYSKAHPYGEWLKRQKIYLKDIVESVPETDRVAPSISSSLSQKNENIDHVGISGILTQLKAFGYTVEALEMLLLPMAKDGVEALGSMGNDTPLAVMSNREKLTFEYFKQMFAQVTNPPIDPIREKIVTSMECMIGPEGDLLETTEKQCNRLALKGPLVSIDEMEAIKKMNYRGWRSKVLDITYPKKSGRKGLEETLNRICAEARKAIREGYTILVLSDRGFSSDRVAASSLLAVGAVHQHLVANLERTRIGLLVESAEPREVHHFCTLVGFGADAICPYLAIEAIWCLQNDGKITPNGDGQPYSKEELVAKYFYASNYGMMKVLAKMGISTLASYKGAQIFEALGLSSEVVGKCFEGTPSRIEGATFEMLARDALRLHELAFPSRALPAGSADAKALPNPGDYHWRKNGEIHLNDPLAMGKLQEAARVNSRAAYKEYSKRIQELNKACNLRGMLKFKHVSDKISLDEVEPASEIVKRFCTGAMSYGSISLEAHTALAIAMNKLGGKSNTGEGGEQPSRMEPLPDGSMNPRRSAIKQVASGRFGVSSYYLTNADELQIKMAQGAKPGEGGELPGHKVIGDIAVTRHSTAGVGLISPPPHHDIYSIEDLAQLIHDLKNSNPGARISVKLVSEAGVGVVASGVVKGHADHVLISGHDGGTGASRWTGIKNAGLPWELGLAETHQTLVANGLRGRAVLQTDGQLKTGRDVAVACLLGAEEFGFSTAPLITLGCIMMRKCHMNTCPVGIATQDPVLREKFAGEPEHVINFFFMLAEELREIMANLGFRTITEMVGRSDMLEVDPEVVKSNEKLENIDLSLILKPASEIRPGVAQYCVEKQDHGLDMALDNKLIDLSRTAIEKQVRVFIETPIQNTNRAVGTMLSHQVTKRYHMNGLPAGTIHVKFTGSAGQSFGAFLCPGITLELEGDSNDYVGKGLSGGKIVVYPPRNSSFSPEDNIVIGNVALYGATMGEAYFNGMAAERFCVRNSGAQAVVEGIGDHGCEYMTGGTVVILGKTGRNFAAGMSGGIAYVYDVDGKFSARCNNELVDLYHVEEEDDIITLKMMIEQHRRNTESVLARDILSDFDNLLPKFVKVYPRDYKRVLESMKVEKAVAKHAKEPKMANGISVTTKKVQPDQSASRPTHVANAKKYRGFITYERESISYRDPKERVRDWKEVAIESTPGPLLNTQSARCMDCGTPFCHQESSGAGCPLGNKIPEFNELVHQNRWREALDRLLETNNFPEFTGRVCPAPCEGSCVLGIIENPVSIKSIECAIIDKGFEEGWMIPRPPLQRTGRKVAIVGSGPSGLAAADQLNKMGHFVTVFERADRIGGLMMYGVPNMKTDKIGVVQRRVNLMAEEGVTFVVNANVGSDPLYSIERLRSENDAVILACGATKPRDLTIPGRELSGVHFAMEFLHANTKSLLDSNLEDGKYISARGKKVVVIGGGDTGTDCIGTSIRHGCTSLVNLELLSKPPSTRAADNPWPQVCVSLCSYHTF

SEQ ID NO: 172953 - protein, 1852 aa, Zea Mays
MRVLGHNGEINTLRGNKNWMTAREGLLEAEKLGLSKEQLSRILPIVDATSSDSGAFDNVLELLVRGGRSLPEAVMMMIPEAWQNDVNMDPEKKALYEFLSALMEPWDGPALISFTDGRYLGATLDRNGLRPGRFYVTHSGRVIMGSEVGVVDVPPEDVLRKGRLNPGMMLLVDFENHTVVDDEALKAQYSKAHPYGEWLKRQKIYLKDIVESVPETDRVAPSISSSLSQKNENIDHVGISGILTQLKAFGYTVEALEMLLLPMAKDGVEALGSMGNDTPLAVMSNREKLTFEYFKQMFAQVTNPPIDPIREKIVTSMECMIGPEGDLLETTEKQCNRLALKGPLVSIDEMEAIKKMNYRGWRSKVLDITYPKKSGRKGLEETLNRICAEARKAIREGYTILVLSDRGFSSDRVAASSLLAVGAVHQHLVANLERTRIGLLVESAEPREVHHFCTLVGFGADAICPYLAIEAIWCLQNDGKITPNGDGQPYSKEELVAKYFYASNYGMMKVLAKMGISTLASYKGAQIFEALGLSSEVVGKCFEGTPSRIEGATFEMLARDALRLHELAFPSRALPAGSADAKALPNPGDYHWRKNGEIHLNDPLAMGKLQEAARVNSRAAYKEYSKRIQELNKACNLRGMLKFKHVSDKISLDEVEPASEIVKRFCTGAMSYGSISLEAHTALAIAMNKLGGKSNTGEGGEQPSRMEPLPDGSMNPRRSAIKQVASGRFGVSSYYLTNADELQIKMAQGAKPGEGGELPGHKVIGDIAVTRHSTAGVGLISPPPHHDIYSIEDLAQLIHDLKNSNPGARISVKLVSEAGVGVVASGVVKGHADHVLISGHDGGTGASRWTGIKNAGLPWELGLAETHQTLVANGLRGRAVLQTDGQLKTGRDVAVACLLGAEEFGFSTAPLITLGCIMMRKCHMNTCPVGIATQDPVLREKFAGEPEHVINFFFMLAEELREIMANLGFRTITEMVGRSDMLEVDPEVVKSNEKLENIDLSLILKPASEIRPGVAQYCVEKQDHGLDMALDNKLIDLSRTAIEKQVRVFIETPIQNTNRAVGTMLSHQVTKRYHMNGLPAGTIHVKFTGSAGQSFGAFLCPGITLELEGDSNDYVGKGLSGGKIVVYPPRNSSFSPEDNIVIGNVALYGATMGEAYFNGMAAERFCVRNSGAQAVVEGIGDHGCEYMTGGTVVILGKTGRNFAAGMSGGIAYVYDVDGKFSARCNNELVDLYHVEEEDDIITLKMMIEQHRRNTESVLARDILSDFDNLLPKFVKVYPRDYKRVLESMKVEKAVAKHAKEPKMANGISVTTKLSLTTCINFHVQKVQPDQSASRPTHVANAKKYRGFITYERESISYRDPKERVRDWKEVAIESTPGPLLNTQSARCMDCGTPFCHQESSGAGCPLGNKIPEFNELVHQNRWREALDRLLETNNFPEFTGRVCPAPCEGSCVLGIIENPVSIKSIECAIIDKGFEEGWMIPRPPLQRTGRKVAIVGSGPSGLAAADQLNKMGHFVTVFERADRIGGLMMYGVPNMKTDKIGVVQRRVNLMAEEGVTFVVNANVGSDPLYSIERLRSENDAVILACGATKPRDLTIPGRELSGVHFAMEFLHANTKSLLDSNLEDGKYISARGKKVVVIGGGDTGTDCIGTSIRHGCTSLVNLELLSKPPSTRAADNPWPQWPRIFRVDYGHQEAATKFGKDPRTYGVLTKRFIGDGNGKVKALEVVRVKWEKVDGRFQLKEMEGSEEIIEADLVLLAMGFLGPEATIAEKLGLEKDNRSNFKAQFGDFATSVDGVFAAGDCRRGQSLVVWAITEGRQAAAAVDKYLSRYDQNAAATGDSTPSGTGLVQPVAA

SEQ ID NO: 172954 - protein, 1828 aa, Zea Mays
MRVLGHNGEINTLRGNKNWMTAREGLLEAEKLGLSKEQLSRILPIVDATSSDSGAFDNVLELLVRGGRSLPEAVMMMIPEAWQNDVNMDPEKKALYEFLSALMEPWDGPALISFTDGRYLGATLDRNGLRPGRFYVTHSGRVIMGSEVGVVDVPPEDVLRKGRLNPGMMLLVDFENHTVVDDEALKAQYSKAHPYGEWLKRQKIYLKDIVESVPETDRVAPSISSSLSQKNENIDHVGISGILTQLKAFGYTVEALEMLLLPMAKDGVEALGSMGNDTPLAVMSNREKLTFEYFKQMFAQVTNPPIDPIREKIVTSMECMIGPEGDLLETTEKQCNRLALKGPLVSIDEMEAIKKMNYRGWRSKVLDITYPKKSGRKGLEETLNRICAEARKAIREGYTILVLSDRGFSSDRVAASSLLAVGAVHQHLVANLERTRIGLLVESAEPREVHHFCTLVGFGADAICPYLAIEAIWCLQNDGKITPNGDGQPYSKEELVAKYFYASNYGMMKVLAKMGISTLASYKGAQIFEALGLSSEVVGKCFEGTPSRIEGATFEMLARDALRLHELAFPSRALPAGSADAKALPNPGDYHWRKNGEIHLNDPLAMGKLQEAARVNSRAAYKEYSKRIQELNKACNLRGMLKFKHVSDKISLDEVEPASEIVKRFCTGAMSYGSISLEAHTALAIAMNKLGGKSNTGEGGEQPSRMEPLPDGSMNPRRSAIKQVASGRFGVSSYYLTNADELQIKMAQGAKPGEGGELPGHKVIGDIAVTRHSTAGVGLISPPPHHDIYSIEDLAQLIHDLKNSNPGARISVKLVSEAGVGVVASGVVKGHADHVLISGHDGGTGASRWTGIKNAGLPWELGLAETHQTLVANGLRGRAVLQTDGQLKTGRDVAVACLLGAEEFGFSTAPLITLGCIMMRKCHMNTCPVGIATQDPVLREKFAGEPEHVINFFFMLAEELREIMANLGFRTITEMVGRSDMLEVDPEVVKSNEKLENIDLSLILKPASEIRPGVAQYCVEKQDHGLDMALDNKLIDLSRTAIEKQVRVFIETPIQNTNRAVGTMLSHQVTKRYHMNGLPAGTIHVKFTGSAGQSFGAFLCPGITLELEGDSNDYVGKGLSGGKIVVYPPRNSSFSPEDNIVIGNVALYGATMGEAYFNGMAAERFCVRNSGAQAVVEGIGDHGCEYMTGGTVVILGKTGRNFAAGMSGGIAYVYDVDGKFSARCNNELVDLYHVEEEDDIITLKMMIEQHRRNTESVLARDILSDFDNLLPKFVKVYPRDYKRVLESMKVEKAVAKHAKEPKMANGISVTTKKVQPDQSASRPTHVANAKKYRGFITYERESISYRDPKERVRDWKEVAIESTPGPLLNTQSARCMDCGTPFCHQIPEFNELVHQNRWREALDRLLETNNFPEFTGRVCPAPCEGSCVLGIIENPVSIKSIECAIIDKGFEEGWMIPRPPLQRTGRKVAIVGSGPSGLAAADQLNKMGHFVTVFERADRIGGLMMYGVPNMKTDKIGVVQRRVNLMAEEGVTFVVNANVGSDPLYSIERLRSENDAVILACGATKPRDLTIPGRELSGVHFAMEFLHANTKSLLDSNLEDGKYISARGKKVVVIGGGDTGTDCIGTSIRHGCTSLVNLELLSKPPSTRAADNPWPQWPRIFRVDYGHQEAATKFGKDPRTYGVLTKRFIGDGNGKVKALEVVRVKWEKVDGRFQLKEMEGSEEIIEADLVLLAMGFLGPEATIAEKLGLEKDNRSNFKAQFGDFATSVDGVFAAGDCRRGQSLVVWAITEGRQAAAAVDKYLSRYDQNAAATGDSTPSGTGLVQPVAA

SEQ ID NO: 172955 - protein, 1502 aa, Zea Mays
MRVLGHNGEINTLRGNKNWMTAREGLLEAEKLGLSKEQLSRILPIVDATSSDSGAFDNVLELLVRGGRSLPEAVMMMIPEAWQNDVNMDPEKKALYEFLSALMEPWDGPALISFTDGRYLGATLDRNGLRPGRFYVTHSGRVIMGSEVGVVDVPPEDVLRKGRLNPGMMLLVDFENHTVVDDEALKAQYSKAHPYGEWLKRQKIYLKDIVESVPETDRVAPSISSSLSQKNENIDHVGISGILTQLKAFGYTVEALEMLLLPMAKDGVEALGSMGNDTPLAVMSNREKLTFEYFKQMFAQVTNPPIDPIREKIVTSMECMIGPEGDLLETTEKQCNRLALKGPLVSIDEMEAIKKMNYRGWRSKVLDITYPKKSGRKGLEETLNRICAEARKAIREGYTILVLSDRGFSSDRVAASSLLAVGAVHQHLVANLERTRIGLLVESAEPREVHHFCTLVGFGADAICPYLAIEAIWCLQNDGKITPNGDGQPYSKEELVAKYFYASNYGMMKVLAKMGISTLASYKGAQIFEALGLSSEVVGKCFEGTPSRIEGATFEMLARDALRLHELAFPSRALPAGSADAKALPNPGDYHWRKNGEIHLNDPLAMGKLQEAARVNSRAAYKEYSKRIQELNKACNLRGMLKFKHVSDKISLDEVEPASEIVKRFCTGAMSYGSISLEAHTALAIAMNKLGGKSNTGEGGEQPSRMEPLPDGSMNPRRSAIKQVASGRFGVSSYYLTNADELQIKMAQGAKPGEGGELPGHKVIGDIAVTRHSTAGVGLISPPPHHDIYSIEDLAQLIHDLKNSNPGARISVKLVSEAGVGVVASGVVKGHADHVLISGHDGGTGASRWTGIKNAGLPWELGLAETHQTLVANGLRGRAVLQTDGQLKTGRDVAVACLLGAEEFGFSTAPLITLGCIMMRKCHMNTCPVGIATQDPVLREKFAGEPEHVINFFFMLAEELREIMANLGFRTITEMVGRSDMLEVDPEVVKSNEKLENIDLSLILKPASEIRPGVAQYCVEKQDHGLDMALDNKLIDLSRTAIEKQVRVFIETPIQNTNRAVGTMLSHQVTKRYHMNGLPAGTIHVKFTGSAGQSFGAFLCPGITLELEGDSNDYVGKGLSGGKIVVYPPRNSSFSPEDNIVIGNVALYGATMGEAYFNGMAAERFCVRNSGAQAVVEGIGDHGCEYMTGGTVVILGKTGRNFAAGMSGGIAYVYDVDGKFSARCNNELVDLYHVEEEDDIITLKMMIEQHRRNTESVLARDILSDFDNLLPKFVKVYPRDYKRVLESMKVEKAVAKHAKEPKMANGISVTTKKVQPDQSASRPTHVANAKKYRGFITYERESISYRDPKERVRDWKEVAIESTPGPLLNTQSARCMDCGTPFCHQESSGAGCPLGNKIPEFNELVHQNRWREALDRLLETNNFPEFTGRVCPAPCEGSCVLGIIENPVSIKSIECAIIDKGFEEGWMIPRPPLQRTGSNWRFNDVWCAKHEDRQDWRCPAPC

SEQ ID NO: 172956 - protein, 325 aa, Zea Mays
MMYGVPNMKTDKIGVVQRRVNLMAEEGVTFVVNANVGSDPLYSIERLRSENDAVILACGATKPRDLTIPGRELSGVHFAMEFLHANTKSLLDSNLEDGKYISARGKKVVVIGGGDTGTDCIGTSIRHGCTSLVNLELLSKPPSTRAADNPWPQWPRIFRVDYGHQEAATKFGKDPRTYGVLTKRFIGDGNGKVKALEVVRVKWEKVDGRFQLKEMEGSEEIIEADLVLLAMGFLGPEATIAEKLGLEKDNRSNFKAQFGDFATSVDGVFAAGDCRRGQSLVVWAITEGRQAAAAVDKYLSRYDQNAAATGDSTPSGTGLVQPVAA

SEQ ID NO: 172957 - protein, 457 aa, Zea Mays
MWESSGAGCPLGNKIPEFNELVHQNRWREALDRLLETNNFPEFTGRVCPAPCEGSCVLGIIENPVSIKSIECAIIDKGFEEGWMIPRPPLQRTGRKVAIVGSGPSGLAAADQLNKMGHFVTVFERADRIGGLMMYGVPNMKTDKIGVVQRRVNLMAEEGVTFVVNANVGSDPLYSIERLRSENDAVILACGATKPRDLTIPGRELSGVHFAMEFLHANTKSLLDSNLEDGKYISARGKKVVVIGGGDTGTDCIGTSIRHGCTSLVNLELLSKPPSTRAADNPWPQWPRIFRVDYGHQEAATKFGKDPRTYGVLTKRFIGDGNGKVKALEVVRVKWEKVDGRFQLKEMEGSEEIIEADLVLLAMGFLGPEATIAEKLGLEKDNRSNFKAQFGDFATSVDGVFAAGDCRRGQSLVVWAITEGRQAAAAVDKYLSRYDQNAAATGDSTPSGTGLVQPVAA

SEQ ID NO: 172958 - protein, 570 aa, Zea Mays
MVTGSMKHLVQVEPAREAAAEGGAPSAGPTYRCAAGGNAASPPAVPGLECCWDIFRLSVEKCPDNKMLGRREIVHGKAGSYTWLTYKQVYDTVLDVGSAIRSCGVGKGGRCGIYGANSPEWVISMQACNAHGIYCVPLYDTLGAGAVEFVLCHAEVQIAFVEEKKIGEMLKTFPNATKYLKTLVSFGKVDPGHKEKVEQNGLSIYSWEEFLQLGGKEKFELPPKEKDDICTIMYTSGTTGDPKGVLISNKSIVTIVSAVDEFLNNSNEQLNMDDVYISYLPLAHIFDRVIEEVFIRHGASIGFWRGDVKLLVEDIGELKPTVFCAVPRVLDRIYGGLQDKITAGGFLKKTLFNVAYKYKQGNMLKGNKHEEAAAMFDRLVFTKVKRGLGGRVRLILSGAAPLSRHVEEYLRVVTCSHVLQGYGLTETCAGSFVSLPNNMSMLGTVGPPVPYVEVRLESVPEMGYDALSSETPRGEICIRGDTLFSGYYKREDLTKEVLVDGWFHTGTIGPCSSIPPVSDRTCPCQHHCESRKCQGKENVKGTGAFVAVLCQQFALTPGRSLITVLKEILI

SEQ ID NO: 172959 - protein, 625 aa, Zea Mays
MVTGSMKHLVQVEPAREAAAEGGAPSAGPTYRCAAGGNAASPPAVPGLECCWDIFRLSVEKCPDNKMLGRREIVHGKAGSYTWLTYKQVYDTVLDVGSAIRSCGVGKGGRCGIYGANSPEWVISMQACNAHGIYCVPLYDTLGAGAVEFVLCHAEVQIAFVEEKKIGEMLKTFPNATKYLKTLVSFGKVDPGHKEKVEQNGLSIYSWEEFLQLGGKEKFELPPKEKDDICTIMYTSGTTGDPKGVLISNKSIVTIVSAVDEFLNNSNEQLNMDDVYISYLPLAHIFDRVIEEVFIRHGASIGFWRGDVKLLVEDIGELKPTVFCAVPRVLDRIYGGLQDKITAGGFLKKTLFNVAYKYKQGNMLKGNKHEEAAAMFDRLVFTKVKRGLGGRVRLILSGAAPLSRHVEEYLRVVTCSHVLQGYGLTETCAGSFVSLPNNMSMLGTVGPPVPYVEVRLESVPEMGYDALSSETPRGEICIRGDTLFSGYYKREDLTKEVLVDGWFHTGDIGEWQSDGSMKIIDRKKNIFKLSQGEYVAVENLENIFGQTPAVDSIWVYGNSFESSLVAVVNPNTQALERWAESNGVTGEFATICEDPRAREFILGELTKMGKEKKWPQQMILCIVVL

SEQ ID NO: 172960 - protein, 661 aa, Zea Mays
MVTGSMKHLVQVEPAREAAAEGGAPSAGPTYRCAAGGNAASPPAVPGLECCWDIFRLSVEKCPDNKMLGRREIVHGKAGSYTWLTYKQVYDTVLDVGSAIRSCGVGKGGRCGIYGANSPEWVISMQACNAHGIYCVPLYDTLGAGAVEFVLCHAEVQIAFVEEKKIGEMLKTFPNATKYLKSFGKVDPGHKEKVEQNGLSIYSWEEFLQLGGKEKFELPPKEKDDICTIMYTSGTTGDPKGVLISNKSIVTIVSAVDEFLNNSNEQLNMDDVYISYLPLAHIFDRVIEEVFIRHGASIGFWRGDVKLLVEDIGELKPTVFCAVPRVLDRIYGGLQDKITAGGFLKKTLFNVAYKYKQGNMLKGNKHEEAAAMFDRLVFTKVKRGLGGRVRLILSGAAPLSRHVEEYLRVVTCSHVLQGYGLTETCAGSFVSLPNNMSMLGTVGPPVPYVEVRLESVPEMGYDALSSETPRGEICIRGDTLFSGYYKREDLTKEVLVDGWFHTGDIGEWQSDGSMKIIDRKKNIFKLSQGEYVAVENLENIFGQTPAVDSIWVYGNSFESSLVAVVNPNTQALERWAESNGVTGEFATICEDPRAREFILGELTKMGKEKKLKGFELIRAVHLDPAPFDMERDLITPTYKKKRPQLLKHYQTIIDGMYNSMK

SEQ ID NO: 172961 - protein, 71 aa, Zea Mays
MKGLEAKDNILGRQFGFGAIVRSDRVSQQWTCDKSSPIVKEFVSVDVELGGKKRYLTEPAVAVILELVRKA

SEQ ID NO: 172962 - protein, 325 aa, Zea Mays
MDGSGAGTGSATLLRKRPLSVNTASSTAAAIELGSKQAAGVVAAIEEEPVSPTGRLFREPNFRCHIVSVFGLGAPVDLPALRAGVAATLARHPRFCSVQVVNEKDARPKWIRTAVNVDDHIIVPELNPATTSADPDKALEDYVSSLSTRPMAHSRPLWEVHVLDFPTADAAAALALRAHHSVGDGVSMLSLFMACTRSAADPGALPSLPPARRAGPVHAVRRPAGALAALAAWLLSLLVLAWRTAVDVACFVATAASLLGDAPTVLKGKEGTEFQPRRFVNRTLSLDDIKLVKNAVGCTVNDVLLGITSSALSRYYYRRTAKICR

SEQ ID NO: 172963 - protein, 444 aa, Zea Mays
MDGSGAGTGSATLLRKRPLSVNTASSTAAAIELGSKQAAGVVAAIEEEPVSPTGRLFREPNFRCHIVSVFGLGAPVDLPALRAGVAATLARHPRFCSVQVVNEKDARPKWIRTAVNVDDHIIVPELNPATTSADPDKALEDYVSSLSTRPMAHSRPLWEVHVLDFPTADAAAALALRAHHSVGDGVSMLSLFMACTRSAADPGALPSLPPARRAGPVHAVRRPAGALAALAAWLLSLLVLAWRTAVDVACFVATAASLLGDAPTVLKGKEGTEFQPRRFVNRTLSLDDIKLVKNAVGCTVNDVLLGITSSALSRYYYRRTGESDSKRSITVRSAVLVNLRATPGIRTGEHDGVRQRQQQRRREVGKQAGLHADPLPPGQARRPHGVRPYGGQGDAQEEELHGVGLHLLERGHGSQTLRHQGSCCALLRHVHAHHPVLLQHGRAD

SEQ ID NO: 172964 - protein, 145 aa, Zea Mays
MNELHILRTVEDRSGGQKRSSPDKTHRSTMDGVYHHHHHQESPLTGNGVATAGEKLGVERFELPLIYISLSRKEKEDDFLAMKGTKLPQRPKKRAKNVDKTLQFVFPGMWLSDLTRGRYEVREKKCVKKKRRGLKGMESMDSDSE

SEQ ID NO: 172965 - protein, 86 aa, Zea Mays
MGPTRQPAVGDCRAGATDKWVPDGHVRICRWLRLGPHDCGPDRAHRGRKKRKERKKKEKKRKEKKKRAVRSRLCITSLVPPTPCLF

SEQ ID NO: 172966 - protein, 70 aa, Zea Mays
MTTCSSWTKSRSSSIQGLPGLTRPSRTPSSSDKRPTTTGPPTRSRHRSGCGDEEEEKYPRSILDITETEQ

SEQ ID NO: 172967 - protein, 280 aa, Zea Mays
MVRRASTPSPWLRPPPPLITTPRTRRARPVFVPPPLISPRHPWRRPRPPPTCPRRRPLPRAPPQSPPLRARERANPPFPRLSLAPRWNRHGIHGRVLRIHLHRVATVRRGRGCPDGGDLDCGQVHAYSSRRSCFSSTTSSPCALGTRHMFGVVGITVTSLTSRAAAAEVCFLAFRNEQSAGYAAAYDFLTGSPGALLIVSGPRYIHGLAGLSHATANAWSLLMSSGSCDQADAGRGDFQELDQIAATKPFAKLAVKATTILNVSRSSLPTRTNGTPAVPI

SEQ ID NO: 172968 - protein, 348 aa, Zea Mays
MARRNAGAMQREGSAGSVKDWSEFDPSPSPKLAYSQSYVAMRGLLTSVASLDPVLTSSSLKSLWAALSSHRHARSLERPKYKGMNWKRPMFHLLVCFLVGVFIGFTPLFSLDLSSNIDSENETLPFDGDVVNRQMLELKSTRLEPIVAAAETEAAQEQQVDESPPVPAMLDDEADFIEASHVQPSVNDSDIVAKKQLIIVTTTSVRPHQAYYLNRLAHVLKNVPPPLLWIVAEWPYQSREAAEILRSSGVMYRHLICNRNSTNIRKIIVCQKNNAIFHIKKHRLDGIVHFADEERVYSVDLFEDMRKIRRFGTWPVATHVGARYKVVLEGPVCRALYFGIPRGGTAPL

SEQ ID NO: 172969 - protein, 142 aa, Zea Mays
MSFSCHFPNCLTYKTSEEFVARVKEAMDREPQQLTPEQRYNLSWEAATERFMEYSDLDKVLNNEAAQPKQGWQPKPFLVPGTTIRAMCGYGSLASSSTTPCIWLVMTDEHPKLIVEMCSTWTSKVHDSRRLSAQYCLLLPLN

SEQ ID NO: 172970 - protein, 103 aa, Zea Mays
MHGRSSGVCANFFVLSPEADSSISFLARSMEASQAQIPLSLGANGWCSCGTATRRRSKSESLGPPSNMSSSPSCYSIASFGLNSLKSPSVITIGRSGTLFVNS

SEQ ID NO: 172971 - protein, 357 aa, Zea Mays
MYKQHSHLRLIHRPSYLEKIFSNLESLRQSIEQASKQKALESRKLAQQSVPQTIMNGIKGDRMDVDPMSVEAFDDQPSVPKRLKTHHPSPSGLENDMSVVSNYHVNSGFALQETQPEQLDHNNKTSYLKREVDAKADMRAPQKPIKISYGIDGNLSASRCNVIPGVPSEINSHIKQENLSVDKETSETALEVKNETNGPTDATVSKSGKPNVNVGNIKFVLYLMEEGTMEDKLNILAPIAMLRSHDIESGQGWRCEICPDFDVCNSCFQKGVVTHPHKLTNHPSTAVRDAQNAEARQMLLQQLRKMLDLLDAAVQQQRQRAELIQQQQRRSGQLQAQLPGRPREAEARGVRDTGAEP

SEQ ID NO: 172972 - protein, 276 aa, Zea Mays
MTGRRQAGCFIWPIESGVQPGPRENPMQCFIMRNKNSTFYLYLGFTSSPVYKGKFLMAARRLRRGPHTEYIISLDAEDLSQGSNSYMGKLRSDFWGTNFKIYDSKPPYDGAKASSSRSSRRFGSRRISPQVSSGNYEVGQVSYKYNLLKSRGPRRMNCTLECPSAQETWENSLKTKFRRPLGPTTLRNKAPRWHEQLQCWCLNFHGRVTVASVKNFQLVTAAGPSDPTSNVDEETVLLQFGKVDDDIFTMDYRQPLSAFQAFAISLSSFGNKLACE

SEQ ID NO: 172973 - protein, 486 aa, Zea Mays
MMLRSRTFSEGKLSTSCSEPNIANAFWRHSQRRGVAEEPRGASSSPEHPLMRARGRSILGGEKQSFQEYTESGAASRSDGLGGTSTSNARRIRRRSISITPEIGDDIVRAVRAMNETLKQNRLQRDHVEGSCSYVTEDQSNANDCPNKDDASRIIGATDSDSRNRTGPTQKAMSLPSSPHEYRGQDTQKGDDFISKEKMALAWNKVFQSSPFLNKPLLPFEEWNIDFSEITIGTRVGIGFFGEVFRGIWNGTDVAIKVFLEQDLTTENMEDFCNEIYILSRLRHPNVILFLGACITPPHLSMVTEYMEMGSLYYLIHMSGQKKKLSWRRRLKIIRDICRGLMCIHRMKIVHRDLKSANCLVNKHWTVKICDFGLSRVMIDSPMTDNSSAGTPEWMAPELIRNEPFTEKCDIFSLGVIMWELCTLSRPWEGISPVQVVYAVANEGSRLEIPEGPLGRLIADCWAEPENRPSCQEILTRLLDCEYTVS

SEQ ID NO: 172974 - protein, 766 aa, Zea Mays
MDETPTSSGQSEDSSCEPNWWPPDLLEKIESASISRKHDVLGNLRSSSWKASQLLWSTGSYSGLIPNGFYSIIPDKKLKETFPTIPSVDDLQTLEADGLKADIIIVDTERDKKVFMLKQLSAALVKGLSSSPALVIKKIAGLVFDCFKRQNPDASPAKGSIEDTHFFGYKGPQLLGQIRHGSCRPRAILFKVLADAVGLESKLVVGLPDDGAVGFVDSYKHMSVAIFISHISAAGESDSAENDSCDSPLEPNSPLYGLSDKVETEGIESSSNLSGRSLRNMMLRSRTFSEGKLSTSCSEPNIANAFWRHSQRRGVAEEPRGASSSPEHPLMRARGRSILGGEKQSFQEYTESGAASRSDGLGGTSTSNARRIRRRSISITPEIGDDIVRAVRAMNETLKQNRLQRDHVEGSCSYVTEDQSNANDCPNKDDASRIIGATDSDSRNRTGPTQKAMSLPSSPHEYRGQDTQKGDDFISKEKMALAWNKVFQSSPFLNKPLLPFEEWNIDFSEITIGTRVGIGFFGEVFRGIWNGTDVAIKVFLEQDLTTENMEDFCNEIYILSRLRHPNVILFLGACITPPHLSMVTEYMEMGSLYYLIHMSGQKKKLSWRRRLKIIRDICRGLMCIHRMKIVHRDLKSANCLVNKHWTVKICDFGLSRVMIDSPMTDNSSAGTPEWMAPELIRNEPFTEKCDIFSLGVIMWELCTLSRPWEGISPVQVVYAVANEGSRLEIPEGPLGRLIADCWAEPENRPSCQEILTRLLDCEYTVS

SEQ ID NO: 172975 - protein, 545 aa, Zea Mays
MTVPLDLWTPTNICLCDSAENDSCDSPLEPNSPLYGLSDKVETEGIESSSNLSGRSLRNMMLRSRTFSEGKLSTSCSEPNIANAFWRHSQRRGVAEEPRGASSSPEHPLMRARGRSILGGEKQSFQEYTESGAASRSDGLGGTSTSNARRIRRRSISITPEIGDDIVRAVRAMNETLKQNRLQRDHVEGSCSYVTEDQSNANDCPNKDDASRIIGATDSDSRNRTGPTQKAMSLPSSPHEYRGQDTQKGDDFISKEKMALAWNKVFQSSPFLNKPLLPFEEWNIDFSEITIGTRVGIGFFGEVFRGIWNGTDVAIKVFLEQDLTTENMEDFCNEIYILSRLRHPNVILFLGACITPPHLSMVTEYMEMGSLYYLIHMSGQKKKLSWRRRLKIIRDICRGLMCIHRMKIVHRDLKSANCLVNKHWTVKICDFGLSRVMIDSPMTDNSSAGTPEWMAPELIRNEPFTEKCDIFSLGVIMWELCTLSRPWEGISPVQVVYAVANEGSRLEIPEGPLGRLIADCWAEPENRPSCQEILTRLLDCEYTVS

SEQ ID NO: 172976 - protein, 436 aa, Zea Mays
MRARGRSILGGEKQSFQEYTESGAASRSDGLGGTSTSNARRIRRRSISITPEIGDDIVRAVRAMNETLKQNRLQRDHVEGSCSYVTEDQSNANDCPNKDDASRIIGATDSDSRNRTGPTQKAMSLPSSPHEYRGQDTQKGDDFISKEKMALAWNKVFQSSPFLNKPLLPFEEWNIDFSEITIGTRVGIGFFGEVFRGIWNGTDVAIKVFLEQDLTTENMEDFCNEIYILSRLRHPNVILFLGACITPPHLSMVTEYMEMGSLYYLIHMSGQKKKLSWRRRLKIIRDICRGLMCIHRMKIVHRDLKSANCLVNKHWTVKICDFGLSRVMIDSPMTDNSSAGTPEWMAPELIRNEPFTEKCDIFSLGVIMWELCTLSRPWEGISPVQVVYAVANEGSRLEIPEGPLGRLIADCWAEPENRPSCQEILTRLLDCEYTVS

SEQ ID NO: 172977 - protein, 760 aa, Zea Mays
MDETPTSSGQSEDSSCEPNWWPPDLLEKIESASISRKHDVLGNLRSSSWKASQLLWSTGSYSGLIPNGFYSIIPDKKLKETFPTIPSVDDLQTLEADGLKADIIIVDTERDKKVFMLKQLSAALVKGLSSSPALVIKKIAGLVFDCFKRQNPDASPAKGSIEDTHFFGYKGPQLLGQIRHGSCRPRAILFKVLADAVGLESKLVVGLPDDGAVGFVDSYKHMSVVVSLNSMELLVDLMRFPGQLIPFSAKAIFISHISAAGESDSAENDSCDSPLEPNSPLYGLSDKVETEGIESSSNLSGRSLRNMMLRSRTFSEGKLSTSCSEPNIANAFWRHSQRRGVAEEPRGASSSPEHPLMRARGRSILGGEKQSFQEYTESGAASRAVRAMNETLKQNRLQRDHVEGSCSYVTEDQSNANDCPNKDDASRIIGATDSDSRNRTGPTQKAMSLPSSPHEYRGQDTQKGDDFISKEKMALAWNKVFQSSPFLNKPLLPFEEWNIDFSEITIGTRVGIGFFGEVFRGIWNGTDVAIKVFLEQDLTTENMEDFCNEIYILSRLRHPNVILFLGACITPPHLSMVTEYMEMGSLYYLIHMSGQKKKLSWRRRLKIIRDICRGLMCIHRMKIVHRDLKSANCLVNKHWTVKICDFGLSRVMIDSPMTDNSSAGTPEWMAPELIRNEPFTEKCDIFSLGVIMWELCTLSRPWEGISPVQVVYAVANEGSRLEIPEGPLGRLIADCWAEPENRPSCQEILTRLLDCEYTVS

SEQ ID NO: 172978 - protein, 259 aa, Zea Mays
MEVQVFDLSSDSEGEVTAHSPDHKRPSRQPGADPNRGGGETGSSALDSLFEQAGAAKPQRHPSDALKKGKEKAVEGESAGPPKHSGELLGAAGRVLGSGSGPWSALMSKCKAGDGGNNGAGCWGSWGDRGDQLTNSTPMPRLGSERKGFDETYELRGMPQLHSDSAASSDHWKGILGASPGDVSPLWCSRDTSMKDNEDETFSQRLQEQLNQQQLGSQHSEAVVTLDYSSLIAYRVFGLRNKLIRYFLTQFFCLICGME

SEQ ID NO: 172979 - protein, 465 aa, Zea Mays
MEVQVFDLSSDSEGEVTAHSPDHKRPSRQPGADPNRGGGETGSSALDSLFEQAGAAKPQRHPSDALKKGKEKAVEGESAGPPKHSGELLGAAGRVLGSGSGPWSALMSKCKAGDGGNNGAGCWGSWGDRGDQLTNSTPMPRLGSERKGFDETYELRGMPQLHSDSAASSDHWKGILGASPGDVSPLWCSRDTSMKDNEDETFSQRSVSARSCDYFLVEDTSPSWLSKVKGLNFPLPDEHQSRTRQIETDEMFARRLQEQLNQQQLGSQHSEATDTTIAWTLHEQDAEHARFAAREGQSSSSQRDRSMAHLYSYGRHSPVQNFSPWASNRTPIPMPRRGGLQRNSNCPQVEQRNMLISQLTRGCFREDMDLETRLAVLDSLSEAFKNCEDTLSPDSDDDDYEDLIALDDDNHHRGASDDQINSLPLSLIEMNPVIYAWIALLLAIHSGICLACTSFTKSALTGGLG

SEQ ID NO: 172980 - protein, 347 aa, Zea Mays
MEVQVFDLSSDSEGEVTAHSPDHKRPSRQPGADPNRGGGETGSSALDSLFEQAGAAKPQRHPSDALKKGKEKAVEGESAGPPKHSGELLGAAGRVLGSGSGPWSALMSKCKAGDGGNNGAGCWGSWGDRGDQLTNSTPMPRLGSERKGFDETYELRGMPQLHSDSAASSDHWKGILGASPGDVSPLWCSRDTSMKDNEDETFSQRLQEQLNQQQLGSQHSEATDTTIAWTLHEQDAEHARFAAREGQSSSSQRDRSMAHLYSYGRHSPVQNFSPWASNRTPIPMPRRGGLQRNSNCPQVEQRNMLISQLTRGCFREDMDLETRLAVLDSLSEAFKNCEDTLSPDSDE

SEQ ID NO: 172981 - protein, 398 aa, Zea Mays
MEVQVFDLSSDSEGEVTAHSPDHKRPSRQPGADPNRGGGETGSSALDSLFEQAGAAKPQRHPSDALKKGKEKAVEGESAGPPKHSGELLGAAGRVLGSGSGPWSALMSKCKAGDGGNNGAGCWGSWGDRGDQLTNSTPMPRLGSERKGFDETYELRGMPQLHSDSAASSDHWKGILGASPGDVSPLWCSRDTSMKDNEDETFSQRSVSARSCDYFLVEDTSPSWLSKVKGLNFPLPDEHQSRTRQIETDEMFARRLQEQLNQQQLGSQHSEATDTTIAWTLHEQDAEHARFAAREGQSSSSQRDRSMAHLYSYGRHSPVQNFSPWASNRTPIPMPRRGGLQRNSNCPQVEQRNMLISQLTRGCFREDMDLETRLAVLDSLSEAFKNCEDTLSPDSDDT

SEQ ID NO: 172982 - protein, 469 aa, Zea Mays
MEVQVFDLSSDSEGEVTAHSPDHKRPSRQPGADPNRGGGETGSSALDSLFEQAGAAKPQRHPSDALKKGKEKAVEGESAGPPKHSGELLGAAGRVLGSGSGPWSALMSKCKAGDGGNNGAGCWGSWGDRGDQLTNSTPMPRLGSERKGFDETYELRGMPQLHSDSAASSDHWKGILGASPGDVSPLWCSRDTSMKDNEDETFSQRSVSARSCDYFLVEDTSPSWLSKVKGLNFPLPDEHQSRTRQIETDEMFARRLQEQLNQQQLGSQHSEATDTTIAWTLHEQDAEHARFAAREGQSSSSQRDRSMAHLYSYGRHSPVQNFSPWASNRTPIPMPRRGGLQRNSNCPQVEQRNMLISQLTRGCFREDMDLETRLAVLDSLSEAFKNCEDTLSPDSDEGASDDQINSLPLSLIEGENCSDEPCNICLDCPSAGDSLRHLPCLHKFHKECIDRWLGMKIWCPICKLNVFSQ

SEQ ID NO: 172983 - protein, 209 aa, Zea Mays
MEVQVFDLSSDSEGEVTAHSPDHKRPSRQPGADPNRGGGETGSSALDSLFEQAGAAKPQRHPSDALKKGKEKAVEGESAGPPKHSGELLGAAGRVLGSGSGPWSALMSKCKAGDGGNNGAGCWGSWGDRGDQLTNSTPMPRLGSERKGFDETYELRGMPQLHSDSAASSDHWKGILGASPGDVSPLWCSRDTSMKDNEDETFSQRLIRQ

SEQ ID NO: 172984 - protein, 218 aa, Zea Mays
MVYLKKKQNLINQKDRAWTTGRCEKGAGAAAASFRPSGITREGRRSPTPRPPTTAESTRPAHLLGGCGGGRRGGSDGRRSGGGARPAAARGRGGHAAERAAGRPVAAAGAAEVARLPHVVVVEVAELGLPAAAPRARQRLGAGTPSRGRLLRGRGRGRGRRRRKGRLWRRVVALVRPAFLRVGGLDDLAEQLEPRGVGVREVGGHGWSGRRGPGWVGG

SEQ ID NO: 172985 - protein, 81 aa, Zea Mays
MLELRLVSLVAFSLYLPLFACRLSPENEFCRNSSCTWSCFLRCAFLLGDHRLVLSQHFGCFAGICFIAIHFGSHNLEEYEN

SEQ ID NO: 172986 - protein, 112 aa, Zea Mays
MFALVCAHIGGVFKLELFLPEEYPMAAPKVRFLTKIYHPNIDKLGRICLDILKDKWSPALQIRTVLLSIQALLSAPNPDDPLSDNIAKHWKSNEVEAVETAKEWTRLYASGA

SEQ ID NO: 172987 - protein, 361 aa, Zea Mays
MLAPRENDHITQAPKHEVALLRLHQVNGMQSPAVQVQTSGGFVLQHLVPVSLSTQHDQQQLNQAPVYYVQSQDHAKSTESKALEPLVQGVQPLVHNPEVMAQVELPQKPNQATELYPQPQNHRLQMPTQQVDSHTWHPQQPMVQQHQYIIQQVSRHMAQQQSSSPHSQSAQATPLFPPFSSPKPASSNTDPITRSMAGQPPYSSSQQQHEVAHSFYGQGNTILVPVADHNAQHQQSQSVQLHSQGTCLPQPSKPSHCSVASYAVQGNGQTYSSTYKNPSNCPATVVALLPQPPATASMAYHPLGPQVVHNHPFGNMVETASVVGYSRDQGEILPVVTAVQPVMVDKLNAGSNVTSPREWSA

SEQ ID NO: 172988 - protein, 59 aa, Zea Mays
MSAIQAMVSVPYSFVVKGTIFLHTCTYLSVMWRTNPVHLNYCLKCHLAWSICVSLLGCI

SEQ ID NO: 172989 - protein, 618 aa, Zea Mays
MAGIDLNTVEEEDEEEAEALPLPGPGGRGAVCLELWHACAGPVPPLPRKGSAVVYLPQGHLEHIGGDAARGAAASAVPPHVLCRVVDVTLHADGATDEVYARVSLLPEDEDAEKRAQAQARVREDEDRRDGEDGGAMRPLARTPHMFCKTLTASDTSTHGGFSVPRRAAEDCFPPLDYSQQRPSQELVAKDLHGTEWKFRHIYRGQPRRHLLTTGWSAFVNRKKLISGDAVLFLRGEDGVLRLGVRRAAQLKIVTPIPAPHNQCSSNSNLGNVAQAVATKTVFHIYYNPRLTQSEFIVPYWKFTRSFNQPISVGMRCRMRYESDDASERRCTGIIIGSREADPIWYGSKWKCLVVRWDDGIECRWPNRVSPWEIELTGSVSGSQMCAPSSKRLKPCLPQVNPEIVLPNGSVSSDFAGSARFHKVLQGQELLGFKTHDGPAISASQATEARNLQYSDERSNNNLGIPRLGVRSPTGIPGFPYHCSGFGESQRFQKVLQGQEVFHPFRGGCLADGHIRTAGMYQPDGRHVSGAAYKWSAPQGYDFPQPAKPVFLLQESSPSSVMMFPQTRSKITHLEYEYSRHGKKQSNIISLASSCFRRSNRRMYWNCEYALPRQWCRA

SEQ ID NO: 172990 - protein, 623 aa, Zea Mays
MAGIDLNTVEEEDEEEAEALPLPGPGGRGAVCLELWHACAGPVPPLPRKGSAVVYLPQGHLEHIGGDAARGAAASAVPPHVLCRVVDVTLHADGATDEVYARVSLLPEDEDAEKRAQAQARVREDEDRRDGEDGGAMRPLARTPHMFCKTLTASDTSTHGGFSVPRRAAEDCFPPLDYSQQRPSQELVAKDLHGTEWKFRHIYRGLLVTGQPRRHLLTTGWSAFVNRKKLISGDAVLFLRGEDGVLRLGVRRAAQLKIVTPIPAPHNQCSSNSNLGNVAQAVATKTVFHIYYNPRLTQSEFIVPYWKFTRSFNQPISVGMRCRMRYESDDASERRCTGIIIGSREADPIWYGSKWKCLVVRWDDGIECRWPNRVSPWEIELTGSVSGSQMCAPSSKRLKPCLPQVNPEIVLPNGSVSSDFAGSARFHKVLQGQELLGFKTHDGPAISASQATEARNLQYSDERSNNNLGIPRLGVRSPTGIPGFPYHCSGFGESQRFQKVLQGQEVFHPFRGGCLADGHIRTAGMYQPDGRHVSGAAYKWSAPQGYDFPQPAKPVFLLQESSPSSVMMFPQTRSKITHLEYEYSRHGKKQSNIISLASSCFRRSNRRMYWNCEYALPRQWCRA

SEQ ID NO: 172991 - protein, 426 aa, Zea Mays
MASSSFNNSHWPSMFRSKHAAEPCQTTQPDISSSPPSLLSAGGASTTTTTGRCLKHSISVGGEERAPDPKPRWNPRPEQIRILEAIFNSGMVNPPRDEIPRIRMRLQQYGQVGDANVFYWFQNRKSRSKNKLRSSTAGTGRLGLQGLARAPGRGAAAAPPPVEPPPLVQNQFHMLASPAQAPTSSSSSSSDRSSGSSKPAAEPAMPATAAPMDLLGPLAAACPQMYYQGSPVAPAHKVLDLVASVEPVFQPWPQGYCLSAAEVATILGGQYMHVPVQQQPPAPLPAGALLGLCNDVTEPTAVVTGHKTCAWGPAGLGQSWPCGGADHHQPGKNNNTAARELAHEDDATKLGLLQYGFGATTAMEAAPAVAPLAASPAGGAVTMASVSASTAGLTGFPASTNGVVANYDLLQAVITHDIDASSRGYT

SEQ ID NO: 172992 - protein, 75 aa, Zea Mays
MVAFRFHQYQVVGRALPTPGDEHPKIYRMKLWATNEVRAKSKFWYFLRKLKKVKKSNGQVLAINECHGFVSCILS

SEQ ID NO: 172993 - protein, 101 aa, Zea Mays
MVAFRFHQYQVVGRALPTPGDEHPKIYRMKLWATNEVRAKSKFWYFLRKLKKVKKSNGQVLAINEIFERNPTTIKNYGIWLRYQSRTGYHNPERRCRTDVQ

SEQ ID NO: 172994 - protein, 134 aa, Zea Mays
MVAFRFHQYQVVGRALPTPGDEHPKIYRMKLWATNEVRAKSKTGYHNMYKEYRDTTLNGAVEQMYNEMASRHRVRSPCIQIIKTATVHFKLCKRDNTKQFHNSEIKFPLVYRKVRPPTRKLKTTFKASRPNLFM

SEQ ID NO: 172995 - protein, 62 aa, Zea Mays
MSFPSSSLAAVMVCFHAFSWNAYCKVSFDPVQSYSRYSVCKYCRCCRILLYTNLDNATMILH

SEQ ID NO: 172996 - protein, 223 aa, Zea Mays
MHGTRKQARKRSAAAGKGKGKGEKRQRQPRFAFLTKSEVDHLEDGYRWRKYGQKAVKNSPYPRSYYRCTTQKCPVKKRVERSSQDPAVVITTYEGKHTHPIPVTLRGSTHILAAQLHHHHNHHLGAFPTPLPQTGAAPFGRAAGGGVIDMLGLLPPRNHGMSGGPMSAVAGAATTTAATITTTSTTPSYPPSLQMQHFMAQDFGLLQDIMLPSFGGGGGNIQP

SEQ ID NO: 172997 - protein, 82 aa, Zea Mays
MSRSISPCPLQLSSPFKQFTNITDYVHISNKTVQNFGLKITVVPASMTQFALPYWSDQVRKMSYLCKAIVVIVLLTVSGIWR

SEQ ID NO: 172998 - protein, 61 aa, Zea Mays
MKIQFRYLTILWHSPAAWLICSNVSVGIPVKCASSVSGASTLFGYDKRKLLLQLLQQYFCG

SEQ ID NO: 172999 - protein, 439 aa, Zea Mays
MVKLPALRMKRMFHGDDCANEFKIRTMKSMKVSHFHVSELEQSAMSNLSDKTPQDEPDPTIQLADQDIRVTEASGLHDLIGGKSMLEDLTSEVIDSPNSEGDSSANYDDNKSVLHAVNYVGKDDGVDSSFQNFCFSDHEANWGLNECCRLMDIYSPDDDFSYLLDSPPDLLPSYTGFCDEFVSIDALMNMSSRCGIFPLIESATEASVDNKPCSSEVDLCFNNSEVLEWLNPNLLEGDLPDLVDFAELNSNATPAKKEQWTRNVTLVLDLDETLVHSTMKHCDDADFTFSMFYDMKEHVVYVKKRPHVHMFLQRMVEMFEVVIFTASQSVYADQLLDMLDPEKKLFSKRFFRESCLITDSGYRKDLTVVGVDLAKVAIIDNTPQVFELQVNNGIPIESWYSNPLDEALPQLIPFLETLAVADDVRPIIAKKFGNIIDNR

SEQ ID NO: 173000 - protein, 96 aa, Zea Mays
MIGLLGRSIDRSLTYASCQLVGRARHGIIRHVVRTYALGTELYIQLLTGTRWGPRACMIDSEASITQRAGMARTVEFPVPSFETLEAAKELVCRDL

SEQ ID NO: 173001 - protein, 747 aa, Zea Mays
MSSGGGGGGARGPSGPVPASARKLVQGLKEIVNRPDAEIYAALRECNMDPDEAVSRLLSQDTFQEVKSKRDRKKEVKETPEPRSRGASNSSRSSRGGVDRAGRGNSVQSGSSDYMASRSSILGPAVAATNAMQKPTVPSLSTNKDVVPNGSVGAQQSSSGFQHNWFGVPGQMSMADIVKMGRPQVRSSGKPMAAGDTSYAGQTPSLSSSINQNSKQSASTALPTTFDQGFPALPDPIPHTVNSSHGSAGNNHTHENDWFPQDDLPSGVQPTCIEASGDQSLFVASLDQSMLVADASYSQEISHAEENNSTAVEATLSSERHLEIVEDDNHFNDGLLQNSSAYQAQVHSYVDNEVGISNVDAESASMNFQHLSLQNEDIAATKSAEDNPAVILPDHLQAANADCAHLSFGSFESGAFSGLLSSKVPKGSLEDDEVLIPDESRSVNRIDVRNQDYYDDDALNSSENVDVETRIGNMDNIDGPSVSESDALRQGAIDVPGLQYDLPSVSSHAYSNTTQPSTMEEPQGNTQAQPLSHFSGLLQANTLPNNLLGSNLTPLREFDFSQFLQTQSATKYNPSVAPNNLPPISMQETSKQGGFPNTQSTQHVPSTSISSGLPLPQQLPVYSQPTLPLGPFTSLVGYPYLPQNYYLPSAPFQQAYSSNGPFHQSAAPAVPGAGMKYPMPQYKSSPPASTLPQPSSLSGYGGFGSANNIPGNFSQNQGAPAAPTTLGFDEALGTQFKHPNHYAALQQ

SEQ ID NO: 173002 - protein, 440 aa, Zea Mays
MSSGGGGGGARGPSGPVPASARKLVQGLKEIVNRPDAEIYAALRECNMDPDEAVSRLLSQDTFQEVKSKRDRKKEVKETPEPRSRGASNSSRSSRGGVDRAGRGNSVQSGSSGTDYMASRSSILGPAVAATNAMQKPTVPSLSTNKDVVPNGSVGAQQSSSGFQHNWFGVPGQMSMADIVKMGRPQVRSSGKPMAAGDTSYAGQTPSLSSSINQNSKQSASTALPTTFDQGFPALPDPIPHTVNSSHGSAGNNHTHENDWFPQDDLPSGVQPTCIEASGDQSLFVASLDQSMLVADASYSQEISHAEENNSTAVEATLSSERHLEIVEDDNHFNDGLLQNSSAYQAQVHSYVDNEVGISNVDAESASMNFQHLSLQNEDIAATKSAEDNPAVILPDHLQAANADCAHLSFGSFESGAFSGLLSSKVPKGSLEDDEESRLL

SEQ ID NO: 173003 - protein, 792 aa, Zea Mays
MSSGGGGGGARGPSGPVPASARKLVQGLKEIVNRPDAEIYAALRECNMDPDEAVSRLLSQDTFQEVKSKRDRKKEVKETPEPRSRGASNSSRSSRGGVDRAGRGNSVQSGSSGTDYMASRSSILGPAVAATNAMQKPTVPSLSTNKDVVPNGSVGAQQSSSGFQHNWFGVPGQMSMADIVKMGRPQVRSSGKPMAAGDTSYAGQTPSLSSSINQNSKQSASTALPTTFDQGFPALPDPIPHTVNSSHGSAGNNHTHENDWFPQDDLPSGVQPTCIEASGDQSLFVASLDQSMLVADASYSQEISHAEENNSTAVEATLSSERHLEIVEDDNHFNDGLLQNSSAYQAQVHSYVDNEVGISNVDAESASMNFQHLSLQNEDIAATKSAEDNPAVILPDHLQAANADCAHLSFGSFESGAFSGLLSSKVPKGSLEDDEVLIPDESRSVNRIDVRNQDYYDDDALNSSENVDVETRIGNMDNIDGPSVSESDALRQGAIDVPGLQYDLPSVSSHAYSNTTQPSTMEEPQGNTQAQPLSHFSGLLTSKQGGFPNTQSTQHVPSTSISSGLPLPQQLPVYSQPTLPLGPFTSLVGYPYLPQNYYLPSAPFQQAYSSNGPFHQSAAPAVPGAGMKYPMPQYKSSPPASTLPQPSSLSGYGGFGSANNIPGNFSQNQGAPAAPTTLGFDEALGTQFKHPNHYAALQQSDNSTMWLHGGAGSRTISAVPPGNFYGFQGQSQHGGFRQAHQPSQYGGLGYPSFYQSQTSLPQEHPQNPTEGSLNNPQGVPSQPSHQLWQHIY

SEQ ID NO: 173004 - protein, 453 aa, Zea Mays
MSSGGGGGGARGPSGPVPASARKLVQGLKEIVNRPDAEIYAALRECNMDPDEAVSRLLSQDTFQEVKSKRDRKKEVKETPEPRSRGASNSSRSSRGGVDRAGRGNSVQSGSSGTDYMASRSSILGPAVAATNAMQKPTVPSLSTNKDVVPNGSVGAQQSSSGFQHNWFGVPGQMSMADIVKMGRPQVRSSGKPMAAGDTSYAGQTPSLSSSINQNSKQSASTALPTTFDQGFPALPDPIPHTVNSSHGSAGNNHTHENDWFPQDDLPSGVQPTCIEASGDQSLFVASLDQSMLVADASYSQEISHAEENNSTAVEATLSSERHLEIVEDDNHFNDGLLQNSSAYQAQVHSYVDNEVGISNVDAESASMNFQHLSLQNEDIAATKSAEDNPAVILPDHLQAANADCAHLSFGSFESGAFSGLLSSKVPKGSLEDDEVLIPDESRSVNRIDVRLL

SEQ ID NO: 173005 - protein, 705 aa, Zea Mays
MSSGGGGGGARGPSGPVPASARKLVQGLKEIVNRPDAEIYAALRECNMDPDEAVSRLLSQDTFQEVKSKRDRKKEVKETPEPRSRGASNSSRSSRGGVDRAGRGNSVQSGSSDYMASRSSILGPAVAATNAMQKPTVPSLSTNKDVVPNGSVGAQQSSSGFQHNWFGVPEENNSTAVEATLSSERHLEIVEDDNHFNDGLLQNSSAYQAQVHSYVDNEVGISNVDAESASMNFQHLSLQNEDIAATKSAEDNPAVILPDHLQAANADCAHLSFGSFESGAFSGLLSSKVPKGSLEDDEVLIPDESRSVNRIDVRNQDYYDDDALNSSENVDVETRIGNMDNIDGPSVSESDALRQGAIDVPGLQYDLPSVSSHAYSNTTQPSTMEEPQGNTQAQPLSHFSGLLQANTLPNNLLGSNLTPLREFDFSQFLQTQSATKYNPSVAPNNLPPISMQETSKQGGFPNTQSTQHVPSTSISSGLPLPQQLPVYSQPTLPLGPFTSLVGYPYLPQNYYLPSAPFQQAYSSNGPFHQSAAPAVPGAGMKYPMPQYKSSPPASTLPQPSSLSGYGGFGSANNIPGNFSQNQGAPAAPTTLGFDEALGTQFKHPNHYAALQQSDNSTMWLHGGAGSRTISAVPPGNFYGFQGQSQHGGFRQAHQPSQYGGLGYPSFYQSQTSLPQEHPQNPTEGSLNNPQGVPSQPSHQLWQHIY

SEQ ID NO: 173006 - protein, 261 aa, Zea Mays
MDAAERRLARVAAHLVPSFPVPHATGPPLAPSPAAASSSSSSPAGDSYRRVHGDVPSEPPEWRTATDESGKEFVDIIYEKAVGEGIAKITINRPDRRNAFRPLTVKELMRAFNDARDDSSIGVIILTGKGTKAFCSGGDQALRDSDGYVDFDSFGRLNVLDLQVQIRRLPKPVIAMVAGYAVGGGHVLHMVCDITIAAENAIFGQTGPKVGSFDAGYGSSIMSRLVSYHTINLVRLDPREPVKCGFCHGSTQLTKLTKWDS

SEQ ID NO: 173007 - protein, 182 aa, Zea Mays
MDAAERRLARVAAHLVPSFPVPHATGPPLAPSPAAASSSSSSPAGDSYRRVHGDVPSEPPEWRTATDESGKEFVDIIYEKAVGEGIAKITINRPDRRNAFRPLTVKELMRAFNDARDDSSIGVIILTGKGTKAFCSGGDQALRDSDGYVDFDSFGRLNVLDLQEQIFLAVGTSSLCKKTKND

SEQ ID NO: 173008 - protein, 105 aa, Zea Mays
MPSHVISLTVHCLYPLPSTSLRTLRRLTFSPSPSPPPRSPPPRCGPSSTPSAPTPPSPSARSSRSTSTFENSSVFTTTATLKFGIHIINRLNSMSLVNVLVSYKW

SEQ ID NO: 173009 - protein, 111 aa, Zea Mays
MECAFVCLRLLCGYRQGNRICHGRRFPFLSDVDVLYSCIFGFNNMPLVCCQASYLQEINGLRPRGLFFLIMVGRDFGYPLKRYAWWCFLVLKNKYPTEPQPFVLSGDFLHY

SEQ ID NO: 173010 - protein, 121 aa, Zea Mays
MRGSRVDSASSPRGPRPPPPRHPLAMFGSPRPPSRGVLHLPCVVRGEGGGSAAAVHTRVSSQVHIQVAQDHLLLPSLQARAQVNFIFITHMTFSLILWIKFQLTREIKEELIFILAGGCNH

SEQ ID NO: 173011 - protein, 207 aa, Zea Mays
MECAFVCLRLLCGYRQGNRICHGRRFPFLSDVDVLYSCIFGFNNMPLVCCQASYLQEINGLRPRGLFFLIMCIGATTLDEYRKHIEKDPALERRFQPVKVPEPTMDETIQILRGLRERYELHHKLRYTDDALIAAAQLSYQYISDRFLPDKAIDLIDEAGSRVRLRHAQLPDEAKELDKELRQISKQKNEAVRGQDFEKVYCCLAQR

SEQ ID NO: 173012 - protein, 119 aa, Zea Mays
MTRGFSAHMHQVSLPFAATVFQFDRLGKRRFPFLSDVDVLYSCIFGFNNMPLVCCQASYLQEINGLRPRGLFFLIMRFQVGRDFGYPLKRYAWWCFLVLKNKYPTEPQPFVLSGDFLHY

SEQ ID NO: 173013 - protein, 152 aa, Zea Mays
MNKARAFLELFFAMWFVMGNVWVFDARLGSFQRAPRLYALCVSLLAWNTVVYSLTFLSAASALRSTGRRRRFGSCRAHTCFISSAYTGGSGSSPLALSASKSSSELYIHYTHDILAYSLDQGVSILDTTDIFQLTREIKEELIFILAGGCNH

SEQ ID NO: 173014 - protein, 125 aa, Zea Mays
MTRGFSAHMHQVSLPFAATVFQFDRLGKRQGNRICHGRRFPFLSDVDVLYSCIFGFNNMPLVCCQASYLQEINGLRPRGLFFLIMVGRDFGYPLKRYAWWCFLVLKNKYPTEPQPFVLSGDFLHY

SEQ ID NO: 173015 - protein, 227 aa, Zea Mays
MAVAAPWSKFLCAPWSSPARVPARRCFFPAPSRSSLLPCASSQLRSAPGRRSASSSPPATCFPHGRSFFPIPDLAQFAPAWSSPSPTARLSHDACPVRPSVTGPLAASSSCPARPPTPTRSSLVSMAVRASSPAVRSPSSDFVSRRSLVHVPVGVVEFCLVGSSLTSLVSSNRRTPSSVASGLHVGCRRSSSCRVCSNVADSSIVNFASSILTFGSAHVCTSNAFAA

SEQ ID NO: 173016 - protein, 136 aa, Zea Mays
MGHDEAVVTQNSVKAPSPPKDQPAIYPCFDWSTVQAYYGPGVLPPAFFNPGIAPGHAPPPYVWGPQTMPPAAFGKSYAAIYPHAGGFLHPLMPLVVNPLSAEPAKSGNSKDNSLNKKLKEIDGSAVSSGNSEKTRG

SEQ ID NO: 173017 - protein, 172 aa, Zea Mays
MMKPCVSTGSDFKVSGATSTEWPAKDDKESKRERRKQSNRESARRSRLRKQAETEELARRVELLTAENTSLRSEISRLTESSQKLRMENSALMEKLADGTSDQAQEASAGHQTTPTAPSSARVVKNFLWMMDGEGASRGGSGSSSRRRDHGAPMLRQLLSSGPLAADAVAAS

SEQ ID NO: 173018 - protein, 173 aa, Zea Mays
MGHDEAVVTQNSVKAPSPPKDQPAIYPCFDWSTVQAYYGPGVLPPAFFNPGIAPGHAPPPYVWGPQTMPPAAFGKSYAAIYPHAGGFLHPLMPLVVNPLSAEPAKSGNSKDNSLNKKLKEIDGSAVSSGNSEKTSGDHSLEGSSDGNNPKVSGTPKKRSLDDRTTSGRQGIEA

SEQ ID NO: 173019 - protein, 354 aa, Zea Mays
MGHDEAVVTQNSVKAPSPPKDQPAIYPCFDWSTVQAYYGPGVLPPAFFNPGIAPGHAPPPYVWGPQTMPPAAFGKSYAAIYPHAGGFLHPLMPLVVNPLSAEPAKSGNSKDNSLNKKLKEIDGSAVSSGNSEKTSLEGSSDGNNPKVSGTPKKRSLDDRTTSETCGESGRLPALSSVRIPDTMMKPCVSTGSDFKVSGATSTEWPAKDDKESKRERRKQSNRESARRSRLRKQAETEELARRVELLTAENTSLRSEISRLTESSQKLRMENSALMEKLADGTSDQAQEASAGHQTTPTAPSSARVVKNFLWMMDGEGASRGGSGSSSRRRDHGAPMLRQLLSSGPLAADAVAAS

SEQ ID NO: 173020 - protein, 291 aa, Zea Mays
MPPAAFGKSYAAIYPHAGGFLHPLMPLVVNPLSAEPAKSGNSKDNSLNKKLKEIDGSAVSSGNSEKTSGDHSLEGSSDGNNPKVSGTPKKRSLDDRTTSETCGESGRLPALSSVRIPDTMMKPCVSTGSDFKVSGATSTEWPAKDDKESKRERRKQSNRESARRSRLRKQAETEELARRVELLTAENTSLRSEISRLTESSQKLRMENSALMEKLADGTSDQAQEASAGHQTTPTAPSSARVVKNFLWMMDGEGASRGGSGSSSRRRDHGAPMLRQLLSSGPLAADAVAAS

SEQ ID NO: 173021 - protein, 174 aa, Zea Mays
MQRLGDFRLPPFFNYPPYFTLQPVRETREKQVQLWKDLILDYCRSQKIHTISLEEDFPLFSNAKIERSLSYEAKEVFLAALVSEEWMDKGHKKCLILWLRIQDWANFILNFVKDNGLEVMTIEEIRSGIDTRGTELEGIDRGVLMRALRQLEQKGKAAIFKGTSADDEGVKFSV

SEQ ID NO: 173022 - protein, 1685 aa, Zea Mays
MTKKHKIRKSKHLLESKKDVDENVENILRMIEEENEQTENEQDDSGNPVRKSKLSSLVKGFHEDYQYLHKHYKQLISKLETAGHSSSGSDSSDSDVEGDRLENNVTTPKAVLNEENGLNHKLDEVHSMEAEIEMLKQSTEEHTKEISDLKQLLEKAIKDKEATRGEFTLEVANLSSENENLKSLVETAKREEGDLLNIIKSKENEVKTLSSEKQTIEEERDNLKMSVVDMKKEMEDLSNQLKDTVDKCSVMASELEKSLKAEKEVQTLFEENQNLKNHNLMLSVEHDNLKALHHNLDIECCQLKATIAETKAENESLTTENHSAERKLQQLRVEIDGLMAETTVIMNNLDKERSTAAEEKERLTSENSVYMSELEEAQSNVKDLEKELESTKSVLNNRIAELCKEKNSTTSEIERLEASLMNHQNDLSQQLDRISDMQKTTENLELANSNLHNEIVKVQGQKNEAVASIVNLESMLEQQVQEIANLQEANKELKAAKTDLHNEVMLLQQEKIVALTQLQEYEAQIKNLRIDLEQQCNQISVMQQANEETQDKNSSLHKQLEETRIHLQEEIIALQGEKEEAISSLQQSNDSLKTLEVQLEQQREQISVLQLAHEDLQNSNSNLEMQLEEAKVSHHAEILALQDEKNKIISELQQSDGCIKNLRFELEQGKEQTSILLHANEDMKNNISVLDKQLEEVRSSLHAEIAEVRAEKETALSELHMSQTSIRNLESVVEKQTENILTLEKANDKLNNKICILTEQVEQAKAELHKEVAAIQEEKDTALTQLRQSEFSIQDLENEVTRLKDELSIQLEKNSTLDKQFEEFKSKLHAEILDLRAEKDTSLLELQTSQDSVRNLEILVEKQTENISTLHQANDELQKNIYTLTEQSQQAKEEMQDELKAIQEEKDTVLTQLKQSETSVQNLEDEVTRLKEELSVQLENNSTLDKQFAEARSNLHAEISDLRAEKGTSLLELQMSQASVRNLEILVGKQTENISTLQQANEELQKNIYTLTEQSQQVKVEMQSDLKAIQEEKNAVLSQLKQSETSVQNLENEVIRLKEELSVQLENNSTLDKQFEEARSNLHAEISELRADKNTSLLKLQTSQDSVRNLEIVVEKQTENISTLQQANDELQKNIYTLTEQSQRDKAEMQDELKAIQEDKDAVLTQLKQSETSVQNLEDELTRLKEELSVQLENNSTLDKQFAEARSNLHAEISDLHTEKDTSLRELQTSQACVRNLEIVVEKQTENISTLQQANDELQKNVYTLTEQSQQAKVEMQDELKSIQEEKDAALTQLKLSETSVQNLENEVTRLKWEFSVQLENNSTLDKQLEEAMLKVSSLHENLEKAQAEAACQLDGMSTKTKDLEETINQLSSQKTKLEKDVKIMIEACTENMSCLAGFEDRVTQKISDQEAGLKVLHQSLGGAVGSCQRLQYAYDEVSTRASHLEILKRSQMEQIDQLEQKNTETVEKHRLLEEEKLSANKENIKLQKHVQDLEVQLQLAKQKLKVTEAESKCKEERYEASVEALRAEICHLEQLVQQFSGRVSLLEGTLMQVKGHAESVVCKWADKLDELETICSQNFVLFIDRSSACSDELKILRKKVHDHLNEQKELANANNELAIRFKEKEMVVSEMVKSAAEAQTKMLQLQKTVDEKEDELAARVQEKREAIKQLSDTIVYHKNYSDDL

SEQ ID NO: 173023 - protein, 79 aa, Zea Mays
MQRTILGSRSKRPHMAFQIGFFNLMPLVLVVCSSIPLVVFFARMCQYASELVIFLQQLAQLCCPRARGWATTRMVDGNG

SEQ ID NO: 173024 - protein, 1672 aa, Zea Mays
MIEEENEQTENEQDDSGNPVRKSKLSSLVKGFHEDYQYLHKHYKQLISKLETAGHSSSGSDSSDSDVEGDRLENNVTTPKAVLNEENGLNHKLDEVHSMEAEIEMLKQSTEEHTKEISDLKQLLEKAIKDKEATRGEFTLEVANLSSENENLKSLVETAKREEGDLLNIIKSKENEVKTLSSEKQTIEEERDNLKMSVVDMKKEMEDLSNQLKDTVDKCSVMASELEKSLKAEKEVQTLFEENQNLKNHNLMLSVEHDNLKALHHNLDIECCQLKATIAETKAENESLTTENHSAERKLQQLRVEIDGLMAETTVIMNNLDKERSTAAEEKERLTSENSVYMSELEEAQSNVKDLEKELESTKSVLNNRIAELCKEKNSTTSEIERLEASLMNHQNDLSQQLDRISDMQKTTENLELANSNLHNEIVKVQGQKNEAVASIVNLESMLEQQVQEIANLQEANKELKAAKTDLHNEVMLLQQEKIVALTQLQEYEAQIKNLRIDLEQQCNQISVMQQANEETQDKNSSLHKQLEETRIHLQEEIIALQGEKEEAISSLQQSNDSLKTLEVQLEQQREQISVLQLAHEDLQNSNSNLEMQLEEAKVSHHAEILALQDEKNKIISELQQSDGCIKNLRFELEQGKEQTSILLHANEDMKNNISVLDKQLEEVRSSLHAEIAEVRAEKETALSELHMSQTSIRNLESVVEKQTENILTLEKANDKLNNKICILTEQVEQAKAELHKEVAAIQEEKDTALTQLRQSEFSIQDLENEVTRLKDELSIQLEKNSTLDKQFEEFKSKLHAEILDLRAEKDTSLLELQTSQDSVRNLEILVEKQTENISTLHQANDELQKNIYTLTEQSQQAKEEMQDELKAIQEEKDTVLTQLKQSETSVQNLEDEVTRLKEELSVQLENNSTLDKQFAEARSNLHAEISDLRAEKGTSLLELQMSQASVRNLEILVGKQTENISTLQQANEELQKNIYTLTEQSQQVKVEMQSDLKAIQEEKNAVLSQLKQSETSVQNLENEVIRLKEELSVQLENNSTLDKQFEEARSNLHAEISELRADKNTSLLKLQTSQDSVRNLEIVVEKQTENISTLQQANDELQKNIYTLTEQSQRDKAEMQDELKAIQEDKDAVLTQLKQSETSVQNLEDELTRLKEELSVQLENNSTLDKQFAEARSNLHAEISDLHTEKDTSLRELQTSQACVRNLEIVVEKQTENISTLQQANDELQKNVYTLTEQSQQAKVEMQDELKSIQEEKDAALTQLKLSETSVQNLENEVTRLKWEFSVQLENNSTLDKQLEEAMLKVSSLHENLEKAQAEAACQLDGMSTKTKDLEETINQLSSQKTKLEKDVKIMIEACTENMSCLAGFEDRVTQKISDQEAGLKVLHQSLGGAVGSCQRLQYAYDEVSTRASHLEILKRSQMEQIDQLEQKNTETVEKHRLLEEEKLSANKENIKLQKHVQDLEVQLQLAKQKLKVTEAESKCKEERYEASVEALRAEICHLEQLVQQFSGRVSLLEGTLMQVKGHAESVVCKWADKLDELETICSQNFVLFIDRSSACSDELKILRKKVHDHLNEQKELANANNELAIRFKEKEMVVSEMVKSAAEAQTKMLQLQKTVDEKEDELAARVQEKREAIKQLSDTIVYHKNYSDDLVRYIRSQSRPRLPFCL

SEQ ID NO: 173025 - protein, 1016 aa, Zea Mays
MTGPRRLRPRVTLGSGGQRKRRMGGRRVLGKKDYDSKHERYEDGGSRKSGSKTSRAEEDAYLYRRDTDVNEISAKGKYNNPDMQADKHSRRKDDSEDTDKWPTDNRDSDDRKTLSRYEHGKSRSSKEQRFDDDKYKEKYKDEYGRDKRQHDDKFSDERVARSHESDRANYKSAKDGHKSSESHYRKDAVQDDHYEDYGNRYKESRGKKRPPEENDDQYDLKPPNTRDQRVHLEKSSGSGRLDSLIERARPDRSCSPSKIHSRSSPSTSSYHDKDQNRHGSKVVDHGKREMPYDERNSRPRTSSARERTPASRLRDRDAENWSSERLKQKDDQPCDVALEIPTSSHYDRTPRKDKHTSPKQLSEKSPSSGDQRFSGRPSGGRSLDNKGERNSLTKYRDRDGDLAQERSHHQDRTPAKVPFRELTPSNSSISRSCHFSGSSPNHPLPPSARNSDSSFLSLHDDDRRPQNGDRRFHGHQKRNDMNSVRGHGHAWNNPPNWASPVSNGFAPIQHGGPPCFHPPVHQFRGPPMFNLRPQMKLNQPGVSYPMHDAVDRFSTHMHPFGWPNHLDESCPPHMQVWNGGSSVFPGEPYIYGRQEWDQNRPHGGSRGWELTGDISKGPNDVPDAELLIAKKDPYSAITAVSDSGGQHNLQPQAEQKEIGHLTAEKFETKDDSKSSKSLESLQGVQHVTSMLTKNGAVFCKDYLARINVSHDLVESELYKRCISLLGDLGVTKASHLVRNGIQDNENIEKMSTKYGHLNPFSSRYLKSDSTIFQRALALRNNQTRKGLIIVSASVKMEANMDVLEDDHGKEMLEQVVSNPALQRHTEVMEEGSLSKQELGDGIEGTIPATIGSGGLDAPPEIPQPEVVVATTAITQFNKDMEDVLPPAIEDGALQATLEHAVGILEVTPGDGLGNVAPSSGDDMEIMPSAMTEPRLGKETAPVASPPDSQEKPSIMHDSETGMEVDKVIDDIHGDGRVSSILGTKLDVAASDGDSEALLVESRVNLSRIPNSPESTH

SEQ ID NO: 173026 - protein, 1194 aa, Zea Mays
MPRSSRHRSHRSHRRGGSADRSESEGEESAPASGAREEAAAAARVSKDAEPERRRSSSGKEPVRSGNGYPEHGKKRKERVEDAVVDVVSDRWNSGVCDDHLVDKRSKSETFGHAEMEKLPDKSRGSGDESKRSSRRAMIVDDRAEEVASKSDSGKRRSEKEKDGRKESAGHYKDDRDREREKERERDREREKEWERQRERDMGRSRDREREKEREREKEREREREREQEQEHEREKDKDRERDRERERERDRQKDRERDKKDYDSKHERYEDGGSRKSGSKTSRAEEDAYLYRRDTDVNAKGKYNNPDMQADKHSRRKDDSEDTDKWPTDNRDSDDRKTLSRYEHGKSRSSKEQRFDDDKYKEKYKDEYGRDKRQHDDKFSDERVARSHESDRANYKSAKDGHKSSESHYRKDAVQDDHYEDYGNRYKESRGKKRPPEENDDQYDLKPPNTRDQRVHLEKSSGSGRLDSLIERARPDRSCSPSKIHSRSSPSTSSYHDKDQNRHGSKVVDHGKREMPYDERNSRPRTSSARERTPASRLRDRDAENWSSERLKQKDDQPCDVALEIPTSSHYDRTPRKDKHTSPKQLSEKSPSSGDQRFSGRPSGGRSLDNKGERNSLTKYRDRDGDLAQERSHHQDRTPAKVPFRELTPSNSSISRSCHFSGSSPNHPLPPSARNSDSSFLSLHDDDRRPQNGDRRFHGHQKRNDMNSVRGHGHAWNNPPNWASPVSNGFAPIQHGGPPCFHPPVHQFRGPPMFNLRPQMKLNQPGVSYPMHDAVDRFSTHMHPFGWPNHLDESCPPHMQVWNGGSSVFPGEPYIYGRQEWDQNRPHGGSRGWELTGDISKGPNDVPDAELLIAKKDPYSAITAVSDSGGQHNLQPQAEQKEIGHLTAEKFETKDDSKSSKSLESLQGVQHVTSMLTKNGAVFCKDYLARINVSHDLVESELYKRCISLLGDLGVTKASHLVRNGIQDNENIEKMSTKYGHLNPFSSRYLKSDSTIFQRALALRNNQTRKGLIIVSASVKMEANMDVLEDDHGKEMLEQVVSNPALQRHTEVMEEGSLSKQELGDGIEGTIPATIGSGGLDAPPEIPQPEVVVATTAITQFNKDMEDVLPPAIEDGALQATLEHAVGILEVTPGDGLGNVAPSSGDDMEIMPSAMTEPRLGKETAPVASPPDSQEKPSIMHDSETGGWGFQCE

SEQ ID NO: 173027 - protein, 1075 aa, Zea Mays
MTGPRRLRPRVTLGSGGQRKRRMGGRRVLGIIRMTEIGRGRRKGKGTGKGKKNGSGRGSEIWEGVGIESVRRKENGRRRGRGRENGNRNRNTSVRKIRIESGIGKGRGSVIGRRTVRGTRKIMIPSMRGMRMAVAGRVAQRRVGRKRMPTCIGEIQMSMAEISAKGKYNNPDMQADKHSRRKDDSEDTDKWPTDNRDSDDRKTLSRYEHGKSRSSKEQRFDDDKYKEKYKDEYGRDKRQHDDKFSDERVARSHESDRANYKSAKDGHKSSESHYRKDAVQDDHYEDYGNRYKESRGKKRPPEENDDQYDLKPPNTRDQRVHLEKSSGSGRLDSLIERARPDRSCSPSKIHSRSSPSTSSYHDKDQNRHGSKVVDHGKREMPYDERNSRPRTSSARERTPASRLRDRDAENWSSERLKQKDDQPCDVALEIPTSSHYDRTPRKDKHTSPKQLSEKSPSSGDQRFSGRPSGGRSLDNKGERNSLTKYRDRDGDLAQERSHHQDRTPAKVPFRELTPSNSSISRSCHFSGSSPNHPLPPSARNSDSSFLSLHDDDRRPQNGDRRFHGHQKRNDMNSVRGHGHAWNNPPNWASPVSNGFAPIQHGGPPCFHPPVHQFRGPPMFNLRPQMKLNQPGVSYPMHDAVDRFSTHMHPFGWPNHLDESCPPHMQVWNGGSSVFPGEPYIYGRQEWDQNRPHGGSRGWELTGDISKGPNDVPDAELLIAKKDPYSAITAVSDSGGQHNLQPQAEQKEIGHLTAEKFETKDDSKSSKSLESLQGVQHVTSMLTKNGAVFCKDYLARINVSHDLVESELYKRCISLLGDLGVTKASHLVRNGIQDNENIEKMSTKYGHLNPFSSRYLKSDSTIFQRALALRNNQTRKGLIIVSASVKMEANMDVLEDDHGKEMLEQVVSNPALQRHTEVMEEGSLSKQELGDGIEGTIPATIGSGGLDAPPEIPQPEVVVATTAITQFNKDMEDVLPPAIEDGALQATLEHAVGILEVTPGDGLGNVAPSSGDDMEIMPSAMTEPRLGKETAPVASPPDSQEKPSIMHDSETAATRAEEARDIAPLRVCEGTMGDGL

SEQ ID NO: 173028 - protein, 1214 aa, Zea Mays
MPRSSRHRSHRSHRRGGSADRSESEGEESAPASGAREEAAAAARVSKDAEPERRRSSSGKEPVRSGNGYPEHGKKRKERVEDAVVDVVSDRWNSGVCDDHLVDKRSKSETFGHAEMEKLPDKSRGSGDESKRSSRRAMIVDDRAEEVASKSDSGKRRSEKEKDGRKESAGHYKDDRDREREKERERDREREKEWERQRERDMGRSRDREREKEREREKEREREREREQEQEHEREKDKDRERDRERERERDRQKDRERDKKDYDSKHERYEDGGSRKSGSKTSRAEEDAYLYRRDTDVNEISAKGKYNNPDMQADKHSRRKDDSEDTDKWPTDNRDSDDRKTLSRYEHGKSRSSKEQRFDDDKYKEKYKDEYGRDKRQHDDKFSDERVARSHESDRANYKSAKDGHKSSESHYRKDAVQDDHYEDYGNRYKESRGKKRPPEENDDQYDLKPPNTRDQRVHLEKSSGSGRLDSLIERARPDRSCSPSKIHSRSSPSTSSYHDKDQNRHGSKVVDHGKREMPYDERNSRPRTSSARERTPASRLRDRDAENWSSERLKQKDDQPCDVALEIPTSSHYDRTPRKDKHTSPKQLSEKSPSSGDQRFSGRPSGGRSLDNKGERNSLTKYRDRDGDLAQERSHHQDRTPAKVPFRELTPSNSSISRSCHFSGSSPNHPLPPSARNSDSSFLSLHDDDRRPQNGDRRFHGHQKRNDMNSVRGHGHAWNNPPNWASPVSNGFAPIQHGGPPCFHPPVHQFRGPPMFNLRPQMKLNQPGVSYPMHDAVDRFSTHMHPFGWPNHLDESCPPHMQVWNGGSSVFPGEPYIYGRQEWDQNRPHGGSRGWELTGDISKGPNDVPDAELLIAKKDPYSAITAVSDSGGQHNLQPQAEQKEIGHLTAEKFETKDDSKSSKSLESLQGVQHVTSMLTKNGAVFCKDYLARINVSHDLVESELYKRCISLLGDLGVTKASHLVRNGIQDNENIEKMSTKYGHLNPFSSRYLKSDSTIFQRALALRNNQTRKGLIIVSASVKMEANMDVLEDDHGKEMLEQVVSNPALQRHTEVMEEGSLSKQELGDGIEGTIPATIGSGGLDAPPEIPQPEVVVATTAITQFNKDMEDVLPPAIEDGALQATLEHAVGILEVTPGDGLGNVAPSSGDDMEIMPSAMTEPRLGKETAPVASPPDSQEKPSIMHDSETAATRAEEARDIAPLRVCEGTMGDGL

SEQ ID NO: 173029 - protein, 279 aa, Zea Mays
MAFEKIKVSNPIVEMDGDEMTRVFWQSIKDKLIFPFLDLDIKYYDLGILHRDATDDKVTVEAAEATLKYNVAIKCATITPDETRVKEFNLKHMWKSPNGTIRNIINGTVFREPIICKNVPRLVPGWTKPICIGRHAFGDQYRATDAVLKGPGKLKLVFEGKEEQIDLEVFNFTGAGGVALSMYNTDESIRAFAAASMTTAYEKKWPLYLSTKNTILKKYDGLRTFSRRSMKLTGNPNLRLLEYGMSIVLLMTWLHMHLRVKEATCGLARITMEMCRVIS

SEQ ID NO: 173030 - protein, 320 aa, Zea Mays
MWKSPNGTIRNIINGTVFREPIICKNVPRLVPGWTKPICIGRHAFGDQYRATDAVLKGPGKLKLVFEGKEEQIDLEVFNFTGAGGVALSMYNTDESIRAFAAASMTTAYEKKWPLYLSTKNTILKKYDGRFKDIFQEVYEADWKSKFEAAGIWYEHRLIDDMVAYALKSEGGYVWACKNYDGDVQSDFLAQGFGSLGLMTSVLVCPDGKTIEAEAAHGTVTRHFRVHQKGGETSTNSIASIFAWTRGLAHRAKLDDNARLLDFALKLEAACVGAVESGKMTKDLALLVHGSSKVTRSHYLNTEEFIDAVATELRSRLGAN

SEQ ID NO: 173031 - protein, 401 aa, Zea Mays
MAFEKIKVSNPIVEMDGDEMTRVFWQSIKDKYYDLGILHRDATDDKVTVEAAEATLKYNVAIKCATITPDETRVKEFNLKHMWKSPNGTIRNIINGTVFREPIICKNVPRLVPGWTKPICIGRHAFGDQYRATDAVLKGPGKLKLVFEGKEEQIDLEVFNFTGAGGVALSMYNTDESIRAFAAASMTTAYEKKWPLYLSTKNTILKKYDGRFKDIFQEVYEADWKSKFEAAGIWYEHRLIDDMVAYALKSEGGYVWACKNYDGDVQSDFLAQGFGSLGLMTSVLVCPDGKTIEAEAAHGTVTRHFRVHQKGGETSTNSIASIFAWTRGLAHRAKLDDNARLLDFALKLEAACVGAVESGKMTKDLALLVHGSSKVTRSHYLNTEEFIDAVATELRSRLGAN

SEQ ID NO: 173032 - protein, 278 aa, Zea Mays
MAFEKIKVSNPIVEMDGDEMTRVFWQSIKDKLIFPFLDLDIKYYDLGILHRDATDDKVTVEAAEATLKYNVAIKCATITPDETRVKEFNLKHMWKSPNGTIRNIINGTVFREPIICKNVPRLVPGWTKPICIGRHAFGDQYRATDAVLKGPGKLKLVFEGKEEQIDLEVFNFTGAGGVALSMYNTDESIRAFAAASMTTAYEKKWPLYLSTKNTILKKYDGRTFSRRSMKLTGNPNLRLLEYGMSIVLLMTWLHMHLRVKEATCGLARITMEMCRVIS

SEQ ID NO: 173033 - protein, 304 aa, Zea Mays
MEVPEISPMSEYLSTHDVILSVDGLKITRTDDWIKILNQGTTAKSRDPEFLEGSHRYVATSSTKGYCVPDSWIDASKNLWQIRDKLPCPDELIAFEKVICNVSTILTEKTSIGSDQKEVEGKYCLIAKDVVKLRRCGNGWHMTEDDESSCACFEVSYARPYSLRCLQKGGNLLSSHTANSNFGQSPCEGSFVYVGDLSSAARSVRLSRYRPRWALLLFIADIPYILENGLSSLLHASAALAVINCLPVYFLDGEAILETTLSYVAWFTPRLQRRILKVCSVVWTGLLVITFSSICYSTVLHYGV

SEQ ID NO: 173034 - protein, 253 aa, Zea Mays
MEVPEISPMSEYLSTHDVILSVDGLKITRTDDWIKILNQEKTSIGSDQKEVEGKYCLIAKDVVKLRRCGNGWHMTEDDESSCACFEDEHCLVPVLNPGFSWIEVSYARPYSLRCLQKGGNLLSSHTANSNFGQSPCEGSFVYVGDLSSAARSVRLSRYRPRWALLLFIADIPYILENGLSSLLHASAALAVINCLPVYFLDGEAILETTLSYVAWFTPRLQRRILKVCSVVWTGLLVITFSSICYSTVLHYGV

SEQ ID NO: 173035 - protein, 207 aa, Zea Mays
MISAGRSRRRGRAPASLPTTTTAASRRTEHSISCCYCDCKIYSLNDALFNLGWKYARYMRAWFSVGVYLSLIALVSISLMLLWESIGVFYFRSGFLSAWLQNLLTSGLNISIVDTTIIIMSTILSIVFHEFGHAIAAASEGLQIEYVAIFVAVLFPGAFVALNYDLLQNMPLFSMLRIYCAGIWNNVMVSHAVMHLLFPKDRNKFIY

SEQ ID NO: 173036 - protein, 180 aa, Zea Mays
MTEDDESSCACFEDEHCLVPVLNPGFSWIEVSYARPYSLRCLQKGGNLLSSHTANSNFGQSPCEGSFVYVGDLSSAARSVRLSRYRPRWALLLFIADIPYILENGLSSLLHASAALAVINCLPVYFLDGEAILETTLSYVAWFTPRLQRRILKVCSVVWTGLLVITFSSICYSTVLHYGV

SEQ ID NO: 173037 - protein, 368 aa, Zea Mays
MPLFSMLRIYCAGIWNNVMLCTACVMITLLLPVMLYPLYVSGDGLMVMEVPEISPMSEYLSTHDVILSVDGLKITRTDDWIKILNQGTTAKSRDPEFLEGSHRYVATSSTKGYCVPDSWIDASKNLWQIRDKLPCPDELIAFEKVICNVSTILTEKTSIGSDQKEVEGKYCLIAKDVVKLRRCGNGWHMTEDDESSCACFEDEHCLVPVLNPGFSWIEVSYARPYSLRCLQKGGNLLSSHTANSNFGQSPCEGSFVYVGDLSSAARSVRLSRYRPRWALLLFIADIPYILENGLSSLLHASAALAVINCLPVYFLDGEAILETTLSYVAWFTPRLQRRILKVCSVVWTGLLVITFSSICYSTVLHYGV

SEQ ID NO: 173038 - protein, 168 aa, Zea Mays
MEVPEISPMSEYLSTHDVILSVDGLKITRTDDWIKILNQGTTAKSRDPEFLEGSHRYVATSSTKGYCVPDSWIDASKNLWQIRDKLPCPDELIAFEKVICNVSTILTEKTSIGSDQKEVEGKYCLIAKDVVKLRRCGNGWHMTEDDESSCACFEAFHGLRSPMPGHTL

SEQ ID NO: 173039 - protein, 484 aa, Zea Mays
MVFCRCLSISHCFSQYILGPISSDVMWMKLSFGYIFPPRSGFLSAWLQNLLTSGLNISIVDTTIIIMSTILSIVFHEFGHAIAAASEGLQIEYVAIFVAVLFPGAFVALNYDLLQNMPLFSMLRIYCAGIWNNVMLCTACVMITLLLPVMLYPLYVSGDGLMVMEVPEISPMSEYLSTHDVILSVDGLKITRTDDWIKILNQGTTAKSRDPEFLEGSHRYVATSSTKGYCVPDSWIDASKNLWQIRDKLPCPDELIAFEKVICNVSTILTEKTSIGSDQKEVEGKYCLIAKDVVKLRRCGNGWHMTEDDESSCACFEDEHCLVPVLNPGFSWIEVSYARPYSLRCLQKGGNLLSSHTANSNFGQSPCEGSFVYVGDLSSAARSVRLSRYRPRWALLLFIADIPYILENGLSSLLHASAALAVINCLPVYFLDGEAILETTLSYVAWFTPRLQRRILKVCSVVWTGLLVITFSSICYSTVLHYGV

SEQ ID NO: 173040 - protein, 1379 aa, Zea Mays
MLRLRAFRPTSDKVVKIQLHPTHPWLVTADANDRVSVWDWEHRQVIYELKAGGVDERRLVGAKLEKLAEGDDSKGKPTEAIRGGSVKQVSFYDDDVRFWQHWRNCSAAAEAPTAVSQQSSTFIAPAPSTRGRHFVVICCENKVIFLDLVTMRGRDVPKQELDNRSLLCMEFLSRTSSSDAPLVAFGSSDGVIRVLSMLTWKLVRRYTGGHKGAIACLMTYMSAAGEVHLVSGGSDGLLILWSADHIHDSRELVPKISMKAHDGGVVAVELSRVMGSAPQLITIGADKTLAIWDTVTFKEIRRIKPVPKLACHSVASWCHPRAPNLDILTCVKDSHIWAIEHPTYSALTRPLCELSSLVPPQVLALHKKLRVYCMVAHPLQPHLVATGTNIGIILSEFDPRALPAIAPLPTPTGNKEHSAVYIVERELKLLNFQLSNTANPSLGNAGVASDAGRSMNNSIEQLIVKQTKKHISTPAPHDSYSVLSVSSSGKYVAIVWPDIPSFAVYKANDWSVVDSGTGKLFAWDTCRDRYALVESALAPRMPLVVKGGSSKKAKEAAAAAAQAAAAAASAASAATVQVRILLDDGTAHVLQRSIDGRNEPVIGLHGGALLGVTYRTSRRISPLTATAISTVQSMPLSGFGGSGSSFASDDPFSSKEGPPQNFQLYSWETYQPVSGLLAQPEWTVWDQTVEYCAFAYQQYIVISSLRPQFRYLGDVSIPFATGAVWHRRQLFVSTPTTIECVFVDAGVAAIDIETKRIKQEMKAREAQSRAAEEHGDLALITVEAPQVTVSEKVSLRPPMLQVVRLASFQYAPSIPPFIVPKQSKFDGDDSVFQKELDDRRYAEVAVAGGGVSVAVTRFPPEQKRPIGPLVVVGVRDGVLWLVDRYMCAHALSLSHPGIRCRCLAAYGDPVSAVKWATRLGREHHDDLAQFMLGMGYATEALHLPGISKRLEFDLAMQSNDLKRALACLLTMSNSRDVGQETAAADATDVTQILSLAVAKQAKQESLTDAVQGIVKFVKEFFDLIDAADATGQSDIAREVLKRLAAAASVKGALHGQMLRGLALRLGNHGELTRLSGLVSNLITAGHGREAAFAAAVLGDNALMEKAWQDTGMLAEAVLHAQAHGRPSLRNLVITWNKMLQKELDHTPTVKTDAAAAFLASLEDPKLTSLGETEKKPPIEILPPGMPPLSAPPIVIKKAGAKPGLPNAAKASNGPIGAPMAQGAPMAHGTPGPQGVPMNQVTPSQGSHDEARPSDATVADAAAAVAEGTAAPPAAEGTSAPPAAEGTATPSSEEAKAAPGNEEGTSNPINEEATAAAVSVAAGSPDSAAAPAADTSSDAPAVNPTEDTVSAPSTEAPPELTDKPSSAEASLPPPPSVSGV

SEQ ID NO: 173041 - protein, 1321 aa, Zea Mays
MRFSFYPFATFCADSKGKPTEAIRGGSVKQVSFYDDDVRFWQHWRNCSAAAEAPTAVSQQSSTFIAPAPSTRGRHFVVICCENKVIFLDLVTMRGRDVPKQELDNRSLLCMEFLSRTSSSDAPLVAFGSSDGVIRVLSMLTWKLVRRYTGGHKGAIACLMTYMSAAGEVHLVSGGSDGLLILWSADHIHDSRELVPKISMKAHDGGVVAVELSRVMGSAPQLITIGADKTLAIWDTVTFKEIRRIKPVPKLACHSVASWCHPRAPNLDILTCVKDSHIWAIEHPTYSALTRPLCELSSLVPPQVLALHKKLRVYCMVAHPLQPHLVATGTNIGIILSEFDPRALPAIAPLPTPTGNKEHSAVYIVERELKLLNFQLSNTANPSLGNAGVASDAGRSMNNSIEQLIVKQTKKHISTPAPHDSYSVLSVSSSGKYVAIVWPDIPSFAVYKANDWSVVDSGTGKLFAWDTCRDRYALVESALAPRMPLVVKGGSSKKAKEAAAAAAQAAAAAASAASAATVQVRILLDDGTAHVLQRSIDGRNEPVIGLHGGALLGVTYRTSRRISPLTATAISTVQSMPLSGFGGSGSSFASDDPFSSKEGPPQNFQLYSWETYQPVSGLLAQPEWTVWDQTVEYCAFAYQQYIVISSLRPQFRYLGDVSIPFATGAVWHRRQLFVSTPTTIECVFVDAGVAAIDIETKRIKQEMKAREAQSRAAEEHGDLALITVEAPQVTVSEKVSLRPPMLQVVRLASFQYAPSIPPFIVPKQSKFDGDDSVFQKELDDRRYAEVAVAGGGVSVAVTRFPPEQKRPIGPLVVVGVRDGVLWLVDRYMCAHALSLSHPGIRCRCLAAYGDPVSAVKWATRLGREHHDDLAQFMLGMGYATEALHLPGISKRLEFDLAMQSNDLKRALACLLTMSNSRDVGQETAAADATDVTQILSLAVAKQAKQESLTDAVQGIVKFVKEFFDLIDAADATGQSDIAREVLKRLAAAASVKGALHGQMLRGLALRLGNHGELTRLSGLVSNLITAGHGREAAFAAAVLGDNALMEKAWQDTGMLAEAVLHAQAHGRPSLRNLVITWNKMLQKELDHTPTVKTDAAAAFLASLEDPKLTSLGETEKKPPIEILPPGMPPLSAPPIVIKKAGAKPGLPNAAKASNGPIGAPMAQGAPMAHGTPGPQGVPMNQVTPSQGSHDEARPSDATVADAAAAVAEGTAAPPAAEGTSAPPAAEGTATPSSEEAKAAPGNEEGTSNPINEEATAAAVSVAAGSPDSAAAPAADTSSDAPAVNPTEDTVSAPSTEAPPELTDKPSSAEASLPPPPSVSGV

SEQ ID NO: 173042 - protein, 1106 aa, Zea Mays
MGSAPQLITIGADKTLAIWDTVTFKEIRRIKPVPKLACHSVASWCHPRAPNLDILTCVKDSHIWAIEHPTYSALTRPLCELSSLVPPQVLALHKKLRVYCMVAHPLQPHLVATGTNIGIILSEFDPRALPAIAPLPTPTGNKEHSAVYIVERELKLLNFQLSNTANPSLGNAGVASDAGRSMNNSIEQLIVKQTKKHISTPAPHDSYSVLSVSSSGKYVAIVWPDIPSFAVYKANDWSVVDSGTGKLFAWDTCRDRYALVESALAPRMPLVVKGGSSKKAKEAAAAAAQAAAAAASAASAATVQVRILLDDGTAHVLQRSIDGRNEPVIGLHGGALLGVTYRTSRRISPLTATAISTVQSMPLSGFGGSGSSFASDDPFSSKEGPPQNFQLYSWETYQPVSGLLAQPEWTVWDQTVEYCAFAYQQYIVISSLRPQFRYLGDVSIPFATGAVWHRRQLFVSTPTTIECVFVDAGVAAIDIETKRIKQEMKAREAQSRAAEEHGDLALITVEAPQVTVSEKVSLRPPMLQVVRLASFQYAPSIPPFIVPKQSKFDGDDSVFQKELDDRRYAEVAVAGGGVSVAVTRFPPEQKRPIGPLVVVGVRDGVLWLVDRYMCAHALSLSHPGIRCRCLAAYGDPVSAVKWATRLGREHHDDLAQFMLGMGYATEALHLPGISKRLEFDLAMQSNDLKRALACLLTMSNSRDVGQETAAADATDVTQILSLAVAKQAKQESLTDAVQGIVKFVKEFFDLIDAADATGQSDIAREVLKRLAAAASVKGALHGQMLRGLALRLGNHGELTRLSGLVSNLITAGHGREAAFAAAVLGDNALMEKAWQDTGMLAEAVLHAQAHGRPSLRNLVITWNKMLQKELDHTPTVKTDAAAAFLASLEDPKLTSLGETEKKPPIEILPPGMPPLSAPPIVIKKAGAKPGLPNAAKASNGPIGAPMAQGAPMAHGTPGPQGVPMNQVTPSQGSHDEARPSDATVADAAAAVAEGTAAPPAAEGTSAPPAAEGTATPSSEEAKAAPGNEEGTSNPINEEATAAAVSVAAGSPDSAAAPAADTSSDAPAVNPTEDTVSAPSTEAPPELTDKPSSAEASLPPPPSVSGV

SEQ ID NO: 173043 - protein, 145 aa, Zea Mays
MLRLRAFRPTSDKVVKIQLHPTHPWLVTADANDRVSVWDWEHRQVIYELKAGGVDERRLVGAKLEKLAEGDDSKGKPTEAIRGGRFPFMMMMFAFGNIGVIALLLLRPQLQSVSSLPRSLHLHLRHEEGTLLSFVVRTKSYFWTW

SEQ ID NO: 173044 - protein, 746 aa, Zea Mays
MPLSGFGGSGSSFASDDPFSSKEGPPQNFQLYSWETYQPVSGLLAQPEWTVWDQTVEYCAFAYQQYIVISSLRPQFRYLGDVSIPFATGAVWHRRQLFVSTPTTIECVFVDAGVAAIDIETKRIKQEMKAREAQSRAAEEHGDLALITVEAPQVTVSEKVSLRPPMLQVVRLASFQYAPSIPPFIVPKQSKFDGDDSVFQKELDDRRYAEVAVAGGGVSVAVTRFPPEQKRPIGPLVVVGVRDGVLWLVDRYMCAHALSLSHPGIRCRCLAAYGDPVSAVKWATRLGREHHDDLAQFMLGMGYATEALHLPGISKRLEFDLAMQSNDLKRALACLLTMSNSRDVGQETAAADATDVTQILSLAVAKQAKQESLTDAVQGIVKFVKEFFDLIDAADATGQSDIAREVLKRLAAAASVKGALHGQMLRGLALRLGNHGELTRLSGLVSNLITAGHGREAAFAAAVLGDNALMEKAWQDTGMLAEAVLHAQAHGRPSLRNLVITWNKMLQKELDHTPTVKTDAAAAFLASLEDPKLTSLGETEKKPPIEILPPGMPPLSAPPIVIKKAGAKPGLPNAAKASNGPIGAPMAQGAPMAHGTPGPQGVPMNQVTPSQGSHDEARPSDATVADAAAAVAEGTAAPPAAEGTSAPPAAEGTATPSSEEAKAAPGNEEGTSNPINEEATAAAVSVAAGSPDSAAAPAADTSSDAPAVNPTEDTVSAPSTEAPPELTDKPSSAEASLPPPPSVSGV

SEQ ID NO: 173045 - protein, 67 aa, Zea Mays
MSEDRCRREEQGTRAARAAPRRRSPCTPPPSGASRPRTRTWTGPCRRSTRACHTARSGSRSKSAERL

SEQ ID NO: 173046 - protein, 85 aa, Zea Mays
MNIESQMKSERTARWNLLVWGPAGSSSYAHFANQRVTWKEARACKRFRVQTEAALACSPMKSMTRRPSLARPVGLPKNVLPYGGA

SEQ ID NO: 173047 - protein, 370 aa, Zea Mays
MVLVRDLPAQWCSFEISLYAMLDSLPDWLRRAPRLPRLPPRRSPPPLRRARPKLYLKLAAERQDPNPNSTMRPSLMRSTSQLLRRRSYSSASGQPERKVAILGAAGGIGQPLSLLMKLNPLVSSLSLYDIAGTPGVAADVSHINSPALVKGFMGDEQLGEALEGSDVVIIPAGVPRKPGMTRDDLFNINAGIVKNLSTAIAKYCPNALVNMISNPVNSTVPIAAEVFKKAGTYDEKKLFGVTTLDVVRAKTFYAGKANLPVTDVNVPVVGGHAGITILPLFSQATPATNALSDEDIKALTKRTQDGGTEVVEAKAGKGSATLSMAYAGAVFADACLKGLNGVPDIVECSFVQSTVTELPFFASKAWEEWS

SEQ ID NO: 173048 - protein, 238 aa, Zea Mays
MFGSCSDMMNQSLFLVGEIGGNDYNGPLLSGVPMEKIRAITPSVVAKISSTISELIRLGAKTLVVPGNLPIGCIPDYLMIFKSNKEEDYEPQTGCLRWMNEFSQYHNKVLVEQLKKLRKLHPGATIIYADYYGAAMEIFLSPEQYGIEYPLVACCGGEGPYGVSPSTGCGFGEYKLCDNPEKYGSWDGFHPSESAYRAIAMGLLLGSYTRPSITSTTTSCPQLMELGSSAEYKPLYDL

SEQ ID NO: 173049 - protein, 369 aa, Zea Mays
MHSSASARGGRGLLLPAAAAAVVVLLLGAVAPAAGCYPRVFNFGDSLADTGNYPFVYGNDSAKLRPPYGETFFHRATGRASNGRLVVDFIADTLGLPFVRPYLSGRSAEDFAGGANFAVGGATALSPDFFRARGFHNMGNRVDLDMEMKWFRGLLDLLCPGNLAGCSDMMNQSLFLVGEIGGNDYNGPLLSGVPFEEIRAITPSVVAKISSTISELIQLGAKTLVVPGNLPIGCVPKYLMIFKSNKKEDYDPQTGCLRWMNEFSQYHNKLLVEQLKKLRRLHPGVTIIYADYYGAAMEIFLSPERYGIEYPLVACCGAEGPYGVSPTTSCGLGEYKLCDNPERYGSWDGLHPTESAYKVIAMGLLLGQI

SEQ ID NO: 173050 - protein, 295 aa, Zea Mays
MSYNQMRLLSLGTIAVHKQSTALLRKLLVYYYGCSDIMSQSLFIVGEIGGNDYNLPMLSRVPIEKIRSFTPNVIAKISSTITELIGLGAKTLVVPGNLPIGCVPKYLLIFKSDDKEDYEPETGCLRWMNEFSEYHNKLLLEELEKLRKTNPTVTIIYADYYGAAMEIFRSPERFGIEEPLVACCGGEGPYGVSLSTACGYGDYKVCDNPDKYGSWDGFHPSEAAYKAIAMGLLRGTYTQPSIASTTSSCPQLTELGSSVEYKSCGTVLHFSAVAQAIGWVLFYLLFFSHSARIRN

SEQ ID NO: 173051 - protein, 445 aa, Zea Mays
MAGVAKAGDVVGEIGVLCYRPQLFTVRTKSLCQLLRMNRTAFLSLVQSNVADGTIIMNNLMQLLKQQKDNSVMVGVLKEIENMLARGRLDLPITLCFAVNKGDDLMLHQLLKRGLDPNESDNNGHTALHIAASKGDEQCVKLLLDYGADPNARDSEGKVPLWEALCEKHNAVIELLVESGAELSSGDTALYACIAVEENDAELLENVIRYGGNINNPTKDGTTPLHRAVCDGNVQMVELLLEHGADVDKQDSNGWSPRDLADQQGHDDIQALFKSRKAHRKHASNGRVAPMLIGRFNSEPSMPDMSHENARVRSEVVPQKLLRKRVSFQNSLFGVISSSHAHQDTGRLLSKGLAGTEGPNCRHDSLIRVTISCPEKGGNAAGKLVRLPRSMAELLELGAKKFGIKPGKVLTVGGAEIDEVELIRDGDHILLVSDEWVPDVEQIRP

SEQ ID NO: 173052 - protein, 845 aa, Zea Mays
MAGWGPSRLPTCGPWGRGVALERELSRDGSHYSISSGILPSLGARSNRRAKLRPFIVSPYDRRYRCWETFLIILVIYSAWVSPFEFGFIRKPAGALAAVDNVVNAFFAVDIILTFFVAYLDRMTYLLEDDPKRIAWRYTTSWFILDVASTIPSEFARKILPPNLRSYGFFNMLRLWRLRRVSSLFARYPDPTDTWIGNSMPDFHQRGLWIRYVVSVYWSITTLTTVGYGDLHAENTREMIFNIFYMLFNLGLTAYLIGNMTNLVVHGTSRTRKYRDTIQAATSFALRNQLPSRLQDQMISHLSLKFRTDSEGLQQQETLDALPKAIRSGISQYLFFNLVQKVYLFEGVSNDLIFQLVSEMKAEYFPPREDVILQNEAPTDFYILVTGSAELIELRNGGEQMAGVAKAGDVVGEIGVLCYRPQLFTVRTKSLCQLLRMNRTAFLSLVQSNVADGTIIMNNLMQLLKQQKDNSVMVGVLKEIENMLARGRLDLPITLCFAVNKGDDLMLHQLLKRGLDPNESDNNGHTALHIAASKGDEQCVKLLLDYGADPNARDSEGKVPLWEALCEKHNAVIELLVESGAELSSGDTALYACIAVEENDAELLENVIRYGGNINNPTKDGTTPLHRAVCDGNVQMVELLLEHGADVDKQDSNGWSPRDLADQQGHDDIQALFKSRKAHRKHASNGRVAPMLIGRFNSEPSMPDMSHENARVRSEVVPQKLLRKRVSFQNSLFGVISSSHAHQDTGRLLSKGLAGTEGPNCRHDSLIRVTISCPEKGGNAAGKLVRLPRSMAELLELGAKKFGIKPGKVLTVGGAEIDEVELIRDGDHILLVSDEWVPDVEQIRP

SEQ ID NO: 173053 - protein, 872 aa, Zea Mays
MAGWGPSRLPTCGPWGRGVALERELSRDGSHYSISSGILPSLGARSNRRAKLRPFIVSPYDRRYRCWETFLIILVIYSAWVSPFEFGFIRKPAGALAAVDNVVNAFFAVDIILTFFVAYLDRMTYLLEDDPKRIAWRYTTSWFILDVASTIPSEFARKILPPNLRSYGFFNMLRLWRLRRVSSLFARLEKDRHFNYFWVRCAKLICVTLFAVHCSACFYYLLADRYPDPTDTWIGNSMPDFHQRGLWIRYVVSVYWSITTLTTVGYGDLHAENTREMIFNIFYMLFNLGLTAYLIGNMTNLVVHGTSRTRKYRDTIQAATSFALRNQLPSRLQDQMISHLSLKFRTDSEGLQQQETLDALPKAIRSGISQYLFFNLVQKVYLFEGVSNDLIFQLVSEMKAEYFPPREDVILQNEAPTDFYILVTGSAMAGVAKAGDVVGEIGVLCYRPQLFTVRTKSLCQLLRMNRTAFLSLVQSNVADGTIIMNNLMQLLKQQKDNSVMVGVLKEIENMLARGRLDLPITLCFAVNKGDDLMLHQLLKRGLDPNESDNNGHTALHIAASKGDEQCVKLLLDYGADPNARDSEGKVPLWEALCEKHNAVIELLVESGAELSSGDTALYACIAVEENDAELLENVIRYGGNINNPTKDGTTPLHRAVCDGNVQMVELLLEHGADVDKQDSNGWSPRDLADQQGHDDIQALFKSRKAHRKHASNGRVAPMLIGRFNSEPSMPDMSHENARVRSEVVPQKLLRKRVSFQNSLFGVISSSHAHQDTGRLLSKGLAGTEGPNCRHDSLIRVTISCPEKGGNAAGKLVRLPRSMAELLELGAKKFGIKPGKVLTVGGAEIDEVELIRDGDHILLVSDEWVPDVEQIRP

SEQ ID NO: 173054 - protein, 795 aa, Zea Mays
MAGWGPSRLPTCGPWGRGVALERELSRDGSHYSISSGILPSLGARSNRRAKLRPFIVSPYDRRYRCWETFLIILVIYSAWVSPFEFGFIRKPAGALAAVDNVVNAFFAVDIILTFFVAYLDRMTYLLEDDPKRIAWRYTTSWFILDVASTIPSEFARKILPPNLRSYGFFNMLRLWRLRRVSSLFARLEKDRHFNYFWVRCAKLICVTLFAVHCSACFYYLLADRDTIQAATSFALRNQLPSRLQDQMISHLSLKFRTDSEGLQQQETLDALPKAIRSGISQYLFFNLVQKVYLFEGVSNDLIFQLVSEMKAEYFPPREDVILQNEAPTDFYILVTGSAELIELRNGGEQMAGVAKAGDVVGEIGVLCYRPQLFTVRTKSLCQLLRMNRTAFLSLVQSNVADGTIIMNNLMQLLKQQKDNSVMVGVLKEIENMLARGRLDLPITLCFAVNKGDDLMLHQLLKRGLDPNESDNNGHTALHIAASKGDEQCVKLLLDYGADPNARDSEGKVPLWEALCEKHNAVIELLVESGAELSSGDTALYACIAVEENDAELLENVIRYGGNINNPTKDGTTPLHRAVCDGNVQMVELLLEHGADVDKQDSNGWSPRDLADQQGHDDIQALFKSRKAHRKHASNGRVAPMLIGRFNSEPSMPDMSHENARVRSEVVPQKLLRKRVSFQNSLFGVISSSHAHQDTGRLLSKGLAGTEGPNCRHDSLIRVTISCPEKGGNAAGKLVRLPRSMAELLELGAKKFGIKPGKVLTVGGAEIDEVELIRDGDHILLVSDEWVPDVEQIRP

SEQ ID NO: 173055 - protein, 767 aa, Zea Mays
MTYLLEDDPKRIAWRYTTSWFILDVASTIPSEFARKILPPNLRSYGFFNMLRLWRLRRVSSLFARLEKDRHFNYFWVRCAKLICVTLFAVHCSACFYYLLADRYPDPTDTWIGNSMPDFHQRGLWIRYVVSVYWSITTLTTVGYGDLHAENTREMIFNIFYMLFNLGLTAYLIGNMTNLVVHGTSRTRKYRDTIQAATSFALRNQLPSRLQDQMISHLSLKFRTDSEGLQQQETLDALPKAIRSGISQYLFFNLVQKVYLFEGVSNDLIFQLVSEMKAEYFPPREDVILQNEAPTDFYILVTGSAELIELRNGGEQMAGVAKAGDVVGEIGVLCYRPQLFTVRTKSLCQLLRMNRTAFLSLVQSNVADGTIIMNNLMQSFDIEKLLKQQKDNSVMVGVLKEIENMLARGRLDLPITLCFAVNKGDDLMLHQLLKRGLDPNESDNNGHTALHIAASKGDEQCVKLLLDYGADPNARDSEGKVPLWEALCEKHNAVIELLVESGAELSSGDTALYACIAVEENDAELLENVIRYGGNINNPTKDGTTPLHRAVCDGNVQMVELLLEHGADVDKQDSNGWSPRDLADQQGHDDIQALFKSRKAHRKHASNGRVAPMLIGRFNSEPSMPDMSHENARVRSEVVPQKLLRKRVSFQNSLFGVISSSHAHQDTGRLLSKGLAGTEGPNCRHDSLIRVTISCPEKGGNAAGKLVRLPRSMAELLELGAKKFGIKPGKVLTVGGAEIDEVELIRDGDHILLVSDEWVPDVEQIRP

SEQ ID NO: 173056 - protein, 380 aa, Zea Mays
MLWLSSGAASSSLCSSGGSLIRTLGPGIDGWEVSLKGMMSIVVLLGLVITSIYWGVNKFVLNDPSLPKADRKKKKEKPKLGMKESLKVLLSSRYVRDLATLVVAYGISINLVEVTWKSKLKAQFPSPNEYSSFMGDFSTATGIATFTMMLLGRIILRKFGWGVAAKITPTVLLLTGVGFFSLILFGQPLTPMLATMGMTPLLAAVYVGAMQNIFSKSAKYSLFDPCKEMAYIPLDEDMKVKGKAAIDVVCNPLGKSGGALIQQFMILTFGSLANSTPYLGGILLVIVLAWLGAASSLDKQFSSLAKQDMEREKAAQDQGKLERSLLSKPAEGGTGDVLVEQQTNGSATSKATGTESSPSNSSLPPPPPPPPPPPNSIDRS

SEQ ID NO: 173057 - protein, 477 aa, Zea Mays
MESRALLHARPAALPHRAGLRLHLPLLRPRAVSRSPAAKPALQSPLLASRGPFLQRHDAVLGNGFVKRRAASAGGDVSFRAQAAASAAVPAPQPEESTKKLLGIDVKTLKKIVPLGLMFFCILFNYTILRDTKDVLVVTAKGSSAEIIPFLKTWVNLPMAIGFMLLYTKLSNVLSRDALFYTVIFPFIAFFGAFAFVLYPLRDVIHPTALADKLLAALGPSFLGPVAILRIWSFCLFYVMAELWGSVVISVLFWGFANQITTVDEAKEFYPLFGLGANIALIFSGRTVKYFSNLRRTLGPGIDGWEVSLKGMMSIVVLLGLVITSIYWGVNKFVLNDPSLPKADRKKKKEKPKLGMKESLKVLLSSRYVRDLATLVVAYGISINLVEVTWKSKLKAQFPSPNEYSSFMGDFSTATGIATFTMMLLGRIILRKFGWGVAAKITPTVLLLTGVGFFSLILFGQPLTPMLATMGKRKGSH

SEQ ID NO: 173058 - protein, 338 aa, Zea Mays
MLWLSSGAASSSLCSSGGSLIRTLGPGIDGWEVSLKGMMSIVVLLGLVITSIYWGVNKFVLNDPSLPKADRKKKKEKPKLGMKESLKVLLSSRYVRDLATLVVAYGISINLVEVTWKSKLKAQFPSPNEYSSFMGDFSTATGIATFTMMLLGRIILRKFGWGVAAKITPTVLLLTGVGFFSLILFGQPLTPMLATMGMTPLLAAVYVGAMQNIFSKSAKYSLFDPCKEMAYIPLDEDMKVKGKAAIDVVCNPLGKSGGALIQQFMILTFGSLANSTPYLGGILLVIVLAWLGAASSLDKQFSSLAKQDMEREKAAQDQGKLERSLLTCGFKPARNLPL

SEQ ID NO: 173059 - protein, 343 aa, Zea Mays
MMSIVVLLGLVITSIYWGVNKFVLNDPSLPKADRKKKKEKPKLGMKESLKVLLSSRYVRDLATLVVAYGISINLVEVTWKSKLKAQFPSPNEYSSFMGDFSTATGIATFTMMLLGRIILRKFGWGVAAKITPTVLLLTGVGFFSLILFGQPLTPMLATMGMTPLLAAVYVGAMQNIFSKSAKYSLFDPCKEMAYIPLDEDMKVKGKAAIDVVCNPLGKSGGALIQQFMILTFGSLANSTPYLGGILLVIVLAWLGAASSLDKQFSSLAKQDMEREKAAQDQGKLERSLLSKPAEGGTGDVLVEQQTNGSATSKATGTESSPSNSSLPPPPPPPPPPPNSIDRS

SEQ ID NO: 173060 - protein, 147 aa, Zea Mays
MSSTTSIQPSASSGGASTSADENARPPDSARSILSLQLDQRSLHFSVSAWVLIVALIGIFPLAPHSLQYKGYRLSLLGTTCTTGYALFALYRLPRAGNMQAVQVWCHHVTASKDFIPFMYCLMFSTSKLHLKLFSGSCFGTCNLLGT

SEQ ID NO: 173061 - protein, 87 aa, Zea Mays
MGQPFHNIDNVIKASAIMVHEQGHFSPRKVTVSTSGFVPQLGTQLLAAASLNARTDEVRNWIMTINRKENLNLLLGTLRVDDAKSLL

SEQ ID NO: 173062 - protein, 74 aa, Zea Mays
MLWKCLYGNNVWAHFYDELAGLNKDFRKMITEHADLKALIVKDIHRIEPVRTTVCVSNEVGWAMKCQFCFTRSG

SEQ ID NO: 173063 - protein, 76 aa, Zea Mays
MGQPFHNIDNVIKASAIMVHEQGHFSPRKVTVSTSGFVPQLGTQLLAAASLNARTDEWMMPKVFCRATPRDPMQAR

SEQ ID NO: 173064 - protein, 76 aa, Zea Mays
MLWKCLYGNNVWAHFYDELAGLNKDFRKMITEHADLKALIVKDIHRIEPVRGRTTVCVSNEVGWAMKCQFCFTRSG

SEQ ID NO: 173065 - protein, 58 aa, Zea Mays
MLWKCLYGNNVWAHFYDELAGLNKDFRKMITEHADLKALIVKDIHRIEPGQDNCLCFK

SEQ ID NO: 173066 - protein, 86 aa, Zea Mays
MLWKCLYGNNVWAHFYDELAGLNKDFRKMITEHADLKALIVKDIHRIEPVRGRTTVCVSNEVGWAMKCQFCFTRRAWVNHFTISTM

SEQ ID NO: 173067 - protein, 79 aa, Zea Mays
MLWKCLYGNNVWAHFYDELAGLNKDFRKMITEHADLKALIVKDIHRIEPVRGRTTVCVSNEVGWAMKCQFCFTRRLETG

SEQ ID NO: 173068 - protein, 68 aa, Zea Mays
MEFNSNETNGPSGLNKDFRKMITEHADLKALIVKDIHRIEPVRGRTTVCVSNEVGWAMKCQFCFTRSG

SEQ ID NO: 173069 - protein, 76 aa, Zea Mays
MAQLPTTSSPMVWEKAARGAPGGATSFEAEQRSHLEASCTMETGSLRDGDAVSFGIEMPEKKDIYVESFDASVGSF

SEQ ID NO: 173070 - protein, 281 aa, Zea Mays
MDKLREMEMFGDDGRDGVWTVMANVMDPESLHRAFDGCAGVFHTSAFVDPGGMSGYTKHMATLEAQAAERVIEACVRTGSVRKCVFTSSLLACVWRQNNPHGRRCPTIIDESCWSDESFCRDNKLWFALGKTAAEKAAWRAARGRDLKLVTICPALVTGPGFRRRNSTASIAYLKGARAMLADGLLATANVETVAEAHVLAYEAMGDNTAGGRYICYDHVVKRPEEFAELERQLGLPGGAAAAQGSDDRPARFELCKRKLSRLMSSRRRCTYDTYYSVAFD

SEQ ID NO: 173071 - protein, 1499 aa, Zea Mays
MEDPLATAPPPRRPHRERRHRRKASDAAAAALAAQAASSYGDVFGGPPRFAPPPAAFAAGAGTAPADYAEVFGGVAASCSIPYLDLPPAVASGVGAGGYGEIFGRFDFGEFAVPYEDMLSGAESLVEEIASPSGSSRSSTRKESVRLDTEPSVPYQQVPDAGSGRHSDDEQFHAVSFPPDGEQTFTMSYNKITRGRPDDLVEMTACIVEPSISYVVDSCNLSNDLEMDYVPVMDSGTNANVVKEKMNLPNIADSGLECADSAYVVDHQQHIPTCPPISENICQDENYNKRSSTHSVSSEEAPSPDYPFLRVSNINLPAAPIKVQPPPMPPSKLLNKKGSNENGDSDVNPNSVAAAAAMKEAMQFAEARLKAAKELMEIKGVSSKFRKRPVHHKSTKSTEIKEYNAPEKAHLFEEKLDMRRLVKEENQSNDIALLDKNTGSVALEHSDHDKKGIISPGKPKEMMQNDSELEQLGEWTSDADFYELVSNDQKCRTNGAECRDNGLMTNSLAKLDRSENEKLGGFAGESKRSRKLWDCNNRTCLRTEHVNQGKDGIGSLEVEQKNTRSPEVTEHVNQQKDAIDSVETEQKTPRSPEVSPCNERVTYEEPTKGNNDLMTNSSTKLDQSVKVKEGGFAGEPKRFRKLWGSNSTTVLRTVHVNQEKDAIAFVEAEEKAPRFSEVPPCDERVASQEATDSRLEQCLGVGNSLGHENGAQFETSCVNNLPSEVHADPEISSSFSECCSSGSHANGNENHSESTAQETAFVGNSSQNVNNKEELELPCIDGLPCTSARNQILQEHFNVINADENKEIEVKISKLEGSSKSYLNFEEEKLPSFVDESCLQNKNERENEVNSESPIHEKMTKFGFEDKGDAYEDFQEGDMDQVAGSAEEEGYVTSGSGIANESEYEEAEDDIFVGDMESNVRTCGSFDKDPYQRQESQGSWGPQDLDNRMDKISDTISHGKERETKESLLENVEKTAAEEVLNHDCREGQKSMETVDYIWPKYVCAEFNVSSDKDGNVFDSADELISDNGSDYAMNMSTMSNNLQASFSEACSSIQHLSQKPQSISAEKADESTPVLGNLEVDCGEAGRKIPSENCEVSEEGQNIGIEMEERKREDNISNIRFMDQQPFYLDSDIRPKAAEGTASETILKSREEDLNVQRTKVRNDIKEAEGELEKEVKVVEEKEKECKMGKEKEQDKERQRRELEEQKEREMERAKDRLAVQRATREAHERAFAEVRAKAERIALERITSARQRASAEAHEKEEKATAQAALEQASREARMKAERAAVERATAEARERAIEKAKAAADAKERIGKFRSSFKDSFKAPNQDNQHEASSQKTAYNKHGKSMDSCVEVEVESALRHKAKLERHQRTAERAAKALAEKNMRDMLVQREHAEKHRLAEFLDPEVKRWSNGKEGNLRALLSTLQYILGSDSGWQAVPLTDLITAAGVKKAYRKATLCVHPDKVQQRGATIRQKYICEKVFDLLKEAWNKYNSEER

SEQ ID NO: 173072 - protein, 1402 aa, Zea Mays
MEDPLATAPPPRRPHRERRHRRKASDAAAAALAAQAASSYGDVFGGPPRFAPPPAAFAAGAGTAPADYAEVFGGVAASCSIPYLDLPPAVASGVGAGGYGEIFGRFDFGEFAVPYEDMLSGAESLVEEIASPSGSSRSSTRKESVRLDTEPSVPYQQVPDAGSGRHSDDEQFHAVSFPPDGEQTFTMSYNKITRGRPDDLVEMTACIVEPSISYVVDSCNLSNDLEMDYVPVMDSGTNANVVKEKMNLPNIADSGLECADSAYVVDHQQHIPTCPPISENICQDENYNKRSSTHSVSSEEAPSPDYPFLRVSNINLPAAPIKVQPPPMPPSKLLNKKGSNENGDSDVNPNSVAAAAAMKEAMQFAEARLKAAKELMEIKGVSSKFRKRPVHHKSTKSTEIKEYNAPEKAHLFEEKLDMRRLVKEENQSNDIALLDKNTGSVALEHSDHDKKGIISPGKPKEMMQNDSELEQLGEWTSDADFYELVSNDQKCRTNGAECRDNGLMTNSLAKLDRSENEKLGGFAGESKRSRKLWDCNNRTCLRTEHVNQGKDGIGSLEVEQKNTRSPEVTEHVNQQKDAIDSVETEQKTPRSPEVSPCNERVTYEEPTKGNNDLMTNSSTKLDQSVKVKEGGFAGEPKRFRKLWGSNSTTVLRTVHVNQEKDAIAFVEAEEKAPRFSEVPPCDERVASQEATDSRLEQCLGVGNSLGHENGAQFETSCVNNLPSEVHADPEISSSFSECCSSGSHANGNENHSESTAQETAFVGNSSQNVNNKEELELPCIDGLPCTSARNQILQEHFNVINADENKEIEVKISKLEGSSKSYLNFEEEKLPSFVDESCLQNKNERENEVNSESPIHEKMTKFGFEDKGDAYEDFQEGDMDQVAGSAEEEGYVTSGSGIANESEYEEAEDDIFVGDMESNVRTCGSFDKDPYQRQESQGSWGPQDLDNRMDKISDTISHGKERETKESLLENVEKTAAEEVLNHDCREGQKSMETVDYIWPKYVCAEFNVSSDKDGNVFDSADELISDNGSDYAMNMSTMSNNLQASFSEACSSIQHLSQKPQSISAEKADESTPVLGNLEVDCGEAGRKIPSENCEVSEEGQNIGIEMEERKREDNISNIRFMDQQPFYLDSDIRPKAAEGTASETILKSREEDLNVQRTKVRNDIKEAEGELEKEVKVVEEKEKECKMGKEKEQDKERQRRELEEQKEREMERAKDRLAVQRATREAHERAFAEVRAKAERIALERITSARQRASAEAHEKEEKATAQAALEQASREARMKAERAAVERATAEARERAIEKAKAAADAKERIGKFRSSFKDSFKAPNQDNQHEASSQKTAYNKHGKSMDSCVEVVEVESALRHKAKLERHQRTAERAAKALAEKNMRDMLVQREHAEKHTG

SEQ ID NO: 173073 - protein, 299 aa, Zea Mays
MATCVLLMLREVSPWALASVVASVSLLWLVVWTLEWAWWTPWRLERALRVQGLKGTRYRLFTGDLRETARANREARKKPLPLGSHDIAPRVQPMHHSTIKEYGKLSFTWFGPTPRVMIPDPELVKEVLSNKFGHFGKPRSNRIGRLLANGLVNHDGEKWAKHRRILNPAFHHEKIKGMMPVFSTCCIEMITRWDNSMPSEGSSEIDVWPEFQNLTGDVISRTAFGSNYQEGRRIFELQGELAERLIQSVQTIFIPGYWFVTLSSNSQQQRLIHVQLHIQAFQYMKICFINYSLALFMVL

SEQ ID NO: 173074 - protein, 90 aa, Zea Mays
MTMLGAAAAAEEEEEEAIAAGAGMAVVKRSSNPYLDFRSSMVEMVVERRIASVGKMEELLGSYLSLNSPRHHPAILAAFEDVWEAVFGEE

SEQ ID NO: 173075 - protein, 638 aa, Zea Mays
MEASSSLRFQVSRFSSFKIWLCLFLVLVLQNCSPALSDSPYLVGMGSYDITGPAADVNMMGYANAEQIASGIHFRLKARAFIVAEPNGKRVVFVNLDACMASQLVTIKVLERLKARYGDLYNENNVAISGIHTHAGPGGYLQYVVYIVTSLGFVRQSFDVIVNGIEQCIVEAHNNLHPGKIYVNKGDLLDASVNRSPSAYLNNPAEERGKYKYNVDKEMTLIKFVDDESGPIGSFNWFATHGTSMSRTNSLISGDNKGAAARFMEDWAEQNGIPKQAAHVNHDGLESSHMTSRLPRRVSPIIPEPNEITDDLVQLASSYEASGGRRLSSSSITKRIRSTQQNRPKFVSAFCQSNCGDVSPNVLGTFCIDTGLPCDFNHSTCNGKNELCYGRGPGYPDEFESTHIIGNRQFQKAVDLFSSASEEIQGKIDYRHTYLDFSKLEVNVRTSTGSQQVVKTCPAAMGFAFAAGTTDGPGAFDFKQGDVKGNPFWRLVRNLLKTPGKEQVECQAPKPILLDTGEMKEPYDWAPAILPIQIIRIGQLAILCVPGEFTTMAGRRLRDAVKAVLTSDNSGEFNNIHVVLAGLTNTYSQYITTFEEYEIQRYETPGCIIASCFNRRGPLIFSVTKGQFYIFFIFGCKC

SEQ ID NO: 173076 - protein, 403 aa, Zea Mays
MGRMNYAMDEGQDPDEFESTHIIGNRQFQKAVDLFSSASEEIQGKIDYRHTYLDFSKLEVNVRTSTGSQQVVKTCPAAMGFAFAAGTTDGPGAFDFKQGDVKGNPFWRLVRNLLKTPGKEQVECQAPKPILLDTGEMKEPYDWAPAILPIQIIRIGQLAILCVPGEFTTMAGRRLRDAVKAVLTSDNSGEFNNIHVVLAGLTNTYSQYITTFEEYEIQRYEGASTLYGPHTLSAYIQEFQKLATAMVANKEVPTNFQPPDMLDKQIGLLPGVVFDSTPPGVEFGDVSSDVPASSTFRKGSVVNATFYSACPRNDLLTDGTFALVEKLDGSNSWVPAYDDDDWSLRFKWSRPSKLSPRSFATLEWTVPGDAPSGVYRLRHFGASKPLIGSIKHFTGTSRAFAVR

SEQ ID NO: 173077 - protein, 773 aa, Zea Mays
MEASSSLRFQVSRFSSFKIWLCLFLVLVLQNCSPALSDSPYLVGMGSYDITGPAADVNMMGYANAEQIASGIHFRLKARAFIVAEPNGKRVVFVNLDACMASQLVTIKVLERLKARYGDLYNENNVAISGIHTHAGPGGYLQYVVYIVTSLGFVRQSFDVIVNGIEQCIVEAHNNLHPGKIYVNKGDLLDASVNRSPSAYLNNPAEERGKYKYNVDKEMTLIKFVDDESGPIGSFNWFATHGTSMSRTNSLISGDNKGAAARFMEDWAEQNGIPKQAAHVNHDGLESSHMTSRLPRRVSPIIPEPNEITSGGRRLSSSSITKRIRSTQQNRPKFVSAFCQSNCGDVSPNVLGTFCIDTGLPCDFNHSTCNGKNELCYGRGPGYPDEFESTHIIGNRQFQKAVDLFSSASEEIQGKIDYRHTYLDFSKLEVNVRTSTGSQQVVKTCPAAMGFAFAAGTTDGPGAFDFKQGDVKGNPFWRLVRNLLKTPGKEQVECQAPKPILLDTGEMKEPYDWAPAILPIQIIRIGQLAILCVPGEFTTMAGRRLRDAVKAVLTSDNSGEFNNIHVVLAGLTNTYSQYITTFEEYEIQRYEGASTLYGPHTLSAYIQEFQKLATAMVANKEVPTNFQPPDMLDKQIGLLPGVVFDSTPPGVEFGDVSSDVPASSTFRKGSVVNATFYSACPRNDLLTDGTFALVEKLDGSNSWVPAYDDDDWSLRFKWSRPSKLSPRSFATLEWTVPGDAPSGVYRLRHFGASKPLIGSIKHFTGTSRAFAVR

SEQ ID NO: 173078 - protein, 771 aa, Zea Mays
MEASSSLRFQVSRFSSFKIWLCLFLVLVLQNCSPALSDSPYLVGMGSYDITGPAADVNMMGYANAEQIASGIHFRLKARAFIVAEPNGKRVVFVNLDACMASQLVTIKVLERLKARYGDLYNENNVAISGIHTHAGPGGYLQYVVYIVTSLGFVRQSFDVIVNGIEQCIVEAHNNLHPGKIYVNKGDLLDASVNRSPSAYLNNPAEERGKYKYNVDKEMTLIKFVDDESGPIGSFNWFATHGTSMSRTNSLISGDNKGAAARFMEDWAEQNGIPKQAAHVNHDGLESSHMTSRLPRRVSPIIPEPNEISGRRLSSSSITKRIRSTQQNRPKFVSAFCQSNCGDVSPNVLGTFCIDTGLPCDFNHSTCNGKNELCYGRGPGYPDEFESTHIIGNRQFQKAVDLFSSASEEIQGKIDYRHTYLDFSKLEVNVRTSTGSQQVVKTCPAAMGFAFAAGTTDGPGAFDFKQGDVKGNPFWRLVRNLLKTPGKEQVECQAPKPILLDTGEMKEPYDWAPAILPIQIIRIGQLAILCVPGEFTTMAGRRLRDAVKAVLTSDNSGEFNNIHVVLAGLTNTYSQYITTFEEYEIQRYEGASTLYGPHTLSAYIQEFQKLATAMVANKEVPTNFQPPDMLDKQIGLLPGVVFDSTPPGVEFGDVSSDVPASSTFRKGSVVNATFYSACPRNDLLTDGTFALVEKLDGSNSWVPAYDDDDWSLRFKWSRPSKLSPRSFATLEWTVPGDAPSGVYRLRHFGASKPLIGSIKHFTGTSRAFAVR

SEQ ID NO: 173079 - protein, 384 aa, Zea Mays
MDLPLYHKVYRQAATTTSSPSGPPHGTPLPAHSPTPALHRERRHRAVRRYPLVVVHTTRHWPTPGTGRLGIPAGKAKASAREASRVPCFVLTCRGPSASPVSARPVPAPSEPAAAEAMQHEPWRPGAEPAAGAGAGPAPTTVDEASMERSMSFVKALQELKNLRPQLYSASEYCEKSYLRSEQKVLDNMKDYAVRALVNAVDHLGTVAYKLTDLYEEQASEITTLELKVACLNQQVRTCQTYTDKEGLRQQQMMGAARRHHNHYIVPYAGNKRMQAFSVTQADADFDPTPRPFSSARTLEWHLVSEKNSKTSRPDQSEIALGETKTTKASSSGFRLLGKESSASPLSRNVQSNITSLDIVSAGMKVNLQHDTKSTSFHYVKISP

SEQ ID NO: 173080 - protein, 226 aa, Zea Mays
MKDYAVRALVNAVDHLGTVAYKLTDLYEEQASEITTLELKVACLNQQVRTCQTYTDKEGLRQQQMMGAARRHHNHYIVPYAGNKRMQAFSVTQADADFDPTPRPFSSARTLEWHLVSEKNSKTSRPDQSEIALGETKTTKASSSGFRLLGKESSASPLSRNVQSNITSLDIVSAGMKPTTRHLSSFSSLDNPRGRQIQKAPLRTKSMLAAFFVKHRSAKMKNVSVR

SEQ ID NO: 173081 - protein, 175 aa, Zea Mays
MEKALLRYCASFLTPDDKRLILRIKDQAKQMIQSEGDQSLVVTICLEVVGAERAVVVQLVGPVRRAAARGGRSPRAEEVRREERAEAEDAAGQQVLQRGEVLVLVLEQGLGLGALHEEHIGMVLQAMVQMGVLVPTGDMTVVRRTAQFFLNRVPNSTKEGERNGNRRTGFQKAIN

SEQ ID NO: 173082 - protein, 370 aa, Zea Mays
MANAADDPMADEARVEDAFTQEITDYSYVPRYHVLSWMETVEGMVAGVAALPPVYLILNRDLLETGWGWKRLVPYRPGYVEWHVFKKYLGDYFDHNREAFLCAEQKPDPFGWIIAKKSALIAAAKLCLKMEKALLRYCASFLTPDDKRLILRIKDQAKQMIQSEGDQSLVVTICLEVVGAERAVVVQLVGPVRRAAARGGRSPRAEEVRREERAEAEDAAGQQVLQRGEVLVLVLEQGLGLGALHEEHIGMVLQAMVQMGVLVPTGDMTVVRRTAQFFLNSFQECLTAQRKEREMATAELGFKKQLTKEEKFEKRKQRLAAIGEDLLAIAADQPFRFPATFTFVVRAFSVLDGTGKGLDPRFHITEIAKP

SEQ ID NO: 173083 - protein, 421 aa, Zea Mays
MANAADDPMADEARVEDAFTQEITDYSYVPRYHVLSWMETVEGMVAGVAALPPVYLILNRDLLETGWGWKRLVPYRPGYVEWHVFKKYLGDYFDHNREAFLCAEQKPDPFGWIIAKKSALIAAAKLCLKMEKALLRYCASFLTPDDKRLILRIKDQAKQMIQSEGDQSLVVTICLEVVGAERAVVVQLVGPVRRAAARGGRSPRAEEVRREERAEAEDAAGQQVLQRGEVLVLVLEQGLGLGALHEEHIGMVLQAMVQMGVLVPTGDMTVVRRTAQFFLNSFQECLTAQRKEREMATAELGFKKQLTKEEKFEKRKQRLAAIGEDLLAIAADQPFRFPATFTFVVRAFSVLDGTGKGLDPRFHITEIAKPNAKELLRFNDAGVEIVVKERIEGDWRSLLSIEQFTHACFLFFGRDNVCNHE

SEQ ID NO: 173084 - protein, 273 aa, Zea Mays
MANAADDPMADEARVEDAFTQEITDYSYVPRYHVLSWMETVEGMVAGVAALPPVYLILNRDLLETGWGWKRLVPYRPGYVEWHVFKKYLGDYFDHNREAFLCAEQKPDPFGWIIAKKSALIAAAKLCLKMEKALLRYCASFLTPDDKRLILRIKDQAKQMIQSEGDQSLVVTICLEVCLLQTTPNCCQTSARDSSPPRVSLSMSLSACNTWRTGPENFLRMSSEPCSPPVRCSVPAAHLPLLLPTSPPPSLNSKPSTSRSYCRGRSRGRDDER

SEQ ID NO: 173085 - protein, 295 aa, Zea Mays
MANAADDPMADEARVEDAFTQEITDYSYVPRYHVLSWMETVEGMVAGVAALPPVYLILNRDLLETGWGWKRLVPYRPGYVEWHVFKKYLGDYFDHNREAFLCAEQKPDPFGWIIAKKSALIAAAKLCLKMEKALLRYCASFLTPDDKRLILRIKDQAKQMIQSEGDQSLVVTICLEVLQAMVQMGVLVPTGDMTVVRRTAQFFLNSFQECLTAQRKEREMATAELGFKKQLTKEEKFEKRKQRLAAIGEDLLAIAADQPFRFPATFTFVVRAFSVLDGTGKGLDPRFHITEIAKP

SEQ ID NO: 173086 - protein, 166 aa, Zea Mays
MEKALLRYCASFLTPDDKRLILRIKDQAKQMIQSEGDQSLVVTICLEVLQAMVQMGVLVPTGDMTVVRRTAQFFLNSFQECLTAQRKEREMATAELGFKKQLTKEEKFEKRKQRLAAIGEDLLAIAADQPFRFPATFTFVVRAFSVLDGTGKGLDPRFHITEIAKP

SEQ ID NO: 173087 - protein, 323 aa, Zea Mays
MANAADDPMADEARVEDAFTQEITDYSYVPRYHVLSWMETVEGMVAGVAALPPVYLILNRDLLETGWGWKRLVPYRPGYVEWHVFKKYLGDYFDHNREAFLCAEQKPDPFGWIIAKKSALIAAAKLCLKMEKALLRYCASFLTPDDKRLILRIKDQAKQMIQSEGDQSLVVTICLEVLQAMVQMGVLVPTGDMTVVRRTAQFFLNSFQECLTAQRKEREMATAELGFKKQLTKEEKFEKRKQRLAAIGEDLLAIAADQPFRFPATFTFVVRAFSVLDGTGKGLDPRFHITEIAKPNAKELLRFNDAGVEIVVKVCGETCVFLL

SEQ ID NO: 173088 - protein, 332 aa, Zea Mays
MANAADDPMADEARVEDAFTQEITDYSYVPRYHVLSWMETVEGMVAGVAALPPVYLILNRDLLETGWGWKRLVPYRPGYVEWHVFKKYLGDYFDHNREAFLCAEQKPDPFGWIIAKKSALIAAAKLCLKMEKALLRYCASFLTPDDKRLILRIKDQAKQMIQSEGDQSLVVTICLEVLQAMVQMGVLVPTGDMTVVRRTAQFFLNSFQECLTAQRKEREMATAELGFKKQLTKEEKFEKRKQRLAAIGEDLLAIAADQPFRFPATFTFVVRAFSDGTGKGLDPRFHITEIAKPNAKELLRFNDAGVEIVVKASFNIWSKLLTYLYDSTSPKG

SEQ ID NO: 173089 - protein, 206 aa, Zea Mays
MLTEIYDTCSCLLMMPVWCQGYLLETGWGWKRLVPYRPGYVEWHVFKKYLGDYFDHNREAFLCAEQKPDPFGWIIAKKSALIAAAKLVLQAMVQMGVLVPTGDMTVVRRTAQFFLNSFQECLTAQRKEREMATAELGFKKQLTKEEKFEKRKQRLAAIGEDLLAIAADQPFRFPATFTFVVRAFSVLDGTGKGLDPRFHITEIAKP

SEQ ID NO: 173090 - protein, 296 aa, Zea Mays
MLTEIYDTCSCLLMMPVWCQGYLLETGWGWKRLVPYRPGYVEWHVFKKYLGDYFDHNREAFLCAEQKPDPFGWIIAKKSALIAAAKLCLKMEKALLRYCASFLTPDDKRLILRIKDQAKQMIQSEGDQSLVVTICLEVLQAMVQMGVLVPTGDMTVVRRTAQFFLNSFQECLTAQRKEREMATAELGFKKQLTKEEKFEKRKQRLAAIGEDLLAIAADQPFRFPATFTFVVRAFSVLDGTGKGLDPRFHITEIAKPCVERHVYSSYDEFLRLHEGKPVLMGLIVEPDLVLLSMSRH

SEQ ID NO: 173091 - protein, 150 aa, Zea Mays
MLTEIYDTCSCLLMMPVWCQGYLLETGWGWKRLVPYRPGYVEWHVFKKYLGDYFDHNREAFLCAEQKPDPFGWIIAKKSALIAAAKLCLKMEKALLRYCASFLTPDDKRLILRIKDQAKQMIQSEGDQSLVVTICLEQWFKWVSLFLLEI

SEQ ID NO: 173092 - protein, 234 aa, Zea Mays
MLTEIYDTCSCLLMMPVWCQGYLLETGWGWKRLVPYRPGYVEWHVFKKYLGDYFDHNREAFLCAEQKPDPFGWIIAKKSALIAAAKLVLQAMVQMGVLVPTGDMTVVRRTAQFFLNSFQECLTAQRKEREMATAELGFKKQLTKEEKFEKRKQRLAAIGEDLLAIAADQPFRFPATFTFVVRAFSVLDGTGKGLDPRFHITEIAKPNAKELLRFNDAGVEIVVKVCGETCVFLL

SEQ ID NO: 173093 - protein, 433 aa, Zea Mays
MANAADDPMADEARVEDAFTQEITDYSYVPRYHVLSWMETVEGMVAGVAALPPVYLILNRALLRCPCQDLLETGWGWKRLVPYRPGYVEWHVFKKYLGDYFDHNREAFLCAEQKPDPFGWIIAKKSALIAAAKLLQINLHHCKNNQNAFQCLKMEKALLRYCASFLTPDDKRLILRIKDQAKQMIQSEGDQSLVVTICLEVVGAERAVVVQLVGPVRRAAARGGRSPRAEEVRREERAEAEDAAGQQVLQRGEVLVLVLEQGLGLGALHEEHIGMVLQAMVQMGVLVPTGDMTVVRRTAQFFLNSFQECLTAQRKEREMATAELGFKKQLTKEEKFEKRKQRLAAIGEDLLAIAADQPFRFPATFTFVVRAFSVLDGTGKGLDPRFHITEIAKPNAKELLRFNDAGVEIVVKASFNIWSKLLTYLYDSTSPKG

SEQ ID NO: 173094 - protein, 331 aa, Zea Mays
MLTEIYDTCSCLLMMPVWCQGYLLETGWGWKRLVPYRPGYVEWHVFKKYLGDYFDHNREAFLCAEQKPDPFGWIIAKKSALIAAAKLCLKMEKALLRYCASFLTPDDKRLILRIKDQAKQMIQSEGDQSLVVTICLEVVGAERAVVVQLVGPVRRAAARGGRSPRAEEVRREERAEAEDAAGQQVLQRGEVLVLVLEQGLGLGALHEEHIGMVLQAMVQMGVLVPTGDMTVVRRTAQFFLNSFQECLTAQRKEREMATAELGFKKQLTKEEKFEKRKQRLAAIGEDLLAIAADQPFRFPATFTFVVRAFSVLDGTGKGLDPRFHITEIAKP

SEQ ID NO: 173095 - protein, 245 aa, Zea Mays
MANAADDPMADEARVEDAFTQEITDYSYVPRYHVLSWMETVEGMVAGVAALPPVYLILNRDLLETGWGWKRLVPYRPGYVEWHVFKKYLGDYFDHNREAFLCAEQKPDPFGWIIAKKSALIAAAKLVLQAMVQMGVLVPTGDMTVVRRTAQFFLNSFQECLTAQRKEREMATAELGFKKQLTKEEKFEKRKQRLAAIGEDLLAIAADQPFRFPATFTFVVRAFSVLDGTGKGLDPRFHITEIAKP

SEQ ID NO: 173096 - protein, 356 aa, Zea Mays
MVPPTATAMPVFLSAAPPPFSTRRRRSRLPAISASLSPSPSSSEEPLLVRAARGEDGLPRPPAWMMRQAGRYMAEYQALAKRHPSFRERSENTDLIVEITLQPWRAFAPDGVILFSDILTPLPAIGVPFDISDSKGPVIQSPVRSEGQVRELVPIDLDMLQFVGESLKILRNEIDGKAALLGFVGAPWTIATYIVEGGMTNTYTNIKNMCHTAPDVLRCLLSHLAEAISDYIIYQVNSGAQCIQIFDSWGGQLPPHVWEQWSKPYIKKIVNRIKKECPHVPLVLYINGNGGLLERMKDTRVDVIGLDWTVDMADGRKRLGNGISVQGNVDPAFLFSPLPVLTDEIRRPSFFYLYLD

SEQ ID NO: 173097 - protein, 143 aa, Zea Mays
MVQMGVLVPTGDMTVVRRTAQFFLNSFQECLTAQRKEREMATAELGFKKQLTKEEKFEKRKQRLAAIGEDLLAIAADQPFRFPATFTFVVRAFSVLDGTGKGLDPRFHITEIAKPNAKELLRFNDAGVEIVVKVCGETCVFLL

SEQ ID NO: 173098 - protein, 141 aa, Zea Mays
MVQMGVLVPTGDMTVVRRTAQFFLNSFQECLTAQRKEREMATAELGFKKQLTKEEKFEKRKQRLAAIGEDLLAIAADQPFRFPATFTFVVRAFSDGTGKGLDPRFHITEIAKPNAKELLRFNDAGVEIVVKVCGETCVFLL

SEQ ID NO: 173099 - protein, 163 aa, Zea Mays
MVQMGVLVPTGDMTVVRRTAQFFLNSFQECLTAQRKEREMATAELGFKKQLTKEEKFEKRKQRLAAIGEDLLAIAADQPFRFPATFTFVVRAFSDGTGKGLDPRFHITEIAKPNAKELLRFNDAGVEIVVKRIEGDWRSLLSIEQFTHACFLFFGRDNVCNHE

SEQ ID NO: 173100 - protein, 157 aa, Zea Mays
MTNTYTNIKNMCHTAPDVLRCLLSHLAEAISDYIIYQVNSGAQCIQIFDSWGGQLPPHVWEQWSKPYIKKIVNRIKKECPHVPLVLYINGNGGLLERMKDTRVDVIGLDWTVDMADGRKRLGNGISVQGNVDPAFLFSPLPVLTDEIRRLVKTKKFI

SEQ ID NO: 173101 - protein, 204 aa, Zea Mays
MTNTYTNIKNMCHTAPDVLRCLLSHLAEAISDYIIYQVNSGAQCIQIFDSWGGQLPPHVWEQWSKPYIKKIVNRIKKECPHVPLVLYINGNGGLLERMKDTRVDVIGLDWTVDMADGRKRLGNGISVQGNVDPAFLFSPLPVLTDEIRRVVKAAGTKGHILNLGHGVLQKTPEEAVAHFFDVTRSLRYDTHFQGSVAEGLQPVA

SEQ ID NO: 173102 - protein, 190 aa, Zea Mays
MVPPTATAMPVFLSAAPPPFSTRRRRSRLPAISASLSPSPSSSEEPLLVRAARGEDGLPRPPAWMMRQAGRYMAEYQALAKRHPSFRERSENTDLIVEITLQPWRAFAPDGVILFSDILTPLPAIGVPFDISDSKGPVIQSPVRSEGQVRELVPIDLDMLQFVGESLKILRNEDLWGPHGQLQLTLLKGG

SEQ ID NO: 173103 - protein, 1047 aa, Zea Mays
MGSLENGAGAGAAAAAGSYKRGPGPALRAGGARKARARSRLARFLLLEKVDYLQWIAAAAAFFFVAIVFVAFLPGSGVIERPRLTLPSSRAGEGRVGGGVEDRSGLVRWEAGAAFEFEPARLREKWARERREEAKSLAELGTPVRRLGVRKPRLAMVFGDLYPSAMQLQMVSVASVLEAMGYEMKVFSLEDGPCGNIWGAIGVPVSILPEDANLPISVDWLDYDGILVNSIEARPVFSSLLHEPFKSIPIIWTVHEYSLAHRAKEYNVSGMIQLINAWKDVFSRTNVIVFPNYILPVMYAAFDSGNYFVIPGPPSEAFQVDSFIAKSYHEDVKISLGLNPKDFLIAIVGNSFSYGDNLMEEALVLQALSPLLQRYRSENSAQSELKVKIFTGNITEKHRMALESVALSVGFPRGAVEHVAAEDKDNLLGTADLVIYYSCLEEQLFPSVLVQAMSLEKLVIAPDLAIIRKHINDGVNGLLFPRKNIGMLAQVLLRAVSNSKVSLSGQKIASAGKAHAKNLMASETIEGYAMLLKNVVKLPTDALSPLTADEIPLALKQEWKWHLFDDVKHLHRVNTSLSGYKILQKLEQEWHSNQMENSSLSTKNINDAFSAIAWEEQRVNEVMDIKRKMEEDELKDRNDQPHGTWEEVYRNVKRVERLKNELHERDDKELERTGQPLCIYEPFFGEGTWPFLHQSSLYRGVGLSSKGRRPGADDIDASSRLPLLNNVYYRDILGEFGAFFALANRIDRIHKNSWIGFQSWRATARKANLSTNAESAILEAIQSQKHRDSFYFWVRMDQDPRNHANKDFWSFCDVINAGNCRLAVLEAFQRMYGVHLDRDLDTLLHMPNDGDTWSVMQSWVLPTRSFLEFVMFSRMFVDALDAQMYDKHHQTGHCILSLHKDQHCYSRLLELIVNVWAFHSARRMVYVNPATGQMQEQHHLSGRRGQMSVQFFSYATLKSMDEELAEEFDLDHPDRRWLWPQTGEVFWQGLYERERSMRQHEKERRKQQSREKIQRIKSRARQKTLGKYIKPPPDDTVVSNDTTTVDL

SEQ ID NO: 173104 - protein, 879 aa, Zea Mays
MGSLENGAGAGAAAAAGSYKRGPGPALRAGGARKARARSRLARFLLLEKVDYLQWIAAAAAFFFVAIVFVAFLPGSGVIERPRLTLPSSRAGEGRVGGGVEDRSGLVRWEAGAAFEFEPARLREKWARERREEAKSLAELGTPVRRLGVRKPRLAMVFGDLYPSAMQLQMVSVASVLEAMGYEMKVFSLEDGPCGNIWGAIGVPVSILPEDANLPISVDWLDYDGILVNSIEARPVFSSLLHEPFKSIPIIWTVHEYSLAHRAKEYNVSGMIQLINAWKDVFSRTNVIVFPNYILPVMYAAFDSGNYFVIPGPPSEAFQVDSFIAKSYHEDVKISLGLNPKDFLIAIVGNSFSYGDNLMEEALVLQALSPLLQRYRSENSAQSELKVKIFTGNITEKHRMALESVALSVGFPRGAVEHVAAEDKDNLLGTADLVIYYSCLEEQLFPSVLVQAMSLEKLVIAPDLAIIRKHINDGVNGLLFPRKNIGMLAQVLLRAVSNSKVSLSGQKIASAGKAHAKNLMASETIEGYAMLLKNVVKLPTDALSPLTADEIPLALKQEWKWHLFDDVKHLHRVNTSLSGYKILQKLEQEWHSNQMENSSLSTKNINDAFSAIAWEEQRVNEVMDIKRKMEEDELKDRNDQPHGTWEEVYRNVKRVERLKNELHERDDKELERTGQPLCIYEPFFGEGTWPFLHQSSLYRGVGLSSKGRRPGADDIDASSRLPLLNNVYYRDILGEFGAFFALANRIDRIHKNSWIGFQSWRATARKANLSTNAESAILEAIQSQKHRDSFYFWVRMDQDPRNHANKDFWSFCDVINAGNCRLAVLEAFQRMYGVHLDRDLDTLLHMPNDGDTWSVMQSWVLPTRSFLEFVMFSRYGFCF

SEQ ID NO: 173105 - protein, 768 aa, Zea Mays
MFDLDHVSVASYSLLHEPFKSIPIIWTVHEYSLAHRAKEYNVSGMIQLINAWKDVFSRTNVIVFPNYILPVMYAAFDSGNYFVIPGPPSEAFQVDSFIAKSYHEDVKISLGLNPKDFLIAIVGNSFSYGDNLMEEALVLQALSPLLQRYRSENSAQSELKVKIFTGNITEKHRMALESVALSVGFPRGAVEHVAAEDKDNLLGTADLVIYYSCLEEQLFPSVLVQAMSLEKLVIAPDLAIIRKHINDGVNGLLFPRKNIGMLAQVLLRAVSNSKVSLSGQKIASAGKAHAKNLMASETIEGYAMLLKNVVKLPTDALSPLTADEIPLALKQEWKWHLFDDVKHLHRVNTSLSGYKILQKLEQEWHSNQMENSSLSTKNINDAFSAIAWEEQRVNEVMDIKRKMEEDELKDRNDQPHGTWEEVYRNVKRVERLKNELHERDDKELERTGQPLCIYEPFFGEGTWPFLHQSSLYRGVGLSSKGRRPGADDIDASSRLPLLNNVYYRDILGEFGAFFALANRIDRIHKNSWIGFQSWRATARKANLSTNAESAILEAIQSQKHRDSFYFWVRMDQDPRNHANKDFWSFCDVINAGNCRMFVDALDAQMYDKHHQTGHCILSLHKDQHCYSRLLELIVNVWAFHSARRMVYVNPATGQMQEQHHLSGRRGQMSVQFFSYATLKSMDEELAEEFDLDHPDRRWLWPQTGEVFWQGLYERERSMRQHEKERRKQQSREKIQRIKSRARQKTLGKYIKPPPDDTVVSNDTTTVDL

SEQ ID NO: 173106 - protein, 211 aa, Zea Mays
MSLEKLVIAPDLAIIRKHINDGVNGLLFPRKNIGMLAQVLLRAVSNSKVSLSGQKIASAGKAHAKNLMASETIEGYAMLLKNVVKLPTDALSPLTADEIPLALKQEWKWHLFDDVKHLHRVNTSLSGYKILQKLEQEWHSNQMENSSLSTKNINDAFSAIAWEEQRVNEVMDIKRKMEEDEVKCKCCISNKSLHSHSLFLSLSFSFFNALK

SEQ ID NO: 173107 - protein, 821 aa, Zea Mays
MFDLDHVSVASYSLLHEPFKSIPIIWTVHEYSLAHRAKEYNVSGMIQLINAWKDVFSRTNVIVFPNYILPVMYAAFDSGNYFVIPGPPSEAFQVDSFIAKSYHEDVKISLGLNPKDFLIAIVGNSFSYGDNLMEEALVLQALSPLLQRYRSENSAQSELKVKIFTGNITEKHRMALESVALSVGFPRGAVEHVAAEDKDNLLGTADLVIYYSCLEEQLFPSVLVQAMSLEKLVIAPDLAIIRKHINDGVNGLLFPRKNIGMLAQVLLRAVSNSKVSLSGQKIASAGKAHAKNLMASETIEGYAMLLKNVVKLPTDALSPLTADEIPLALKQEWKWHLFDDVKHLHRVNTSLSGYKILQKLEQEWHSNQMENSSLSTKNINDAFSAIAWEEQRVNEVMDIKRKMEEDELKDRNDQPHGTWEEVYRNVKRVERLKNELHERDDKELERTGQPLCIYEPFFGEGTWPFLHQSSLYRGVGLSSKGRRPGADDIDASSRLPLLNNVYYRDILGEFGAFFALANRIDRIHKNSWIGFQSWRATARKANLSTNAESAILEAIQSQKHRDSFYFWVRMDQDPRNHANKDFWSFCDVINAGNCRLAVLEAFQRMYGVHLDRDLDTLLHMPNDGDTWSVMQSWVLPTRSFLEFVMFSRMFVDALDAQMYDKHHQTGHCILSLHKDQHCYSRLLELIVNVWAFHSARRMVYVNPATGQMQEQHHLSGRRGQMSVQFFSYATLKSMDEELAEEFDLDHPDRRWLWPQTGEVFWQGLYERERSMRQHEKERRKQQSREKIQRIKSRARQKTLGKYIKPPPDDTVVSNDTTTVDL

SEQ ID NO: 173108 - protein, 236 aa, Zea Mays
MSIKLSYWERLAVLEAFQRMYGVHLDRDLDTLLHMPNDGDTWSVMQSWVLPTRSFLEFVMFSRMFVDALDAQMYDKHHQTGHCILSLHKDQHCYSRLLELIVNVWAFHSARRMVYVNPATGQMQEQHHLSGRRGQMSVQFFSYATLKSMDEELAEEFDLDHPDRRWLWPQTGEVFWQGLYERERSMRQHEKERRKQQSREKIQRIKSRARQKTLGKYIKPPPDDTVVSNDTTTVDL

SEQ ID NO: 173109 - protein, 625 aa, Zea Mays
MGSDLKEMKYRRRIGVEERPQCSDPRGGADWAALQQDPVELLRKLDELRDQITRSCNVVVGQPREHRRVSRRAVSMLPEHLEPPPLPGYHRSRYGGRYGHGLPPPSPYAPPRPEHGERYARQSSGHYRQYPPRHCENGGMGPGTYHHHGCACPHCLHGQRTFPQEENIPMARYFAGQHESYRLERSPSVSSDYDRGSVASSLYSHRSVSKMRAEYFRKKAEHICRPVDGAAPFSVCSSCYKLLLMPMEKCVGRKQNRFQCGSCCQIISLKHQEENGIPFALAPSSSLHAPEMEQSTSDQMRQDSVHQRHEDFNFMFNNSNDHCDMQNNMDFTDDNSLPSTASNDRIEIDKECGSTRSIQSKAEGLSFSPSRSVDIGSPKDILCERDKDSNVEPSSDGPLSPRSPTLEDKLVDPLCAQEKGNDEDDQGTAYRSNLTCKGEYDANDEYDGDVSTRSKPESNVNDKDTTEGETSCRNYKEDNCCNIEDSSKTYEQNSGEDDTSSLVDGNEKYESMNTKDDDSSPGGEDTCNRYEPKVEDDENCVLGAESISNNCDENNKDAIKTGSISERHEELIIEEENEKLQQAFIEDANSQAGSGSSINERTNSGFSRGSSEAGLDEDQSSTVHG

SEQ ID NO: 173110 - protein, 714 aa, Zea Mays
MGSDLKEMKYRRRIGVEERPQCSDPRGGADWAALQQDPVELLRKLDELRDQITRSCNVVVGQPREHRRVSRRAVSMLPEHLEPPPLPGYHRSRYGGRYGHGLPPPSPYAPPRPEHGERYARQSSGHYRQYPPRHCENGGMGPGTYHHHGCACPHCLHGQRTFPQEENIPMARYFAGQHESYRLERSPSVSSDYDRGSVASSLYSHRSVSKMRAEYFRKKAEHICRPVDGAAPFSVCSSCYKLLLMPMEKCVGRKQNRFQCGSCCQIISLKHQEENGIPFALAPSSSLHAPEMEQSTSDQMRQDSVHQRHEDFNFMFNNSNDHCDMQNNMDFTDDNSLPSTASNDRIEIDKECGSTRSIQSKAEGLSFSPSRSVDIGSPKDILCERDKDSNVEPSSDGPLSPRSPTLEDKLVDPLCAQEKGNDEDDQGTAYRSNLTCKGEYDANDEYDGDVSTRSKPESNVNDKDTTEGETSCRNYKEDNCCNIEDSSKTYEQNSGEDDTSSLVDGNEKYESMNTKDDDSSPGGEDTCNRYEPKVEDDENCVLGAESISNNCDENNKDAIKTGSISERHEELIIEEENEKLQQAFIEDANSQAGSGSSINERTNSGFSRGSSEAGLDEDQSSTGKSGDSSFFAGFLKKGFKDLSLLNKSMDSVKVSINGHPISERALKKAEKKAGPVDPGSYCHLLENLIIRWPEIVPVGILVFLSMAENCIKEI

SEQ ID NO: 173111 - protein, 503 aa, Zea Mays
MEQSTSDQMRQDSVHQRHEDFNFMFNNSNDHCDMQNNMDFTDDNSLPSTASNDRIEIDKECGSTRSIQSKAEGLSFSPSRSVDIGSPKDILCERDKDSNVEPSSDGPLSPRSPTLEDKLVDPLCAQEKGNDEDDQGTAYRSNLTCKGEYDANDEYDGDVSTRSKPESNVNDKDTTEGETSCRNYKEDNCCNIEDSSKTYEQNSGEDDTSSLVDGNEKYESMNTKDDDSSPGGEDTCNRYEPKVEDDENCVLGAESISNNCDENNKDAIKTGSISERHEELIIEEENEKLQQAFIEDANSQAGSGSSINERTNSGFSRGSSEAGLDEDQSSTGKSGDSSFFAGFLKKGFKDLSLLNKSMDSVKVSINGHPISERALKKAEKKAGPVDPGSYWYDYRAGFWGVMGRECIGIVPPFIREFNYPMARNCAGGDSGVFVNGRELHQRDLDLLVGRGLPRTSGKSYSLEMSGNVIDEDTGKKLRSLGKLAPTIEKLKRGFGMHVPEEFR

SEQ ID NO: 173112 - protein, 731 aa, Zea Mays
MGSDLKEMKYRRRIGVEERPQCSDPRGGADWAALQQDPVELLRKLDELRDQITRSCNVVVGQPREHRRVSRRAVSMLPEHLEPPPLPGYHRSRYGGRYGHGLPPPSPYAPPRPEHGERYARQSSGHYRQYPPRHCENGGMGPGTYHHHGCACPHCLHGQRTFPQEENIPMARYFAGQHESYRLERSPSVSSDYDRGSVASSLYSHRSVSKMRAEYFRKKAEHICRPVDGAAPFSVCSSCYKLLLMPMEKCVGRKQNRFQCGSCCQIISLKHQEENGIPFALAPSSSLHAPEMEQSTSDQMRQDSVHQRHEDFNFMFNNSNDHCDMQNNMDFTDDNSLPSTASNDRIEIDKECGSTRSIQSKAEGLSFSPSRSVDIGSPKDILCERDKDSNVEPSSDGPLSPRSPTLEDKLVDPLCAQEKGNDEDDQGTAYRSNLTCKGEYDANDEYDGDVSTRSKPESNVNDKDTTEGETSCRNYKEDNCCNIEDSSKTYEQNSGEDDTSSLVDGNEKYESMNTKDDDSSPGGEDTCNRYEPKVEDDENCVLGAESISNNCDENNKDAIKTGSISERHEELIIEEENEKLQQAFIEDANSQAGSGSSINERTNSGFSRGSSEAGLDEDQSSTGKSGDSSFFAGFLKKGFKDLSLLNKSMDSVKVSINGHPISERALKKAEKKAGPVDPGTTTVLVFGVSWDENVSALSLHLLENLIIRWPEIVPVGILVFLSMAENCIKEI

SEQ ID NO: 173113 - protein, 337 aa, Zea Mays
MTERQVAELGPGTACCGWNHCGRRLAAGAVDGSVSVYDSQPPPSFKWQAHEQAIVNVVWLPPEYGDAIACVCADGTLSLWEEVAADDQLPTWRNCKIFEDGNSHILNVHFGLHLGILKMVTAYSDGQVKVYELLDSLELDKWQLQAEFQNITDPISRFGKPACTSASIAWNPRRGGSQQASFAIGFNSDSPHFNSCKIWEFEEAHQRWLPLVELGSPEDTGDKVCAVAWAPNIGRPYEIIAVATCKGIAIWHIGLNADADGGPSTQNVALLNGHDGEGMFGCNDLITLGLSGSGHCLLPLNSLGGLICCHYVTGSLRPCMCCSLVRQGFLTCRWTRG

SEQ ID NO: 173114 - protein, 205 aa, Zea Mays
MVTAYSDGQVKVYELLDSLELDKWQLQAEFQNITDPISRFGKPACTSASIAWNPRRGGSQQASFAIGFNSDSPHFNSCKIWEFEEAHQRWLPLVELGSPEDTGDKVCAVAWAPNIGRPYEIIAVATCKGIAIWHIGLNADADGGPSTQNVALLNGHDGEVWQLEWDMGGMTLASTGGDGMVKLWQANLDGVWHEQAVLDCSGSHV

SEQ ID NO: 173115 - protein, 58 aa, Zea Mays
MREVNYRMYRTKIGQGTLAFTKQMLRVFILVELEEFDHLVAKLDHRSLEARKRITVYS

SEQ ID NO: 173116 - protein, 741 aa, Zea Mays
MSALQASLLLRPLPSPLPPRRRQPLPSAFASLPRGANAPRRAPLRLRALDPIAPQPDASEPPAAASSSAAEAEESESTTMTESTAQPATMSGKEELEDLVGKARAWAVAVAAAVVAAVRRFVDWVLSRNWMSWWPFWRSDHRLQGLIEEADANPNDAAKQSALLHELNKFSPEEVIKRFEQRSHAVDSKGAAEYLRALILTNTIADYLPDEQSGRSASLPALLQELKQRVSGNEDKPFMNPGISEKQPLHVVMVDPKSTGRSTRFAQEIVSTMLFTIAVGVMWVMGAAALQKYIGSLGGIGASGVGSSSSYSPKEMNKDIMPEKNVKTFKDVKGCDDAKKELEEVVEYLKNPSKFTRLGGKLPKGILLTGAPGTGKTLLAKAIAGEAGVPFFYRAGSEFEEMFVGVGARRVRSLFQAAKKKAPCIVFIDEIDAVGSTRKQWEGHTKKTLHQLLVEMDGFEQNEGIIVMAATNLADILDPALTRPGRFDRHIVVPSPDVRGRQEILELYLQDKPVANDVDINAIARSTPGFNGADLANLVNIAAIKAAVEGADKLNAVQLEFAKDRIIMGTERRSMFISDESRKLTAYHESGHAIVALNTQGAHPIHKATILPRGSALGMVTQLPSQDETSISKKQLLARLDVCMGGRVAEELIFGEDNVTTGARNDLHTATELAQYMVSNCGMSDAIGPVHVKERPSVEMQSRIDAEVVKLLREAYGRVKRLLKKGATHLRYIFHLGTISI

SEQ ID NO: 173117 - protein, 487 aa, Zea Mays
MGAAALQKYIGSLGGIGASGVGSSSSYSPKEMNKDIMPEKNVKTFKDVKGCDDAKKELEEVVEYLKNPSKFTRLGGKLPKGILLTGAPGTGKTLLAKAIAGEAGVPFFYRAGSEFEEMFVGVGARRVRSLFQAAKKKAPCIVFIDEIDAVGSTRKQWEGHTKKTLHQLLVEMDGFEQNEGIIVMAATNLADILDPALTRPGRFDRHIVVPSPDVRGRQEILELYLQDKPVANDVDINAIARSTPGFNGADLANLVNIAAIKAAVEGADKLNAVQLEFAKDRIIMGTERRSMFISDESRKLTAYHESGHAIVALNTQGAHPIHKATILPRGSALGMVTQLPSQDETSISKKQLLARLDVCMGGRVAEELIFGEDNVTTGARNDLHTATELAQYMVSNCGMSDAIGPVHVKERPSVEMQSRIDAEVVKLLREAYGRVKRLLKKHEKQLHALANALLERETLTADEINKVVHPYQEEPQFSFQDEEFALT

SEQ ID NO: 173118 - protein, 557 aa, Zea Mays
MKISSIPTKPVEGQKTGTSGLRKKVKVFQQENYLANWIQALFNSLPPEDYVGATLVLGGDGRYFNKEAAQIIIKIAAGNGVQKIIVGRNGLLSTPAVSAVIRKRKANGGFIMSASHNPGGPDNDWGIKFNYSSGQPAPETITDQIYGNTLSISEIKTADIPDTDLSSVGVVSYGDFAIEVIDPVSDYLELMENVFDFQLIKDLLSRPDFRFIFDAMHAITGAYAGPIFVEKLGADPDCILNGVPLEDFGNGHPDPNLTYAKELVFTMFGTHAPDFGAASDGDGDRNMILGKRFFITPSDSVAIIAANAQTAIPYFQFGTKGLARSMPTSGALDRVAEKLNVPFFEVPTGWKFFGNLMDAGKLSICGEESFGTGSDHIREKDGIWAVLAWLSILAHRNKDKKVGERLVSVEDIAMEHWKTYGRNFFSRYDYEACESHSANQMMDHLRDVMANSKPGEKYGNYTLQFADDFSYTDPVDGSTVSKQGLRFVFTDGSRIIFRLSGTGSAGATIRLYIEQFESDISKHSLDAQTALKPLIDLALSVSKLKDFTGREKPTVIT

SEQ ID NO: 173119 - protein, 400 aa, Zea Mays
MPTMHALRLCPLLSTIRSTPPRATAAARQGALFVARCSSAGTPSAAQALKISSIPTKPVEGQKTGTSGLRKKVKVFQQENYLANWIQALFNSLPPEDYVGATLVLGGDGRYFNKEAAQIIIKIAAGNGVQKIIVGRNGLLSTPAVSAVIRKRKANGGFIMSASHNPGGPDNDWGIKFNYSSGQPAPETITDQIYGNTLSISEIKTADIPDTDLSSVGVVSYGDFAIEVIDPVSDYLELMENVFDFQLIKDLLSRPDFRFIFDAMHAITGAYAGPIFVEKLGADPDCILNGVPLEDFGNGHPDPNLTYAKELVFTMFGTHAPDFGAASDGDGDRNMILGKRFFITPSDSVAIIAANAQTAIPYFQFGTKGLARSMPTSGALDRVAEKLNVPFFEAGNFLAT

SEQ ID NO: 173120 - protein, 317 aa, Zea Mays
MDCDSILCCSFQVKVFQQENYLANWIQALFNSLPPEDYVGATLVLGGDGRYFNKEAAQIIIKIAAGNGVQKIIVGRNGLLSTPAVSAVIRKRKFNYSSGQPAPETITDQIYGNTLSISEIKTADIPDTDLSSVGVVSYGDFAIEVIDPVSDYLELMENVFDFQLIKDLLSRPDFRFIFDAMHAITGAYAGPIFVEKLGADPDCILNGVPLEDFGNGHPDPNLTYAKELVFTMFGTHAPDFGAASDGDGDRNMILGKRFFITPSDSVAIIAANAQTAIPYFQFGTKGLARSMPTSGALDRVAEKLNVPFFEAGNFLAT

SEQ ID NO: 173121 - protein, 367 aa, Zea Mays
MENVFDFQLIKDLLSRPDFRFIFDAMHAITGAYAGPIFVEKLGADPDCILNGVPLEDFGNGHPDPNLTYAKELVFTMFGTHAPDFGAASDGDGDRNMILGKRFFITPSDSVAIIAANAQTAIPYFQFGTKGLARSMPTSGALDRVAEKLNVPFFEVPTGWKFFGNLMDAGKLSICGEESFGTGSDHIREKDGIWAVLAWLSILAHRNKDKKVGERLVSVEDIAMEHWKTYGRNFFSRYDYEACESHSANQMMDHLRDVMANSKPGEKYGNYTLQFADDFSYTDPVDGSTVSKQGLRFVFTDGSRIIFRLSGTGSAGATIRLYIEQFESDISKHSLDAQTALKPLIDLALSVSKLKDFTGREKPTVIT

SEQ ID NO: 173122 - protein, 241 aa, Zea Mays
MSASHNPGGPDNDWGIKFNYSSGQPAPETITDQIYGNTLSISEIKTADIPDTDLSSVGVVSYGDFAIEVIDPVSDYLELMENVFDFQLIKDLLSRPDFRFIFDAMHAITGAYAGPIFVEKLGADPDCILNGVPLEDFGNGHPDPNLTYAKELVFTMFGTHAPDFGAASDGDGDRNMILGKRFFITPSDSVAIIAANAQTAIPYFQFGTKGLARSMPTSGALDRVAEKLNVPFFEAGNFLAT

SEQ ID NO: 173123 - protein, 60 aa, Zea Mays
MNGTTKTKNLDANVDSLKVKLTAEDLKEIGSQIRAEDVAGGRQYNSYAHTSWKYADTPKK

SEQ ID NO: 173124 - protein, 237 aa, Zea Mays
MHLVNKLKAEYTSLSEEACELTQEKNELRDEKASLKSEVDNLNNQYQQRMRVLYPWVGMEPSVVMGPPPAYPYPVPVPIPSGAVPMHPQLQTYHFFHSQASGTIQNTCIPYMAYTQPCHPPTDQPSNQLNTPVAHSSSHRSNSPAQDCRSKSSTLQQPSCGVRSSDAGDIATDLELKTPGSSCQSHAEIAYNDSSSDLKTKKHCIKQINDCTLTESSSSSRCSSNGPPDVSNSAIDE

SEQ ID NO: 173125 - protein, 314 aa, Zea Mays
MSSSGPLPATGTHHGSQRAECKSQGSTSARKVQKADREKMRRDKLNEQFQDLGNALDRPRNDKATILGDTIQMLKDLTTQVNKLKAEYTSLSEEACELTQEKNELRDEKASLKSEVDNLNNQYQQRMRVLYPWVGMEPSVVMGPPPAYPYPVPVPIPSGAVPMHPQLQTYHFFHSQASGTIQNTCIPYMAYTQPCHPPTDQPSNQLNTPVAHSSSHRSNSPAQDCRSKSSTLQQPSCGVRSSDAGDIATDLELKTPGSSCQSHAEIAYNDSSSDLKTKKHCIKQINDCTLTESSSSSRCSSNGPPDVSNSAIDE

SEQ ID NO: 173126 - protein, 299 aa, Zea Mays
MSSSGPLPATGTHHGSQRAECKSQGSTSARKVQKADREKMRRDKLNEQFQDLGNALDPDRPRNDKATILGDTIQMLKDLTTQLTQEKNELRDEKASLKSEVDNLNNQYQQRMRVLYPWVGMEPSVVMGPPPAYPYPVPVPIPSGAVPMHPQLQTYHFFHSQASGTIQNTCIPYMAYTQPCHPPTDQPSNQLNTPVAHSSSHRSNSPAQDCRSKSSTLQQPSCGVRSSDAGDIATDLELKTPGSSCQSHAEIAYNDSSSDLKTKKHCIKQINDCTLTESSSSSRCSSNGPPDVSNSAIDE

SEQ ID NO: 173127 - protein, 58 aa, Zea Mays
MIIFNRALENMTRMILIFRCEFEDTTRQTQVMQQKLKCGFQLINNLVKPHKEKLHHQT

SEQ ID NO: 173128 - protein, 78 aa, Zea Mays
MLLSPKRKIDGGHVVGEVAKTGPSDLYLNESCEDEPIPFELLVPNYDCDEPDHNQGIQTKLLMRLQGCTCPPEPLMSN

SEQ ID NO: 173129 - protein, 57 aa, Zea Mays
MKLRLNASECSCMCYMFKSISYKFELVCLSLGYIWSTYLYFSLIVIMLRLNFSVFSL

SEQ ID NO: 173130 - protein, 785 aa, Zea Mays
MRDLSGFVETRQQLLSLKPNHRMNWIGFAVAHHLNSNSSKAVEVLEAYEGTLEDDYPPENERYEHNEMLLYKISLFEECGMLDRALEEMQKKESKIVDKLSFKEQMASVLFKLGRFDESESIYRSLLFMNPDNYKYFIAVQKCLGLYSDNGQYSAADVERLSALYNSLKEKYAWSSAVKRIPLDFLEGEKFQEAADNYVRPLLTKGVPSLFSDLSPLYEHPGKANILEQLFLKLEDSIRDSGCFPGCPQKEPPSTLLWTLFLISQHYDRRGQYDIALNKIDEAISHTPTVIDLYSVKGKILQHAGNFTAAAALADEARSMDLADRYLNSECVMQMLQADQVGLAEKTAVLFTKDGDQHNNLHDMQCMWYELASGESYYRQGDLGRALKNFLAVEKHYADMTEDQFDFHSYCLRKMTLRAYVSMLKFQDRLHAHEYFHKAAAGAIRCYMKLHDSPTKSSKEENDEISKLPPAQRKKLRQKQKKAEARAKREAEEKQEDETASSNSSKSGKKQHARPVDLDPHGEKLIQIEDPLAEATKYLKLLQNNSSDSLETHILSFELSMRKQKVLLAFQAVKQLIKLDEDNPDSHRCLIKFFHKINSLPGPVTDSEKLIWNVLEAERPDMRQLHGKSLVEVNRSFLEKHNASLMHRAAGAEMMYLLEPNKKMEAINLIEDSTNITSSGHSLLGPVKTWQIQDCIDVHKLLETVFGDQNVANRWKARCAEYFPYSTYFEGIKSAISTYAIDHSLESPPENGIASNPHLKSKDGEQGSLNGTLHIVDDLSSLSIR

SEQ ID NO: 173131 - protein, 493 aa, Zea Mays
MLSWMGKILQHAGNFTAAAALADEARSMDLADRYLNSECVMQMLQADQVGLAEKTAVLFTKDGDQHNNLHDMQCMWYELASGESYYRQGDLGRALKNFLAVEKHYADMTEDQFDFHSYCLRKMTLRAYVSMLKFQDRLHAHEYFHKAAAGAIRCYMKLHDSPTKSSKEENDEISKLPPAQRKKLRQKQKKAEARAKREAEEKQEDETASSNSSKSGKKQHARPVDLDPHGEKLIQIEDPLAEATKYLKLLQNNSSDSLETHILSFELSMRKQKVLLAFQAVKQLIKLDEDNPDSHRCLIKFFHKINSLPGPVTDSEKLIWNVLEAERPDMRQLHGKSLVEVNRSFLEKHNASLMHRAAGAEMMYLLEPNKKMEAINLIEDSTNITSSGHSLLGPVKTWQIQDCIDVHKLLETVFGDQNVANRWKARCAEYFPYSTYFEGIKSAISTYAIDHSLESPPENGIASNPHLKSKDGEQGSLNGTLHIVDDLSSLSIR

SEQ ID NO: 173132 - protein, 858 aa, Zea Mays
MGSSLPPKEANLFKVIVKSYETKQYKKGLKAADSILKKFPEHGETLSMKGLTLNCMDRKSEAYELVRRGLKAQMRDLSGFVETRQQLLSLKPNHRMNWIGFAVAHHLNSNSSKAVEVLEAYEGTLEDDYPPENERYEHNEMLLYKISLFEECGMLDRALEEMQKKESKIVDKLSFKEQMASVLFKLGRFDESESIYRSLLFMNPDNYKYFIAVQKCLGLYSDNGQYSAADVERLSALYNSLKEKYAWSSAVKRIPLDFLEGEKFQEAADNYVRPLLTKGVPSLFSDLSPLYEHPGKANILEQLFLKLEDSIRDSGCFPGCPQKEPPSTLLWTLFLISQHYDRRGQYDIALNKIDEAISHTPTVIDLYSVKGKILQHAGNFTAAAALADEARSMDLADRYLNSECVMQMLQADQVGLAEKTAVLFTKDGDQHNNLHDMQCMWYELASGESYYRQGDLGRALKNFLAVEKHYADMTEDQFDFHSYCLRKMTLRAYVSMLKFQDRLHAHEYFHKAAAGAIRCYMKLHDSPTKSSKEENDEISKLPPAQRKKLRQKQKKAEARAKREAEEKQEDETASSNSSKSGKKQHARPVDLDPHGEKLIQIEDPLAEATKYLKLLQNNSSDSLETHILSFELSMRKQKVLLAFQAVKQLIKLDEDNPDSHRCLIKFFHKINSLPGPVTDSEKLIWNVLEAERPDMRQLHGKSLVEVNRSFLEKHNASLMHRAAGAEMMYLLEPNKKMEAINLIEDSTNITSSGHSLLGPVKTWQIQDCIDVHKLLETVFGDQNVANRWKARCAEYFPYSTYFEGIKSAISTYAIDHSLESPPENGIASNPHLKSKDGEQGSLNGTLHIVDDLSSLSIR

SEQ ID NO: 173133 - protein, 901 aa, Zea Mays
MGSSLPPKEANLFKVIVKSYETKQYKKGLKAADSILKKFPEHGETLSMKGLTLNCMDRKSEAYELVRRGLKNDLKSHVCWHVYGLLYRSDREYREAIKCYRNALRIDPDNIEILRDLSLLQAQMRDLSGFVETRQQLLSLKPNHRMNWIGFAVAHHLNSNSSKAVEVLEAYEGTLEDDYPPENERYEHNEMLLYKISLFEECGMLDRALEEMQKKESKIVDKLSFKEQMASVLFKLGRFDESESIYRSLLFMNPDNYKYFIAVQKCLGLYSDNGQYSAADVERLSALYNSLKEKYAWSSAVKRIPLDFLEGEKFQEAADNYVRPLLTKGVPSLFSDLSPLYEHPGKANILEQLFLKLEDSIRDSGCFPGCPQKEPPSTLLWTLFLISQHYDRRGQYDIALNKIDEAISHTPTVIDLYSVKGKILQHAGNFTAAAALADEARSMDLADRYLNSECVMQMLQADQVGLAEKTAVLFTKDGDQHNNLHDMQCMWYELASGESYYRQGDLGRALKNFLAVEKHYADMTEDQFDFHSYCLRKMTLRAYVSMLKFQDRLHAHEYFHKAAAGAIRCYMKLHDSPTKSSKEENDEISKLPPAQRKKLRQKQKKAEARAKREAEEKQEDETASSNSSKSGKKQHARPVDLDPHGEKLIQIEDPLAEATKYLKLLQNNSSDSLETHILSFELSMRKQKVLLAFQAVKQLIKLDEDNPDSHRCLIKFFHKINSLPGPVTDSEKLIWNVLEAERPDMRQLHGKSLVEVNRSFLEKHNAGAEMMYLLEPNKKMEAINLIEDSTNITSSGHSLLGPVKTWQIQDCIDVHKLLETVFGDQNVANRWKARCAEYFPYSTYFEGIKSAISTYAIDHSLESPPENGIASNPHLKSKDGEQGSLNGTLHIVDDLSSLSIR

SEQ ID NO: 173134 - protein, 897 aa, Zea Mays
MNECLVKSYETKQYKKGLKAADSILKKFPEHGETLSMKGLTLNCMDRKSEAYELVRRGLKNDLKSHVCWHVYGLLYRSDREYREAIKCYRNALRIDPDNIEILRDLSLLQAQMRDLSGFVETRQQLLSLKPNHRMNWIGFAVAHHLNSNSSKAVEVLEAYEGTLEDDYPPENERYEHNEMLLYKISLFEECGMLDRALEEMQKKESKIVDKLSFKEQMASVLFKLGRFDESESIYRSLLFMNPDNYKYFIAVQKCLGLYSDNGQYSAADVERLSALYNSLKEKYAWSSAVKRIPLDFLEGEKFQEAADNYVRPLLTKGVPSLFSDLSPLYEHPGKANILEQLFLKLEDSIRDSGCFPGCPQKEPPSTLLWTLFLISQHYDRRGQYDIALNKIDEAISHTPTVIDLYSVKGKILQHAGNFTAAAALADEARSMDLADRYLNSECVMQMLQADQVGLAEKTAVLFTKDGDQHNNLHDMQCMWYELASGESYYRQGDLGRALKNFLAVEKHYADMTEDQFDFHSYCLRKMTLRAYVSMLKFQDRLHAHEYFHKAAAGAIRCYMKLHDSPTKSSKEENDEISKLPPAQRKKLRQKQKKAEARAKREAEEKQEDETASSNSSKSGKKQHARPVDLDPHGEKLIQIEDPLAEATKYLKLLQNNSSDSLETHILSFELSMRKQKVLLAFQAVKQLIKLDEDNPDSHRCLIKFFHKINSLPGPVTDSEKLIWNVLEAERPDMRQLHGKSLVEVNRSFLEKHNASLMHRAAGAEMMYLLEPNKKMEAINLIEDSTNITSSGHSLLGPVKTWQIQDCIDVHKLLETVFGDQNVANRWKARCAEYFPYSTYFEGIKSAISTYAIDHSLESPPENGIASNPHLKSKDGEQGSLNGTLHIVDDLSSLSIR

SEQ ID NO: 173135 - protein, 225 aa, Zea Mays
MLIIYLVESMRAVKQLIKLDEDNPDSHRCLIKFFHKINSLPGPVTDSEKLIWNVLEAERPDMRQLHGKSLVEVNRSFLEKHNASLMHRAAGAEMMYLLEPNKKMEAINLIEDSTNITSSGHSLLGPVKTWQIQDCIDVHKLLETVFGDQNVANRWKARCAEYFPYSTYFEGIKSAISTYAIDHSLESPPENGIASNPHLKSKDGEQGSLNGTLHIVDDLSSLSIR

SEQ ID NO: 173136 - protein, 82 aa, Zea Mays
MSLNKTQYHKRSNTEMTQWFIPWFGQDQRLPTPRCGVPTDEGCNQPLSSGPKTNLNTTVFCFAFQYPVCEESPQLGVSRPYT

SEQ ID NO: 173137 - protein, 138 aa, Zea Mays
MNRFPWPKRSLLFCTHLLLSVSPKPPRRCQKPKPPRRCPRRRLTSPCSCPLRLGPPAACPVVRRRVLAPVGSLISCCSANQNGSATISGLRPQATVHALRRRVLLRSLPHRPPQHRPTLCPVIVRWCSLLLVPKTEER

SEQ ID NO: 173138 - protein, 111 aa, Zea Mays
MAQRGELGRQLPLRGPLKALEADIHHANAMADAIQRNYGGSCVQMRLSFSSLAPLFLYFIQWLDCGCCYALPSYLGLFHILICKVYADGDSSVSTYERRASLREFYGDWFV

SEQ ID NO: 173139 - protein, 77 aa, Zea Mays
MPPALSSNIQTLALVVTSRYQSNTTHRKQDVGYYAFRGPNLYKSRVLSHLQANHRATVDVANLQKHLVVHLVVHCRY

SEQ ID NO: 173140 - protein, 120 aa, Zea Mays
MMAKTRVGEQPGADLTIDNNIARGTVKQEVVLLDVTYPSSSVPVRPVPGPSGLLPSPKFWLRRPADLMDLPSPLSRGGGALMTISRISRQSMAIASFVPSPRVAIAHSKQDLRPNLPQLT

SEQ ID NO: 173141 - protein, 349 aa, Zea Mays
MRIMWNVAQNQNLFLILLRLNNLHPQGNGLLKLLRRFFHLSRKLSVLQLYLTLKDFLRYHTSWTGHRVQKMAIMLLLRKHETLEVDEDDSIIAESEVLWRINFERFIFCLKKKFCAERKKAKMRLGTLAIWEAFFEANVTNNDNKTVTSPIDGILERVGQKEGGMSMTLDHITSVLNDLECTSTANNPEEFTFDLNKLVETCRNDEIESLVKKKHGQEAYTIFRLLLKQGSPVETDEITDRTILDKQVVHETLYKLWKDEYIDSERVPSTSATGTGSAQFFVWRVKNIYREHFMDNLYHAALNLRQMVNYMAELLLEGSKDEIKLRNRKNILILALTRHDESLMLFHDF

SEQ ID NO: 173142 - protein, 220 aa, Zea Mays
MNFNKLVYAHYVERCPKPEPFFDPLAVEQPTSTRKRAPKTVEAVLSLEQKVVCTAALSDAERFSEIPYFMDGSSSAKDGHHAVAGNKRKHETLEVDEDDSIIAESEVLWRINFERFIFCLKKKFCAERKKAKMRLGTLAIWEAFFEANVTNNDNKTVTSPIDGILERVGQKEGGMSMTLDHITSVLNDLECTSTANNPEEFTFDRVSCEKETWARSLYNL

SEQ ID NO: 173143 - protein, 67 aa, Zea Mays
MTSVGLRNYCVEDPVANDPLQLLPKRTYQPSTIKRKRTHGFLTRKSTKGGRKVIARRIAKGRHRISV

SEQ ID NO: 173144 - protein, 269 aa, Zea Mays
MLHRRCLQGTTYKKKLQTVLFFFPKNFYNFRSIMALVVCSCLYKMPKPRTPSPRPPHRIATGPPRSQMASSSSCPLAPGTSGCKPRTTRTSGVGFGVEAMARSVAAVKLEPKPEPWAAEAEEGSSVVPRSMEGPPFPAPFVAKTYEMVSDAATDAVVSWAPCGAGNTFVVWDPQALATGILPRFFKHANFASFVRQLNVYEGESRSLGVCKRIILSRPEASAEKHQEEARVQASGRSIAKKQRKCLFRTAQQGSRGGREFETGPRSAQG

SEQ ID NO: 173145 - protein, 473 aa, Zea Mays
MEDALAPPSVAPTPSPLAAAAVLTRRRSHLDSASFRTLSRLFSHCLHINPSPCGISPPVPEPVAADFVGGDPDDSPERPNGADFDRLKDVQIEAADAGGPSLHGTVHQPAAANSTLDLVEAEAEALQLEGADAVGVVESTSCMTRAEAGESAVLVVESTSCKTTAEVEESAVGAGLAMVGDVSLKSVESLLETKVDESVEVAVGDDEGCLLFEAMLTNFTGLIDDVDAGAIPTQRCAVSGGDLQNSKASEDLKQLGDRIEEGEPLRNCDNGQNDGGGFEEGEIEGEFQDLGSEESGNSEHGDEDGEDEKLEDNSISRGSGPNKSCDYGTQFGNLQSIPETGNDHLILNRDAIVRGDAQISVTRAQAVTYDEVVDWNETPLPDNETVNPGKKRKRILTEERKAKKTKNKRKNRALQRIADGVKRPKLTPVTKPKKPCHFYDHGKCRQGNNCKFSHDFTPSTKSKISGLRDAPSE

SEQ ID NO: 173146 - protein, 181 aa, Zea Mays
MPTTEGTPTQDAKTSDASLAYEKTNTREHTRSQKNATVHNVAPSNSILRNLAGVSSKSQNVSNHIPKGVQFLSIGKGQSNLDSLHLDALFMEKQRNANGTQHNLGGHEAERQKIVKQNSQKPNLLLDDKNSSEGATRHPCSDPQKATLPVNSIATPGSIHTQHEVSEASRILQEFLFGAGS

SEQ ID NO: 173147 - protein, 320 aa, Zea Mays
MLQSAAGEGRKDLILFVLPFLFASHAMQRNVCRRDSFITHRAFCDALTEESAKAIGGVNAMAAPVHHHHHPMLFSPPPAHVMQQQDVLLLQEHQHHQHQQQQQEDDVMQQPPPQQCNYAMKTEMPPWPAMAYDHPLLQPLCNAAAAAAAQGSAATSAPQLPAASAHLSATALLQKAAQMGATIGGAGYTQMAGPATSATAAFGLGLPGLQNAQHHHPQQQDGGGGVMAAGLARTASSHGRGGDEGGGGGSGDGMTRDFLGLRAFSHRDILGLAGLDSSCMGAITASASMGCYEPQQQHTQPQAPQQQQSSNEPWHGMGQP

SEQ ID NO: 173148 - protein, 440 aa, Zea Mays
MLARAIAGEAGVPFFSCSGSEFEEMFVGVGARRVRDLFAAAKKRSPCIIFIDEIDAIGGSRNPKDQQYMKMTLNQLLVELDGFKQNEGIIVIAATNFPESLDKALVRPGRFDRHIVVPNPDVEGRRQILESHMSKILKGDDVDLMIIARGTPGFSGADLANLVNVAALKAAMDGAKAVTMDDLEYAKDRIMMGSERKSAVISDECRKLTAYHEGGHALVAIHTEGAHPVHKATIVPRGMALGMVAQLPDKDQTSVSRKQMLAKLDVCMGGRVAEELIFGDTEVTSGASSDFQQATAMARAMVTKYGMSKQVGLVSYNYEDDGKSMSSETRLAIEQEVKNFLENAYSNAKTILTKHNKELHALANALLEHETLTGAQIKNILAQVHNKQQHEHTIEAPQKASVAPASPASPAASAAAAAAAAAAAAQQAAAKAKGVAGMGS

SEQ ID NO: 173149 - protein, 861 aa, Zea Mays
MPQILMLFENYNHPPPIKAPTPSCTSLPQPPPSPTLTPTPAAARAPAPSPHEMGDACFSTQLIDGDGVFNVSGLENFMKDARLGECGLSYAVVSIMGPQSSGKSTLLNHLFGTNFREMDAFRGRSQTTKGIWLAKAQNIEPCTLVMDLEGTDGRERGEDDTAFEKQSALFALAVSDIVLINMWCHDIGREQAANKPLLKTVFQVMMRLFSPRKTTLLFVIRDKSRTPLENLEPILREDIQKIWDAVPKPHAHKETPLSEFFDVQVVALSSYEEKEELFKQQVSDLRDRFQYSIAPGGLAGDRRGVVPASGFSFSSQQFWKVIKENKDLDLPAHKVMVATVRCEEIGNEKVGSFTSDEEWQQLEEAVQHDFVPGFGKKISSLLDRCLSEYDMEAIYFDEGVRSSKRQQLESKLLQLVNPAYQSLLGHLRTRTLEAFNESFDKALEKEGFAAAARNCTQTFLEKFDKGSEDAAIQQVNWDTSKVKDKLRRDIEAHVASVRAAKLSELCAKYEAQLTKALAEPVESLLDSASEDTWPAIRKLLQRETKTAVSGLQSAVSAFELDEATEKELLVKLEKHGRSVVESKAKEEAGRVLIRMKDRFSMLFSRDADSMPRVWTGKEDIKAITKTARSASMKLLSTMAAIRLEEDGDNIENTLSVALVDTSKPGTTDRSIQLTDPLASSSWERVGEEKTLITPVQCKNLWRQFKAETEYTVTQALAAQEANKRNNNWLPPPWALAAMAILGFNEFMTLLRNPLYLFAIFVIYLVGKAIWVQSEIGREFQHGFLPAILSLSTKFVPTVMNILKRLADEGQAPAAAPERQREMELQPKPTRNGSSYTNATSAGSSSVTTSEIGPEYSSPVAQ

SEQ ID NO: 173150 - protein, 546 aa, Zea Mays
MGDACFSTQLIDGDGVFNVSGLENFMKDARLGECGLSYAVVSIMGPQSSGKSTLLNHLFGTNFREMDAFRGRSQTTKGIWLAKAQNIEPCTLVMDLEGTDGRERGEDDTAFEKQSALFALAVSDIVLINMWCHDIGREQAANKPLLKTVFQVMMRLFSPRKTTLLFVIRDKSRTPLENLEPILREDIQKIWDAVPKPHAHKETPLSEFFDVQVVALSSYEEKEELFKQQVSDLRDRFQYSIAPGGLAGDRRGVVPASGFSFSSQQFWKVIKENKDLDLPAHKVMVATVRCEEIGNEKVGSFTSDEEWQQLEEAVQHDFVPGFGKKISSLLDRCLSEYDMEAIYFDEGVRSSKRQQLESKLLQLVNPAYQSLLGHLRTRTLEAFNESFDKALEKEGFAAAARNCTQTFLEKFDKGSEDAAIQQVNWDTSKVKDKLRRDIEAHVASVRAAKLSELCAKYEAQLTKALAEPVESLLDSASEDTWPAIRKLLQRETKTAVSGLQSAVSAFELDEATEKELLVKLEKHGRSVVESKAKEEAGRVLIRMKDR

SEQ ID NO: 173151 - protein, 803 aa, Zea Mays
MGDACFSTQLIDGDGVFNVSGLENFMKDARLGECGLSYAVVSIMGPQSSGKSTLLNHLFGTNFREMDAFRGRSQTTKGIWLAKAQNIEPCTLVMDLEGTDGRERGEDDTAFEKQSALFALAVSDIVLINMWCHDIGREQAANKPLLKTVFQVMMRLFSPRKTTLLFVIRDKSRTPLENLEPILREDIQKIWDAVPKPHAHKETPLSEFFDVQVVALSSYEEKEELFKQQVSDLRDRFQYSIAPGGLAGDRRGVVPASGFSFSSQQFWKVIKENKDLDLPAHKVMVATVRCEEIGNEKVGSFTSDEEWQQLEEAVQHDFVPGFGKKISSLLDRCLSEYDMEAIYFDEGVRSSKRQQLESKLLQLVNPAYQSLLGHLRTRTLEAFNESFDKALEKEGFAAAARNCTQTFLEKFDKGSEDAAIQQVNWDTSKVKDKLRRDIEAHVASVRAAKLSELCAKYEAQLTKALAEPVESLLDSASEDTWPAIRKLLQRETKTAVSGLQSAVSAFELDEATEKELLVKLEKHGRSVVESKAKEEAGRVLIRMKDSRDADSMPRVWTGKEDIKAITKTARSASMKLLSTMAAIRLEEDGDNIENTLSVALVDTSKPGTTDRSIQLTDPLASSSWERVGEEKTLITPVQCKNLWRQFKAETEYTVTQALAAQEANKRNNNWLPPPWALAAMAILGFNEFMTLLRNPLYLFAIFVIYLVGKAIWVQSEIGREFQHGFLPAILSLSTKFVPTVMNILKRLADEGQAPAAAPERQREMELQPKPTRNGSSYTNATSAGSSSVTTSEIGPEYSSPVAQ

SEQ ID NO: 173152 - protein, 750 aa, Zea Mays
MGDACFSTQLIDGDGVFNVSGLENFMKDARLGECGLSYAVVSIMGPQSSGKSTLLNHLFGTNFREMDAFRGRSQTTKGIWLAKAQNIEPCTLVMDLEGTDGRERGEDDTAFEKQSALFALAVSDIVLINMWCHDIGREQAANKPLLKTVFQVQVVALSSYEEKEELFKQQVSDLRDRFQYSIAPGGLAGDRRGVVPASGFSFSSQQFWKVIKENKDLDLPAHKVMVATVRCEEIGNEKVGSFTSDEEWQQLEEAVQHDFVPGFGKKISSLLDRCLSEYDMEAIYFDEGVRSSKRQQLESKLLQLVNPAYQSLLGHLRTRTLEAFNESFDKALEKEGFAAAARNCTQTFLEKFDKGSEDAAIQQVNWDTSKVKDKLRRDIEAHVASVRAAKLSELCAKYEAQLTKALAEPVESLLDSASEDTWPAIRKLLQRETKTAVSGLQSAVSAFELDEATEKELLVKLEKHGRSVVESKAKEEAGRVLIRMKDRFSMLFSRDADSMPRVWTGKEDIKAITKTARSASMKLLSTMAAIRLEEDGDNIENTLSVALVDTSKPGTTDRSIQLTDPLASSSWERVGEEKTLITPVQCKNLWRQFKAETEYTVTQALAAQEANKRNNNWLPPPWALAAMAILGFNEFMTLLRNPLYLFAIFVIYLVGKAIWVQSEIGREFQHGFLPAILSLSTKFVPTVMNILKRLADEGQAPAAAPERQREMELQPKPTRNGSSYTNATSAGSSSVTTSEIGPEYSSPVAQ

SEQ ID NO: 173153 - protein, 243 aa, Zea Mays
MAWGQGAKRSILGLLFRSQHQTARAYSSSAFQTHQLSTHVPQDGVFIRRFGSEVSSSEQMNLIKQLRQRTSAPIKDVKASLVTCNWDIEAAQKDLRKRGVALAAKKSSRTAAEGLLAIAQDDKRAAVVELNCETDFVARNDVFQYLASSLAKMALSAQGPGELFMPFGPELLENMPINLDHPKLSVETTVQSAVTEVAAMVGENVKLRRGFMLSTTAHGVVSSYMHTCPQPGPKFREIPNGYG

SEQ ID NO: 173154 - protein, 1146 aa, Zea Mays
MGKPCFSGLVAIELCSMGGIAECGVSIDTKASPRRAAIEKAQDELRQEYDVREERRRELEFLEKGGNPLDFKLGHVASLSVQSTSVTEQIAEQNVISEAKGSSAFATSPHGDSVESNDKPGNSLCREGNTADNITLLDGDASSMGVDKIVKRGTKRTNSAQAEQFLHCDGQNNAKEEDSGLYRLGPKSQAYARRRSKPIRENAYSVSVRYPPIPPLSSQQKDVTGLIPETKTEDNGVSSIGDSKPTSPNSKNLVTNASLLNDKVEMETENVQAIPEGNQAPKNELSNSNNGSPAIEISPNSVPDNSRLTVSDQMVTAFVSVESPDAISKVAASRIVCSLPYISNEILKEAQTLEKAGNNPSMVSVVDVHAYGMDNNGAAPYSAVKSASLNENEVDPIHEYAAKAVTEHPDQNENLVPVNADEMADEGLNKILPDDKDDKKDCQLEVSSGPVILNDSSTPVYPEFSNSFYARDGTEVSNNAVDSKNNAEQLASSNQGKGNMEECKDSDGNNASELSVAQKLVSVIVPPASDAGDVSNFVENDVDKSSRDQEKVAKKEYEDSVVAKKDHEDAILRRARYIEANIKRAGEWSLCNISLEKKQKSHWDFVLEEMVWMANDFTQERLWKNTVAAQMSHWISSRGRAVFEEASIQRKQKSVARVLANGIMNFWCSVHTLRASGGIPKPIKIEQPNELEENKLGGFKSGKADEECLEQEKSRQSPIQSFALRFLEYNINASEFLPLAEAPSTPDRLNDFGILKANLFYGVAPGAMQAYRESMDRLLIYNNKKIGDTVLKDDYEPSTYASVTDVPMENAYGDDESEAHTYLLPGAYNGGLASKNSHKKKHHLPQRMNGARSYEIGVDSPYEPLYLESKSGNQQLLSNGKQTDFLSIPIKRIRTAARQRVVSPFPAGASGTPQFTNKTDASSGDTNSCQDDQSSLHGGSFSRKNADIESTVDFDRQLLYDGSEVSTKSKKKKKTKHPGYKALPNVSESCSLRAPGKGNYDHRSQIDMIAQYEQKDYIKKRQETNGNFGVIDLSTVVNGLHAAKKPKLLNQAPDISLEALKPIGPMASLAASQMSNMANPTRVIKISTRGRKSKGLKMRAGHSGPGSPWSSFEDQALVVLVHDMGENWELVSDALNSIIQLKGFGS

SEQ ID NO: 173155 - protein, 1764 aa, Zea Mays
MGVDKIVKRGTKRTNSAQAEQFLHCDGQNNAKEEDSGLYRLGPKSQAYARRRSKPIRENAYSVSVRYPPIPPLSSQQKDVTGLIPETKTEDNGVSSIGDSKPTSPNSKNLVTNASLLNDKVEMETENVQAIPEGNQAPKNELSNSNNGSPAIEISPNSVPDNSRLTVSDQMVTAFVSVESPDAISKVAASRIVCSLPYISNEILKEAQTLEKAGNNPSMVSVVDVHAYGMDNNGAAPYSAVKSASLNENEVDPIHEYAAKAVTEHPDQNENLVPVNADEMADEGLNKILPDDKDDKKDCQLEVSSGPVILNDSSTPVYPEFSNSFYARDGTEVSNNAVDSKNNAEQLASSNQGKGNMEECKDSDGNNASELSVAQKLVSVIVPPASDAGDVSNFVENDVDKSSRDQEKVAKKEYEDSVVAKKDHEDAILRRARYIEANIKRAGEWSLCNISLEKKQKSHWDFVLEEMVWMANDFTQERLWKNTVAAQMSHWISSRGRAVFEEASIQRKQKSVARVLANGIMNFWCSVHTLRASGGIPKPIKIEQPNELEENKLGGFKSGKADEECLEQEKSRQSPIQSFALRFLEYNINASEFLPLAEAPSTPDRLNDFGILKANLFYGVAPGAMQAYRESMDRLLIYNNKKIGDTVLKDDYEPSTYASVTDVPMENAYGDDESEAHTYLLPGAYNGGLASKNSHKKKHHLPQRMNGARSYEIGVDSPYEPLYLESKSGNQQLLSNGKQTDFLSIPIKRIRTAARQRVVSPFPAGASGTPQFTNKTDASSGDTNSCQDDQSSLHGGSFSRKNADIESTVDFDRQLLYDGSEVSTKSKKKKKTKHPGYKALPNVSESCSLRAPGKGNYDHRSQIDMIAQYEQKDYIKKRQETNGNFVVNGLHAAKKPKLLNQAPDISLEALKPIGPMASLAASQMSNMANPTRVIKISTRGRKSKGLKMRAGHSGPGSPWSSFEDQALVVLVHDMGENWELVSDALNSIIQLKCIYRRPNECKERHKLLTDRSCGDGADSADDSGSSQHYPSALPGIPKGSARQLFQRLQGPFEEGTLKTHFEKIILLGQKLHQTRRKDEIHELRQKNPLHTSHGFALSQACPGNLSGVILTPLDLCDGPSNSDALTGSNTSGLGLSNNNCSVGPTLPTSNMNLRLPGSPGMVLGSNSPLPLNAPSRDVQRYGVPRPTSIQGDEQSRIHYNQMVNGRNLQQPGVPVPGVLPSGVDRGARMMPPAHGVGIMAGLNRGTPITRPGFPRLGSLGNMSPTDGQGLKNTVNVHPGAILGPGSTMLRPRDPMQMFRPGQNSEEHRQMMMPEFQLQVSQGNNHAVHFSGPPYSNTGASSPVQSLPAQQSQPHQMPQQSHMYGNTHLLHTQGTNQSNPQQQQAYAMRLAKERHMQQMMPQQQRPLSVASAVSAVQNGSPMQQQSQGSATCVIPATQTQHKQQYPAQNAQDNSMLPHQPSATTTHKQKKQQGQQQPRQNQQQRNQGSQQAKLMKSLGRGNMMQQSPVDVIQASGISTSCKDQVPDKNMMQQGPGHFVVSKGSIPLIPQPGNQPNVYTSQMPPSPMQTPDISNQGAVKGSSNHALLTSQQGSLHTPSQLAQQQQQQLRFMNPSQNNMQRLIMQQNRHVNTDGRIELPADQVQHNQVMSSASLARSTDSGSPGISSISQRKQESSHDPSAITSTSQLASSPQDTFVGSDRVLPSSSQSMPQRQMSGGVPVHGYGIGGQVQLQQSRQQLQSQQQQQQQQRPVVQGGVYAHPSNSGQG

SEQ ID NO: 173156 - protein, 1907 aa, Zea Mays
MGKPCFSGLVAIELCSMGGIAECGVSIDTKASPRRAAIEKAQDELRQEYDVREERRRELEFLEKGGNPLDFKLGHVASLSVQSTSVTEQIAEQNVISEAKGSSAFATSPHGDSVESNDKPGNSLCREGNTADNITLLDGDASSMGVDKIVKRGTKRTNSAQAEQFLHCDGQNNAKEEDSGLYRLGPKSQAYARRRSKPIRENAYSVSVRYPPIPPLSSQQKDVTGLIPETKTEDNGVSSIGDSKPTSPNSKNLVTNASLLNDKVEMETENVQAIPEGNQAPKNELSNSNNGSPAIEISPNSVPDNSRLTVSDQMVTAFVSVESPDAISKVAASRIVCSLPYISNEILKEAQTLEKAGNNPSMVSVVDVHAYGMDNNGAAPYSAVKSASLNENEVDPIHEYAAKAVTEHPDQNENLVPVNADEMADEGLNKILPDDKDDKKDCQLEVSSGPVILNDSSTPVYPEFSNSFYARDGTEVSNNAVDSKNNAEQLASSNQGKGNMEECKDSDGNNASELSVAQKLVSVIVPPASDAGDVSNFVENDVDKSSRDQEKVAKKEYEDSVVAKKDHEDAILRRARYIEANIKRAGEWSLCNISLEKKQKSHWDFVLEEMVWMANDFTQERLWKNTVAAQMSHWISSRGRAVFEEASIQRKQKSVARVLANGIMNFWCSVHTLRASGGIPKPIKIEQPNELEENKLGGFKSGKADEECLEQEKSRQSPIQSFALRFLEYNINASEFLPLAEAPSTPDRLNDFGILKANLFYGVAPGAMQAYRESMDRLLIYNNKKIGDTVLKDDYEPSTYASVTDVPMENAYGDDESEAHTYLLPGAYNGGLASKNSHKKKHHLPQRMNGARSYEIGVDSPYEPLYLESKSGNQQLLSNGKQTDFLSIPIKRIRTAARQRVVSPFPAGASGTPQFTNKTDASSGDTNSCQDDQSSLHGGSFSRKNADIESTVDFDRQLLYDGSEVSTKSKKKKKTKHPGYKALPNVSESCSLRAPGKGNYDHRSQIDMIAQYEQKDYIKKRQETNGNFVVNGLHAAKKPKLLNQAPDISLEALKPIGPMASLAASQMSNMANPTRVIKISTRGRKSKGLKMRAGHSGPGSPWSSFEDQALVVLVHDMGENWELVSDALNSIIQLKCIYRRPNECKERHKLLTDRSCGDGADSADDSGSSQHYPSALPGIPKGSARQLFQRLQGPFEEGTLKTHFEKIILLGQKLHQTRRKDEIHELRQKNPLHTSHGFALSQACPGNLSGVILTPLDLCDGPSNSDALTGSNTSGLGLSNNNCSVGPTLPTSNMNLRLPGSPGMVLGSNSPLPLNAPSRDVQRYGVPRPTSIQGDEQSRIHYNQMVNGRNLQQPGVPVPGVLPSGVDRGARMMPPAHGVGIMAGLNRGTPITRPGFPRLGSLGNMSPTDGQGLKNTVNVHPGAILGPGSTMLRPRDPMQMFRPGQNSEEHRQMMMPEFQLQVSQGNNHAVHFSGPPYSNTGASSPVQSLPAQQSQPHQMPQQSHMYGNTHLLHTQGTNQSNPQQQQAYAMRLAKERHMQQMMPQQQRPLSVASAVSAVQNGSPMQQQSQGSATCVIPATQTQHKQQYPAQNAQDNSMLPHQPSATTTHKQKKQQGQQQPRQNQQQRNQGSQQAKLMKSLGRGNMMQQSPVDVIQASGISTSCKDQVPDKNMMQQGPGHFVVSKGSIPLIPQPGNQPNVYTSQMPPSPMQTPDISNQGAVKGSSNHALLTSQQGSLHTPSQLAQQQQQQLRFMNPSQNNMQRLIMQQNRHVNTDGRIELPADQVQHNQVMSSASLARSTDSGSPGISSISQRKQESSHDPSAITSTSQLASSPQDTFVGSDRVLPSSSQSMPQRQMSGGVPVHGYGIGGQVQLQQSRQQLQSQQQQQQQQRPVVQGGVYAHPSNSGQG

SEQ ID NO: 173157 - protein, 1956 aa, Zea Mays
MGKPCFSGLVAIELCSMGGIAECGVSIDTKASPRRAAIEKAQDELRQEYDVREERRRELEFLEKGGNPLDFKLGHVASLSVQSTSVTEQIAEQNVISEAKGSSAFATSPHGDSVESNDKPGNSLCREGNTADNITLLDGDASSMGVDKIVKRGTKRTNSAQAEQFLHCDGQNNAKEEDSGLYRLGPKSQAYARRRSKPIRENAYSVSVRYPPIPPLSSQQKDVTGLIPETKTEDNGVSSIGDSKPTSPNSKNLVTNASLLNDKVEMETENVQAIPEGNQAPKNELSNSNNGSPAIEISPNSVPDNSRLTVSDQMVTAFVSVESPDAISKVAASRIVCSLPYISNEILKEAQTLEKAGNNPSMVSVVDVHAYGMDNNGAAPYSAVKSASLNENEVDPIHEYAAKAVTEHPDQNENLVPVNADEMADEGLNKILPDDKDDKKDCQLEVSSGPVILNDSSTPVYPEFSNSFYARDGTEVSNNAVDSKNNAEQLASSNQGKGNMEECKDSDGNNASELSVAQKLVSVIVPPASDAGDVSNFVENDVDKSSRDQEKVAKKEYEDSVVAKKDHEDAILRRARYIEANIKRAGEWSLCNISLEKKQKSHWDFVLEEMVWMANDFTQERLWKNTVAAQMSHWISSRGRAVFEEASIQRKQKSVARVLANGIMNFWCSVHTLRASGGIPKPIKIEQPNELEENKLGGFKSGKACARMLRPCPAVHPYGHPKHTFALFIEWSLNMGIGMCKLLEIALKTSCLFDEECLEQEKSRQSPIQSFALRFLEYNINASEFLPLAEAPSTPDRLNDFGILKANLFYGVAPGAMQAYRESMDRLLIYNNKKIGDTVLKDDYEPSTYASVTDVPMENAYGDDESEAHTYLLPGAYNGGLASKNSHKKKHHLPQRMNGARSYEIGVDSPYEPLYLESKSGNQQLLSNGKQTDFLSIPIKRIRTAARQRVVSPFPAGASGTPQFTNKTDASSGDTNSCQDDQSSLHGGSFSRKNADIESTVDFDRQLLYDGSEVSTKSKKKKKTKHPGYKALPNVSESCSLRAPGKGNYDHRSQIDMIAQYEQKDYIKKRQETNGNFVVNGLHAAKKPKLLNQAPDISLEALKPIGPMASLAASQMSNMANPTRVIKISTRGRKSKGLKMRAGHSGPGSPWSSFEDQALVVLVHDMGENWELVSDALNSIIQLKCIYRRPNECKERHKLLTDRSCGDGADSADDSGSSQHYPSALPGIPKGSARQLFQRLQGPFEEGTLKTHFEKIILLGQKLHQTRRKDEIHELRQKNPLHTSHGFALSQACPGNLSGVILTPLDLCDGPSNSDALTGSNTSGLGLSNNNCSVGPTLPTSNMNLRLPGSPGMVLGSNSPLPLNAPSRDVQRYGVPRPTSIQGDEQSRIHYNQMVNGRNLQQPGVPVPGVLPSGVDRGARMMPPAHGVGIMAGLNRGTPITRPGFPRLGSLGNMSPTDGQGLKNTVNVHPGAILGPGSTMLRPRDPMQMFRPGQNSEEHRQMMMPEFQLQVSQGNNHAVHFSGPPYSNTGASSPVQSLPAQQSQPHQMPQQSHMYGNTHLLHTQGTNQSNPQQQQAYAMRLAKERHMQQMMPQQQRPLSVASAVSAVQNGSPMQQQSQGSATCVIPATQTQHKQQYPAQNAQDNSMLPHQPSATTTHKQKKQQGQQQPRQNQQQRNQGSQQAKLMKSLGRGNMMQQSPVDVIQASGISTSCKDQVPDKNMMQQGPGHFVVSKGSIPLIPQPGNQPNVYTSQMPPSPMQTPDISNQGAVKGSSNHALLTSQQGSLHTPSQLAQQQQQQLRFMNPSQNNMQRLIMQQNRHVNTDGRIELPADQVQHNQVMSSASLARSTDSGSPGISSISQRKQESSHDPSAITSTSQLASSPQDTFVGSDRVLPSSSQSMPQRQMSGGVPVHGYGIGGQVQLQQSRQQLQSQQQQQQQQRPVVQGGVYAHPSNSGQG

SEQ ID NO: 173158 - protein, 1107 aa, Zea Mays
MENAYGDDESEAHTYLLPGAYNGGLASKNSHKKKHHLPQRMNGARSYEIGVDSPYEPLYLESKSGNQQLLSNGKQTDFLSIPIKRIRTAARQRVVSPFPAGASGTPQFTNKTDASSGDTNSCQDDQSSLHGGSFSRKNADIESTVDFDRQLLYDGSEVSTKSKKKKKTKHPGYKALPNVSESCSLRAPGKGNYDHRSQIDMIAQYEQKDYIKKRQETNGNFGVIDLSTVVNGLHAAKKPKLLNQAPDISLEALKPIGPMASLAASQMSNMANPTRVIKISTRGRKSKGLKMRAGHSGPGSPWSSFEDQALVVLVHDMGENWELVSDALNSIIQLKCIYRRPNECKERHKLLTDRSCGDGADSADDSGSSQHYPSALPGIPKGSARQLFQRLQGPFEEGTLKTHFEKIILLGQKLHQTRRKDEIHELRQKNPLHTSHGFALSQACPGNLSGVILTPLDLCDGPSNSDALTGSNTSGLGLSNNNCSVGPTLPTSNMNLRLPGSPGMVLGSNSPLPLNAPSRDVQRYGVPRPTSIQGDEQSRIHYNQMVNGRNLQQPGVPVPGVLPSGVDRGARMMPPAHGVGIMAGLNRGTPITRPGFPRLGSLGNMSPTDGQGLKNTVNVHPGAILGPGSTMLRPRDPMQMFRPGQNSEEHRQMMMPEFQLQVSQGNNHAVHFSGPPYSNTGASSPVQSLPAQQSQPHQMPQQSHMYGNTHLLHTQGTNQSNPQQQQAYAMRLAKERHMQQMMPQQQRPLSVASAVSAVQNGSPMQQQSQGSATCVIPATQTQHKQQYPAQNAQDNSMLPHQPSATTTHKQKKQQGQQQPRQNQQQRNQGSQQAKLMKSLGRGNMMQQSPVDVIQASGISTSCKDQVPDKNMMQQGPGHFVVSKGSIPLIPQPGNQPNVYTSQMPPSPMQTPDISNQGAVKGSSNHALLTSQQGSLHTPSQLAQQQQQQLRFMNPSQNNMQRLIMQQNRHVNTDGRIELPADQVQHNQVMSSASLARSTDSGSPGISSISQRKQESSHDPSAITSTSQLASSPQDTFVGSDRVLPSSSQSMPQRQMSGGVPVHGYGIGGQVQLQQSRQQLQSQQQQQQQQRPVVQGGVYAHPSNSGQG

SEQ ID NO: 173159 - protein, 876 aa, Zea Mays
MGKPCFSGLVAIELCSMGGIAECGVSIDTKASPRRAAIEKAQDELRQEYDVREERRRELEFLEKGGNPLDFKLGHVASLSVQSTSVTEQIAEQNVISEAKGSSAFATSPHGDSVESNDKPGNSLCREGNTADNITLLDGDASSMGVDKIVKRGTKRTNSAQAEQFLHCDGQNNAKEEDSGLYRLGPKSQAYARRRSKPIRENAYSVSVRYPPIPPLSSQQKDVTGLIPETKTEDNGVSSIGDSKPTSPNSKNLVTNASLLNDKVEMETENVQAIPEGNQAPKNELSNSNNGSPAIEISPNSVPDNSRLTVSDQMVTAFVSVESPDAISKVAASRIVCSLPYISNEILKEAQTLEKAGNNPSMVSVVDVHAYGMDNNGAAPYSAVKSASLNENEVDPIHEYAAKAVTEHPDQNENLVPVNADEMADEGLNKILPDDKDDKKDCQLEVSSGPVILNDSSTPVYPEFSNSFYARDGTEVSNNAVDSKNNAEQLASSNQGKGNMEECKDSDGNNASELSVAQKLVSVIVPPASDAGDVSNFVENDVDKSSRDQEKVAKKEYEDSVVAKKDHEDAILRRARYIEANIKRAGEWSLCNISLEKKQKSHWDFVLEEMVWMANDFTQERLWKNTVAAQMSHWISSRGRAVFEEASIQRKQKSVARVLANGIMNFWCSVHTLRASGGIPKPIKIEQPNELEENKLGGFKSGKACARMLRPCPAVHPYGHPKHTFALFIEWSLNMGIGMCKLLEIALKTSCLFDEECLEQEKSRQSPIQSFALRFLEYNINASEFLPLAEAPSTPDRLNDFGILKANLFYGVAPGAMQAYRESMDRLLIYNNKMSLWRMHMEMTKVRHTPTYCLELIMVVWHQKIVTKRSTICLRG

SEQ ID NO: 173160 - protein, 379 aa, Zea Mays
MQAYRESMDRLLIYNNKKIGDTVLKDDYEPSTYASVTDVPMENAYGDDESEAHTYLLPGAYNGGLASKNSHKKKHHLPQRMNGARSYEIGVDSPYEPLYLESKSGNQQLLSNGKQTDFLSIPIKRIRTAARQRVVSPFPAGASGTPQFTNKTDASSGDTNSCQDDQSSLHGGSFSRKNADIESTVDFDRQLLYDGSEVSTKSKKKKKTKHPGYKALPNVSESCSLRAPGKGNYDHRSQIDMIAQYEQKDYIKKRQETNGNFGVIDLSTVVNGLHAAKKPKLLNQAPDISLEALKPIGPMASLAASQMSNMANPTRVIKISTRGRKSKGLKMRAGHSGPGSPWSSFEDQALVVLVHDMGENWELVSDALNSIIQLKGFGS

SEQ ID NO: 173161 - protein, 763 aa, Zea Mays
MGGIAECGVSIDTKASPRRAAIEKAQEELRQEYDVREERRRELEFLEKGGNPLDFKLGHVASLSVQSTSVTEQIAEQNVISEAKGSSAFATSSHGDSVESNDKPGNSLCREGNTADNLTLLDGDASNLGVDKIVKHGTKRTNSAQAEQFLHCDGQNNAKEEDSGLFRLGPKSQAYARRRSKPIRENAYSLSVMYPPIPPLSSQQKDVTGLIPETKTEDNGVSSIGDSKPTSPNSKNMVTNASLLNDKVEMETENVQAIPEGNQAPKNELSNSNNGSPAMEISPNSVPDNSRLTVSDQMATAFVSVESPDAISKVAASRIVCSLPYISNEILKEAQTLEKAVNADEMADEGLNEILPDDKDDKKDCQLEVSSGPVILNDSSTPVYPEFSNFFYAKDGTEVSNNAVDSKNNAEQHASSNQGKGNMEECKDSDGNNASESSVAQKLVSVIVLPASDTGDVSNFVENDVEKSSRDQEKVAKKEYEDSVVAKKDHEDAILRRARYIEANIKRAGEWSLCNISLEKKQKSHWDFVLEEMVWMANDFTQERLWKNTVAAQMSHWISSRGRAAFEEASIQRKQKSVARVLANGIMNFWCSVHTLRASGGIPKPMQIQQPNELEENKLGGVKTRKADEECLEQEKSRQSPIQSFALRLLEYNINASEFLPLAEAPSTPDRLNDFGILKVPDQLSEANLFYGVAPGAMQAYRESMERLLIYNNKMPAGHSGPGSPWSSFEDQALVVLVHDMGENWELVSDALNSIIQLKGFGS

SEQ ID NO: 173162 - protein, 570 aa, Zea Mays
MYPPIPPLSSQQKDVTGLIPETKTEDNGVSSIGDSKPTSPNSKNMVTNASLLNDKVEMETENVQAIPEGNQAPKNELSNSNNGSPAMEISPNSVPDNSRLTVSDQMATAFVSVESPDAISKVAASRIVCSLPYISNEILKEAQTLEKAGNNPSMVSVVDVHAYGMDNNGAAPYSAVKSASLNENEVDPIHAYAAKAVTEHPDQNENLVPVNADEMADEGLNEILPDDKDDKKDCQLEVSSGPVILNDSSTPVYPEFSNFFYAKDGTEVSNNAVDSKNNAEQHASSNQGKGNMEECKDSDGNNASESSVAQKLVSVIVLPASDTGDVSNFVENDVEKSSRDQEKVAKKEYEDSVVAKKDHEDAILRRARYIEANIKRAGEWSLCNISLEKKQKSHWDFVLEEMVWMANDFTQERLWKNTVAAQMSHWISSRGRAAFEEASIQRKQKSVARVLANGIMNFWCSVHTLRASGGIPKPMQIQQPNELEENKLGGVKTRKADEECLEQEKSRQSPIQSFALRLLEYNINASEFLPLAEAPSTPDRLNDFGILKVPDQLSELVGDLGYISQTCVSF

SEQ ID NO: 173163 - protein, 674 aa, Zea Mays
MYPPIPPLSSQQKDVTGLIPETKTEDNGVSSIGDSKPTSPNSKNMVTNASLLNDKVEMETENVQAIPEGNQAPKNELSNSNNGSPAMEISPNSVPDNSRLTVSDQMATAFVSVESPDAISKVAASRIVCSLPYISNEILKEAQTLEKAGNNPSMVSVVDVHAYGMDNNGAAPYSAVKSASLNENEVDPIHAYAAKAVTEHPDQNENLVPVNADEMADEGLNEILPDDKDDKKDCQLEVSSGPVILNDSSTPVYPEFSNFFYAKDGTEVSNNAVDSKNNAEQHASSNQGKGNMEECKDSDGNNASESSVAQKLVSVIVLPASDTGDVSNFVENDVEKSSRDQEKVAKKEYEDSVVAKKDHEDAILRRARYIEANIKRAGEWSLCNISLEKKQKSHWDFVLEEMVWMANDFTQERLWKNTVAAQMSHWISSRGRAAFEEASIQRKQKSVARVLANGIMNFWCSVHTLRASGGIPKPMQIQQPNELEENKLGGVKTRKADEECLEQEKSRQSPIQSFALRLLEYNINASEFLPLAEAPSTPDRLNDFGILKVPDQLSEANLFYGVAPGAMQAYRESMERLLIYNNKMPAGHSGPGSPWSSFEDQALVVLVHDMGENWELVSDALNSIIQLKCIYRRPNECKERHKLLTDKSCGDGADSADDSGSSQHYPSALPGIPK

SEQ ID NO: 173164 - protein, 866 aa, Zea Mays
MGGIAECGVSIDTKASPRRAAIEKAQEELRQEYDVREERRRELEFLEKGGNPLDFKLGHVASLSVQSTSVTEQIAEQNVISEAKGSSAFATSSHGDSVESNDKPGNSLCREGNTADNLTLLDGDASNLGVDKIVKHGTKRTNSAQAEQFLHCDGQNNAKEEDSGLFRLGPKSQAYARRRSKPIRENAYSLSVMYPPIPPLSSQQKDVTGLIPETKTEDNGVSSIGDSKPTSPNSKNMVTNASLLNDKVEMETENVQAIPEGNQAPKNELSNSNNGSPAMEISPNSVPDNSRLTVSDQMATAFVSVESPDAISKVAASRIVCSLPYISNEILKEAQTLEKAGNNPSMVSVVDVHAYGMDNNGAAPYSAVKSASLNENEVDPIHAYAAKAVTEHPDQNENLVPVNADEMADEGLNEILPDDKDDKKDCQLEVSSGPVILNDSSTPVYPEFSNFFYAKDGTEVSNNAVDSKNNAEQHASSNQGKGNMEECKDSDGNNASESSVAQKLVSVIVLPASDTGDVSNFVENDVEKSSRDQEKVAKKEYEDSVVAKKDHEDAILRRARYIEANIKRAGEWSLCNISLEKKQKSHWDFVLEEMVWMANDFTQERLWKNTVAAQMSHWISSRGRAAFEEASIQRKQKSVARVLANGIMNFWCSVHTLRASGGIPKPMQIQQPNELEENKLGGVKTRKADEECLEQEKSRQSPIQSFALRLLEYNINASEFLPLAEAPSTPDRLNDFGILKVPDQLSEANLFYGVAPGAMQAYRESMERLLIYNNKMPAGHSGPGSPWSSFEDQALVVLVHDMGENWELVSDALNSIIQLKCIYRRPNECKERHKLLTDKSCGDGADSADDSGSSQHYPSALPGIPK

SEQ ID NO: 173165 - protein, 177 aa, Zea Mays
MAEQLASQDAPNPPAPAQRVLMTNTHGEKLVGLLHHMGSDKVVVLCHGFTGSKDYSLITDLAAALTKQGISVFRFDFSGNGESEGEFQYGNYKKEAADLHSVVLYLRQEKYDVAAIVGHSKGGDVVVLYASIYKDVPMVVNLSGRFHLEKGIEERLGKEFMDRINKEGYIDAKDKSE

SEQ ID NO: 173166 - protein, 826 aa, Zea Mays
MAPAAPAGLASVAVAVAVAVLAAAASAAVTYDRKAVVVNGQRRILMSGSIHYPRSVPEMWPDLIQKAKDGGLDVVQTYVFWNGHEPSRRQYYFEGRYDLVHFIKLVKQAGLYVHLRIGPYVCAEWNFGGFPVWLKYVPGISFRTDNEPFKNFTTKIVDMMKSEGLFEWQGGPIILSQIENEFGPLEWDQGEPAKAYASWAANMAVALNTSVPWVMCKEDDAPDPIINTCNGFYCDWFSPNKPHKPTMWTEAWTSWYTGFGIPVPHRPVEDLAYGVAKFIQKGGSFVNYYMYHGGTNFGRTAGGPFIATSYDYDAPIDEYGLLREPKWGHLKELHKAIKLCEPALVAGDPIVTSLGNAQQASVFRSSTDACVAFLENKDKVSYARVSFNGMHYDLPPWSISILPDCKTTVYNTASVGSQISQMKMEWAGGFTWQSYNEDINSLGDESFATVGLLEQINVTRDNTDYLWYTTYVDIAQDEQFLSNGKNPMLTVMSAGHALHIFVNGQLTGTVYGSVEDPKLTYSGNVKLWSGSNTISCLSIAVGLPNVGEHFETWNAGILGPVTLDGLNEGRRDLTWQKWTYKVGLKGEALSLHSLSGSSSVEWGEPVQKQPLSWYKAFFNAPDGDEPLALDMSSMGKGQIWINGQGIGRYWPGYKASGTCGICDYRGEYDEKKCQTNCGDSSQRWYHVPRSWLNPTGNLLVIFEEWGGDPTGISMVKRIAGSICADVSEWQPSMANWRTKGYEKAKVHLQCDHGRKMTHIKFASFGTPQGSCGSYSEGGCHAHKSYDIFWKSCIGQERCGVSVVPDAFGGDPCPGTMKRAVVEAICG

SEQ ID NO: 173167 - protein, 416 aa, Zea Mays
MFIQVGSQISQMKMEWAGGFTWQSYNEDINSLGDESFATVGLLEQINVTRDNTDYLWYTTYVDIAQDEQFLSNGKNPMLTVMSAGHALHIFVNGQLTGTVYGSVEDPKLTYSGNVKLWSGSNTISCLSIAVGLPNVGEHFETWNAGILGPVTLDGLNEGRRDLTWQKWTYKVGLKGEALSLHSLSGSSSVEWGEPVQKQPLSWYKAFFNAPDGDEPLALDMSSMGKGQIWINGQGIGRYWPGYKASGTCGICDYRGEYDEKKCQTNCGDSSQRWYHVPRSWLNPTGNLLVIFEEWGGDPTGISMVKRIAGSICADVSEWQPSMANWRTKGYEKAKVHLQCDHGRKMTHIKFASFGTPQGSCGSYSEGGCHAHKSYDIFWKSCIGQERCGVSVVPDAFGGDPCPGTMKRAVVEAICG

SEQ ID NO: 173168 - protein, 116 aa, Zea Mays
MKHGDRYLKPWIIPVPEVTIVPRAKDDECLILASDGLWDVMSNEEVCEIARKRILLWHKKNSTSSSSAPRVGDSADSAAQAAAECLSKLALQKGSKDNITVVVVDLKAQRKFKSKT

SEQ ID NO: 173169 - protein, 370 aa, Zea Mays
MASEVEDEAATPLLANGAADVRRRAKAILSTQAVRIATKAEQHERFIFKVTHLLGVLGFGGFCYLLGARPQDVPYVYCLFYVIFVPLRWIYYRYKKWHYYLLDFCYYANTFLLVMILFYPEDEKLFMVCFSFAEGPLAWALIVWRCSLVFSSFDKLVSVLIHLLPGIVLFTIRWWNPQTFAAMHPEGRDARVTWPYVEDKSYLWTWLFFVPLAAYTLWQLMYFLIVNVLRRQRLLRDPEVMTSYRELSKKAQKANNIWWRLSGLLGDRNRQVMYILLQALFTVATMALTVPIFLSYRMHVVFLILKVCASTWNGGSFILEVMPRQVVQKQLKKLDMKPMEQGSSTQGAPGGDGGTLGNHHQHTSEEHIQE

SEQ ID NO: 173170 - protein, 303 aa, Zea Mays
MASEVEDEAATPLLANGAADVRRRRDQAKAILSTQAVRIATKAEQHERFIFKVTHLLGVLGFGGFCYLLGARPQDVPYVYCLFYVIFVPLRWIYYRYKKWHYYLLDFCYYANTFLLVMILFYPEDEKLFMVCFSFAEGPLAWALIVWRCSLVFSSFDKLVSVLIHLLPGIVLFTIRWWNPQTFAAMHPEGRDARVTWPYVEDKSYLWTWLFFVPLAAYTLWQLMYFLIVNVLRRQRLLRDPEVMTSYRELSKKAQKANNIWWRLSGLLGDRNRQVMCARRHGTVAASSWRSISRSEEIEAGCL

SEQ ID NO: 173171 - protein, 219 aa, Zea Mays
MASEVEDEAATPLLANGAADVRRRRDQAKAILSTQAVRIATKAEQHERFIFKVTHLLGVLGFGGFCYLLGARPQDVPYVYCLFYVIFVPLRWIYYRYKKWHYYLLGPLAWALIVWRCSLVFSSFDKLVSVLIHLLPGIVLFTIRWWNPQTFAAMHPEGRDARVTWPYVEDKSYLWTWLFFVPLAAYTLWQLMYFLIVNVLRRQRLLRDPEVMTSYRAGL

SEQ ID NO: 173172 - protein, 351 aa, Zea Mays
MASEVEDEAATPLLANGAADVRRRRDQAKAILSTQAVRIATKAEQHERFIFKDVPYVYCLFYVIFVPLRWIYYRYKKWHYYLLDFCYYANTFLLVMILFYPEDEKLFMVCFSFAEGPLAWALIVWRCSLVFSSFDKLVSVLIHLLPGIVLFTIRWWNPQTFAAMHPEGRDARVTWPYVEDKSYLWTWLFFVPLAAYTLWQLMYFLIVNVLRRQRLLRDPEVMTSYRELSKKAQKANNIWWRLSGLLGDRNRQVMYILLQALFTVATMALTVPIFLSYRMHVVFLILKVCASTWNGGSFILEVMPRQVVQKQLKKLDMKPMEQGSSTQGAPGGDGGTLGNHHQHTSEEHIQE

SEQ ID NO: 173173 - protein, 153 aa, Zea Mays
MKNFLWFASRLQSLVFSSFDKLVSVLIHLLPGIVLFTIRWWNPQTFAAMHPEGRDARVTWPYVEDKSYLWTWLFFVPLAAYTLWQLMYFLIVNVLRRQRLLRDPEVMTSYRELSKKAQKANNIWWRLSGLLGDRNRQVMCARRHGTVAASSWR

SEQ ID NO: 173174 - protein, 211 aa, Zea Mays
MALLPSGIVLFTIRWWNPQTFAAMHPEGRDARVTWPYVEDKSYLWTWLFFVPLAAYTLWQLMYFLIVNVLRRQRLLRDPEVMTSYRELSKKAQKANNIWWRLSGLLGDRNRQVMYILLQALFTVATMALTVPIFLSYRMHVVFLILKVCASTWNGGSFILEVMPRQVVQKQLKKLDMKPMEQGSSTQGAPGGDGGTLGNHHQHTSEEHIQE

SEQ ID NO: 173175 - protein, 277 aa, Zea Mays
MDFFLSSILAERNKYLHALCAFIVRTVLQRSHTCWVFLDLGDFAISWVPVSYCSIDIFGPQDVPYVYCLFYVIFVPLRWIYYRYKKWHYYLLDFCYYANTFLLVMILFYPEDEKLFMVCFSFAEGPLAWALIVWRCSLVFSSFDKLVSVLIHLLPGIVLFTIRWWNPQTFAAMHPEGRDARVTWPYVEDKSYLWTWLFFVPLAAYTLWQLMYFLIVNVLRRQRLLRDPEVMTSYRELSKKAQKANNIWWRLSGLLGDRNRQVMCARRHGTVAASSWR

SEQ ID NO: 173176 - protein, 173 aa, Zea Mays
MILFYPEDEKLFMVCFSFAEGPLAWALIVWRCSLVFSSFDKLVSVLIHLLPGIVLFTIRWWNPQTFAAMHPEGRDARVTWPYVEDKSYLWTWLFFVPLAAYTLWQLMYFLIVNVLRRQRLLRDPEVMTSYRELSKKAQKANNIWWRLSGLLGDRNRQVMCARRHGTVAASSWR

SEQ ID NO: 173177 - protein, 412 aa, Zea Mays
MGCSNSKVDNEEPVRRSKDRRQLMKQLVRRRPELAAVHIAYLHALRNTGATLRQFVELESALSQQPPVDLVVPPSPTPQPPPPPPPELSVTSSLPPSPCPPPPVPFSPVTTIRKMEKRDGELPPPPPPLVLSPIRLRKMEDEFHGGDFTDDDDTDSCSTPLPPPLPPGIDWEDLDPYNVCPLSFPSPFADRNDKEVASHVTMDNDPEVDTEFYGEEDESMLGNNDVIVDRVHVNPAKGRALGDGNSSTVSWVTKDSDSMAVPWRSKKSLVEIVKEIDEYFLKAAASGNDVVIFLDSAGGRPDALEVEAKKGAGKNSKPAKVFSTLSWSWSFKSQQASREASVLNSSASGYGYHGKTLEKLYDEEQKLYKLIKNLQGSSIRNMSQCYKSWNQEGMIDCMPKDFGILLKNCKLG

SEQ ID NO: 173178 - protein, 443 aa, Zea Mays
MGCSNSKVDNEEPVRRSKDRRQLMKQLVRRRPELAAVHIAYLHALRNTGATLRQFVELESALSQQPPVDLVVPPSPTPQPPPPPPPELSVTSSLPPSPCPPPPVPFSPVTTIRKMEKRDGELPPPPPPLVLSPIRLRKMEDEFHGGDFTDDDDTDSCSTPLPPPLPPGIDWEDLDPYNVCPLSFPSPFADRNDKEVASHVTMDNDPEVDTEFYGEEDESMLGNNDVIVDRVHVNPAKGRALGDGNSSTVSWVTKDSDSMAVPWRSKKSLVEIVKEIDEYFLKAAASGNDVVIFLDSAGGRPDALEVEAKKGAGKNSKPAKVFSTLSWSWSFKSQQASREASVLNSSASGYGYHGKTLEKLYDEEQKLYKLIKDEEFARLQYKKHVSVLQKLESGGHDRLHAERLRDSIEELQTRIISLEEAACAYVEKHARVPSGPEPYCPAS

SEQ ID NO: 173179 - protein, 561 aa, Zea Mays
MGCSNSKVDNEEPVRRSKDRRQLMKQLVRRRPELAAVHIAYLHALRNTGATLRQFVELESALSQQPPVDLVVPPSPTPQPPPPPPPELSVTSSLPPSPCPPPPVPFSPVTTIRKMEKRDGELPPPPPPLVLSPIRLRKMEDEFHGGDFTDDDDTDSCSTPLPPPLPPGIDWEDLDPYNVCPLSFPSPFADRNDKEVASHVTMDNDPEVDTEFYGEEDESMLGNNDVIVDRVHVNPAKGRALGDGNSSTVSWVTKDSDSMAVPWRSKKSLVEIVKEIDEYFLKAAASGNDVVIFLDSAGGRPDALEVEAKKGAGKNSKPAKVFSTLSWSWSFKSQQASREASVLNSSASGYGYHGKTLEKLYDEEQKLYKLIKDEEFARLQYKKHVSVLQKLESGGHDRLHAERLRDSIEELQTRIISLEEAVSLACFSISNLRDEELYPQIIELSAGLVHMWKNMHECHQVQNHIAQQVSLLGNRPGSEPTSDTHRQATSQLEIEVSGWHTAFCNLITSQREYVSILSQWIGLTDCLPDDGGLMRSSSGILSLSEELQRALDRLPEKQLKR

SEQ ID NO: 173180 - protein, 699 aa, Zea Mays
MGCSNSKVDNEEPVRRSKDRRQLMKQLVRRRPELAAVHIAYLHALRNTGATLRQFVELESALSQQPPVDLVVPPSPTPQPPPPPPPELSVTSSLPPSPCPPPPVPFSPVTTIRKMEKRDGELPPPPPPLVLSPIRLRKMEDEFHGGDFTDDDDTDSCSTPLPPPLPPGIDWEDLDPYNVCPLSFPSPFADRNDKEVASHVTMDNDPEVDTEFYGEEDESMLGNNDVIVDRVHVNPAKGRALGDGNSSTVSWVTKDSDSMAVPWRSKKSLVEIVKEIDEYFLKAAASGNDVVIFLDSAGGRPDALEVEAKKGKNSKPAKVFSTLSWSWSFKSQQASREASVLNSSASGYGYHGKTLEKLYDEEQKLYKLIKDEEFARLQYKKHVSVLQKLESGGHDRLHAERLRDSIEELQTRIISLEEAVSLACFSISNLRDEELYPQIIELSAGLVHMWKNMHECHQVQNHIAQQVSLLGNRPGSEPTSDTHRQATSQLEIEVSGWHTAFCNLITSQREYVSILSQWIGLTDCLPDDGGLMRSSSGILSLSEELQRALDRLPEKVAAEAIKTFMSVIHSIVVQQSEERQLKKKSDNMDSKFQTQLEKHSENTMQNSAQPPNKNNYSASKNGTKLDAFIKQVEEEKARYLTSVRVSRAMTLNSLQTSLRNVFHALEGFSGVCVQAFEGISRCSEVAVIHSGAASPAISS

SEQ ID NO: 173181 - protein, 211 aa, Zea Mays
MFWRMTGLSAASPVDTILDKENFTLEELLDEDEIIQECKALNSRLINFLRDKSQVEQLLHYILEEVPEDAERKRSFKFPFIACEIFTCEIDVILRTLVEDEELMDLLFSFVKPDHPHSTLLSGYFSKVVICLMLRKTAPLMSYVQGHPKIVVQLVDLIGITSIMEVLIRLIGADETIYSNYGDTLQWLENTDVLEMIADKFGSSEYTCALT

SEQ ID NO: 173182 - protein, 282 aa, Zea Mays
MLDSLGNLLKLLDTSATESGLPTTYGSLRPPLGKHRLKIVEFISVLLTIGSETAEKELRRQSAIKRSIDLFFEYPYNNFLHHHVENIIVACLEGKRPEVVEHVLHECDIVGKILVSERFSSLSTESNGPTVPSEGKTPPRIGNVGHMTRIANKLIQLGNSNNTIQAHLQENNDWVEWQTNVLVKRNEVENVYHWACGRPTSLHDRGRDSDDDDFRDRDYDVAALANNLSQAFRYGIYSNDDIEEAQGSLERDDEDVYFDDESAEVVISSLRLGDDQDRGRGS

SEQ ID NO: 173183 - protein, 125 aa, Zea Mays
MILLAAANSGASSKMVREQSDISGMVTIVVSFVISTVKKQLITYSIVLCWNHMGIHWDHSLDFSMIISAMEHFGNKFFMQIMVVSPWEIWKQRNVVIFREYIPFFLLLEALFQGHVEASAAESCP

SEQ ID NO: 173184 - protein, 184 aa, Zea Mays
MGVPKQRWTPEEEAALKAGVAKHGPGKWRTILRDSDFSALLRLRSNVDLKDKWRNLSVTAGGYGSREKARMALKKGRRVVPKLTAEPMDVDEKDMDNAHDTVIDVEPLAMAFEPLPFLESPDKSVARLDDLIVEAIRKLNEPSGSNKAVISGYIEDQYWPPADFQYLLSTKLKSLVNSGKLIKG

SEQ ID NO: 173185 - protein, 157 aa, Zea Mays
MGVPKQRWTPEEEAALKAGVAKHGPGKWRTILRDSDFSALLRLRSNVDLKDKWRNLSVTAGGYGSREKARMALKKGRRVVPKLTAEPMDVDEKDMDNAHDTVIDVEPLAMAFEPLPFLESPDKSVARLDDLIVEAIRKLNEPSGSNKAVISGYIESF

SEQ ID NO: 173186 - protein, 148 aa, Zea Mays
MHDLRLIHTDLKPENILLVSSEYIKVPSTKKNSQDEMHFKCLPQSSAIKLIDFGSTAFDNQDHNSIVSTRHYRAPEIILGLGWSFPCDIWSVGCILVELCSGEALFQTHENLEHLAMMERVLGPLPEHMIRKSRCVICNLNLVDHFIF

SEQ ID NO: 173187 - protein, 139 aa, Zea Mays
MKRATSWVFVGTFGRVLECWDRETREYVAIKVVRSIRKYRDAAMIEIDVLNRLAENEKYRSLCVQIQRWFDYRNHICIVSTSFWSIILVSRSQLPILRMHFIFVDLRMCCCLYYLSYWPSQYALYGMRDSSIKTITTLL

SEQ ID NO: 173188 - protein, 320 aa, Zea Mays
MESSQSRKRTRQAYDCAAALPPEREVVARGGASPPWREDDRDGHYVFDLGENLTRRYKILSKMGEGTFGRVLECWDRETREYVAIKVVRSIRKYRDAAMIEIDVLNRLAENEKYRSLCVQIQRWFDYRNHICIVFEKLGPSLYDFLKRNRYRPFPVELVREFGRQLLESVAYMHDLRLIHTDLKPENILLVSSEYIKVPSTKKNSQDEMHFKCLPQSSAIKLIDFGSTAFDNQDHNSIVSTRHYRAPEIILGLGWSFPCDIWSVGCILVELCSGEALFQTHENLEHLAMMERVLGPLPEHMIRKSRCVICNLNLVDHFIF

SEQ ID NO: 173189 - protein, 191 aa, Zea Mays
MESSQSRKRTRQAYDCAAALPPEREVVARGGASPPWREDDRDGHYVFDLGENLTRRYKILSKMGEGSGFLQSVVSSSDMHDLRLIHTDLKPENILLVSSEYIKVPSTKKNSQDEMHFKCLPQSSAIKLIDFGSTAFDNQDHNSIVSTRHYRAPEIILGLGWSFPCDIWSVGCILVELCSVRSLLSFLTFFS

SEQ ID NO: 173190 - protein, 229 aa, Zea Mays
MCSIALQKMRNTDLYMHDLRLIHTDLKPENILLVSSEYIKVPSTKKNSQDEMHFKCLPQSSAIKLIDFGSTAFDNQDHNSIVSTRHYRAPEIILGLGWSFPCDIWSVGCILVELCSGEALFQTHENLEHLAMMERVLGPLPEHMIRKSSSSAQKYFRRATRLNWPEGAVSRESIRAVKKLDRLKDLVSRNAGHSKAELADLLYSILRFEPSERLTAQEALEHPFFRNPT

SEQ ID NO: 173191 - protein, 259 aa, Zea Mays
MKRATSWVFVGTFGRVLECWDRETREYVAIKVVRSIRKYRDAAMIEIDVLNRLAENEKYRSLCVQIQRWFDYRNHICIVFEKLGPSLYDFLKRNRYRPFPVELVREFGRQLLESVAYMHDLRLIHTDLKPENILLVSSEYIKVPSTKKNSQDEMHFKCLPQSSAIKLIDFGSTAFDNQDHNSIVSTRHYRAPEIILGLGWSFPCDIWSVGCILVELCSGEALFQTHENLEHLAMMERVLGPLPEHMIRKSRNISGGQHV

SEQ ID NO: 173192 - protein, 423 aa, Zea Mays
MTGYERGRILHRFADLIDEHVEELAALDTVDAGKLFAVGKARDIPGAAHLLRYYAGAADKVHGATLKMAQRMHGYTLKEPVGVVGHIVPWNYPTTMFFFKVGPALAAGCAVVVKPAEQTPLSALFYAHLAREAGVPAGVLNVVPGFGPTAGAAVAAHMDVDKVSFTGSTEVGRLVMRAAAESNLKPVSLELGGKSPVIVFDDADLDMAVNLVNFATYTNKGEICVAGTRIYVQEGIYDEFVKKAAELASKSVVGDPFNPSVSQGPQVDKDQYEKVLRYIDIGKREGATLVTGGKPCGDKGYYIEPTIFTDVKDDMTIAQDEIFGPVMALMKFKTVEEVIQKANNTRYGLAAGIVTKNIDVANTVSRSIRAGAIWINCYFAFDPDAPFGGYKMSGFGKDMGMDALDKYLQTKTVVTPLYNTPWL

SEQ ID NO: 173193 - protein, 390 aa, Zea Mays
MASNGCNGNGNGNGNGKAAPAGVVVPEIKFTKLFINGEFVDAASGKTFDTRDPRTGDVLAHVAEADKADVDLAVKSARDAFEHGKWPRMSGYERGRIMSKLADLVEQHTEELAALDGADAGKLLLLGKIIDIPAATQMLRYYAGAADKIHGDVLRVSGRYQGYTLKEPIGVVGVIIPWNFPTMMFFLKVSPALAAGCTVVVKPAEQTPLSALYYAHLAKMAGVPDGVINVVPGFGPTAGAALASHMDVDSVAFTGSTEVGRLIMESAARSNLKTVSLELGGKSPLIIFDDADVDMAVNLSRLAVFFNKGEVCVAGSRVYVQEGIYDEFVKKAVEAARSWKVGDPFDVTSNMGPQVDKDQFERVLKYIEHGKSEGATLLTGGKPAADKGRT

SEQ ID NO: 173194 - protein, 480 aa, Zea Mays
MASNGCNGNGNGNGNGKAAPAGVVVPEIKFTKLFINGEFVDAASGKTFDTRDPRTGDVLAHVAEADKADVDLAVKSARDAFEHGKWPRMSGYERGRIMSKLADLVEQHTEELAALDGADAGKLLLLGKIIDIPAATQMLRYYAGAADKIHGDVLRVSGRYQGYTLKEPIGVVGVIIPWNFPTMMFFLKVSPALAAGCTVVVKPAEQTPLSALYYAHLAKMAGVPDGVINVVPGFGPTAGAALASHMDLGGKSPLIIFDDADVDMAVNLSRLAVFFNKGEVCVAGSRVYVQEGIYDEFVKKAVEAARSWKVGDPFDVTSNMGPQVDKDQFERVLKYIEHGKSEGATLLTGGKPAADKGYYIEPTIFVDVTEDMKIAQEEIFGPVMSLMKFKTVDEVIEKANCTRYGLAAGIVTKSLDVANRVSRSVRAGTVWVNCYFAFDPDAPFGGYKMSGFGRDQGLAAMDKYLQVKSVITALPDSPWY

SEQ ID NO: 173195 - protein, 79 aa, Zea Mays
MSNSTIVPCNCAPNFKKGQVPNKILTSNSVRSALFDAGNNYKDMPPFILFRMLCLFYGRVRLATSRHCCSCLDCCSCNP

SEQ ID NO: 173196 - protein, 97 aa, Zea Mays
MIDPMMSDKHPVKAMCDIRDLGLFYVVFSFPDKSNPPVFDKCDWHCVSHIEAAWDLAYSIASVCSAMVLIPSHRSIGKPSTENVLTVLARGRSSTQN

SEQ ID NO: 173197 - protein, 248 aa, Zea Mays
MAEAVAVAYEEQRRRQIEMNKRKLEELQLHHLSAAVREAAAAAKPSSAKKRKAPVPRDAATEPPRRSDRLANLPEKPMYREVRVNLPFPEGSKSNARVPLDAANSVVVEPLRWSDRLANLPKKPMYHEDSDEERSYAISKAEELVQELGSSFPIFTQPMTLSHVSGGFWLGLPKHFCREHLPKSDETITLVDEEDDESDTFYLAMQAGLSTGWKEFAIQHKLLDGDCLVFQLIERTKFKVIEIYFALQ

SEQ ID NO: 173198 - protein, 1663 aa, Zea Mays
MVSIILSLLHMDDCAKLSQSVPSECYVSHECHDINIESEGKNVVVYFVGLLLDILRHNLESKGSDTDHLSSTGLSPAGRQALEWRLKHAKHSIEDLDWRLSVLKRLPPLSERQWSWKEALVLLRAAPSKLLNLCMQRENYDIGEEAVQRFSLPAEDKASLELAEWVAGAYKRALVEDAVNRVTDNTNAAHELDILSLRTQLGSLTTILLCVDVAATSAKSVHMCRFLLDEATSMLSEIFPGRSPKVGPTYWDQIQELATISVIKRILQRLHDILDLDTLPSLQVFFTEMSISSSTECSRVGQKQRPLGLLHQMIDDAFKGKRQFLSGKLHNVARAIVDEDFDTVYSKEGVNLEKKDILSSEKGILLGHGLRILKQASRSDLASSNVVDSGPEHKGSANRYLGPLSTKPSTYLSNFIIYTATIGDIVDGTDTTHDFNYFSLVYEWPKDLLTRLVFERGSTDAAAKVADTMSVDFVHEIISACVPPVLPPRTGQGWACIPVIPTICNISSENRLCTKSSPAQGWSAHDSSLSSRQEPLYPLQLNLVKHLAQLSSVRAVLACVFGSSILSGDNESSFTHVKDSTQAPETERSFFEFALEQSERYPTLNRWIQMQSNLHRVSESSITDKSEVSLHQSKGKFCMKRTRESDSDGESELEENVISGNTSSSSLESTKHEDARLEPTTFISFDWENEAPYEKAVERLISEGKLSDALAVSDRCLRNGASDNLLQLLIEQKEEKGPGTGQIHPYGSHSLGNDTSQYCLRLRDKKVAAQLALKYLHSWDLDAATNVLTMCMCHLPENDPMRSEVLHMKQSLQRYGHIMSADEHYTRWQEVEADCEDDPEGLALRLAAKGAVSAALEVAESASLSIDLRRELQGRQLVKLLITDPLNGGGPAAASRFLSTLRDSNDALPVAIGAMNLLPDLRSKQLLVHFFLKRTVGNLSDAEIARLNLWALGLRVLSLLPLPSQQRCSSLHEHPQLIVEVLLMMKQLQSASLILKEFSSLRDDKLIIAYAKKAISINVSSAPRERRSNISASRAKQKKATTPAKTNFVQSFGNFQREARKAFSWVPRDSGTKTPPKDILRKRKSSGSGGDRSSWEAMPGLQEERTPVYPSEAQERLPFVSAPDEWVLTGDPDKDDATRSSHKYETSPDITLFKVVEKFRKKALISLCTNESVAAKGALELCMTQMKVVLSSQQLPLDASMDNIARAYHATETYVQALSYAKNLFKKLVGSSDLSSGSERSKEVDDVSVDTGSSSTGSQYLDELSDFLTQADMWLGRAELLQSLLGSGIIASLDDIADKESSSRLRDRLVNDERYSMAVYTCRKCKIDAVPVWVAWGHALVRMEHYAQARVKFKQALQQYKGDATSVVTEIINTIEGGPPVDVSSVRSMYEHLAKSAATIFDDSLSADAYLNVLYMPSTFPRSERSRQSRGHVDSQFRTASSYLEDGPRSNLDSVRYAECIHYLQDYARPQMLAFMFRHGHYTEACSLFFPFSQPTTEGETSLSSAPWSDPLTTDYGTIDDLCDLCLGYGAMAVLENTIRTITQSPTYHEAHMIQYMNTIITRICNYCETHRHFNYLYNFLVLKDDHVASGLCCIQLFMNSMSQEEALRHLGHAKTHFEEALSVRDRTIEATKLVLRSARNKGAPGKMTRETIMKYSTRVSYQ

SEQ ID NO: 173199 - protein, 1682 aa, Zea Mays
MVSIILSLLHMDDCAKLSQSVPSECYVSHECHDINIESEGKNVVVYFVGLLLDILRHNLESKGSDTDHLSSTGLSPAGRQALEWRLKHAKHSIEDLDWRLSVLKRLPPLSERQWSWKEALVLLRAAPSKLLNLCMQRENYDIGEEAVQRFSLPAEDKASLELAEWVAGAYKRALVEDAVNRVTDNTNAAHELDILSLRTQLGSLTTILLCVDVAATSAKSVHMCRFLLDEATSMLSEIFPGRSPKVGPTYWDQIQELATISVIKRILQRLHDILDLDTLPSLQVFFTEMSISSSTECSRVGQKQRPLGLLHQMIDDAFKGKRQFLSGKLHNVARAIVDEDFDTVYSKEGVNLEKKDILSSEKGILLGHGLRILKQASRSDLASSNVVDSGPEHKGSANRYLGPLSTKPSTYLSNFIIYTATIGDIVDGTDTTHDFNYFSLVYEWPKDNTCGLVSLAPMSAFGKLGTKQLLTRLVFERGSTDAAAKVADTMSVDFVHEIISACVPPVLPPRTGQGWACIPVIPTICNISSENRLCTKSSPAQGWSAHDSSLSSRQEPLYPLQLNLVKHLAQLSSVRAVLACVFGSSILSGDNESSFTHVKDSTQAPETERSFFEFALEQSERYPTLNRWIQMQSNLHRVSESSITDKSEVSLHQSKGKFCMKRTRESDSDGESELEENVISGNTSSSSLESTKHEDARLEPTTFISFDWENEAPYEKAVERLISEGKLSDALAVSDRCLRNGASDNLLQLLIEQKEEKGPGTGQIHPYGSHSLGNDTSQYCLRLRDKKVAAQLALKYLHSWDLDAATNVLTMCMCHLPENDPMRSEVLHMKQSLQRYGHIMSADEHYTRWQEVEADCEDDPEGLALRLAAKGAVSAALEVAESASLSIDLRRELQGRQLVKLLITDPLNGGGPAAASRFLSTLRDSNDALPVAIGAMNLLPDLRSKQLLVHFFLKRTVGNLSDAEIARLNLWALGLRVLSLLPLPSQQRCSSLHEHPQLIVEVLLMMKQLQSASLILKEFSSLRDDKLIIAYAKKAISINVSSAPRERRSNISASRAKQKKATTPAKTNFVQSFGNFQREARKAFSWVPRDSGTKTPPKDILRKRKSSGSGGDRSSWEAMPGLQEERTPVYPSEAQERLPFVSAPDEWVLTGDPDKDDATRSSHKYETSPDITLFKALISLCTNESVAAKGALELCMTQMKVVLSSQQLPLDASMDNIARAYHATETYVQALSYAKNLFKKLVGSSDLSSGSERSKEVDDVSVDTGSSSTGSQYLDELSDFLTQADMWLGRAELLQSLLGSGIIASLDDIADKESSSRLRDRLVNDERYSMAVYTCRKCKIDAVPVWVAWGHALVRMEHYAQARVKFKQALQQYKGDATSVVTEIINTIEGGPPVDVSSVRSMYEHLAKSAATIFDDSLSADAYLNVLYMPSTFPRSERSRQSRGHVDSQFRTASSYLEDGPRSNLDSVRYAECIHYLQDYARPQMLAFMFRHGHYTEACSLFFPFSQPTTEGETSLSSAPWSDPLTTDYGTIDDLCDLCLGYGAMAVLENTIRTITQSPTYHEAHMIQYMNTIITRICNYCETHRHFNYLYNFLVLKDDHVASGLCCIQLFMNSMSQEEALRHLGHAKTHFEEALSVRDRTIEATKLVLRSARNKGAPGKMTRETIMKYSTRVSYQAKVHGC

SEQ ID NO: 173200 - protein, 591 aa, Zea Mays
MAASEREAALLTRVAANHLFLAQFEPLRAVLLSLRRRDPVLCADFLRAVAAAGGRVPGVLWSAPPACPSPSHLAWLAVLELAALPSTPNPEALRLKAEFLVLLQPIADDPAIGAEAREILTKLLDLGVTRLKLEVEGGGDAGASAEEASVKDLRGLWEVFLDNAFVFDALCIGVSRQIALDRGFGVDVLLWLRRNVQLAHLDAVKTLVTEGDLDAAPGHLRFLCLDHGLEKDEYKVVIAELLRKGWAKTSNYGGTWSELQNRITKLYGAALQSTSPELVQLVQLILDNILSEEIEDHDVSDANGMPLPFEKFLETLLLERDTDSDDKVLLDAAITSCKKDLYHYCRLSGKHMLEVVLETALSSIKREQLLEAVDVVSLFPLLHPLVAVLGWDILKGKTGLRRKLMQLFWTSKSQGLRLQEYSHYRSPTDETSCEEYLCDLLCFHLDLARFVSSVNSGCLWNLRNSLLFTQQEQGSDVNNAEILDPFVENLILERLAVQSPMRVLFDVVPGIKFQDAIELVGMQPLPSTTAAWKRMHDIELMHMRYSLQSVALALGEMEKCTGALFVGEDILLFLEVAKLWSYQFNELLGAT

SEQ ID NO: 173201 - protein, 2228 aa, Zea Mays
MAASEREAALLTRVAANHLFLAQFEPLRAVLLSLRRRDPVLCADFLRAVAAAGGRVPGVLWSAPPACPSPSHLAWLAVLELAALPSTPNPEALRLKAEFLVLLQPIADDPAIGAEAREILTKLLDLGVTRLKLEVEGGGDAGASAEEASVKDLRGLWEVFLDNAFVFDALCIGVSRQIALDRGFGVDVLLWLRRNVQLAHLDAVKTLVTEGDLDAAPGHLRFLCLDHGLEKDEYKVVIAELLRKGWAKTSNYGGTWSELQNRITKLYGAALQSTSPELVQLVQLILDNILSEEIEDHDVSDANGMPLPFEKFLETLLLERDTDSDDKVLLDAAITSCKKDLYHYCRLSGKHMLEVVLETALSSIKREQLLEAVDVVSLFPLLHPLVAVLGWDILKGKTGLRRKLMQLFWTSKSQGLRLQEYSHYRSPTDETSCEEYLCDLLCFHLDLARFVSSVNSGCLWNLRNSLLFTQQEQGSDVNNAEILDPFVENLILERLAVQSPMRVLFDVVPGIKFQDAIELVGMQPLPSTTAAWKRMHDIELMHMRYSLQSVALALGEMEKCTGDENECYYHKALSYLREMQNFMEAIKSSPRKIFMVSIILSLLHMDDCAKLSQSVPSECYVSHECHDINIESEGKNVVVYFVGLLLDILRHNLESKGSDTDHLSSTGLSPAGRQALEWRLKHAKHSIEDLDWRLSVLKRLPPLSERQWSWKEALVLLRAAPSKLLNLCMQRENYDIGEEAVQRFSLPAEDKASLELAEWVAGAYKRALVEDAVNRVTDNTNAAHELDILSLRTQLGSLTTILLCVDVAATSAKSVHMCRFLLDEATSMLSEIFPGRSPKVGPTYWDQIQELATISVIKRILQRLHDILDLDTLPSLQVFFTEMSISSSTECSRVGQKQRPLGLLHQMIDDAFKGKRQFLSGKLHNVARAIVDEDFDTVYSKEGVNLEKKDILSSEKGILLGHGLRILKQASRSDLASSNVVDSGPEHKGSANRYLGPLSTKPSTYLSNFIIYTATIGDIVDGTDTTHDFNYFSLVYEWPKDNTCGLVSLAPMSAFGKLGTKQLLTRLVFERGSTDAAAKVADTMSVDFVHEIISACVPPVLPPRTGQGWACIPVIPTICNISSENRLCTKSSPAQGWSAHDSSLSSRQEPLYPLQLNLVKHLAQLSSVRAVLACVFGSSILSGDNESSFTHVKDSTQAPETERSFFEFALEQSERYPTLNRWIQMQSNLHRVSESSITDKSEVSLHQSKGKFCMKRTRESDSDGESELEENVISGNTSSSSLESTKHEDARLEPTTFISFDWENEAPYEKAVERLISEGKLSDALAVSDRCLRNGASDNLLQLLIEQKEEKGPGTGQIHPYGSHSLGNDTSQYCLRLRDKKVAAQLALKYLHSWDLDAATNVLTMCMCHLPENDPMRSEVLHMKQSLQRYGHIMSADEHYTRWQEVEADCEDDPEGLALRLAAKGAVSAALEVAESASLSIDLRRELQGRQLVKLLITDPLNGGGPAAASRFLSTLRDSNDALPVAIGAMNLLPDLRSKQLLVHFFLKRTVGNLSDAEIARLNLWALGLRVLSLLPLPSQQRCSSLHEHPQLIVEVLLMMKQLQSASLILKEFSSLRDDKLIIAYAKKAISINVSSAPRERRSNISASRAKQKKATTPAKTNFVQSFGNFQREARKAFSWVPRDSGTKTPPKDILRKRKSSGSGGDRSSWEAMPGLQEERTPVYPSEAQERLPFVSAPDEWVLTGDPDKDDATRSSHKYETSPDITLFKALISLCTNESVAAKGALELCMTQMKVVLSSQQLPLDASMDNIARAYHATETYVQALSYAKNLFKKLVGSSDLSSGSERSKEVDDVSVDTGSSSTGSQYLDELSDFLTQADMWLGRAELLQSLLGSGIIASLDDIADKESSSRLRDRLVNDERYSMAVYTCRKCKIDAVPVWVAWGHALVRMEHYAQARVKFKQALQQYKGDATSVVTEIINTIEGGPPVDVSSVRSMYEHLAKSAATIFDDSLSADAYLNVLYMPSTFPRSERSRQSRGHVDSQFRTASSYLEDGPRSNLDSVRYAECIHYLQDYARPQMLAFMFRHGHYTEACSLFFPFSQPTTEGETSLSSAPWSDPLTTDYGTIDDLCDLCLGYGAMAVLENTIRTITQSPTYHEAHMIQYMNTIITRICNYCETHRHFNYLYNFLVLKDDHVASGLCCIQLFMNSMSQEEALRHLGHAKAKVHGC

SEQ ID NO: 173202 - protein, 1617 aa, Zea Mays
MVSIILSLLHMDDCAKLSQSVPSECYVSHECHDINIESEGKNVVVYFVGLLLDILRHNLESKGSDTDHLSSTGLSPAGRQALEWRLKHAKHSIEDLDWRLSVLKRLPPLSERQWSWKEALVLLRAAPSKLLNLCMQRENYDIGEEAVQRFSLPAEDKASLELAEWVAGAYKRALVEDAVNRVTDNTNAAHELDILSLRTQLGSLTTILLCVDVAATSAKSVHMCRFLLDEATSMLSEIFPGRSPKVGPTYWDQIQELATISVIKRILQRLHDILDLDTLPSLQVFFTEMSISSSTECSRVGQKQRPLGLLHQMIDDAFKGKRQFLSGKLHNVARAIVDEDFDTVYSKEGVNLEKKDILSSEKGILLGHGLRILKQASRSDLASSNVVDSGPEHKGSANRYLGPLSTKPSTYLSNFIIYTATIGDIVDGTDTTHDFNYFSLVYEWPKDLLTRLVFERGSTDAAAKVADTMSVDFVHEIISACVPPVLPPRTGQGWACIPVIPTICNISSENRLCTKSSPAQGWSAHDSSLSSRQEPLYPLQLNLVKHLAQLSSVRAVLACVFGSSILSGDNESSFTHVKDSTQAPETERSFFEFALEQSERYPTLNRWIQMQSNLHRVSESSITDKSEVSLHQSKGKFCMKRTRESDSDGESELEENVISGNTSSSSLESTKHEDARLEPTTFISFDWENEAPYEKAVERLISEGKLSDALAVSDRCLRNGASDNLLQLLIEQKEEKGPGTGQIHPYGSHSLGNDTSQYCLRLRDKKVAAQLALKYLHSWDLDAATNVLTMCMCHLPENDPMRSEVLHMKQSLQRYGHIMSADEHYTRWQEVEADCEDDPEGLALRLAAKGAVSAALEVAESASLSIDLRRELQGRQLVKLLITDPLNGGGPAAASRFLSTLRDSNDALPVAIGAMNLLPDLRSKQLLVHFFLKRTVGNLSDAEIARLNLWALGLRVLSLLPLPSQQRCSSLHEHPQLIVEVLLMMKQLQSASLILKEFSSLRDDKLIIAYAKKAISINREARKAFSWVPRDSGTKTPPKDILRKRKSSGSGGDRSSWEAMPGLQEERTPVYPSEAQERLPFVSAPDEWVLTGDPDKDDATRSSHKYETSPDITLFKALISLCTNESVAAKGALELCMTQMKVVLSSQQLPLDASMDNIARAYHATETYVQALSYAKNLFKKLVGSSDLSSGSERSKEVDDVSVDTGSSSTGSQYLDELSDFLTQADMWLGRAELLQSLLGSGIIASLDDIADKESSSRLRDRLVNDERYSMAVYTCRKCKIDAVPVWVAWGHALVRMEHYAQARVKFKQALQQYKGDATSVVTEIINTIEGGPPVDVSSVRSMYEHLAKSAATIFDDSLSADAYLNVLYMPSTFPRSERSRQSRGHVDSQFRTASSYLEDGPRSNLDSVRYAECIHYLQDYARPQMLAFMFRHGHYTEACSLFFPFSQPTTEGETSLSSAPWSDPLTTDYGTIDDLCDLCLGYGAMAVLENTIRTITQSPTYHEAHMIQYMNTIITRICNYCETHRHFNYLYNFLVLKDDHVASGLCCIQLFMNSMSQEEALRHLGHAKTHFEEALSVRDRTIEATKLVLRSARNKGAPGKMTRETIMKYSTRVSYQ

SEQ ID NO: 173203 - protein, 1543 aa, Zea Mays
MTHAETEETHWVRSPARSGGRRVLHPSWDADISCGIHAIMACNANISCVFMHTSCYTHCAVDNALVLFFNELYYGYVVPCFGDLTAVEDAVNRVTDNTNAAHELDILSLRTQLGSLTTILLCVDVAATSAKSVHMCRFLLDEATSMLSEIFPGRSPKVGPTYWDQIQELATISVIKRILQRLHDILDLDTLPSLQVFFTEMSISSSTECSRVGQKQRPLGLLHQMIDDAFKGKRQFLSGKLHNVARAIVDEDFDTVYSKEGVNLEKKDILSSEKGILLGHGLRILKQASRSDLASSNVVDSGPEHKGSANRYLGPLSTKPSTYLSNFIIYTATIGDIVDGTDTTHDFNYFSLVYEWPKDLLTRLVFERGSTDAAAKVADTMSVDFVHEIISACVPPVLPPRTGQGWACIPVIPTICNISSENRLCTKSSPAQGWSAHDSSLSSRQEPLYPLQLNLVKHLAQLSSVRAVLACVFGSSILSGDNESSFTHVKDSTQAPETERSFFEFALEQSERYPTLNRWIQMQSNLHRVSESSITDKSEVSLHQSKGKFCMKRTRESDSDGESELEENVISGNTSSSSLESTKHEDARLEPTTFISFDWENEAPYEKAVERLISEGKLSDALAVSDRCLRNGASDNLLQLLIEQKEEKGPGTGQIHPYGSHSLGNDTSQYCLRLRDKKVAAQLALKYLHSWDLDAATNVLTMCMCHLPENDPMRSEVLHMKQSLQRYGHIMSADEHYTRWQEVEADCEDDPEGLALRLAAKGAVSAALEVAESASLSIDLRRELQGRQLVKLLITDPLNGGGPAAASRFLSTLRDSNDALPVAIGAMNLLPDLRSKQLLVHFFLKRTVGNLSDAEIARLNLWALGLRVLSLLPLPSQQRCSSLHEHPQLIVEVLLMMKQLQSASLILKEFSSLRDDKLIIAYAKKAISINREARKAFSWVPRDSGTKTPPKDILRKRKSSGSGGDRSSWEAMPGLQEERTPVYPSEAQERLPFVSAPDEWVLTGDPDKDDATRSSHKYETSPDITLFKVVEKFRKKALISLCTNESVAAKGALELCMTQMKVVLSSQQLPLDASMDNIARAYHATETYVQALSYAKNLFKKLVGSSDLSSGSERSKEVDDVSVDTGSSSTGSQYLDELSDFLTQADMWLGRAELLQSLLGSGIIASLDDIADKESSSRLRDRLVNDERYSMAVYTCRKCKIDAVPVWVAWGHALVRMEHYAQARVKFKQALQQYKGDATSVVTEIINTIEGGPPVDVSSVRSMYEHLAKSAATIFDDSLSADAYLNVLYMPSTFPRSERSRQSRGHVDSQFRTASSYLEDGPRSNLDSVRYAECIHYLQDYARPQMLAFMFRHGHYTEACSLFFPFSQPTTEGETSLSSAPWSDPLTTDYGTIDDLCDLCLGYGAMAVLENTIRTITQSPTYHEAHMIQYMNTIITRICNYCETHRHFNYLYNFLVLKDDHVASGLCCIQLFMNSMSQEEALRHLGHAKTHFEEALSVRDRTIEATKLVLRSARNKGAPGKMTRETIMKYSTRVSYQAKVHGC

SEQ ID NO: 173204 - protein, 1384 aa, Zea Mays
MLSEIFPGRSPKVGPTYWDQIQELATISVIKRILQRLHDILDLDTLPSLQVFFTEMSISSSTECSRVGQKQRPLGLLHQMIDDAFKGKRQFLSGKLHNVARAIVDEDFDTVYSKEGVNLEKKDILSSEKGILLGHGLRILKQASRSDLASSNVVDSGPEHKGSANRYLGPLSTKPSTYLSNFIIYTATIGDIVDGTDTTHDFNYFSLVYEWPKDLLTRLVFERGSTDAAAKVADTMSVDFVHEIISACVPPVLPPRTGQGWACIPVIPTICNISSENRLCTKSSPAQGWSAHDSSLSSRQEPLYPLQLNLVKHLAQLSSVRAVLACVFGSSILSGDNESSFTHVKDSTQAPETERSFFEFALEQSERYPTLNRWIQMQSNLHRVSESSITDKSEVSLHQSKGKFCMKRTRESDSDGESELEENVISGNTSSSSLESTKHEDARLEPTTFISFDWENEAPYEKAVERLISEGKLSDALAVSDRCLRNGASDNLLQLLIEQKEEKGPGTGQIHPYGSHSLGNDTSQYCLRLRDKKVAAQLALKYLHSWDLDAATNVLTMCMCHLPENDPMRSEVLHMKQSLQRYGHIMSADEHYTRWQEVEADCEDDPEGLALRLAAKGAVSAALEVAESASLSIDLRRELQGRQLVKLLITDPLNGGGPAAASRFLSTLRDSNDALPVAIGAMNLLPDLRSKQLLVHFFLKRTVGNLSDAEIARLNLWALGLRVLSLLPLPSQQRCSSLHEHPQLIVEVLLMMKQLQSASLILKEFSSLRDDKLIIAYAKKAISINREARKAFSWVPRDSGTKTPPKDILRKRKSSGSGGDRSSWEAMPGLQEERTPVYPSEAQERLPFVSAPDEWVLTGDPDKDDATRSSHKYETSPDITLFKALISLCTNESVAAKGALELCMTQMKVVLSSQQLPLDASMDNIARAYHATETYVQALSYAKNLFKKLVGSSDLSSGSERSKEVDDVSVDTGSSSTGSQYLDELSDFLTQADMWLGRAELLQSLLGSGIIASLDDIADKESSSRLRDRLVNDERYSMAVYTCRKCKIDAVPVWVAWGHALVRMEHYAQARVKFKQALQQYKGDATSVVTEIINTIEGGPPVDVSSVRSMYEHLAKSAATIFDDSLSADAYLNVLYMPSTFPRSERSRQSRGHVDSQFRTASSYLEDGPRSNLDSVRYAECIHYLQDYARPQMLAFMFRHGHYTEACSLFFPFSQPTTEGETSLSSAPWSDPLTTDYGTIDDLCDLCLGYGAMAVLENTIRTITQSPTYHEAHMIQYMNTIITRICNYCETHRHFNYLYNFLVLKDDHVASGLCCIQLFMNSMSQEEALRHLGHAKTHFEEALSVRDRTIEATKLVLRSARNKGAPGKMTRETIMKYSTRVSYQ

SEQ ID NO: 173205 - protein, 1443 aa, Zea Mays
MLSEIFPGRSPKVGPTYWDQIQELATISVIKRILQRLHDILDLDTLPSLQVFFTEMSISSSTECSRVGQKQRPLGLLHQMIDDAFKGKRQFLSGKLHNVARAIVDEDFDTVYSKEGVNLEKKDILSSEKGILLGHGLRILKQASRSDLASSNVVDSGPEHKGSANRYLGPLSTKPSTYLSNFIIYTATIGDIVDGTDTTHDFNYFSLVYEWPKDNTCGLVSLAPMSAFGKLGTKQLLTRLVFERGSTDAAAKVADTMSVDFVHEIISACVPPVLPPRTGQGWACIPVIPTICNISSENRLCTKSSPAQGWSAHDSSLSSRQEPLYPLQLNLVKHLAQLSSVRAVLACVFGSSILSGDNESSFTHVKDSTQAPETERSFFEFALEQSERYPTLNRWIQMQSNLHRVSESSITDKSEVSLHQSKGKFCMKRTRESDSDGESELEENVISGNTSSSSLESTKHEDARLEPTTFISFDWENEAPYEKAVERLISEGKLSDALAVSDRCLRNGASDNLLQLLIEQKEEKGPGTGQIHPYGSHSLGNDTSQYCLRLRDKKVAAQLALKYLHSWDLDAATNVLTMCMCHLPENDPMRSEVLHMKQSLQRYGHIMSADEHYTRWQEVEADCEDDPEGLALRLAAKGAVSAALEVAESASLSIDLRRELQGRQLVKLLITDPLNGGGPAAASRFLSTLRDSNDALPVAIGAMNLLPDLRSKQLLVHFFLKRTVGNLSDAEIARLNLWALGLRVLSLLPLPSQQRCSSLHEHPQLIVEVLLMMKQLQSASLILKEFSSLRDDKLIIAYAKKAISINVSSAPRERRSNISASRAKQKKATTPAKTNFVQSFGNFQREARKAFSWVPRDSGTKTPPKDILRKRKSSGSGGDRSSWEAMPGLQEERTPVYPSEAQERLPFVSAPDEWVLTGDPDKDDATRSSHKYETSPDITLFKALISLCTNESVAAKGALELCMTQMKVVLSSQQLPLDASMDNIARAYHATETYVQALSYAKNLFKKLVGSSDLSSGSERSKEVDDVSVDTGSSSTGSQYLDELSDFLTQADMWLGRAELLQSLLGSGIIASLDDIADKESSSRLRDRLVNDERYSMAVYTCRKCKIDAVPVWVAWGHALVRMEHYAQARVKFKQALQQYKGDATSVVTEIINTIEGGPPVDVSSVRSMYEHLAKSAATIFDDSLSADAYLNVLYMPSTFPRSERSRQSRGHVDSQFRTASSYLEDGPRSNLDSVRYAECIHYLQDYARPQMLAFMFRHGHYTEACSLFFPFSQPTTEGETSLSSAPWSDPLTTDYGTIDDLCDLCLGYGAMAVLENTIRTITQSPTYHEAHMIQYMNTIITRICNYCETHRHFNYLYNFLVLKDDHVASGLCCIQLFMNSMSQEEALRHLGHAKTHFEEALSVRDRTIEATKLVLRSARNKGAPGKMTRETIMKYSTRVSYQ

SEQ ID NO: 173206 - protein, 115 aa, Zea Mays
MVVETLAEKHFDLAFRMLHEFDLPAVDIYAGVAASLAERKKGGQLTEFLKNIRGTIDDDEWDQVIGAAINVYANKHKERPDRLIDMLISNHSTCLCCLWTSKKCIPNSRTKWKCR

SEQ ID NO: 173207 - protein, 133 aa, Zea Mays
MVVETLAEKHFDLAFRMLHEFDLPERKKGGQLTEFLKNIRGTIDDDEWDQVIGAAINVYANKHKERPDRLIDMLISNHRKVLACVVCGRLKSAFQIAARSGSVADVQYVAHQALHANALTVLDMCKQWLAQYM

SEQ ID NO: 173208 - protein, 214 aa, Zea Mays
MATDSSALQASSESIAQKMGFFRVPDLLVKLSAKCLSDLDVVRSPTSPLDLKFFTGLGNKSPGDASQNQKILLGDRVGLGLVDSLTDDNPAPLGGRKVLFLGSEMRIIDNLSRKNSSTAPDQAGEVEQKDDNMSDGLMGSAMSLGDIINSEDYTRVVSRGPNPRTTHFFGDRVFELQAEQLMPVEMRSSKKRKTSTSIRVTNPFAAWSAGKISW

SEQ ID NO: 173209 - protein, 235 aa, Zea Mays
MATDSSALQASSESIAQKMGFFRVPDLLVKLSAKCLSDLDVVRSPTSPLDLKFFTGLGNKSPGDASQNQKILLGDRVGLGLVDSLTDDNPAPLGGRKVLFLGSEMRIIDNLSRKNSSTAPDQAGEVEQKDDNMSDGLMGSAMSLGDIINSEDYTRVVSRGPNPRTTHFFGDRVFELQAEQLMPVESKVDQSTSPVEDGLMSFCYFCSEKLKEAEDIYIYQVTNPFAAWSAGKISW

SEQ ID NO: 173210 - protein, 642 aa, Zea Mays
MTTPPRNATLPVLLVLLLLAPHLLATAPAFASRGLSASDAAHIRRRQLLQYHGGGAGNGSGVVVDPSYAFPNPRLRDAYVALQAWRRAILSDPHNVTGSWTGPDVCAYAGVYCAPSPQDPDLTVVASVDLNHADLAGHLPEELGLLADLAVLHLNSNRFCGLVPRSLDKLHALHELDLSNNRLVGAFPDVVLRLPSLRYLDLRFNDFEGPVPSELFDRPLDAIFINSNRFRFQIPDNFGNSPASVLVLANNDFGGCLPASVANMSSTLNEIILMNTGLKSCVPPELGALMGLTVLDLSFNKLMGAIPDELARLHSIEQLDLGHNRLVGDVPEEICRLPHLQNFTYSYNFITGEPPVCLHVKSLDDRRNCIPYRPDQRSPEQCNFFRNHHHVNCDAFKCKKFILPSPPLPPPPSPPPPSPPPPSPSPPPPSPPPPSPPPPSPSPPPPSPPPPSPPPPSPPPPSPPPPSPSPPPPSPPPPSPPPPSPSPPPPSPQPPSPPPPSPSPPPLYYEESPEERYLSPPPPAYTEVPPPPYYEESPEERYLSPPPPAHQESPPPIHHDPPPPPYYEVSPEDRYLSPPPPPSPASLPKYDYSSPPPPSSPPYSEVSPEERYPSPPPPPRALPKLPVYDYSSPPPPAAAWTP

SEQ ID NO: 173211 - protein, 312 aa, Zea Mays
MADPPASDAQPEQAPAAAAASNDPAEDATVEKPLAAPPTPKLDAAAAADGSAYEVEDDEYVSDPNDEPFPTMRRREASDDEGSEDGRPRARIGPDQDDDGQGGPEAYDDEVDEEDEEYYDEEEEDLGEGFEEYEGRAAPPMEDGGGGGGGQVSRGEDGVAGEEGLPEGEAKGEGEEKEQEPFAVPTSGAFYMHDDRFQEENRGRRRRMFGARKLWDAKDDQAWVHDRFEEMNLHDDRYEDQRMSRGRFRGRGGRGKARGGGRGFPRGGKQPNYHEDGNTQNRPPKVVRGRGPRRYEAVARSSREVVGSQRKH

SEQ ID NO: 173212 - protein, 217 aa, Zea Mays
MYPDYRYPPKGQKRKSATSGKDITSAAPSEPAPKRRKVKVLTHRPHYIEPATVPKFGGESSSATKVEEPALTQRIEEPATMPKVNKIEEPRIKETKISVLSPSAEVTVSKAQKDLIATPKRKRMVNVLDVLETIKNSSSTPGKTVEASKTQAETKLTEAEAAKSQARTEGGPSKPAKEKSLETGEKEMEKEAATQILPEKTVTSTLEASSEVPDYIV

SEQ ID NO: 173213 - protein, 80 aa, Zea Mays
MVLALLDESDLDIASDAVEMIVDRADTKGDGKIDQEEWTEYAKDNPYVLRNMTLPYLKDITMVFPSFVMHSEISETDMAV

SEQ ID NO: 173214 - protein, 214 aa, Zea Mays
MGCLQTKHASRSPHLLDTREAVALAAETSFTVSEVEALHDLFRKISNSVIRDNLIHKEEFQLALFRGKKQQNLFVDRVFDLFDQKRNGVIEFGEFVRSLGVFHPDAPEDQKVAFAFKLYDLKQTGFIERHELKEMVLALLDESDLDIASDAVEMIVDRADTKGDGKIDQEEWTEYAKDNPYVLRNMTLPYLKDITMVFPSFVMHSEISETDMAV

SEQ ID NO: 173215 - protein, 130 aa, Zea Mays
MFIQKITYGTQGIYFEGRNKGRNQSARGGLQPTKNYMHQNQQLSEQIIEAMLQRCARLCWHSALGKLLQRNKIVNQGRYHRRRFDKHQLRVSIIKQVLTSGNHLDLIAGQGETSADNLAYAEPCIELNSK

SEQ ID NO: 173216 - protein, 316 aa, Zea Mays
MVVLVVRDICAHLSQMVTTQETSLAASCRRVYAHAHDYHINSISNNSDGETFISADDLRINLWNLEISNQSFNIIDVKPTNMEDLTEVITSAEFHPTHCNTLAYSSSKGSIRLVDLRQSALCDNHSQIFEQHEAPGSRSFFTEIIASISDIKFSKDGRHILSRDYMTLKLWDVKMNSGPVATFQVHEYLRPKLCDLYENDSIFDKFECCQSGDGLRVATGSYSNIFRVFGCRSGSSEATTLEATRNPTRRQVQTTSRATRSLSTLTRAVRRGGESTGIDANGNSYDLSTKLLHLAWHPSENLIACAAANSLYMYYA

SEQ ID NO: 173217 - protein, 245 aa, Zea Mays
MTMNGAAAPERSPPASPPPLVQAQAPPSPSPTQPLEWRFSQVFGERSAGEEVQDVDIISAIEFNKSGHHLATGDRGGRVVLFERTDVKDHASRKDAEKADYSISRHPEFRYKTEFQSHEPEFDYLKSLEIEEKINQIKWCQATNCALFLLSTNDKTIKFWKVQEKKVKKVSEMNLDRSTAPTNGSPGGTGYLRPSLSNGNVLKPGGLPLLRLPVVTTQETSLAASCRRVYAHAHDYHINSISNNS

SEQ ID NO: 173218 - protein, 235 aa, Zea Mays
MEDLTEVITSAEFHPTHCNTLAYSSSKGSIRLVDLRQSALCDNHSQIFEQHEAPGSRSFFTEIIASISDIKFSKDGRHILSRDYMTLKLWDVKMNSGPVATFQVHEYLRPKLCDLYENDSIFDKFECCQSGDGLRVATGSYSNIFRVFGCRSGSSEATTLEATRNPTRRQVQTTSRATRSLSTLTRAVRRGGESTGIDANGNSYDLSTKLLHLAWHPSENLIACAAANSLYMYYA

SEQ ID NO: 173219 - protein, 151 aa, Zea Mays
MTLKLWDVKMNSGPVATFQVHEYLRPKLCDLYENDSIFDKFECCQSGDGLRVATGSYSNIFRVFGCRSGSSEATTLEATRNPTRRQVQTTSRATRSLSTLTRAVRRGGESTGIDANGNSYDLSTKLLHLAWHPSENLIACAAANSLYMYYA

SEQ ID NO: 173220 - protein, 288 aa, Zea Mays
MAAGSIVVDFPSMGAALCFPSLDSLLRDSASGFLAAVSNAPAPGAADLTNFHRVFSRVLSAYPDPPLEAVWFFSALSFHDRPDDLRSLLQLLSAFTASSPGTAKPLALLAPVVSELFHADKPRRETETLVEAVLSYISICSNRSAPSSTVGATADAVSLLPAFGELVKVWSVRYSRERCPFQVLFPLAGDEARRELMKEGCSVDYLAGVVLAEAFLLRLCLKVQNATGVPRSELQKELKIWAVSSIPVFQNHRFFGVLLNMLLNSPLPVYSLVHFAVIICKEHDLSWS

SEQ ID NO: 173221 - protein, 492 aa, Zea Mays
MAAGSIVVDFPSMGAALCFPSLDSLLRDSASGFLAAVSNAPAPGAADLTNFHRVFSRVLSAYPDPPLEAVWFFSALSFHDRPDDLRSLLQLLSAFTASSPGTAKPLALLAPVVSELFHADKPRRETETLVEAVLSYISICSNRSAPSSTVGATADAVSLLPAFGELVKVWSVRYSRERCPFQVLFPLAGDEARRELMKEGCSVDYLAGVVLAEAFLLRLCLKVQNATGVPRSELQKELKIWAVSSIPVFQNHRFFGVLLNMLLNSPLPVYSLVVMRSYCNQNLAGVEISSHFISSDRRKGDQGRAVSFINAFSTSNVPNFLIKWATFQAGSGALSKPIANTPQSIIKWLVDLEVKGLKVFGDYSSCIMERFAYDGVKNGHGNMIHSDADLFFFDKQSGREFMDTKGSEDEAVDEMETAGNNAFMAAAQSMKGVTDGMRKRKSCGYEDATAVKFVKYKVEDSSLKDYLSAANGISSGSEVENPQSDDEMEESN

SEQ ID NO: 173222 - protein, 796 aa, Zea Mays
MASVNLHRPPLLTPTFVLVSTPMFVPRLPLFHPPVRTCRPCSPCSHPPPLLPLSRAAVTGSENTPADASRIQGLPLPSPALTRTPSPPPPPSCEREEGPLDLRGAWRSGTTHAEAAPVGCCCIRPGSGEFQEAVMSNRDEVSVFVKCLRLGAAEYLVKPLRTNELLNLWTHVWQRRRMLGLPKKNFFNDNFELVLSEPSDANTNSTTLLSDETDDRPKGNTNQETGTSKQLEYESNPLVAEPDQREKMEGVPGSALDASQKSSPRRVFSRPIKTNLRVAESSAFLAYVKSSTPATSSFDSELQRGGSRLDSLDNQGNCSSATDRSDTGTDVNIRNKEAFEMPAQYPMVWFSSSNMHMERSSEGHNDTSGTPPAYHFPFYYPGMVEHNMALSSAQDFQANINNAQAHTPQEGTFKICHYAGELFYMQHDSGPDWLIFIPGSTVQADAVVGEYGFLLLRSIASQDPLSVSIAVLQQLNIPPEMYQVGYTKLFFRTGQVAALENAKIQMLHGTLRIQKHFRGMHSRQGYQRLKKAAMNLQSFIRGERARIHFDNLVKRWRAAVLIQKYTRRRLAANMFNDQLNHIILLQSVMRGCLTRRKYKCLQNEKESKASHNIVPGETRKNNAESRISHCVDFRNLPIHIRTPLIHLKCQDVKYGKRVHILPIDGTVQGITGNLFDAFLKHTEIFCDGEPIKREDEERLDEVGYYDVGGVRKQMAQIRELVELPLRHPQLFKSIGVKPPKGILLYGPPGSGKTLIARAVANETGAFFFLINGLAVPLNWRPLSTKFVSTMIGGGIQ

SEQ ID NO: 173223 - protein, 394 aa, Zea Mays
MVEHNMALSSAQDFQANINNAQAHTPQEGTFKICHYAGELFYMQHDSGPDWLIFIPGSTVQADAVVGEYGFLLLRSIASQDPLSVSIAVLQQLNIPPEMYQVGYTKLFFRTGQVAALENAKIQMLHGTLRIQKHFRVIRGERARIHFDNLVKRWRAAVLIQKYTRRRLAANMFNDQLNHIILLQSVMRGCLTRRKYKCLQNEKESKASHNIVPGETRKNNAESRISHCVDFRNLPIHIRTPLIHLKCQDVKYGKRVHILPIDGTVQGITGNLFDAFLKHTEIFCDGEPIKREDEERLDEVGYYDVGGVRKQMAQIRELVELPLRHPQLFKSIGVKPPKGILLYGPPGSGKTLIARAVANETGAFFFLINGLAVPLNWRPLSTKFVSTMIGGGIQ

SEQ ID NO: 173224 - protein, 119 aa, Zea Mays
MARKCSHCGNCGHNSRTCGRETMLCEAGDNGGHGGLRLFGVQVRIGGGGAGSASMKKSYSMDCLQLAAPGCSLVSPSTSSSSSSLLLMSIEEGSERGAPNGYLSDGPHGRAVQERKKGT

SEQ ID NO: 173225 - protein, 574 aa, Zea Mays
MAQAARLNLRMQKEIKLLLDDPPHGVSLNLSEDKNVLSSLSSIEARPEGTVYAKGVFILKIQIPERYPFQPPNVTFVTPIYHPNIDNGGRICLDILNLPPKGAWQPSLNIATVLTSIGLLLSEPNPDDGLMAEISREYKYNRQVFDTTAQLWTDKYASSAAVGASGWCSVDADVLAQNTQMEDTNNLGSLPNVSKKVCEGNQRKMRLLGQKLSLKYERSEESMKTVKQDPVASYLPSMAGSTYPTACFSDVSGRKNDTSENMSISTDSGVVSKQDHQGHKKELQLPGQSLFVTSEAPCKSSDASDMLSNHLPIDASDAKDHVMQSSDGILENNSARRIGGSSASAYKAPEGNRRNIRALKLSLKSVKPEKKNNDQNENMAPNHLPSQSSFSYLQKRPLDAVSRKKFDGGPALVQQNPNTEQKPSNTNMVSNEERNQGLKMLCSQRRRLSLKSEPRLPRVENACEKETKRPNNFPLSDEKLNELPSSEPIPKGEPVAPSELPFSAPAVLKSQTRALGSAGGQKDSSSGNSCVNENTLAIENAVVSDSEDSADERERPPRSRLSLMRRRLGGKLRT

SEQ ID NO: 173226 - protein, 313 aa, Zea Mays
MSISTDSGVVSKQDHQGHKKELQLPGQSLFVTSEAPCKSSDASDMLSNHLPIDASDAKDHVMQSSDGILENNSARRIGGSSASAYKAPEGNRRNIRALKLSLKSVKPEKKNNDQNENMAPNHLPSQSSFSYLQKRPLDAVSRKKFDGGPALVQQNPNTEQKPSNTNMVSNEERNQGLKMLCSQRRRLSLKSEPRLPRVENACEKETKRPNNFPLSDEKLNELPSSEPIPKGEPVAPSELPFSAPAVLKSQTRALGSAGGQKDSSSGNSCVNENTLAIENAVVSDSEDSADERERPPRSRLSLMRRRLGGKLRT

SEQ ID NO: 173227 - protein, 80 aa, Zea Mays
MPFLLSLVSFLNGCCWTAYALIRFDLYVTIPNALGAFFGLVQLILYFCYYKSTPKKEKNVELPTVSSNVGGGNVTVSVER

SEQ ID NO: 173228 - protein, 101 aa, Zea Mays
MSYPSASSSPQCRRSSIGPGSSGSGWFFDLVRVLFVLIYGEELRPTAVCGTALAASLPRVSFPVDHQRLPRFGPKPSRTCAPAAWLPVESALQPLPTSICY

SEQ ID NO: 173229 - protein, 191 aa, Zea Mays
MTFIVRRRLMTFISRARFTRRRNNLAYSPTRSDFSTQPPRDMLRRAATTATLNGRAAAWFRHLTRRPMTLPPAHLGRHHLQAQLRPPRVVWVPPLPHLCGARGYSYTRMARRIPIARPDGYSSSDGEAEDPDAGEAGEITEPVGEGAEGDNSEGSETEVEGFMLDLSSDNLFGDSDGDGDGDEEGTEEGGK

SEQ ID NO: 173230 - protein, 73 aa, Zea Mays
MRFSSLRECWISIGQKLPQTTRLFLPPDSYYHIQNLYEPPQNLHLFCLHVQLRPPMKSFLVVGIALTLPFKFF

SEQ ID NO: 173231 - protein, 120 aa, Zea Mays
MMDESFLDRMVSQLRSTCKYYTGYPKDLGRSRIIPFTSERQFVQLLHEGAHIHSILIKFWKRPQLNFIHISSLSELSARSTLGFASQGKGTNIHLLKYSTTQNRLQAQERAWILTSPSIL

SEQ ID NO: 173232 - protein, 481 aa, Zea Mays
MEAQNGYSPLLAGDDHEAIHATGAGDEGDDVKLRLLGYKQQLKRDLSFNVVGQCVPLYAVGGDHQRGLLPGAADPGDHPARHRRQERRRLPGVQVHGDRLPRRHPAQPRRHQQPPHHLPLLFRPVRRGLEHARCVCPDGCRADRCHREGQRRVRVHPLQHRQRRRHPQQLVHLCPGPAHEPVHAHRIRRLGAYDRRDEERGQERPHRHHQRHRHLHPRGLGLHPRRHLRGQGHTLPAEPRQRRRRLRHRRGVLPRLQEPLRQRRRRDRLPGGRRRRRLLLRHELRHQQLQDGLRLLQGRRHALLLRLAQGQQAGGAHQRRLALGSRRALHGAAVSGKPGGVPGHGFHRDDRAVHLVRAADPVPGDAGAQVLRAGAIQPGPLRRPGRLGRRALGGHHHRALLAAGHVPGHQGHAQLHPRRRRRPPLPRPRVLAAQRQALVQGPRHQSGRMNMYNWTCIVERLAETEELLPTTCCNYFVPKIN

SEQ ID NO: 173233 - protein, 684 aa, Zea Mays
MEAQNGYSPLLAGDDHEAIHATGAGDEGDDVKLRLLGYKQQLKRDLSVVANFSVSFSIVSVVTGVTTLFGTGLQFGGPATMVYGWPIAGAFTAAVGLAMAEICSAYPTSGGLYFWSARLCTHRRWGPFAAWLTGWVLSNFAFSFSIISVLTGITTLYNTGLNFGGPATMTFGWFVAGAFTMAVGASMAEICSSFPTSGGLYYWSARLSGKRWAPFASWITGWYAADWQWAVTTSVDYSLAQLIQVIILLATGGKNGGGYLASKYMVIGFHAAILLSHAVINSLPITFLSFFGQFAAAWNMLGVFVLMVAVPTVATERASAEFVFTHFNTDNGAGIRSNLYIFVLGLLMSQYTLTGYDASAHMTEETKNADKNGPIGIISAIGISILVGWGYILGVTFAVKDIPYLLSPDNDAGGYAIAEVFYLAFKSRYGSGAGGIVCLGVVAVAVYFCGMSSVTSNSRMAYAFSRDGAMPFSSVWHKVNKQEVPINAVWLSALVALCMALPVYVNFGFFFLPHTHEGFGSLVSSVIHVNPRTIYAVSGKPGGVPGHGFHRDDRAVHLVRAADPVPGDAGAQVLRAGAIQPGPLRRPGRLGRRALGGHHHRALLAAGHVPGHQGHAQLHPRRRRRPPLPRPRVLAAQRQALVQGPRHQSGRMNMYNWTCIVERLAETEELLPTTCCNYFVPKIN

SEQ ID NO: 173234 - protein, 424 aa, Zea Mays
MGGDHQRGLLPGAADPGDHPARHRRQERRRLPGVQVHGDRLPRRHPAQPRRHQQPPHHLPLLFRPVRRGLEHARCVCPDGCRADRCHREGQRRVRVHPLQHRQRRRHPQQLVHLCPGPAHEPVHAHRIRRLGAYDRRDEERGQERPHRHHQRHRHLHPRGLGLHPRRHLRGQGHTLPAEPRQRRRRLRHRRGVLPRLQEPLRQRRRRDRLPGGRRRRRLLLRHELRHQQLQDGLRLLQGRRHALLLRLAQGQQAGGAHQRRLALGSRRALHGAAGIFSGKPGGVPGHGFHRDDRAVHLVRAADPVPGDAGAQVLRAGAIQPGPLRRPGRLGRRALGGHHHRALLAAGHVPGHQGHAQLHPRRRRRPPLPRPRVLAAQRQALVQGPRHQSGRMNMYNWTCIVERLAETEELLPTTCCNYFVPKIN

SEQ ID NO: 173235 - protein, 265 aa, Zea Mays
MQLNPAKDIYPASCVVTASGRREACPPTAPPPTWRARPRSPPSWSGRRGRRRSPRPSLPRRGRRGARRGPWPRTPWPPAAGPPSPPRRWRPGAPARRRTPRRSTPPAPRTAPSGAGPACRRPPATRARGTCPSGAPAAARPGSTRPTCTSAAARPPPPGRGTRRPAPPSTPRTAGAARSRRAPPRPRPGGAARSTPSRCRAPGCAPCAGAPARARRTAPPACAPPSPAASGPSPGSLRVHAQTPVRKLKLATQGKKIHLQTFAMT

SEQ ID NO: 173236 - protein, 167 aa, Zea Mays
MSSDSSSWARALVQISPYTFSAIGIAVSIGVSVLGAAWGIFITGSSLIGAAIKAPRITSKNLISVIFCEAVAIYGVIVAIILQTKLESVPTSQMYDPESLRAGYAIFASGLIVGFANLVCGCALSDAQNSSLFVKILVIEIFGSALGLFGVIVGIIMSSQATWPAKA

SEQ ID NO: 173237 - protein, 151 aa, Zea Mays
MDASAAHVANLLSSEPSDVSLGIGGFSMGAAAALHSAACYAHGRFTNGVAYPINLRVVVGLSGWLPSSRTLRSKIESSQLALRKASGLPILLSHGMADEVVTYRNGERSAEILRSSGFQYTYFKPYNGLGHYTIPEEMDDVSKWLRSTLGL

SEQ ID NO: 173238 - protein, 107 aa, Zea Mays
MVFTDHHPWRRWELASIWGEDLGCMILVDGRLASIWGGDNREVRRTAILGDGRAIWGDVRATRCRQCRGPALATMEGAVIWGTRVAVDGDDGRRRDLGKGEDGGEGR

SEQ ID NO: 173239 - protein, 800 aa, Zea Mays
MAASPGADEPLESSTVEHPEAVQPPSLPIVEAEPPPPLIGAAAAHEAISPKKSSSPSPHPANLAVEVSPEVEASSSSPSPSSSPSPYPQIMEVLPGAPQPLSPPRASPSVAARASTDLSITEAMSMASQEAARPPPSPESTDAHLHTASALPTSLMEIGPGVLVPQQQPRPPSPEMAPPLCDYSESAQPSPLCHPDGCTGASPDAPMDEVMTGTSGKAAGPSPGENSELAQSQLPHLPAENTYVCSNAAGKISAVTSEEGTQPAMASIDGEGPLEIGAQRSLQELEETTTSFKMEAEPCSPEMAPPGFEDCKSQWLPLSHPNPLVESTHTVVQVTTTNAMGTTPDAATGSLSSPRLLPLLKRDTEGQTLPRSCSPTTEAAPCSPDMPPPGFENCKSSWLPLPTLQPIAETTHVLHDVAPTKSMVVGLMEKACSVLALERTDVKIDSEQSLLPPLESETESSLQGPLPRSPSSMMKAIPCSPDTAPPGFENLKFTQLQPPCPPLVQTAHVLQNSANNEAMPVISKEAPQPLPALDATDLDIDAKPVLAPPSESKPGQLSPEPPLLLPHVAQHTTCSPGMTLLGSENIESSQLLPRALVLPLDQTSDILADAGTKKTVTMEEVCHPLPVAGVAEEANRSVLLPVTENGCEGQSPHLELQTSSPAVNAAATSLEIAPGSFENSESSQLISPCLAQTIDPTTHASGIMPTIVKSEKTNLPLSSLQATCTDMESAILCQSPSKSEERSLPQAEQHPSSPSVKDTTCSPEVAPPGYENFDSLDQLPPSPPLCSKFVCCVKIRCESS

SEQ ID NO: 173240 - protein, 885 aa, Zea Mays
MAASPGADEPLESSTVEHPEAVQPPSLPIVEAEPPPPLIGAAAAHEAISPKKSSSPSPHPANLAVEVSPEVEASSSSPSPSSSPSPYPQIMEVLPGAPQPLSPPRASPSVAARASTDLSITEAMSMASQEAARPPPSPESTDAHLHTASALPTSLMEIGPGVLVPQQQPRPPSPEMAPPLCDYSESAQPSPLCHPDGCTGASPDAPMDEVMTGTSGKAAGPSPGENSELAQSQLPHLPAENTYVCSNAAGKISAVTSEEGTQPAMASIDGEGPLEIGAQRSLQELEETTTSFKMEAEPCSPEMAPPGFEDCKSQWLPLSHPNPLVESTHTVVQVTTTNAMGTTPDAATGSLSSPRLLPLLKRDTEGQTLPRSCSPTTEAAPCSPDMPPPGFENCKSSWLPLPTLQPIAETTHVLHDVAPTKSMVVGLMEKACSVLALERTDVKIDSEQSLLPPLESETESSLQGPLPRSPSSMMKAIPCSPDTAPPGFENLKFTQLQPPCPPLVQTAHVLQNSANNEAMPVISKEAPQPLPALDATDLDIDAKPVLAPPSESKPGQLSPEPPLLLPHVAQHTTCSPGMTLLGSENIESSQLLPRALVLPLDQTSDILADAGTKKTVTMEEVCHPLPVAGVAEEANRSVLLPVTENGCEGQSPHLELQTSSPAVNAAATSLEIAPGSFENSESSQLISPCLAQTIDPTTHASGIMPTIVKSEKTNLPLSSLQATCTDMESAILCQSPSKSEERSLPQAEQHPSSPSVKDTTCSPEVAPPGYENFDSLDQLPPSPPLCSKFEIGQMVCGSCRQLVAYPTGAVHVQCFGCLTINLVLEEHQVGKVYCGQCDTLLMYPFGAPAVKCSNCLFVTEIGERNVRPRILMEQSVSPAAQEEVH

SEQ ID NO: 173241 - protein, 797 aa, Zea Mays
MAASPGADEPLESSTVEHPEAVQPPSLPIVEAEPPPPLIGAAAAHEAISPKKSSSPSPHPANLAVEVSPEVEASSSSPSPSSSPSPYPQIMEVLPGAPQPLSPPRASPSVAARASTDLSITEAMSMASQEAARPPPSPESTDAHLHTASALPTSLMEIGPGVLVPQQQPRPPSPEMAPPLCDYSESAQPSPLCHPDGCTGASPDAPMDEVMTGTSGKAAGPSPGENSELAQSQLPHLPAENTYVCSNAAGKISAVTSEEGTQPAMASIDGEGPLEIGAQRSLQELEETTTSFKMEAEPCSPEMAPPGFEDCKSQWLPLSHPNPLVESTHTVVQVTTTNAMGTTPDAATGSLSSPRLLPLLKRDTEGQTLPRSCSPTTEAAPCSPDMPPPGFENCKSSWLPLPTLQPIAETTHVLHDVAPTKSMVVGLMEKACSVLALERTDVKIDSEQSLLPPLESETESSLQGPLPRSPSSMMKAIPCSPDTAPPGFENLKFTQLQPPCPPLVQTAHVLQNSANNEAMPVISKEAPQPLPALDATDLDIDAKPVLAPPSESKPGQLSPEPPLLLPHVAQHTTCSPGMTLLGSENIESSQLLPRALVLPLDQTSDILADAGTKKTVTMEEVCHPLPVAGVAEEANRSVLLPVTENGCEGQSPHLELQTSSPAVNAAATSLEIAPGSFENSESSQLISPCLAQTIDPTTHASGIMPTIVKSEKTNLPLSSLQATCTDMESAILCQSPSKSEERSLPQAEQHPSSPSVKDTTCSPEVAPPGYENFDSLDQLPPSPPLCSKFVEKNLYGQ

SEQ ID NO: 173242 - protein, 898 aa, Zea Mays
MAASPGADEPLESSTVEHPEAVQPPSLPIVEAEPPPPLIGAAAAHEAISPKKSSSPSPHPANLAVEVSPEVEASSSSPSPSSSPSPYPQIMEVLPGAPQPLSPPRASPSVAARASTDLSITEAMSMASQEAARPPPSPESTDAHLHTASALPTSLMEIGPGVLVPQQQPRPPSPEMAPPLCDYSESAQPSPLCHPDGCTGASPDAPMDEVMTGTSGKAAGPSPGENSELAQSQLPHLPAENTYVCSNAAGKISAVTSEEGTQPAMASIDGEGPLEIGAQRSLQELEETTTSFKMEAEPCSPEMAPPGFEDCKSQWLPLSHPNPLVESTHTVVQVTTTNAMGTTPDAATGSLSSPRLLPLLKRDTEGQTLPRSCSPTTEAAPCSPDMPPPGFENCKSSWLPLPTLQPIAETTHVLHDVAPTKSMVVGLMEKACSVLALERTDVKIDSEQSLLPPLESETESSLQGPLPRSPSSMMKAIPCSPDTAPPGFENLKFTQLQPPCPPLVQTAHVLQNSANNEAMPVISKEAPQPLPALDATDLDIDAKPVLAPPSESKPGQLSPEPPLLLPHVAQHTTCSPGMTLLGSENIESSQLLPRALVLPLDQTSDILADAGTKKTVTMEEVCHPLPVAGVAEEANRSVLLPVTENGCEGQSPHLELQTSSPAVNAAATSLEIAPGSFENSESSQLISPCLAQTIDPTTHASGIMPTIVKSEKTNLPLSSLQATCTDMESAILCQSPSKSEERSLPQAEQHPSSPSVKDTTCSPEVAPPGYENFDSLDQLPPSPPLCSKFEIGQMVCGSCRQLVAYPTGAVHVQCFGCLTINLVLEEHQVGKVYCGQCDTLLMYPFGAPAVKCSNCLFVTEIGLSNCLLCLNIGTQCSATDIDGTECLTCGTRGGSLES

SEQ ID NO: 173243 - protein, 849 aa, Zea Mays
MAASPGADEPLESSTVEHPEAVQPPSLPIVEAEPPPPLIGAAAAHEAISPKKSSSPSPHPANLAVEVSPEVEASSSSPSPSSSPSPYPQIMEVLPGAPQPLSPPRASPSVAARASTDLSITEAMSMASQEAARPPPSPESTDAHLHTASALPTSLMEIGPGVLVPQQQPRPPSPEMAPPLCDYSESAQPSPLCHPDGCTGASPDAPMDEVMTGTSGKAAGPSPGENSELAQSQLPHLPAENTYVCSNAAGKISAVTSEEGTQPAMASIDGEGPLEIGAQRSLQELEETTTSFKMEAEPCSPEMAPPGFEDCKSQWLPLSHPNPLVESTHTVVQVTTTNAMGTTPDAATGSLSSPRLLPLLKRDTEGQTLPRSCSPTTEAAPCSPDMPPPGFENCKSSWLPLPTLQPIAETTHVLHDVAPTKSMVVGLMEKACSVLALERTDVKIDSEQSLLPPLESETESSLQGPLPRSPSSMMKAIPCSPDTAPPGFENLKFTQLQPPCPPLVQTAHVLQNSANNEAMPVISKEAPQPLPALDATDLDIDAKPVLAPPSESKPGQLSPEPPLLLPHVAQHTTCSPGMTLLGSENIESSQLLPRALVLPLDQTSDILADAGTKKTVTMEEVCHPLPVAGVAEEANRSVLLPVTENGCEGQSPHLELQTSSPAVNAAATSLEIAPGSFENSESSQLISPCLAQTIDPTTHASGIMPTIVKSEKTNLPLSSLQATCTDMESAILCQSPSKSEERSLPQAEQHPSSPSVKDTTCSPEVAPPGYENFDSLDQLPPSPPLCSKFEHQVGKVYCGQCDTLLMYPFGAPAVKCSNCLFVTEIGERNVRPRILMEQSVSPAAQEEVH

SEQ ID NO: 173244 - protein, 108 aa, Zea Mays
MELGGGGRGGGDRVRRQLQSVGRLAAYLGGGFLLLSATSSVAVRALRAISDANQGAALLELPGKWLRLKKRCQFSLSMIDGCWGVGKETIGNLLMNSLPCVIIIAVSL

SEQ ID NO: 173245 - protein, 190 aa, Zea Mays
MILPKQPLSERFPLGRLDNKRPHHTAAVAVLAHGAWRRRARRRRPGPAAVAVGGAAGSVSRRRFPPPLRHLFRRRPRPPRHLRRQPEEVREAVRCLRGEGQLLVQALQGQRHHRVVSDARPGVRESVPLPYLRWDSGAALLELPGKWLRLKKRCQFSLSMIDGCWGVGKETIGNLLMNSLPCVIIIAVSL

SEQ ID NO: 173246 - protein, 185 aa, Zea Mays
MILPKQPLSERFPLGRLDNKRPHHTAAVAVLAHGAWRRRARRRRPGPAAVAVGGAAGSVSRRRFPPPLRHLFRRRPRPPRHLRRQPEEVREAVRCLRGEGQLLVQALQGQRHHRVVSDARPGVRESVPLPYLRWDSGAALLELPGKWLRLKKRCQFSLSMIDGCWGVDFLQVVQASIRRRCARIV

SEQ ID NO: 173247 - protein, 157 aa, Zea Mays
MELGGGGRGGGDRVRRQLQSVGRLAAYLGGGFLLLSATSSVAVRALRAISDANQEVREAVRCLRGEGQLLVQALQGQRHHRVVSDARPGVRESVPLPYLRWDSGAALLELPGKWLRLKKRCQFSLSMIDGCWGVGKETIGNLLMNSLPCVIIIAVSL

SEQ ID NO: 173248 - protein, 291 aa, Zea Mays
MSTATAPSPSPSPSPSSGTRPLLRIGAARRFAMAFPPWAALLFAGVLVVVLAAAGAEAGGGSVCFDRMFSFGDSLTDTGNFLLSVPDDFPDPARNLPYGQTFFGRPSGRYSDGRNLLDFFAEAFGLPYVPPYLGGGDFQNGANFAVGGATALNGSFFRERGVEPTWTPHSLDEQMQWFKKLLTSIAPLETGFTVPLNACCGSDAPYNCSPSILCGRPGSTVCPDPSKYISWDGLHFTEASYKVVIQGVLGGYAKPPLSETCKGAEFKVSQLHQCTDNPTNTVSYDALSSFI

SEQ ID NO: 173249 - protein, 190 aa, Zea Mays
MTSAASFPSSLFPFPTRASTPPLPSSSSRPSHSRPHLRIRSPKPNNPTVAPASSRMEVAQPQASNAQGGAEPAMKLLFVEMGVGYDQHGQDITAAAVRACKDAITSNSIPAFRGGVNTDQMKLQIKLGVPRSTQHLLDAERVKAVFPYGKIISFEVVDGGMICSSGVCLEAMGDKNDDCYIVNAAVYVGY

SEQ ID NO: 173250 - protein, 80 aa, Zea Mays
MIQDRLRLAPIEEKCVQQWLKWFKHVHHRPPAVRTGIQGHDGNKKRGRERTMLTWEATVKGDLEEYDYMSIKTVIHVPKP

SEQ ID NO: 173251 - protein, 948 aa, Zea Mays
MALNMKTLTQALAKASAVIEKTVSTTVQEVTGPRPLQDYELLDQAGSGGPGLAWRIYTARPRDGAPSAPYPVVSVWVLDKRALAEARARAGLSKAAEDAFLDLVRADAARLVRLRHPGVLHVVQALDETKAAMAMATEPVFASVANALGCLDNVGKVPKELKGMEMGLLEIKHGLLQVAETLDFLHNNAHLAHRAISPELGGFGFALSVDQATGGLTSSQLFHYSDYDVEDTALPLQPSLNYTAPELVRSGDSKVGSACDMFSFGCLAYHLVARRPLLDCHNNVKMYMNALTYLTSEAFSNIPSDLVSDLQRMISMDAVSRPSAVAFTGSSFFRDDTRLRALRFLDHLLERDNMQKTEFLKALSDMWKDFDSRVLRYKVLPPLCAELRNMVMQPMILPMVLTIAESQDKGDFELATLPALVPVFTSASGETLLLLVKHADLIINKATQEHLISHILPMLVRAYDDNDPRLQEEVLRRTVSLSRQLDTKLVKQAVLPRVHGLALKTTVAAVRVNALRCLGDLVPSLDKEGILGILETVRRCTAVDHTAPTLMCTLGVANAIYKQCGVEFAAEYVIPLIFPLLTAHQLNVQQFAKYMLFVKDITSKIEEKRGVTVTDNGNTEVKASPSLANGIHSEPMPGQIPAAKSSPPWDEDWGPSKKTGVPSLSVDSSAQTKQPSVHPFDFSTQTKQSTPLPFDLSTRAKQPSLVSHATAATIPPAQPQPVQSLVPSSGPQTSGSCAPVDIEWPPRRSSSSDFNASLSISKENESGRLSSDGLDDIDPFADWPPKPSNVTSITATEHRPSINQNISGFSSGNIGFGGSGNSIGQAKSNQMSWSNTPNLMGMNSTGSYLNQGSAALGFGNPIGGLSTGLSNPSSSSTGLSMMQPKSDFGSLSMSANNAANGPPRLAPPPSTSVGRGRGRNQGQSALSRASRPPHSNSSSGQQPILDLL

SEQ ID NO: 173252 - protein, 591 aa, Zea Mays
MALNMKTLTQALAKASAVIEKTVSTTVQEVTGPRPLQDYELLDQAGSGGPGLAWRIYTARPRDGAPSAPYPVVSVWVLDKRALAEARARAGLSKAAEDAFLDLVRADAARLVRLRHPGVLHVVQALDETKAAMAMATEPVFASVANALGCLDNVGKVPKELKGMEMGLLEIKHGLLQVAETLDFLHNNAHLAHRAISPETVFITSNGSWKLGGFGFALSVDQATGGLTSSQLFHYSDYDVEDTALPLQPSLNYTAPELVRSGDSKVGSACDMFSFGCLAYHLVARRPLLDCHNNVKMYMNALTYLTSEAFSNIPSDLVSDLQRMISMDAVSRPSAVAFTGSSFFRDDTRLRALRFLDHLLERDNMQKTEFLKALSDMWKDFDSRVLRYKVLPPLCAELRNMVMQPMILPMVLTIAESQDKGDFELATLPALVPVFTSASGETLLLLVKHADLIINKATQEHLISHILPMLVRAYDDNDPRLQEEVLRRTVSLSRQLDTKLVKQAVLPRVHGLALKTTVAAVRVNALRCLGDLVPSLDKEVRCGVCCGICDSSHLPITHSTSTECTTICQVYAICQGHYKQDRREAWCDCYR

SEQ ID NO: 173253 - protein, 595 aa, Zea Mays
MQKTEFLKALSDMWKDFDSRVLRYKVLPPLCAELRNMVMQPMILPMVLTIAESQDKGDFELATLPALVPVFTSASGETLLLLVKHADLIINKATQEHLISHILPMLVRAYDDNDPRLQEEVLRRTVSLSRQLDTKLVKQAVLPRVHGLALKTTVAAVRVNALRCLGDLVPSLDKEGILGILETVRRCTAVDHTAPTLMCTLGVANAIYKQCGVEFAAEYVIPLIFPLLTAHQLNVQQFAKYMLFVKDITSKIEEKRGVTVTDNGNTEVKASPSLANGIHSEPMPGQIPAAKSSPPWDEDWGPSKKTGVPSLSVDSSAQTKQPSVHPFDFSTQTKQSTPLPFDLSTRAKQPSLVSHATAATIPPAQPQPVQSLVPSSGPQTSGSCAPVDIEWPPRRSSSSDFNASLSISKENESGRLSSDGLDDIDPFADWPPKPSNVTSITATEHRPSINQNISGFSSGNIGFGGSGNSIGQAKSNQMSWSNTPNLMGMNSTGSYLNQGSAALGFGNPIGGLSTGLSNPSSSSTGLSMMQPKSDFGSLSMSANNAANGPPRLAPPPSTSVGRGRGRNQGQSALSRASRPPHSNSSSGQQPILDLL

SEQ ID NO: 173254 - protein, 620 aa, Zea Mays
MALNMKTLTQALAKASAVIEKTVSTTVQEVTGPRPLQDYELLDQAGSGGPGLAWRIYTARPRDGAPSAPYPVVSVWVLDKRALAEARARAGLSKAAEDAFLDLVRADAARLVRLRHPGVLHVVQALDETKAAMAMATEPVFASVANALGCLDNVGKVPKELKGMEMGLLEIKHGLLQVAETLDFLHNNAHLAHRAISPETVFITSNGSWKLGGFGFALSVDQATGGLTSSQLFHYSDYDVEDTALPLQPSLNYTAPELVRSGDSKVGSACDMFSFGCLAYHLVARRPLLDCHNNVKMYMNALTYLTSEAFSNIPSDLVSDLQRMISMDAVSRPSAVAFTGSSFFRDDTRLRALRFLDHLLERDNMQKTEFLKALSDMWKDFDSRVLRYKVLPPLCAELRNMVMQPMILPMVLTIAESQDKGDFELATLPALVPVFTSASGETLLLLVKHADLIINKATQEHLISHILPMLVRAYDDNDPRLQEEVLRRTVSLSRQLDTKLVKQAVLPRVHGLALKTTVAAVRVNALRCLGDLVPSLDKEGILGILETVRRCTAVDHTAPTLMCTLGVANAIYKQCGVEFAAEYVIPLIFPLLTAHQLNVQQFAKYMLFVKDITRSKRSVV

SEQ ID NO: 173255 - protein, 400 aa, Zea Mays
MRLGMIDKARRHFTQAGHLQQSDPTDWQKLQEVEVHLGRCTDARKIGDWKSTLREADAAIAAGADSSQLLLALRSEALLHLHKLEEAESTLASFLKLDSALPSSLTAAELSGMLAESYVHIVRAQIDMALGRFDAAVAAAEKARDLDPGNAEIGMVLNNVRLVAKAREQGNDLFKAAKFSDASMAYGEGLKYDPSNSVLHCNRAACWSKLEKWEKAVDDCNEALRIQPSYTKALLRRAASYAKLERWVDCVRDYEALRKELPSDKEVAEALFHAQISLKATRGEDVSNMKFGGEVEIVSSVEQLRAAISSPGVSVVYFMSAMNQQCTQITPSVNTLCTECPSVNFLKVNIDSSPMVAKAENVRIVPTFKIYKGGVKVKEMICPSLHVLRYSVRHYSVSSS

SEQ ID NO: 173256 - protein, 249 aa, Zea Mays
MSTRLHHHLLQLMCSLLISAELVSGNTGDDDMAVLIQLKAFLRVHNQINRDAYDRWSEASPSPCGSWQGVGCDADGRVSSLDLSSSSISVPLFGNANATRSQIRSRSSSFLAAISLHLRALSPAPASAPPRRAVVRNPHSVSLAASSSPAPGGAGARKRTAADSARRLTAAISTSGSAARMDRTRAAQPPHIMPLTSSNAVVALAAPSPAAASSTDDGSVVARGRSAGAPRVGRRRGAVGRRRLGFGLA

SEQ ID NO: 173257 - protein, 102 aa, Zea Mays
MKYVLVTGGVVSGLGKGVTASSIGVVLKACGFRITSIKIDPYLNTDAGTMSPFEHGEVFVLDDGGEVDLDLGNYERFLDIKLTRDNNITTGKIYQSEDEIVH

SEQ ID NO: 173258 - protein, 598 aa, Zea Mays
MKYVLVTGGVVSGLGKGVTASSIGVVLKACGFRITSIKIDPYLNTDAGTMSPFEHGEVFVLDDGGEVDLDLGNYERFLDIKLTRDNNITTGKIYQSVIDKERKGEYLGKTVQEWIERVAMIPVDGMEGPADVCVIELGGTIGDIESMPFIEALGQFSYRVGPGNFCLVHVSLVPVLNVVGEQKTKPTQHSVRGLRGLGLTPNILACRSTKELEDSVKEKLSQFCHVPAANIITLYDVSNIWRIPLLLCDQKAHEAILKVLNLERVDSIAREPKLDEWVARAAIFDTLHDTVRIAMVGKYTGLSDSYLSVLKALLHASVDCRRKLVVDWVASTDLEDSTAIEAPDAYKTSWNLLKGADGILVPGGFGDRGVEGKILAAKYAREKNVPYLGICLGMQIAVVEYARHVMNFTDANSTEFDPNTKTPCVIFMPEGSKTHMGATMRLGSRRTFFKIADCKSSKLYGNVTYVDERHRHRYEVNPDMVPEFEKAGLQFVGKDDTGRRMEMIEIPNHRYFVGAQFHPEFKSRPSKPSPLFVGLIAAASGQLDRVLQDRCNGHVGSAKHVLSNGSYTSAVHQNGNPKKLTNGLSNGTYYANGNGVHA

SEQ ID NO: 173259 - protein, 364 aa, Zea Mays
MSPFEHGEVFVLDDGGEVDLDLGNYERFLDIKLTRDNNITTGKIYQSVIDKERKGEYLGKTVQVVPHITNAIQEWIERVAMIPVDGMEGPADVCVIELGGTIGDIESMPFIEALGQFSYRVGPGNFCLVHVSLVPVLNVVGEQKTKPTQHSVRGLRGLGLTPNILACRSTKELEDSVKEKLSQFCHVPAANIITLYDVSNIWRIPLLLCDQKAHEAILKVLNLERVDSIAREPKLDEWVARAAIFDTLHDTVRIAMVGKYTGLSDSYLSVLKALLHASVDCRRKLVVDWVASTDLEDSTAIEAPDAYKTSWNLLKMEFWYLVALVTEVLKGKFWLLSMPGKRMSHILVYVLGCRLLSWSMPVML

SEQ ID NO: 173260 - protein, 166 aa, Zea Mays
MEVEALQAILMDDIKEIDPSESGIATTARCFQILLSPQDDDFDESAYVPVQLALIFAHTEKYPDEPPVLNVKSVRGIKPHDLASLKEKLQREATENLGMAMVYTLVSSAKEWLSEKYGQNGGDEEPEESEAEKEEVIIPHGEAVTVESFLAWRERFEAELALQRAK

SEQ ID NO: 173261 - protein, 248 aa, Zea Mays
MLRHDQKLFSSNLAILLKWSPFSTEAELLKQFDDMGDHGTKIIVFNLWFNDDGDMELDFNSDKKDILITGAHKKVKTNSLDKIAAQNYVSTRLRYSLRAYASILYLHVPDTFRIILRGCDVEPHNVVNDLMYRECVLYKPQIAGLTESSVITTIGFVKGAPDIDVQGFNVYHKNRLILPFWKVANNSYGKGRGVVGILEANFIKPTHDKQDFEKSVLYQRLEFRLKEMTYEYWRTVHHYIKENKNGLR

SEQ ID NO: 173262 - protein, 233 aa, Zea Mays
MSLGAEVIELSSDEDEEPVPSTTALIHHAPSSPPDVKPHLLADVDVKPLLLLPPPLHPPGYGALVPVKTEEPVPVATVSSPPRALPPPRLCRQFWKSGDYVVARRNPDVAGPGGRNRLRINPKFLHSNATSHKWAFGAIAELLDNAIDEVNNGATFVRVNKFKNPRDGNPSLLVQDDGGGMDPEALRRCMSFGFSDKQSDAFIGQYGNGFKTSTMRLGADVIVFTQNQNNWLR

SEQ ID NO: 173263 - protein, 655 aa, Zea Mays
MVPLPLQPRLVLALTILLALCSATSADPRTSVAGQTCAPGTAVSGSALADNFVPAMDELNTNVSAHGFGTSAVGSGPNTVFGLGQCFRDLSSVDCKLCFAEVRSLLPKCYPRVGGRLYLDGCFGRYGNYSFFGEALDAASDARVCGTAAEGNYTGADPRAFGDAVRAVLANVTAAAEAPGSQGFGAGSAAVGGATAFAIAQCWETLNGTACAQCLRAASAAVAPCAPAAEGRALFAGCYLRYSTRQFWNVNATAGSSSSGNSGILWIWLGSFLGALAIVLVIAFLAWKKRILSRDKGCNSFIDMYGDGLSIRIAQSSLNFKYEELRKATNYFDPSNKLGQGSYGAVYKAVLMDGKEVAVKRLFLNTRQWADQFFNEVDLISQVRHKNLVKLLGCSMNGPESLLVYEYYFNKSLDLFLFGTSHRGNLTWDLRVDIIQGIAEGLSYLHEESEIRIIHRDIKASNILLDDKLKPKITDFGLARAFGEDVTHLTTGVAGTLGYMAPEYIVHGHLTEKADVFSYGVLVLEIVTGKRCSNSNGSHGGQVLLTKVWKQYKDNRVEMIVDRSIYEDSIRDEIMHILQIGLLCTQANPDDRPTMGKVVELLRNHRNALEIVLSDPPFLNVDAVEDIKEGEHSRLLSSNSAPSLSGSSRSYLSGR

SEQ ID NO: 173264 - protein, 648 aa, Zea Mays
MSGGTGSSGRAAPRYAPDDPTLPKPWRGLVDGTTGYLYYWNPETNVTQYERPVPPESQLLPPPPPLPPPPPRSRDRRDRSRSRSRTPPRRDHRDRDRDRDRRHDEHASSKTASSHHHPAPVAVADDPSTEAYRRRHEITVTGDNVPTPITSFEAGGFPSEILKEIQRAGFASPTPIQAQSWPIAMQNQDVVAIAKTGSGKTLGYLLPGFMHIKRLQNSTRNGPTVLVLAPTRELATQILDEAVKFGRSSRISCTCLYGGAPKGPQLRDLDRGVDVVVATPGRLNDILEMRKVTIGSVDSLVANSSITQHVEIITPSEKQRRLEQILRSQDSGSKILIFCTTKRMCDQLARTLTRQFGASAIHGDKSQSEREKVLNQFRSGRSPILVATDVAARGLDIKDIRVVINYDFPTGVEDYVHRIGRTGRAGATGVAYTFFCDQDSKYAADLIKILEGANQRVPRDLEDMASRGGGRGRKRNHWASRPDRGGSRSELDSRYSSRDGLASSGKSESGRGSRGRDDNGSRGRYDPGETDGRSRRSTRGRSRSRSKSDSRSRSPSPKKSRRHEGRRSRTKSRSRSRSRRNHGASHSKSRSPVASRRYEKTASGSARPNSGHAEHKSPPRSHSRDDHVNHSDHKDDPRANAAVQNGNN

SEQ ID NO: 173265 - protein, 414 aa, Zea Mays
MSGGTGSSGRAAPRYAPDDPTLPKPWRGLVDGTTGYLYYWNPETNVTQYERPVPPESQLLPPPPPLPPPPPRSRDRRDRSRSRSRTPPRRDHRDRDRDRDRRHDEHASSKTASSHHHPAPVAVADDPSTEAYRRRHEITVTGDNVPTPITSFEAGGFPSEILKEIQRAGFASPTPIQAQSWPIAMQNQDVVAIAKTGSGKTLGYLLPGFMHIKRLQNSTRNGPTVLVLAPTRELATQILDEAVKFGRSSRISCTCLYGGAPKGPQLRDLDRGVDVVVATPGRLNDILEMRKVSLKQVSYLVLDEADRMLDMGFEPQIRKIVKEIPHRRQTLMYTATWPKEVRRIADDLLVHPVQVTIGSVDSLVANSSITQHVEIITPSEKQRRLEQILRSQDSGSLELRPFMVTSPKVKGRRF

SEQ ID NO: 173266 - protein, 527 aa, Zea Mays
MQNQDVVAIAKTGSGKTLGYLLPGFMHIKRLQNSTRNGPTVLVLAPTRELATQILDEAVKFGRSSRISCTCLYGGAPKGPQLRDLDRGVDVVVATPGRLNDILEMRKVSLKQVSYLVLDEADRMLDMGFEPQIRKIVKEIPHRRQTLMYTATWPKEVRRIADDLLVHPVQVTIGSVDSLVANSSITQHVEIITPSEKQRRLEQILRSQDSGSKILIFCTTKRMCDQLARTLTRQFGASAIHGDKSQSEREKVLNQFRSGRSPILVATDVAARGLDIKDIRVVINYDFPTGVEDYVHRIGRTGRAGATGVAYTFFCDQDSKYAADLIKILEGANQRVPRDLEDMASRGGGRGRKRNHWASRPDRGGSRSELDSRYSSRDGLASSGKSESGRGSRGRDDNGSRGRYDPGETDGRSRRSTRGRSRSRSKSDSRSRSPSPKKSRRHEGRRSRTKSRSRSRSRRNHGASHSKSRSPVASRRYEKTASGSARPNSGHAEHKSPPRSHSRDDHVNHSDHKDDPRANAAVQNGNN

SEQ ID NO: 173267 - protein, 423 aa, Zea Mays
MRKVSLKQVSYLVLDEADRMLDMGFEPQIRKIVKEIPHRRQTLMYTATWPKEVRRIADDLLVHPVQVTIGSVDSLVANSSITQHVEIITPSEKQRRLEQILRSQDSGSKILIFCTTKRMCDQLARTLTRQFGASAIHGDKSQSEREKVLNQFRSGRSPILVATDVAARGLDIKDIRVVINYDFPTGVEDYVHRIGRTGRAGATGVAYTFFCDQDSKYAADLIKILEGANQRVPRDLEDMASRGGGRGRKRNHWASRPDRGGSRSELDSRYSSRDGLASSGKSESGRGSRGRDDNGSRGRYDPGETDGRSRRSTRGRSRSRSKSDSRSRSPSPKKSRRHEGRRSRTKSRSRSRSRRNHGASHSKSRSPVASRRYEKTASGSARPNSGHAEHKSPPRSHSRDDHVNHSDHKDDPRANAAVQNGNN

SEQ ID NO: 173268 - protein, 598 aa, Zea Mays
MPGCGVAGRGDVGVSSAARRTPPQGKSRPCLWMTIARGYGRQHELKYCTSPQSKSLLLEARFGRHVTRSTAYLLQNSRSTAMTRLQKSGKFLQPVLDSSRNYLTSTFYNASLKRRVLSRVECFVSSDPINNGWLKPRRSENFTSLESACVQPEYKLPVRTRADCKAEQYEITGSPLSPSDVPADAVMIGDTNEISPWWQEFPKRWTVVLLCFFAFLLCNMDRVNMSIAILPMSSEFSWNPATVGLIQSSFFWGYLLTQILGGIWADRFGGKVVLGFGVVWWSFATVLTPLAAKIGLPCLLTMRAFMGIGEGVAMPAMNNILSKWIPVSERSRSLALVYSGMYLGSVTGLSLSPLLISRFGWPSVFYAFGSLGTVWFALWQSKAHSSPDDDPELSKAEKRHILGGSALKEPVTSIPWRLILSKAPVWALIISHFCHNWGTFILLTWMPTYYNQVLKFNLTESGLLCVLPWLTMAVFANIGGWIADTLVQRGVSVTNVRKIMQSIGFLGPALFLTLLSKVRTPAMAVLCMACSQGSDAFSQSGLYSNHQDIGPRYAGVLLGLSNTAGVLAGVFGTAATGYILQKGTVVWNVFSTGEKILE

SEQ ID NO: 173269 - protein, 562 aa, Zea Mays
MPGCGVAGRGDVGVSSAARRTPPQGKSRPCLWMTIARGYGRQHELKYCTSPQSKSLLLEARFGRHVTRSTAYLLQNSRSTAMTRLQKSGKFLQPVLDSSRNYLTSTFYNASLKRRVLSRVECFVSSDPINNGWLKPRRSENFTSLESACVQPEYKLPVRTRADCKAEQYEITGSPLSPSDVPADAVMIGDTNEISPWWQEFPKRWTVVLLCFFAFLLCNMDRVNMSIAILPMSSEFSWNPATVGLIQSSFFWGYLLTQGVAMPAMNNILSKWIPVSERSRSLALVYSGMYLGSVTGLSLSPLLISRFGWPSVFYAFGSLGTVWFALWQSKAHSSPDDDPELSKAEKRHILGGSALKEPVTSIPWRLILSKAPVWALIISHFCHNWGTFILLTWMPTYYNQVLKFNLTESGLLCVLPWLTMAVFANIGGWIADTLVQRGVSVTNVRKIMQSIGFLGPALFLTLLSKVRTPAMAVLCMACSQGSDAFSQSGLYSNHQDIGPRYAGVLLGLSNTAGVLAGVFGTAATGYILQKGSWDSVFKVSVVLYIVGTVVWNVFSTGEKILE

SEQ ID NO: 173270 - protein, 199 aa, Zea Mays
MDGARVLIAASATAVCCLACAVWIFRSSSSSFPASSNKHQPPPANFCGCASCGCRDAKSANGEMAVGGENKKKAPEPAPPEAPSMMEQLVPEITTHALSYLDYTSLCRLSMTNSAMRRAADDDGAWKALYHKDFTVEQGTINPPNGWKAYYAATKAIINLNAEFYNIIREGSLPAMSRFWLNADYVKCIHATGEFCTGC

SEQ ID NO: 173271 - protein, 106 aa, Zea Mays
MSRFWLNADYVKCIHATGEFCTGYNAVMESWGMLLNWGQDGGGGQGIALQIRDVRVRVLGEVAWVNMKANVLFHVTNVYELCNGRWYMVHHHSSLMADPPPHNMFA

SEQ ID NO: 173272 - protein, 79 aa, Zea Mays
MESWGMLLNWGQDGGGGQGIALQIRDVRVRVLGEVAWVNMKANVLFHVTNVYELCNGRWYMVHHHSSLMADPPPHNMFA

SEQ ID NO: 173273 - protein, 306 aa, Zea Mays
MSGATVEEVQIQEALLFSETIKGLKTLRSQLYSAAEYFELAYTQQDEKQAVTNNLKEYAVKALVNTVDHLGSISFKVSSLIDQRFSEATDADLRISCIHQRTQASQACVDREGISQQSLVITAPKYHKRYILPAQGQSMPSAMPNFREMNKVVVTGRASQMHQVFSAETRAKEKKQPSLRKLQSIARLPSQRARSASPAQRAHPMAPAKNATPTNRDKRSESPVPSTAPAPLTRSASLSKKASLLKTSSVRAQPKKLAPMRTQVDRSDDSKDGERTPKKSKKFLKSILSRRKSRKDEPLPSYFDDY

SEQ ID NO: 173274 - protein, 384 aa, Zea Mays
MALLSPRVPRLPPSTFTSAAGARCFGPAARCQATAAGGVAAAGPPSSELEAIRWGSAKLQGARDEMEDEVLLRPGSLLDGFSFAAVLDGHAGFSAVQFLRDELYKECAAALDGGAVLSTKNLDAITASIQRAFAAVDAKLSTWLEQTDKDDSGATATVMFLRSDVLVVSHIGDSCLQVISRGGRSEALTGSHRPYGNNKTSLEEVKRIRAAGGWIVDGRICGDISVSRAFGDIRFKTQKNEMLVKGVKQGRWTDKFISRIQFKDDIVISSPDVSLVELGPDVEFVLLATDGLWDYIKSSEAVAFVRDQLRQHGDVQLACEALGQKALDQRSQDNISIVIADLGRTNWKALPDERPNLFLELSQAVATVGVVSIGIWVSSFLGLQ

SEQ ID NO: 173275 - protein, 316 aa, Zea Mays
MALLSPRVPRLPPSTFTSAAGARCFGPAARCQATAAGGVAAAGPPSSELEAIRWGSAKLQGARDEMEDEVLLRPGSLLDGFSFAAVLDGHAGFSAVQFLRDELYKECAAALDGGAVLSTKNLDAITASIQRAFAAVDAKLSTWLEQTDKDDSGATATVMFLRSDVLVVSHIGDSCLVISRGGRSEALTGSHRPYGNNKTSLEEVKRIRAAGGWIVDGRICGDISVSRAFGDIRFKTQKNEMLVKGVKQGRWTDKFISRFWGGGHNVKVDGKKKLQLHSLKLLHNEACLHLPKVDLIKSLDQTWNLFCWQLMVFGTT

SEQ ID NO: 173276 - protein, 147 aa, Zea Mays
MEKMNVVASRKQGGDWICRSCQYVNFCKRDACQRCGEARLGVERTDYGALGGDWDVKPGDWYCYRCGVNNYASRAGCFKCGAAKNESPPAAVAQGWGYTAAGQAGMKPGDWICPRLGCNVQNYANRTECFRCSMPKSYYANFSFFLF

SEQ ID NO: 173277 - protein, 585 aa, Zea Mays
MERAAWGASDGGGNLVQDAVDYRGCRADKSSTGGWVAAALALGIELCERLATMGIAVNLVTYLTDTMHLPSAAAANVVTDFMGTSFLLCLLGGFLADSFLGRYLTIAIFALIQAIGTGLLAVSTEVRQLRPPPCGPGAAGPCEQATGFQMGVLYVCLYLIALGTGGLKSSVSGFGTDQFDERDARERAAMGLFFNRFFFFISVGTLLAVTVLVYVQDHVGRSWAYGICAAAMLAAIAVFLSGTRRYRYRRSSGSPIVHILQVLVAAARKRNIAKHPLAVSALYEDRPEHARIPHTAQFPCLDRAAVMAGDDDNEVGHDGRPTPNPWKLCSVSRVEEVKMVARLMPVWATTILFWTIYAQMITFSVEQATTMDRRMGGFEIPAASLTVFFVGAIMLTLAFYDRVFVPLCRSLMTGRQGLTNLEKIGIGLVLSIVGMAAAAISEKKRLAVAATSGVAGHGSLPISVFMLTPQFLLVGAGEAFIYTGQLDFFITRSPKSMKTMSTGLFLTTLSLGFFLSSALVSLVKSCTRWLGDTINHSRLDYFYWLLAVLSVVNLVAYLVCAMWATAPTSSQAEQPQPAMVADEKC

SEQ ID NO: 173278 - protein, 367 aa, Zea Mays
MSQELGVAPTDDHCMLVEMGSRAAFVVAFLLRAIYAGTQILTKAAFDEGMNTSVFVFYRHLTGILFLVPIAFVLERKTAPPLSFRVSLKLFFHALYGISGAINIYGLGLSYSSATSSSAIFNLLPAVAFFLAVLLGMETLNLKRFHGIAKAAGVLFSTAGVTVLAFYQGPAFRSFIHHTAFSHHNVHAGVVTAAHPKSVWILGIFLTTLSTASWALWTVLQGPMLEAYPSKLLNTTLQMIFATVQCFFIALAAERDLSRWKLALDIRLYAVIYSGILVSGVAYYMQVWVIEKSGPVFLAMTMPITLLVTIILSLFLGEPVTLGSILGGLIMVGGLYSVLWAKRSEQVHASKQQMAAPTPPPAEATQV

SEQ ID NO: 173279 - protein, 322 aa, Zea Mays
MEEGGRHDHDAGDRISSLPDDLLFSILLRIGSIRAAARTSVLSRRWRHVWARLPELRLGTCDEQPGATFLDFVDAVLDACSAPAVHRLEVAMYCHGLRVHACRLVPWLRFASQRRVGDIHIQVPSQKKFFLSKPIKEELELPVCDGATRITLSLERRWSLRLCPAGSFMSLTDLHISCATMAGSELGNLVSEQCPLLRNLYLFVRLAAASNVSIHSNSLQSLSFNVQNTQKLEVMAPKLEVLAVCDATKAHISAPKLSVVSWDNDTGYNPLCHHFANAARHLRLLHLGSKCVSASLMRQFDEVDVLKLKLNLLNIKRHTQIY

SEQ ID NO: 173280 - protein, 342 aa, Zea Mays
MEEGGRHDHDAGDRISSLPDDLLFSILLRIGSIRAAARTSVLSRRWRHVWARLPELRLGTCDEQPGATFLDFVDAVLDACSAPAVHRLEVAMYCHGLRVHACRLVPWLRFASQRRVGDIHIQVPSQKKFFLSKPIKEELELPVCDGATRITLSLERRWSLRLCPAGSFMSLTDLHISCATMAGSELGNLVSEQCPLLRNLYLFVRLAAASNVSIHSNSLQSLSFNVQNTQKLEVMAPKLEVLAVCDATKAHISAPKLSVVSWDNDTGYNPLCHHFANAARHLRLLHLGSKCVSASLMRQFDEVDVLKLKLNLLNIKGTEAYTNLLNETAALPKCEDLMVTKK

SEQ ID NO: 173281 - protein, 227 aa, Zea Mays
MAPKLEVLAVCDATKAHISAPKLSVVSWDNDTGYNPLCHHFANAARHLRLLHLGSKCVSASLMRQFDEVDVLKLKLNLLNIKGTEAYTNLLNETAALPKCEELKLRVSLRASQHNFASIMFHILRSCNNTRRISIKIDSSMVYLCPSSCFCLGPQIFKADGIILESLEEVKITFIRHCYGQVQFVEEFARCHAPSLKKLVVNSPTKGLQEMVGGLFDPDVTVKCNVI

SEQ ID NO: 173282 - protein, 243 aa, Zea Mays
MAADRRFKIFAAADGFGQPLKDAVVAYLRAHPAVAEVVDLGVDKYYAAAAAVARHVSSPDSEPDAPEVRGVVVCGTGAGVCIFANKYPRVYATHCASPADAVNTRSINACNVLALSGIATQPDAAAAIADSWLATPFRAPCPASGDAPWPEDIQGFFDTAPDEMAAIPEAEDAPDSVCAICCLRNGMEFEPVGIMPGGEMRIVRESPTSAYVRFKAGSVEPAHHHTFGHDLVVIKGKKKGQVL

SEQ ID NO: 173283 - protein, 210 aa, Zea Mays
MFYQSFPRAKKFQKKSFPLFDALGELYDGHIAQGTWNITSTQLPQEWNTISNEEEQVNTTRMDEEGIIQQQPQEEDSRLEQDEDPIIERTEQRSTAMRRSTASTINQDKEAKRMKKDSLEGLVGRYLDLKSKQVEDEVTQMVKGKESAQGNDFSIMRCISVLRSMNVTADEKIKAAEVFDIPNNRETFISFSVDEPETALLWLRRKIDKL

SEQ ID NO: 173284 - protein, 52 aa, Zea Mays
METVLHSVLSASMSYIYVAFLHVWAQHVIEPKEGCCETCMACLNFWIKSSIY

SEQ ID NO: 173285 - protein, 320 aa, Zea Mays
MAVSLFYYVSSFLKKKYRDLGWQQRYARFCGRIIVLSVLVLLLYPFLWVWTVIGTLWFSTARGCEEGQKWGFLIWLLFSYCGLACIACVAIGKWLHRRHALQQRAQQGIPVSEHGVLVDMIRVPDWAFEAVGLEMRVGQDTAYHPGLYLTDAQREAVEALIQELPKFRLKAVPTDCSECPICLEEFHVGNEVRGLPCAHNFHVECIDQWLRLNVKCPRCRCSVFPNLDLSALNNLRSTSEPDHPSASASNVTTATAATRYVRSQPAGQSYLVRLQGLLLRPVRHDSVESDGEPAVGNSRLVGTEELPSILVDDGHQLPDR

SEQ ID NO: 173286 - protein, 384 aa, Zea Mays
MPMRGVDFKWYDGFFLSMLATSVIIVSINWKRYRLCAHPLHIWIVVDYTTVFIFRLLMFVDNGLAAGMGLDLGWQQRYARFCGRIIVLSVLVLLLYPFLWVWTVIGTLWFSTARGCLPEEGQKWGFLIWLLFSYCGLACIACVAIGKWLHRRHALQQRAQQGIPVSEHGWYIFWCSSVQVLVDMIRVPDWAFEAVGLEMRVGQDTAYHPGLYLTDAQREAVEALIQELPKFRLKAVPTDCSECPICLEEFHVGNEVRGLPCAHNFHVECIDQWLRLNVKCPRCRCSVFPNLDLSALNNLRSTSEPDHPSASASNVTTATAATRYVRSQPAGQSYLVRLQGLLLRPVRHDSVESDGEPAVGNSRLVGTEELPSILVDDGHQLPDR

SEQ ID NO: 173287 - protein, 625 aa, Zea Mays
MAPPVAGVVRLAAASRVLVLSLYLLARLLLRPYDTSATLHPPCLSSFSSSPDPNTPVSAAISSLAVWDGVHFARPAECGYEYEQSFAFLPLLPASLVLLARLLFAPLVPILGYRAVLVLSGYVLNNVAFVAAAAYFYRLSVLILKDQKAAYRASVLFCFNPASVFYSSLYSESLYALFSLGGIFYVFSGANTVAVIMLALSGSARSNGALNAGYFCFQALLQAYDATVQKKRPLLAIHALVAGALRSIFIFLPFFAFQAYGYLNICVHGSSDELRPWCKAKVPLLYGFIQSHYWGVGFLRYFQVKQLPNFLLASPVLSLAVYSIVHYAKLLHRCFQRTSVHKQIITALEKRPVVSYRRSDDATILSEPPAGLTKKAQGSSKAKQRKPVATEIAPATFHDSTTPANQNIEEDQDTCSILLLPFVLHLAFMAFTALFVMHVQVSTRFLSASPPVYWAAAHVLASPSRANRRWGYLICVYFIAYILLGASFGSVIERWLLESLGIWWADCILTIRSWRAEDIITSVPTRKQQSETIRRLVCGSRTTKSGAHCCPLASQQRRHRLVDINNQLIVTPIQQTLIRYIAIVCVHRRGRRTGLIFPCMSLPKNGHFKSRRPAREVPRTQPTAA

SEQ ID NO: 173288 - protein, 508 aa, Zea Mays
MAPPVAGVVRLAAASRVLVLSLYLLARLLLRPYDTSATLHPPCLSSFSSSPDPNTPVSAAISSLAVWDGVHFARPAECGYEYEQSFAFLPLLPASLVLLARLLFAPLVPILGYRAVLVLSGYVLNNVAFVAAAAYFYRLSVLILKDQKAAYRASVLFCFNPASVFYSSLYSESLYALFSLGGIFYVFSGANTVAVIMLALSGSARSNGALNAGYFCFQALLQAYDATVQKKRPLLAIHALVAGALRSIFIFLPFFAFQAYGYLNICVHGSSDELRPWCKAKVPLLYGFIQSHYWGVGFLRYFQVKQLPNFLLASPVLSLAVYSIVHYAKLLHRCFQRTSVHKQIITALEKRPVVSYRRSDDATILSEPPAGLTKKAQGSSKAKQRKPVATEIAPATFHDSTTPANQNIEEDQDTCSILLLPFVLHLAFMAFTALFVMHVQVSTRFLSASPPVYWAAAHVLASPSRANRRWGYLICVYFIAYILLGGFSRPALPEGFPRFARCFLWFSN

SEQ ID NO: 173289 - protein, 605 aa, Zea Mays
MSIKLDQDDTQVLGNDANEIQQFYKKYCASMSHISKKRNFEEMARYYQVVYALYEVLQDVTNKNIDDQVLRCADMVEENGRHFKNYKYNIIPLNFPGSSEEIMELPEIRGAIDAISDIDGLPMPDMSSIQRHEDKSIQDLIEYLSLAFGFQKSNVENQRENMVLLLANISTRTAAQEGHPLVDTVNELWKKIFGNYKSWCCYLHITSSIIISHDITEHKKQQLKLLHIGLYLLIWGEASNVRFMPECLCYIFHHMAKQLHDMVDENNFQPPQAPVEEGSFLKNVIEPIFKVLQKEAQKSRGGTAGHSAWRNYDDLNELFWSEKCFTELNWPPDLSSNFFYKGCGMARKPKTNFVEVRTFLHIFRSFNRMWMFFILAFQAMLIVSWSSSGSLSGITDGTVLKNVLSVFITAALLNFITVTLDIMFTVQAWGSMEWTKLVRYLLKFVVAIAWIIILPLTYSSSIKYPSGAGKILNSWIGDWYNQSVYNIAIVIYMVPDILAALFFLLPQLQNVMERSDSRVLVLLMWWIQPRLYVGRGMHGDILSILKYVFFWAVLLISKLAFSFYVEISPLIDPTKFILDQQVGNYEWHQIFPFFHAIMSMLQFFL

SEQ ID NO: 173290 - protein, 1099 aa, Zea Mays
MQCDKTARAFEHRSFFRVWNSFINSLREEDFISDREKDMLMAPSYSSNLSIIQWPPFLLASKVPAAVHMAMNSKEGDEHELIEKIKLDGDRYDAVIECYKSLMIILNSLLLDTNDQNIVNDIDKKVTYSMIKKTFLEDFEMAEIGKVSSTLARLLQLLKSEPINDVGERKIVNALQDFMEITTRDFMKDGQSFKDEDERNQRFMNLNMNMIKEDYWREKFVRLHLLLTMKDSAMDVPINLDARRRITFFANSLFMKMPRAPRVHDMISFSVLTPYYNEEVLYSSHDLNRKNEDGISILFYLQKIYPDEWNNFLERIGVESNNEVSIKGRMDDIRLWASYRGQTLARTVRGMMYYRRALELQCYEDMINDQGYGLADLDTAKAARSKAIADIKFTYVVSCQLYGVHKTSKDSRERGLYENILNLMLTYPALRIAYIDEKEVQLRNGKIEKQYYSVLVKGDDEEIYRIRLPGKPTEVGEGKPNNQNHAIIFTRGEALQAIDMNQDNYLEEAFKMRNLLEEFLLTHGKSEPTILGVREHIFTGSVSSLAWFMSSQETSFVTIGQRVLANPLKVRFHYGHPDVFDRLFHLTRGGISKASKIINLSEDIFAGFNSTLRRGNVTHHEYIQLGKGRDVGMNQISNFEAKVANGNGEQTLCRDIYRLGHRFDFYRMLSLYFTTVGFYFNSMVAVLTVYVFLYGRLYLVLSGLEKSILQDPNIQNIKPFENALATQSVFQLGMLLVLPMMMEIGLEKGFGRALAEFVIMQLQLASVFFTFHLGTKTHYYGRTILHGGAKYRATGRGFVVRHAKFAENYRMYSRSHFVKALELLILLVVYLAYGSSYRSSSLYLYVTVSIWFLVFCWLFAPFVFNPSCFEWHKTVDDWNDWWKWMGNRGGIGLAPEQSWEAWWVYALSWLVIAVALVSLKVVSMGREKFVTRIQLVFRILKGIVFLVLIGLLVLLFVGFDLAVSDVGASILAFIPTGWFILLVAQLCGPLFRRLIIEPLHLLCCPYGTGGACRGPCCARFRQRTGAALRKMGPWDSIQEMARMYEYTMGLLIFLPIAVLSWFPFVSEFQTRLLFNQAFSRGLQISRILAGQNGSGTKSD

SEQ ID NO: 173291 - protein, 1819 aa, Zea Mays
MSSLTNGLPMLDGATAAVPLEQKFSASTGDGSAAPSQPLQNNRSVPMQFFGFNLLFQSLYTRRKYAFKKVQTLDPSSTQRGVRQFKTYMSIKLDQDDTQVLGNDANEIQQFYKKYCASMSHISKKRNFEEMARYYQVVYALYEVLQDVTNKNIDDQVLRCADMVEENGRHFKNYKYNIIPLNFPGSSEEIMELPEIRGAIDAISDIDGLPMPDMSSIQRHEDKSIQDLIEYLSLAFGFQKSNVENQRENMVLLLANISTRTAAQEGHPLVDTVNELWKKIFGNYKSWCCYLHITSSIIISHDITEHKKQQLKLLHIGLYLLIWGEASNVRFMPECLCYIFHHMAKQLHDMVDENNFQPPQAPVEEGSFLKNVIEPIFKVLQKEAQKSRGGTAGHSAWRNYDDLNELFWSEKCFTELNWPPDLSSNFFYKGCGMARKPKTNFVEVRTFLHIFRSFNRMWMFFILAFQAMLIVSWSSSGSLSGITDGTVLKNVLSVFITAALLNFITVTLDIMFTVQAWGSMEWTKLVRYLLKFVVAIAWIIILPLTYSSSIKYPSGAGKILNSWIGDWYNQSVYNIAIVIYMVPDILAALFFLLPQLQNVMERSDSRVLVLLMWWIQPRLYVGRGMHGDILSILKYVFFWAVLLISKLAFSFYVEISPLIDPTKFILDQQVGNYEWHQIFPFLPRNLGVVITIWAPIVMVYFMDTQIWYAIFSTVFGGVSGALSHVGEIRTLGMLRARFKSIPEAFSQCNAIKQREQAFEHRSFFRVWNSFINSLREEDFISDREKDMLMAPSYSSNLSIIQWPPFLLASKVPAAVHMAMNSKEGDEHELIEKIKLDGDRYDAVIECYKSLMIILNSLLLDTNDQNIVNDIDKKVTYSMIKKTFLEDFEMAEIGKVSSTLARLLQLLKSEPINDVGERKIVNALQDFMEITTRDFMKDGQSFKDEDERNQRFMNLNMNMIKEDYWREKFVRLHLLLTMKDSAMDVPINLDARRRITFFANSLFMKMPRAPRVHDMISFSVLTPYYNEEVLYSSHDLNRKNEDGISILFYLQKIYPDEWNNFLERIGVESNNEVSIKGRMDDIRLWASYRGQTLARTVRGMMYYRRALELQCYEDMINDQGYGLADLDTAKAARSKAIADIKFTYVVSCQLYGVHKTSKDSRERGLYENILNLMLTYPALRIAYIDEKEVQLRNGKIEKQYYSVLVKGDDEEIYRIRLPGKPTEVGEGKPNNQNHAIIFTRGEALQAIDMNQDNYLEEAFKMRNLLEEFLLTHGKSEPTILGVREHIFTGRVRFHYGHPDVFDRLFHLTRGGISKASKIINLSEDIFAGFNSTLRRGNVTHHEYIQLGKGRDVGMNQISNFEAKVANGNGEQTLCRDIYRLGHRFDFYRMLSLYFTTVGFYFNSMVAVLTVYVFLYGRLYLVLSGLEKSILQDPNIQNIKPFENALATQSVFQLGMLLVLPMMMEIGLEKGFGRALAEFVIMQLQLASVFFTFHLGTKTHYYGRTILHGGAKYRATGRGFVVRHAKFAENYRMYSRSHFVKALELLILLVVYLAYGSSYRSSSLYLYVTVSIWFLVFCWLFAPFVFNPSCFEWHKTVDDWNDWWKWMGNRGGIGLAPEQSWEAWWVYALSWLVIAVALVSLKVVSMGREKFVTRIQLVFRILKGIVFLVLIGLLVLLFVGFDLAVSDVGASILAFIPTGWFILLVAQLCGPLFRRLIIEPLHLLCCPYGTGGACRGPCCARFRQRTGAALRKMGPWDSIQEMARMYEYTMGLLIFLPIAVLSWFPFVSEFQTRLLFNQAFSRGLQISRILAGQNGSGTKSD

SEQ ID NO: 173292 - protein, 1747 aa, Zea Mays
MSIKLDQDDTQVLGNDANEIQQFYKKYCASMSHISKKRNFEEMARYYQVVYALYEVLQDVTNKNIDDQVLRCADMVEENGRHFKNYKYNIIPLNFPGSSEEIMELPEIRGAIDAISDIDGLPMPDMSSIQRHEDKSIQDLIEYLSLAFGFQKSNVENQRENMVLLLANISTRTAAQEGHPLVDTVNELWKKIFGNYKSWCCYLHITSSIIISHDITEHKKQQLKLLHIGLYLLIWGEASNVRFMPECLCYIFHHMAKQLHDMVDENNFQPPQAPVEEGSFLKNVIEPIFKVLQKEAQKSRGGTAGHSAWRNYDDLNELFWSEKCFTELNWPPDLSSNFFYKGCGMARKPKTNFVEVRTFLHIFRSFNRMWMFFILAFQAMLIVSWSSSGSLSGITDGTVLKNVLSVFITAALLNFITVTLDIMFTVQAWGSMEWTKLVRYLLKFVVAIAWIIILPLTYSSSIKYPSGAGKILNSWIGDWYNQSVYNIAIVIYMVPDILAALFFLLPQLQNVMERSDSRVLVLLMWWIQPRLYVGRGMHGDILSILKYVFFWAVLLISKLAFSFYVEISPLIDPTKFILDQQVGNYEWHQIFPFLPRNLGVVITIWAPIVMVYFMDTQIWYAIFSTVFGGVSGALSHVGEIRTLGMLRARFKSIPEAFSQCNAIKQREQAFEHRSFFRVWNSFINSLREEDFISDREKDMLMAPSYSSNLSIIQWPPFLLASKVPAAVHMAMNSKEGDEHELIEKIKLDGDRYDAVIECYKSLMIILNSLLLDTNDQNIVNDIDKKVTYSMIKKTFLEDFEMAEIGKKSEPINDVGERKIVNALQDFMEITTRDFMKDGQSFKDEDERNQRFMNLNMNMIKEDYWREKFVRLHLLLTMKDSAMDVPINLDARRRITFFANSLFMKMPRAPRVHDMISFSVLTPYYNEEVLYSSHDLNRKNEDGISILFYLQKIYPDEWNNFLERIGVESNNEVSIKGRMDDIRLWASYRGQTLARTVRGMMYYRRALELQCYEDMINDQGYGLADLDTAKAARSKAIADIKFTYVVSCQLYGVHKTSKDSRERGLYENILNLMLTYPALRIAYIDEKEVQLRNGKIEKQYYSVLVKGDDEEIYRIRLPGKPTEVGEGKPNNQNHAIIFTRGEALQAIDMNQDNYLEEAFKMRNLLEEFLLTHGKSEPTILGVREHIFTGSVSSLAWFMSSQETSFVTIGQRVLANPLKVRFHYGHPDVFDRLFHLTRGGISKASKIINLSEDIFAGFNSTLRRGNVTHHEYIQLGKGRDVGMNQISNFEAKVANGNGEQTLCRDIYRLGHRFDFYRMLSLYFTTVGFYFNSMVAVLTVYVFLYGRLYLVLSGLEKSILQDPNIQNIKPFENALATQSVFQLGMLLVLPMMMEIGLEKGFGRALAEFVIMQLQLASVFFTFHLGTKTHYYGRTILHGGAKYRATGRGFVVRHAKFAENYRMYSRSHFVKALELLILLVVYLAYGSSYRSSSLYLYVTVSIWFLVFCWLFAPFVFNPSCFEWHKTVDDWNDWWKWMGNRGGIGLAPEQSWEAWWVYALSWLVIAVALVSLKVVSMGREKFVTRIQLVFRILKGIVFLVLIGLLVLLFVGFDLAVSDVGASILAFIPTGWFILLVAQLCGPLFRRLIIEPLHLLCCPYGTGGACRGPCCARFRQRTGAALRKMGPWDSIQEMARMYEYTMGLLIFLPIAVLSWFPFVSEFQTRLLFNQAFSRGLQISRILAGQNGSGTKSD

SEQ ID NO: 173293 - protein, 1777 aa, Zea Mays
MSIKLDQDDTQVLGNDANEIQQFYKKYCASMSHISKKRNFEEMARYYQVVYALYEVLQDVTNKNIDDQVLRCADMVEENGRHFKNYKYNIIPLNFPGSSEEIMELPEIRGAIDAISDIDGLPMPDMSSIQRHEDKSIQDLIEYLSLAFGFQKSNVENQRENMVLLLANISTRTAAQEGHPLVDTVNELWKKIFGNYKSWCCYLHITSSIIISHDITEHKKQQLKLLHIGLYLLIWGEASNVRFMPECLCYIFHHMAKQLHDMVDENNFQPPQAPVEEGSFLKNVIEPIFKVLQKEAQKSRGGTAGHSAWRNYDDLNELFWSEKCFTELNWPPDLSSNFFYKGCGMARKPKTNFVEVRTFLHIFRSFNRMWMFFILAFQAMLIVSWSSSGSLSGITDGTVLKNVLSVFITAALLNFITVTLDIMFTVQAWGSMEWTKLVRYLLKFVVAIAWIIILPLTYSSSIKYPSGAGKILNSWIGDWYNQSVYNIAIVIYMVPDILAALFFLLPQLQNVMERSDSRVLVLLMWWIQPRLYVGRGMHGDILSILKYVFFWAVLLISKLAFSFYVEISPLIDPTKFILDQQVGNYEWHQIFPFLPRNLGVVITIWAPIVMVYFMDTQIWYAIFSTVFGGVSGALSHVGEIRTLGMLRARFKSIPEAFSQCNAIKQREQAFEHRSFFRVWNSFINSLREEDFISDREKDMLMAPSYSSNLSIIQWPPFLLASKVPAAVHMAMNSKEGDEHELIEKIKLDGDRYDAVIECYKSLMIILNSLLLDTNDQNIVNDIDKKVTYSMIKKTFLEDFEMAEIGKVSSTLARLLQLLKSEPINDVGERKIVNALQDFMEITTRDFMKDGQSFKDEDERNQRFMNLNMNMIKEDYWREKFVRLHLLLTMKDSAMDVPINLDARRRITFFANSLFMKMPRAPRVHDMISFSVLTPYYNEEVLYSSHDLNRKNEDGISILFYLQKIYPDEWNNFLERIGVESNNEVSIKGRMDDIRLWASYRGQTLARTVRGMMYYRRALELQCYEDMINDQGYGLADLDTAKAARSKAIADIKFTYVVSCQLYGVHKTSKDSRERGLYENILNLMLTYPALRIAYIDEKEVQLRNGKIEKQYYSVLVKGDDEEIYRIRLPGKPTEVGEGKPNNQNHAIIFTRGEALQAIDMNQDNYLEEAFKMRNLLEEFLLTHGKSEPTILGVREHIFTGRVRFHYGHPDVFDRLFHLTRGGISKASKIINLSEDIFAGFNSTLRRGNVTHHEYIQLGKGRDVGMNQISNFEAKVANGNGEQTLCRDIYRLGHRFDFYRMLSLYFTTVGFYFNSMVAVLTVYVFLYGRLYLVLSGLEKSILQDPNIQNIKPFENALATQSVFQLGMLLVLPMMMEIGLEKGFGRALAEFVIMQLQLASVFFTFHLGTKTHYYGRTILHGGAKYRATGRGFVVRHAKFAENYRMYSRSHFVKALELLILLVVYLAYGSSYRSSSLYLYVTVSIWFLVFCWLFAPFVFNPSCFEWHKTVDDWNDWWKWMGNRGGIGLAPEQSWEAWWVSEHDHLRNATIRSLLLEFILSLRFLIYQYGIVYHLHIVHGNKSFLVYALSWLVIAVALVSLKVVSMGREKFVTRIQLVFRILKGIVFLVLIGLLVLLFVGFDLAVSDVGASILAFIPTGWFILLVAQLCGPLFRRLIIEPLHLLCCPYGTGGACRGPCCARFRQRTGAALRKMGPWDSIQEMARMYEYTMGLLIFLPIAVLSWFPFVSEFQTRLLFNQAFSRGLQISRILAGQNGSGTKSD

SEQ ID NO: 173294 - protein, 1044 aa, Zea Mays
MLMAPSYSSNLSIIQWPPFLLASKVPAAVHMAMNSKEGDEHELIEKIKLDGDRYDAVIECYKSLMIILNSLLLDTNDQNIVNDIDKKVTYSMIKKTFLEDFEMAEIGKVSSTLARLLQLLKSEPINDVGERKIVNALQDFMEITTRDFMKDGQSFKDEDERNQRFMNLNMNMIKEDYWREKFVRLHLLLTMKDSAMDVPINLDARHEWNNFLERIGVESNNEVSIKGRMDDIRLWASYRGQTLARTVRGMMYYRRALELQCYEDMINDQGYGLADLDTAKAARSKAIADIKFTYVVSCQLYGVHKTSKDSRERGLYENILNLMLTYPALRIAYIDEKEVQLRNGKIEKQYYSVLVKGDDEEIYRIRLPGKPTEVGEGKPNNQNHAIIFTRGEALQAIDMNQDNYLEEAFKMRNLLEEFLLTHGKSEPTILGVREHIFTGSVSSLAWFMSSQETSFVTIGQRVLANPLKVRFHYGHPDVFDRLFHLTRGGISKASKIINLSEDIFAGFNSTLRRGNVTHHEYIQLGKGRDVGMNQISNFEAKVANGNGEQTLCRDIYRLGHRFDFYRMLSLYFTTVGFYFNSMVAVLTVYVFLYGRLYLVLSGLEKSILQDPNIQNIKPFENALATQSVFQLGMLLVLPMMMEIGLEKGFGRALAEFVIMQLQLASVFFTFHLGTKTHYYGRTILHGGAKYRATGRGFVVRHAKFAENYRMYSRSHFVKALELLILLVVYLAYGSSYRSSSLYLYVTVSIWFLVFCWLFAPFVFNPSCFEWHKTVDDWNDWWKWMGNRGGIGLAPEQSWEAWWVSEHDHLRNATIRSLLLEFILSLRFLIYQYGIVYHLHIVHGNKSFLVYALSWLVIAVALVSLKVVSMGREKFVTRIQLVFRILKGIVFLVLIGLLVLLFVGFDLAVSDVGASILAFIPTGWFILLVAQLCGPLFRRLIIEPLHLLCCPYGTGGACRGPCCARFRQRTGAALRKMGPWDSIQEMARMYEYTMGLLIFLPIAVLSWFPFVSEFQTRLLFNQAFSRGLQISRILAGQNGSGTKSD

SEQ ID NO: 173295 - protein, 1805 aa, Zea Mays
MSIKLDQDDTQVLGNDANEIQQFYKKYCASMSHISKKRNFEEMARYYQVVYALYEVLQDVTNKNIDDQVLRCADMVEENGRHFKNYKYNIIPLNFPGSSEEIMELPEIRGAIDAISDIDGLPMPDMSSIQRHEDKSIQDLIEYLSLAFGFQKSNVENQRENMVLLLANISTRTAAQEGHPLVDTVNELWKKIFGNYKSWCCYLHITSSIIISHDITEHKKQQLKLLHIGLYLLIWGEASNVRFMPECLCYIFHHMAKQLHDMVDENNFQPPQAPVEEGSFLKNVIEPIFKVLQKEAQKSRGGTAGHSAWRNYDDLNELFWSEKCFTELNWPPDLSSNFFYKGCGMARKPKTNFVEVRTFLHIFRSFNRMWMFFILAFQAMLIVSWSSSGSLSGITDGTVLKNVLSVFITAALLNFITVTLDIMFTVQAWGSMEWTKLVRYLLKFVVAIAWIIILPLTYSSSIKYPSGAGKILNSWIGDWYNQSVYNIAIVIYMVPDILAALFFLLPQLQNVMERSDSRVLVLLMWWIQPRLYVGRGMHGDILSILKYVFFWAVLLISKLAFSFYVEISPLIDPTKFILDQQVGNYEWHQIFPFLPRNLGVVITIWAPIVMVYFMDTQIWYAIFSTVFGGVSGALSHVGEIRTLGMLRARFKSIPEAFSQCNAIKQREQAFEHRSFFRVWNSFINSLREEDFISDREKDMLMAPSYSSNLSIIQWPPFLLASKVPAAVHMAMNSKEGDEHELIEKIKLDGDRYDAVIECYKSLMIILNSLLLDTNDQNIVNDIDKKVTYSMIKKTFLEDFEMAEIGKVSSTLARLLQLLKSEPINDVGERKIVNALQDFMEITTRDFMKDGQSFKDEDERNQRFMNLNMNMIKEDYWREKFVRLHLLLTMKDSAMDVPINLDARRRITFFANSLFMKMPRAPRVHDMISFSVLTPYYNEEVLYSSHDLNRKNEDGISILFYLQKIYPDEWNNFLERIGVESNNEVSIKGRMDDIRLWASYRGQTLARTVRGMMYYRRALELQCYEDMINDQGYGLADLDTAKAARSKAIADIKFTYVVSCQLYGVHKTSKDSRERGLYENILNLMLTYPALRIAYIDEKEVQLRNGKIEKQYYSVLVKGDDEEIYRIRLPGKPTEVGEGKPNNQNHAIIFTRGEALQAIDMNQDNYLEEAFKMRNLLEEFLLTHGKSEPTILGVREHIFTGSVSSLAWFMSSQETSFVTIGQRVLANPLKVRFHYGHPDVFDRLFHLTRGGISKASKIINLSEDIFAGFNSTLRRGNVTHHEYIQLGKGRDVGMNQISNFEAKVANGNGEQTLCRDIYRLGHRFDFYRMLSLYFTTVGFYFNSMVAVLTVYVFLYGRLYLVLSGLEKSILQDPNIQNIKPFENALATQSVFQLGMLLVLPMMMEIGLEKGFGRALAEFVIMQLQLASVFFTFHLGTKTHYYGRTILHGGAKYRATGRGFVVRHAKFAENYRMYSRSHFVKALELLILLVVYLAYGSSYRSSSLYLYVTVSIWFLVFCWLFAPFVFNPSCFEWHKTVDDWNDWWKWMGNRGGIGLAPEQSWEAWWVSEHDHLRNATIRSLLLEFILSLRFLIYQYGIVYHLHIVHGNKSFLVYALSWLVIAVALVSLKVVSMGREKFVTRIQLVFRILKGIVFLVLIGLLVLLFVGFDLAVSDVGASILAFIPTGWFILLVAQLCGPLFRRLIIEPLHLLCCPYGTGGACRGPCCARFRQRTGAALRKMGPWDSIQEMARMYEYTMGLLIFLPIAVLSWFPFVSEFQTRLLFNQAFSRGLQISRILAGQNGSGTKSD

SEQ ID NO: 173296 - protein, 1117 aa, Zea Mays
MQCDKTARAFEHRSFFRVWNSFINSLREEDFISDREKDMLMAPSYSSNLSIIQWPPFLLASKVPAAVHMAMNSKEGDEHELIEKIKLDGDRYDAVIECYKSLMIILNSLLLDTNDQNIVNDIDKKVTYSMIKKTFLEDFEMAEIGKVSSTLARLLQLLKSEPINDVGERKIVNALQDFMEITTRDFMKDGQSFKDEDERNQRFMNLNMNMIKEDYWREKFVRLHLLLTMKDSAMDVPINLDARRRITFFANSLFMKMPRAPRVHDMISFSVLTPYYNEEVLYSSHDLNRKNEDGISILFYLQKIYPDEWNNFLERIGVESNNEVSIKGRMDDIRLWASYRGQTLARTVRGMMYYRRALELQCYEDMINDQGYGLADLDTAKAARSKAIADIKFTYVVSCQLYGVHKTSKDSRERGLYENILNLMLTYPALRIAYIDEKEVQLRNGKIEKQYYSVLVKGDDEEIYRIRLPGKPTEVGEGKPNNQNHAIIFTRGEALQAIDMNQDNYLEEAFKMRNLLEEFLLTHGKSEPTILGVREHIFTGRVRFHYGHPDVFDRLFHLTRGGISKASKIINLSEDIFAGFNSTLRRGNVTHHEYIQLGKGRDVGMNQISNFEAKVANGNGEQTLCRDIYRLGHRFDFYRMLSLYFTTVGFYFNSMVAVLTVYVFLYGRLYLVLSGLEKSILQDPNIQNIKPFENALATQSVFQLGMLLVLPMMMEIGLEKGFGRALAEFVIMQLQLASVFFTFHLGTKTHYYGRTILHGGAKYRATGRGFVVRHAKFAENYRMYSRSHFVKALELLILLVVYLAYGSSYRSSSLYLYVTVSIWFLVFCWLFAPFVFNPSCFEWHKTVDDWNDWWKWMGNRGGIGLAPEQSWEAWWVSEHDHLRNATIRSLLLEFILSLRFLIYQYGIVYHLHIVHGNKSFLVYALSWLVIAVALVSLKVVSMGREKFVTRIQLVFRILKGIVFLVLIGLLVLLFVGFDLAVSDVGASILAFIPTGWFILLVAQLCGPLFRRLIIEPLHLLCCPYGTGGACRGPCCARFRQRTGAALRKMGPWDSIQEMARMYEYTMGLLIFLPIAVLSWFPFVSEFQTRLLFNQAFSRGLQISRILAGQNGSGTKSD

SEQ ID NO: 173297 - protein, 1901 aa, Zea Mays
MEAGPSSSAAMSAARRRRDALAQTLASRRLPEGMAEAGELVPGALAPEVMPFLRAADEIEPYNPRVAFLCRKYAFKKVQTLDPSSTQRGVRQFKTYMSIKLDQDDTQVLGNDANEIQQFYKKYCASMSHISKKRNFEEMARYYQVVYALYEVLQDVTNKNIDDQVLRCADMVEENGRHFKNYKYNIIPLNFPGSSEEIMELPEIRGAIDAISDIDGLPMPDMSSIQRHEDKSIQDLIEYLSLAFGFQKSNVENQRENMVLLLANISTRTAAQEGHPLVDTVNELWKKIFGNYKSWCCYLHITSSIIISHDITEHKKQQLKLLHIGLYLLIWGEASNVRFMPECLCYIFHHMAKQLHDMVDENNFQPPQAPVEEGSFLKNVIEPIFKVLQKEAQKSRGGTAGHSAWRNYDDLNELFWSEKCFTELNWPPDLSSNFFYKGCGMARKPKTNFVEVRTFLHIFRSFNRMWMFFILAFQAMLIVSWSSSGSLSGITDGTVLKNVLSVFITAALLNFITVTLDIMFTVQAWGSMEWTKLVRYLLKFVVAIAWIIILPLTYSSSIKYPSGAGKILNSWIGDWYNQSVYNIAIVIYMVPDILAALFFLLPQLQNVMERSDSRVLVLLMWWIQPRLYVGRGMHGDILSILKYVFFWAVLLISKLAFSFYVEISPLIDPTKFILDQQVGNYEWHQIFPFLPRNLGVVITIWAPIVMVYFMDTQIWYAIFSTVFGGVSGALSHVGEIRTLGMLRARFKSIPEAFSQCNAIKQREQAFEHRSFFRVWNSFINSLREEDFISDREKDMLMAPSYSSNLSIIQWPPFLLASKVPAAVHMAMNSKEGDEHELIEKIKLDGDRYDAVIECYKSLMIILNSLLLDTNDQNIVNDIDKKVTYSMIKKTFLEDFEMAEIGKVSSTLARLLQLLKSEPINDVGERKIVNALQDFMEITTRDFMKDGQSFKDEDERNQRFMNLNMNMIKEDYWREKFVRLHLLLTMKDSAMDVPINLDARRRITFFANSLFMKMPRAPRVHDMISFSVLTPYYNEEVLYSSHDLNRKNEDGISILFYLQKIYPDEWNNFLERIGVESNNEVSIKGRMDDIRLWASYRGQTLARTVRGMMYYRRALELQCYEDMINDQGYGLADLDTAKAARSKAIADIKFTYVVSCQLYGVHKTSKDSRERGLYENILNLMLTYPALRIAYIDEKEVQLRNGKIEKQYYSVLVKGDDEEIYRIRLPGKPTEVGEGKPNNQNHAIIFTRGEALQAIDMNQDNYLEEAFKMRNLLEEFLLTHGKSEPTILGVREHIFTGSVSSLAWFMSSQETSFVTIGQRVLANPLKVRFHYGHPDVFDRLFHLTRGGISKASKIINLSEDIFAGFNSTLRRGNVTHHEYIQLGKGRDVGMNQISNFEAKVANGNGEQTLCRDIYRLGHRFDFYRMLSLYFTTVGFYFNSMVAVLTVYVFLYGRLYLVLSGLEKSILQDPNIQNIKPFENALATQSVFQLGMLLVLPMMMEIGLEKGFGRALAEFVIMQLQLASVFFTFHLGTKTHYYGRTILHGGAKYRATGRGFVVRHAKFAENYRMYSRSHFVKALELLILLVVYLAYGSSYRSSSLYLYVTVSIWFLVFCWLFAPFVFNPSCFEWHKTVDDWNDWWKWMGNRGGIGLAPEQSWEAWWVSEHDHLRNATIRSLLLEFILSLRFLIYQYGIVYHLHIVHGNKSFLVYALSWLVIAVALVSLKVVSMGREKFVTRIQLVFRILKGIVFLVLIGLLVLLFVGFDLAVSDVGASILAFIPTGWFILLVAQLCGPLFRRLIIEPLHLLCCPYGTGGACRGPCCARFRQRTGAALRKMGPWDSIQEMARMYEYTMGLLIFLPIAVLSWFPFVSEFQTRLLFNQAFSRGLQISRILAGQNGSGTKSD

SEQ ID NO: 173298 - protein, 780 aa, Zea Mays
MEAGPSSSAAMSAARRRRDALAQTLASRRLPEGMAEAGELVPGALAPEVMPFLRAADEIEPYNPRVAFLCRKYAFKKVQTLDPSSTQRGVRQFKTYMSIKLDQDDTQVLGNDANEIQQFYKKYCASMSHISKKRNFEEMARYYQVVYALYEVLQDVTNKNIDDQVLRCADMVEENGRHFKNYKYNIIPLNFPGSSEEIMELPEIRGAIDAISDIDGLPMPDMSSIQRHEDKSIQDLIEYLSLAFGFQKSNVENQRENMVLLLANISTRTAAQEGHPLVDTVNELWKKIFGNYKSWCCYLHITSSIIISHDITEHKKQQLKLLHIGLYLLIWGEASNVRFMPECLCYIFHHMAKQLHDMVDENNFQPPQAPVEEGSFLKNVIEPIFKVLQKEAQKSRGGTAGHSAWRNYDDLNELFWSEKCFTELNWPPDLSSNFFYKGCGMARKPKTNFVEVRTFLHIFRSFNRMWMFFILAFQAMLIVSWSSSGSLSGITDGTVLKNVLSVFITAALLNFITVTLDIMFTVQAWGSMEWTKLVRYLLKFVVAIAWIIILPLTYSSSIKYPSGAGKILNSWIGDWYNQSVYNIAIVIYMVPDILAALFFLLPQLQNVMERSDSRVLVLLMWWIQPRLYVGRGMHGDILSILKYVFFWAVLLISKLAFSFYVEISPLIDPTKFILDQQVGNYEWHQIFPFLPRNLGVVITIWAPIVMVYFMDTQIWYAIFSTVFGGVSGALSHVGEIRTLGMLRARFKSIPEAFSQCNAIKQREHLSTEASFVFGIHSSIP

SEQ ID NO: 173299 - protein, 1263 aa, Zea Mays
MPSYAHHHPYQRVQPMSVPTHCPNQNPQALMGHNLYHLSPYSFGTYFASSGLPRNLGVVITIWAPIVMVYFMDTQIWYAIFSTVFGGVSGALSHVGEIRTLGMLRARFKSIPEAFSQCNAIKQREQAFEHRSFFRVWNSFINSLREEDFISDREKDMLMAPSYSSNLSIIQWPPFLLASKVPAAVHMAMNSKEGDEHELIEKIKLDGDRYDAVIECYKSLMIILNSLLLDTNDQNIVNDIDKKVTYSMIKKTFLEDFEMAEIGKVSSTLARLLQLLKSEPINDVGERKIVNALQDFMEITTRDFMKDGQSFKDEDERNQRFMNLNMNMIKEDYWREKFVRLHLLLTMKDSAMDVPINLDARRRITFFANSLFMKMPRAPRVHDMISFSVLTPYYNEEVLYSSHDLNRKNEDGISILFYLQKIYPDEWNNFLERIGVESNNEVSIKGRMDDIRLWASYRGQTLARTVRGMMYYRRALELQCYEDMINDQGYGLADLDTAKAARSKAIADIKFTYVVSCQLYGVHKTSKDSRERGLYENILNLMLTYPALRIAYIDEKEVQLRNGKIEKQYYSVLVKGDDEEIYRIRLPGKPTEVGEGKPNNQNHAIIFTRGEALQAIDMNQDNYLEEAFKMRNLLEEFLLTHGKSEPTILGVREHIFTGSVSSLAWFMSSQETSFVTIGQRVLANPLKVRFHYGHPDVFDRLFHLTRGGISKASKIINLSEDIFAGFNSTLRRGNVTHHEYIQLGKGRDVGMNQISNFEAKVANGNGEQTLCRDIYRLGHRFDFYRMLSLYFTTVGFYFNSMVAVLTVYVFLYGRLYLVLSGLEKSILQDPNIQNIKPFENALATQSVFQLGMLLVLPMMMEIGLEKGFGRALAEFVIMQLQLASVFFTFHLGTKTHYYGRTILHGGAKYRATGRGFVVRHAKFAENYRMYSRSHFVKALELLILLVVYLAYGSSYRSSSLYLYVTVSIWFLVFCWLFAPFVFNPSCFEWHKTVDDWNDWWKWMGNRGGIGLAPEQSWEAWWVSEHDHLRNATIRSLLLEFILSLRFLIYQYGIVYHLHIVHGNKSFLVYALSWLVIAVALVSLKVVSMGREKFVTRIQLVFRILKGIVFLVLIGLLVLLFVGFDLAVSDVGASILAFIPTGWFILLVAQLCGPLFRRLIIEPLHLLCCPYGTGGACRGPCCARFRQRTGAALRKMGPWDSIQEMARMYEYTMGLLIFLPIAVLSWFPFVSEFQTRLLFNQAFSRGLQISRILAGQNGSGTKSD

SEQ ID NO: 173300 - protein, 1235 aa, Zea Mays
MPSYAHHHPYQRVQPMSVPTHCPNQNPQALMGHNLYHLSPYSFGTYFASSGLPRNLGVVITIWAPIVMVYFMDTQIWYAIFSTVFGGVSGALSHVGEIRTLGMLRARFKSIPEAFSQCNAIKQREQAFEHRSFFRVWNSFINSLREEDFISDREKDMLMAPSYSSNLSIIQWPPFLLASKVPAAVHMAMNSKEGDEHELIEKIKLDGDRYDAVIECYKSLMIILNSLLLDTNDQNIVNDIDKKVTYSMIKKTFLEDFEMAEIGKVSSTLARLLQLLKSEPINDVGERKIVNALQDFMEITTRDFMKDGQSFKDEDERNQRFMNLNMNMIKEDYWREKFVRLHLLLTMKDSAMDVPINLDARRRITFFANSLFMKMPRAPRVHDMISFSVLTPYYNEEVLYSSHDLNRKNEDGISILFYLQKIYPDEWNNFLERIGVESNNEVSIKGRMDDIRLWASYRGQTLARTVRGMMYYRRALELQCYEDMINDQGYGLADLDTAKAARSKAIADIKFTYVVSCQLYGVHKTSKDSRERGLYENILNLMLTYPALRIAYIDEKEVQLRNGKIEKQYYSVLVKGDDEEIYRIRLPGKPTEVGEGKPNNQNHAIIFTRGEALQAIDMNQDNYLEEAFKMRNLLEEFLLTHGKSEPTILGVREHIFTGRVRFHYGHPDVFDRLFHLTRGGISKASKIINLSEDIFAGFNSTLRRGNVTHHEYIQLGKGRDVGMNQISNFEAKVANGNGEQTLCRDIYRLGHRFDFYRMLSLYFTTVGFYFNSMVAVLTVYVFLYGRLYLVLSGLEKSILQDPNIQNIKPFENALATQSVFQLGMLLVLPMMMEIGLEKGFGRALAEFVIMQLQLASVFFTFHLGTKTHYYGRTILHGGAKYRATGRGFVVRHAKFAENYRMYSRSHFVKALELLILLVVYLAYGSSYRSSSLYLYVTVSIWFLVFCWLFAPFVFNPSCFEWHKTVDDWNDWWKWMGNRGGIGLAPEQSWEAWWVSEHDHLRNATIRSLLLEFILSLRFLIYQYGIVYHLHIVHGNKSFLVYALSWLVIAVALVSLKVVSMGREKFVTRIQLVFRILKGIVFLVLIGLLVLLFVGFDLAVSDVGASILAFIPTGWFILLVAQLCGPLFRRLIIEPLHLLCCPYGTGGACRGPCCARFRQRTGAALRKMGPWDSIQEMARMYEYTMGLLIFLPIAVLSWFPFVSEFQTRLLFNQAFSRGLQISRILAGQNGSGTKSD

SEQ ID NO: 173301 - protein, 442 aa, Zea Mays
MKSEPINDVGERKIVNALQDFMEITTRDFMKDGQSFKDEDERNQRFMNLNMNMIKEDYWREKFVRLHLLLTMKDSAMDVPINLDARHEWNNFLERIGVESNNEVSIKGRMDDIRLWASYRGQTLARTVRGMMYYRRALELQCYEDMINDQGYGLADLDTAKAARSKAIADIKFTYVVSCQLYGVHKTSKDSRERGLYENILNLMLTYPALRIAYIDEKEVQLRNGKIEKQYYSVLVKGDDEEIYRIRLPGKPTEVGEGKPNNQNHAIIFTRGEALQAIDMNQDNYLEEAFKMRNLLEEFLLTHGKSEPTILGVREHIFTGSVSSLAWFMSSQETSFVTIGQRVLANPLKVRFHYGHPDVFDRLFHLTRGGISKASKIINLSEDIFAGICTVMAGYSSCSCVTKGCFNGEREVCYKDSTSVPHPQGHCVPCAHWFACPFICWF

SEQ ID NO: 173302 - protein, 1032 aa, Zea Mays
MLMAPSYSSNLSIIQWPPFLLASKVPAAVHMAMNSKEGDEHELIEKIKLDGDRYDAVIECYKSLMIILNSLLLDTNDQNIVNDIDKKVTYSMIKKTFLEDFEMAEIGKKSEPINDVGERKIVNALQDFMEITTRDFMKDGQSFKDEDERNQRFMNLNMNMIKEDYWREKFVRLHLLLTMKDSAMDVPINLDARHEWNNFLERIGVESNNEVSIKGRMDDIRLWASYRGQTLARTVRGMMYYRRALELQCYEDMINDQGYGLADLDTAKAARSKAIADIKFTYVVSCQLYGVHKTSKDSRERGLYENILNLMLTYPALRIAYIDEKEVQLRNGKIEKQYYSVLVKGDDEEIYRIRLPGKPTEVGEGKPNNQNHAIIFTRGEALQAIDMNQDNYLEEAFKMRNLLEEFLLTHGKSEPTILGVREHIFTGSVSSLAWFMSSQETSFVTIGQRVLANPLKVRFHYGHPDVFDRLFHLTRGGISKASKIINLSEDIFAGFNSTLRRGNVTHHEYIQLGKGRDVGMNQISNFEAKVANGNGEQTLCRDIYRLGHRFDFYRMLSLYFTTVGFYFNSMVAVLTVYVFLYGRLYLVLSGLEKSILQDPNIQNIKPFENALATQSVFQLGMLLVLPMMMEIGLEKGFGRALAEFVIMQLQLASVFFTFHLGTKTHYYGRTILHGGAKYRATGRGFVVRHAKFAENYRMYSRSHFVKALELLILLVVYLAYGSSYRSSSLYLYVTVSIWFLVFCWLFAPFVFNPSCFEWHKTVDDWNDWWKWMGNRGGIGLAPEQSWEAWWVSEHDHLRNATIRSLLLEFILSLRFLIYQYGIVYHLHIVHGNKSFLVYALSWLVIAVALVSLKVVSMGREKFVTRIQLVFRILKGIVFLVLIGLLVLLFVGFDLAVSDVGASILAFIPTGWFILLVAQLCGPLFRRLIIEPLHLLCCPYGTGGACRGPCCARFRQRTGAALRKMGPWDSIQEMARMYEYTMGLLIFLPIAVLSWFPFVSEFQTRLLFNQAFSRGLQISRILAGQNGSGTKSD

SEQ ID NO: 173303 - protein, 220 aa, Zea Mays
MASNMQASGLPQPPRPPMMGSSAQPQNLGPPMPMQFRPVIPSQPPPQFVPPAAQQFRSVGEPMPGANVGMPGQMPHFPQPGQHMPHSNQVPPVSQGVPMVYQPARPMSSAPMQPQQQAAYAGGHLLTMGAPMQPLTYTYQPTSIPPVVQPWSTGPGQSVTHVPPLVQSGHQQVSAPTTLPPVNLSEPSSSDWQEHTAAEGKKYYYNKKTRQSSWEKPVEL

SEQ ID NO: 173304 - protein, 158 aa, Zea Mays
MPGANVGMPGQMPHFPQPGQHMPHSNQVPPVSQGVPMVYQPARPMSSAPMQPQQQAAYAGGHLLTMGAPMQPLTYTYQPTSIPPVVQPWSTGPGQSVTHVPPLVQSGHQQVSAPTTLPPVNLSEPSSSDWQEHTAAEGKKYYYNKKTRQSSWEKPVEL

SEQ ID NO: 173305 - protein, 190 aa, Zea Mays
MASNMQASGLPQPPRPPMMGSSAQPQNLGPPMPMQFRPVIPSQPPPQFVPPAAQQFRSVGEPMPGANVGMPGQMPHFPQPGQHMPHSNQVPPVSQGVPMVYQPARPMSSAPMQPQQQAAYAGGHLLTMGAPMQPLTYTYQPTSIPPVVQPWSTGPGQSVTHVPPLVQSGHQQVSAPTTLPPIGRSTLQPR

SEQ ID NO: 173306 - protein, 210 aa, Zea Mays
MASNMQASGLPQPPRPPMMGSSAQPQNLGPPMPMQFRPVIPSQPPPQFVPPAAQQFRSVGEPMPGANVGMPGQMPHFPQPGQHMPHSNQVPPVSQGVPMVYQPARPMSSAPMQPQQQAAYAGGHLLTMGAPMQPLTYTYQPTSIPPVVQPWSTGPGQSVTHVPPLVQSGHQQVSAPTTLPPIGRSTLQPREKSTTIIRRQGNQVGRNQLS

SEQ ID NO: 173307 - protein, 80 aa, Zea Mays
MPGANVGMPGQMPHFPQPGQHMPHSNQVPPVSQGVPMYQPTSIPPVVQPWSTGPGQSVTHVPPLVQSGHQQVSAPTTLPP

SEQ ID NO: 173308 - protein, 131 aa, Zea Mays
MPGANVGMPGQMPHFPQPGQHMPHSNQVPPVSQGVPMVYQPARPMSSAPMQPQQQAAYAGGHLLTMGAPMQPLTYTYQPTSIPPVVQPWSTGPGQSVTHVPPLVQSGHQQVSAPTTLPPLFRLAGAHCSRG

SEQ ID NO: 173309 - protein, 594 aa, Zea Mays
MPVAGKINVTPVEEKTSEEEPVVYATKMEAKNAFKSLLESVNVESDWTWDQTMRVIINDKRYGALKTLGERKQAFNEYLNQRKKFEAEEKRIKQRKARDDFLAMLEERKELTSSTRWSKAILMFEDDERFKAVERPREREDLFENYLVELHKKEKAKAAEEHKRYVAEYRAFLESCDFIKASTQWRKVQERLEDDERYSRLEKFDRLDIFQEYIRHLEKEEEEQKRVQKDQVRRQERKNRDGFRKMLEEHVADGTLNARTRWRDYCAQIKDSQSYLAVASNTSGSTPKELFDDVIEELDKQYQEDKTQIKEVVKSGKIPMTTSWTLEEFQTAILEDDALKGISTINIKLIYDDQLERLKEKEQKEAKKRQRLGENFSDLLYSIKEISASSTWDDSKQLFEDSQEFRALDSETYARELFEECVVHLKERLKEKERLREEEKAKREKEREEKEKKKEKEKERKEKERKEKERDHREEREKEKGKDRSRRDEMEFDGADLNTHGTKDKKRDKEKEKKHKRRHHDTDDVSSERDDKDDAKKSRRHSSSDRKKSRKHAHGSDSDSENRHKRHKKDRDSSRRNGAHELEDGELGEDGEIY

SEQ ID NO: 173310 - protein, 653 aa, Zea Mays
MQNGGSSTAVVPVAASTEVPLVATDAGSSRNNDENSSLTTGADAEDGTSAEDLEEAKKTMPVAGKINVTPVEEKTSEEEPVVYATKMEAKNAFKSLLESVNVESDWTWDQTMRVIINDKRYGALKTLGERKQAFNEYLNQRKKFEAEEKRIKQRKARDDFLAMLEERKELTSSTRWSKAILMFEDDERFKAVERPREREDLFENYLVELHKKEKAKAAEEHKRYVAEYRAFLESCDFIKASTQWRKVQERLEDDERYSRLEKFDRLDIFQEYIRHLEKEEEEQKRVQKDQVRRQERKNRDGFRKMLEEHVADGTLNARTRWRDYCAQIKDSQSYLAVASNTSGSTPKELFDDVIEELDKQYQEDKTQIKEVVKSGKIPMTTSWTLEEFQTAILEDDALKGISTINIKLIYDDQLERLKEKEQKEAKKRQRLGENFSDLLYSIKEISASSTWDDSKQLFEDSQEFRALDSETYARELFEECVVHLKERLKEKERLREEEKAKREKEREEKEKKKEKEKERKEKERKEKERDHREEREKEKGKDRSRRDEMEFDGADLNTHGTKDKKRDKEKEKKHKRRHHDTDDVSSERDDKDDAKKSRRHSSSDRKKSRKHAHGSDSDSENRHKRHKKDRDSSRRNGAHELEDGELGEDGEIY

SEQ ID NO: 173311 - protein, 679 aa, Zea Mays
MQNGGSSTAVVPVAASTEVPLVATDAGSSRNNDENSSLTTGADAEDGTSAEDLEEAKKTMPVAGKINVTPVEEKTSEEEPVVYATKMEAKNAFKSLLESVNVESDWTWDQTMRVIINDKRYGALKTLGERKQAFNEYLNQRKKFEAEEKRIKQRKARDDFLAMLEERKELTSSTRWSKAILMFEDDERFKAVERPREREDLFENYLVELHKKEKAKAAEEHKRYVAEYRAFLESCDFIKASTQWRKVQERLEDDERYSRLEKFDRLDIFQEYIRHLEKEEEEQKRVQKDQVRRQERKNRDGFRKMLEEHVADGTLNARTRWRDYCAQIKDSQSYLAVASNTSGSTPKELFDDVIEELDKQYQEDKTQIKEVVKSGKIPMTTSWTLEEFQTAILEDDALKGISTINIKLIYDDQLERLKEKEQKEAKKRQRLGENFSDLLYSIKEISASSTWDDSKQLFEDSQEFRALDSETYARELFEECVVHLKERLKEKERLREEEKAKREKEREEKEKKKEKEKERKEKERKEKERDHREEREKEKGKDRSRRDEMEFDGADLNTHGTKDKKRDKEKEKKHKRRHHDTDDVSSERDDKDDAKKSRRHSSSDRKKSRKHAHGSDSDSENRHKRHKKDRDSSRRNGAHGSDSDSENRHKRHKKDRDSSRRNGAHELEDGELGEDGEIY

SEQ ID NO: 173312 - protein, 581 aa, Zea Mays
MQNGGSSTAVVPVAASTEVPLVATDAGSSRNNDENSSLTTGADAEDGTSAEDLEEAKKTMPVAGKINVTPVEEKTSEEEPVVYATKMEAKNAFKSLLESVNVESDWTWDQTMRVIINDKRYGALKTLGERKQAFNEYLNQRKKFEAEEKRIKQRKARDDFLAMLEERKELTSSTRWSKAILMFEDDERFKAVERPREREDLFENYLVELHKKEKAKAAEEHKRYVAEYRAFLESCDFIKASTQWRKVQERLEDDERYSRLEKFDRLDIFQEYIRHLEKEEEEQKRVQKYQEDKTQIKEVVKSGKIPMTTSWTLEEFQTAILEDDALKGISTINIKLIYDDQLERLKEKEQKEAKKRQRLGENFSDLLYSIKEISASSTWDDSKQLFEDSQEFRALDSETYARELFEECVVHLKERLKEKERLREEEKAKREKEREEKEKKKEKEKERKEKERKEKERDHREEREKEKGKDRSRRDEMEFDGADLNTHGTKDKKRDKEKEKKHKRRHHDTDDVSSERDDKDDAKKSRRHSSSDRKKSRKHAHGSDSDSENRHKRHKKDRDSSRRNGAHELEDGELGEDGEIY

SEQ ID NO: 173313 - protein, 555 aa, Zea Mays
MPVAGKINVTPVEEKTSEEEPVVYATKMEAKNAFKSLLESVNVESDWTWDQTMRVIINDKRYGALKTLGERKQAFNEYLNQRKKFEAEEKRIKQRKARDDFLAMLEERKELTSSTRWSKAILMFEDDERFKAVERPREREDLFENYLVELHKKEKAKAAEEHKRYVAEYRAFLESCDFIKASTQWRKVQERLEDDERYSRLEKFDRLDIFQEYIRHLEKEEEEQKRVQKIKDSQSYLAVASNTSGSTPKELFDDVIEELDKQYQEDKTQIKEVVKSGKIPMTTSWTLEEFQTAILEDDALKGISTINIKLIYDDQLERLKEKEQKEAKKRQRLGENFSDLLYSIKEISASSTWDDSKQLFEDSQEFRALDSETYARELFEECVVHLKERLKEKERLREEEKAKREKEREEKEKKKEKEKERKEKERKEKERDHREEREKEKGKDRSRRDEMEFDGADLNTHGTKDKKRDKEKEKKHKRRHHDTDDVSSERDDKDDAKKSRRHSSSDRKKSRKHAHGSDSDSENRHKRHKKDRDSSRRNGAHELEDGELGEDGEIY

SEQ ID NO: 173314 - protein, 349 aa, Zea Mays
MLEEHVADGTLNARTRWRDYCAQIKDSQSYLAVASNTSGSTPKELFDDVIEELDKQYQEDKTQIKEVVKSGKIPMTTSWTLEEFQTAILEDDALKGISTINIKLIYDDQLERLKEKEQKEAKKRQRLGENFSDLLYSIKEISASSTWDDSKQLFEDSQEFRALDSETYARELFEECVVHLKERLKEKERLREEEKAKREKEREEKEKKKEKEKERKEKERKEKERDHREEREKEKGKDRSRRDEMEFDGADLNTHGTKDKKRDKEKEKKHKRRHHDTDDVSSERDDKDDAKKSRRHSSSDRKKSRKHAHGSDSDSENRHKRHKKDRDSSRRNGAHELEDGELGEDGEIY

SEQ ID NO: 173315 - protein, 542 aa, Zea Mays
MRVIINDKRYGALKTLGERKQAFNEYLNQRKKFEAEEKRIKQRKARDDFLAMLEERKELTSSTRWSKAILMFEDDERFKAVERPREREDLFENYLVELHKKEKAKAAEEHKRYVAEYRAFLESCDFIKASTQWRKVQERLEDDERYSRLEKFDRLDIFQEYIRHLEKEEEEQKRVQKDQVRRQERKNRDGFRKMLEEHVADGTLNARTRWRDYCAQIKDSQSYLAVASNTSGSTPKELFDDVIEELDKQYQEDKTQIKEVVKSGKIPMTTSWTLEEFQTAILEDDALKGISTINIKLIYDDQLERLKEKEQKEAKKRQRLGENFSDLLYSIKEISASSTWDDSKQLFEDSQEFRALDSETYARELFEECVVHLKERLKEKERLREEEKAKREKEREEKEKKKEKEKERKEKERKEKERDHREEREKEKGKDRSRRDEMEFDGADLNTHGTKDKKRDKEKEKKHKRRHHDTDDVSSERDDKDDAKKSRRHSSSDRKKSRKHAHGSDSDSENRHKRHKKDRDSSRRNGAHELEDGELGEDGEIY

SEQ ID NO: 173316 - protein, 961 aa, Zea Mays
MASNMQSSGLPQPPRPPMMGSSAQPQNLGPPMPMQFRPVMPSQHPPQFMPPAAQQFRPVGEPMAGANVGMPGQMPHFPQPGQHLPHSNQVPPVSQGVPMVYQPARPMSSAPMQQQQQTAYAGGHLPTMGAPMQPLTYTYQPTSIPPVAQPWSTGPGQSVHHVPPLVPSGHQPVSAPTTLPPVNLSEPSSSDWQEHTAAEGKKYYYNKKTRQSSWEKPVELMTPLERADASTEWKEFTTPEGRKYYFNKVTKQSKWTIPDELKVARELAENASNQQPDRESGIATSALVRSAAFEPSTAPANQSSSAVGIIASSAHDGSSNSVLSGPPLPHNVENTSSSIVGMQNGGSSTAVVPVAASTEVPLVATDAGSSRNNDENSSLTTGADAEDGTSAEDLVEAKKTMPVAGKINVTPVEEKTSEEEPVVYATKMEAKNAFKSLLESVNVESDWTWDQTMRVIINDKRYGALKTLGERKQAFNEYLNQRKKFEAEEKRIKQRKARDDFLAMLEESKELTSSTRWSKAILMFEDDERFKAVERPREREDLFENYLVELHKKEKAKAAEEHKRYVAEYRAFLESCDFIKASTQWRKVQERLEDDERYSRLEKFDRLDIFQEYIRHLEKEEEEQKRVQKDQVRRQERKNRDGFRKMLEEHVADGTLNARTRWRDYCAQIKDSQSYLAVASNTSGSTPKELFDDVIEELGKQYQEDKIQIKEVVKSGKIPMTTSWTLEEFQTATLEDDALKGISTINIKLVYDDQLERLKEKEQKDAKKRQRLGENFSDLLYSIKEISASSTWDDSKQLFEDSQEFRALDSETYARELFEECVVHLKERKEKERKEKERDHREEREKEKGKDRSRRDEMEFDGADLNTHGAKDKKRDKDKEKKHKRRHHDTDDVSSERDDKDDAKKSRRHSSDRKKSRKHAHGSDSDSENRHKRHKKDRDSSRRNGAHELEDGELGEDGEIY

SEQ ID NO: 173317 - protein, 990 aa, Zea Mays
MASNMQSSGLPQPPRPPMMGSSAQPQNLGPPMPMQFRPVMPSQHPPQFMPPAAQQFRPVGEPMAGANVGMPGQMPHFPQPGQHLPHSNQVPPVSQGVPMVYQPARPMSSAPMQQQQQTAYAGGHLPTMGAPMQPLTYTYQPTSIPPVAQPWSTGPGQSVHHVPPLVPSGHQPVSAPTTLPPVNLSEPSSSDWQEHTAAEGKKYYYNKKTRQSSWEKPVELMTPLERADASTEWKEFTTPEGRKYYFNKVTKQSKWTIPDELKVARELAENASNQQPDRESGIATSALVRSAAFEPSTAPANQSSSAVGIIASSAHDGSSNSVLSGPPLPHNVENTSSSIVGMQNGGSSTAVVPVAASTEVPLVATDAGSSRNNDENSSLTTGADAEDGTSAEDLVEAKKTMPVAGKINVTPVEEKTSEEEPVVYATKMEAKNAFKSLLESVNVESDWTWDQTMRVIINDKRYGALKTLGERKQAFNEYLNQRKKFEAEEKRIKQRKARDDFLAMLEESKELTSSTRWSKAILMFEDDERFKAVERPREREDLFENYLVELHKKEKAKAAEEHKRYVAEYRAFLESCDFIKASTQWRKVQERLEDDERYSRLEKFDRLDIFQYIRHLEKEEEEQKRVQKDQVRRQERKNRDGFRKMLEEHVADGTLNARTRWRDYCAQIKDSQSYLAVASNTSGSTPKELFDDVIEELGKQYQEDKIQIKEVVKSGKIPMTTSWTLEEFQTATLEDDALKGISTINIKLVYDDQLERLKEKEQKDAKKRQRLGENFSDLLYSIKEISASSTWDDSKQLFEDSQEFRALDSETYARELFEECVVHLKERLKEKERLREEEKAKREKEREEKEKKKEKERKEKERKEKERDHREEREKEKGKDRSRRDEMEFDGADLNTHGAKDKKRDKDKEKKHKRRHHDTDDVSSERDDKDDAKKSRRHSSDRKKSRKHAHGSDSDSENRHKRHKKDRDSSRRNGAHELEDGELGEDGEIY

SEQ ID NO: 173318 - protein, 104 aa, Zea Mays
MEFDGADLNTHGAKDKKRDKDKEKKHKRRHHDTDDVSSERDDKDDAKKSRRHSSDRKKSRKHAHGSDSDSENRHKRHKKDRDSSRRNGAHELEDGELGEDGEIY

SEQ ID NO: 173319 - protein, 410 aa, Zea Mays
MQTEQAETIDLSFAKEQIEEMVTQMRLCNDISPTLRDIVAQFDEENQRPSHRLSPGQMPVMEDQMDDGNEADDNDSMLPDSGTWDFGDCHDHEDTYDQNCNPMDSISTNFQEEFNEYTVEIPQGTIVNDRVDKIASLVLLGMASSKANAWAGPEHWKYRKAKDLEAAPTSSGDSEITNKIKKRTKDKPDIGFTKALDNELPNIFAAPKNPKTLLFPANRAICSNKLPEDCHYRPESLVKLFLLPDVLCLAKRRKSLDAPVDNNDDFIPSEPWEDDNFCNDHIDEGHVCSDVEEPVNLINKPRQVNKIDIQYDKVSKQVDVHALKEVLWNHIHASAETGQEREEPGPPLRLSQVLHDLPSSSPDAVATDISPHLYFICLLHLANEHNLKLCDRPMLDEIDIYMPPTSPLVK

SEQ ID NO: 173320 - protein, 79 aa, Zea Mays
MPFNRLELKMVRVVVRSKECALPDRSGSSIARRGVVLGRATEGGCTYQRGECGAPTVLARLSVGDIASGGAADGCWSND

SEQ ID NO: 173321 - protein, 116 aa, Zea Mays
MEPPITALPIFPMREHSKPHGQPIRRLSRSGEQPHPHELRRRCHRADPRSLLWQLGKSLDYDPFRASRNRRSSFGDQMIQFFEFYEIEDPEHLFGEGKCPLTHYVPFTFNALSHIT

SEQ ID NO: 173322 - protein, 215 aa, Zea Mays
MLGFSYIYLFTTIVMGLIHLTPLYNIHPTRIMISHILTSSLSPLSLSASTSPSLSLSLSLSLSLSSRPLTWPPAKHPWPLARPSTSRCPCSLAAPPSGRLLTGRTASPCSLDAPPSPWIQPRRPRRLCSSPTPPATSPTTGSASPTSLLPRARSQAASLPLLARATSSPRNTGVLSPTRLPSAPCSTRGRHPPASPLHPAPLLPRHRLEPRLLKR

SEQ ID NO: 173323 - protein, 686 aa, Zea Mays
MAAPLLFYDLGLIASSSSGDGRDGNSSSSRLQLLATTARALELGYAGVALDHHHRGLLADSHVCRTDTFAPLSSLPLPSSAALHRRRLASPASEAFRQYTRITLSLDSAAATASALAPSAARLLRTYDLVAARPLTQAAFDHLCQTPLSAQHLDLISIDFSSHGKMPFRIKPPMLKLALQKGLHFEIAYSPLLSTDVNDKRNLIAQVKLLVDWTKGKNLIISSAAHTASQIRGPYDVINLSAYLLGIPIDRAKAAMSTSCRSLVLKAMRKKHFYKETIRVDRLLPNEELSSTKFKLADWIGWNSVSSEGVANQLEPSSNFDEVPGSPVCGIMEGSHEKTHSPDLSVVSKLPEQPSHQEQFPSQTQEDTLQVDRTVVVTDSGQSSIFPASFNYQNAILEKAENNEVFVNPFVQPGAGCSADPEIIVKHVEFVQDTMEVDTIESCRTKLMGDNIASTSDTSTKLACSSLLHGRELSGTSLEDQGPGHSSESLANEKYDMKYHTDCTYGVNDKTLLVQEILSGADIWPEDKDSDGSAGMQVDNEASRGTSESLECPPCGVDDKAPSDLSFYSSHKLCTDVAILPKVVEGKVEQSRDENIVQTVENEAESVDTKTRTSISVEPMSHGQEISSTIHTRNTGASCESDELKEQNSKNTDASLDKSVAKMHELLKFPYPSGKVEMSTIRPGCT

SEQ ID NO: 173324 - protein, 784 aa, Zea Mays
MAFKGLPRDSRGSLEVFNPDAPVSDRATTSPFLLPPAAASHPSLLAAGDGGDADVGRATQRAAEWGLVLQTDEHTGRPQGVVARPSGSNRTSESGNSIDERAAAAGAGRALPRVSEELRAALSAFQQTFVVSDATRPDHPILYASAGFFNMTGYSSNEVVGRNCRFLQGSGTDPVEISKIRQALAAGSNYCGRILNYKKDGTPFWNLLTVAPIKDEDGRVLKFIGMQVEVSKYTEGNKDTALRPNGLPESLIKYDARQKDHARSSVSELLLALKDPRSLSESRNNTLKRKSQESAGSALVPGKRSSETGSRRNSHSGMRNSLQKISEVPEGGNKTRKSGLRSFMGLIGMGHGNVEKNILKPREDPLLDSDDERPDSFDDDFRKKEMRKGIDLATTLERIEKNFVITDPRLPDNPIIFASDSFLRLTEYCREEILGRNCRFLQGPETDRGTVKKIRDAIDNQTEVTVQLINYTKSGKKFWNLFHLQPMRDQKGDVQYFIGVQLDGTERVREAAAKDGAILVKKTADNIDEAAKELPDANLRPEDLWANHSKPVLPKPHMKDTASWRAIQKVLENGESIDLKHFRPVRPLGSGDTGSVHLVELLGTGEYFAMKAMDKSVMLNRNKVHRATAERQILDMLDHPFLPTLYASFQTKTHICLIVDYCAGGELFMLLDRQPMKVLKEDAVRFYAAEVVTALEYLHCQGIIYRDLKPENILLHRDGHISLTDFDLSCLTSCRPQVFLPHDIDKKKKRRKSRSNPIFFAEPMRASNSFVGTEEYIAPVFIYI

SEQ ID NO: 173325 - protein, 486 aa, Zea Mays
MAFKGLPRDSRGSLEVFNPDAPVSDRATTSPFLLPPAAASHPSLLAAGDGGDADVGRATQRAAEWGLVLQTDEHTGRPQGVVARPSGSNRTSESGNSIDERAAAAGAGRALPRVSEELRAALSAFQQTFVVSDATRPDHPILYASAGFFNMTGYSSNEVVGRNCRFLQGSGTDPVEISKIRQALAAGSNYCGRILNYKKDGTPFWNLLTVAPIKDEDGRVLKFIGMQVEVSKYTEGNKDTALRPNGLPESLIKYDARQKDHARSSVSELLLALKDPRSLSESRNNTLKRKSQESAGSALVPGKRSSETGSRRNSHSGMRNSLQKISEVPEGGNKTRKSGLRSFMGLIGMGHGNVEKNILKPREDPLLDSDDERPDSFDDDFRKKEMRKGIDLATTLERIEKNFVITDPRLPDNPIIFASDSFLRLTEYCREEILGRNCRFLQGPETDRGTVKKIRDAIDNQTEVTVQLINYTKSEILEPLSLAAYA

SEQ ID NO: 173326 - protein, 909 aa, Zea Mays
MTTMSDDGDRTCPLCAEEMDITDQQLKPCKCGYDICVWCWHHIIDMAEKEETVGRCPACRTCYDKDRIVKMAATCDRTVAEKNAEKKHRTQKVKPKAAPSAAATSTVESKKHLASVRVIQRNLVYIIGLPAHLCNESVLECREYFGQYGKILKVSVSRPTGPPSQQASANSNISVYITYAKEEEAIRCIQAVHNFVLEGKVLRACFGTTKYCHAWLRNMTCGNPDCLYLHDVGSQEDSFTKDEIISAYTRTRVPQMASGVSQRRTGTVLPPPGDDFSYSAVVSAKHTFKNGTLNTTSQPRLSPPNSSSGRSTLPSAASWGQRDLNARTTATGATSSQSHTKPKSESQSNPFSSSSVFSCTKTPSSWNDDTSTAAKISEGQQLSEKESRTLQPYKPGISKETQALSSLESSLDIDFSTIPSAWNDDDIVVPDVMPKGSDENQVANKNGELTHPASKSLVLSKKDIKMNITSKTPSDFVSSPAISKSDVSTSDGDHSLTNITPKCLASNAVECQSSHTAVEKMLEDIGSKDTDMEKLSAQISSVTLGGNDEIQSMAGNQQPDVMPCTSVDVLMDQNFGRDLAHPNPDELLLPSENKDSIVSCQYSSDKRLDWSLEMQNCSVTPLNDRMDSALLTDKIHSRQLDGSEQSSYSSFVEFPSTVDTSLWNDTENNAALTIDNITSSQMQPGFSSTDNTYALLNGGQDGLGTVYTHDNVSVYTHGNVSGHPGMGSHHHRAMGSLRNNSIGSFDKTISVNKYERRIISDTLSEFNPWDDSYSTANNFARMLRESKNNDVHCIAPSWKSGTGIKESRFSFARQDNQGNLFDSSLRNCGTGTEQNFSLLPQNSRGNIYQNGLAFQSLENEFSNNNSPGVLDMATTGECYYTFLLLCLTEQNDKYCNLNEFTLCATLIFH

SEQ ID NO: 173327 - protein, 961 aa, Zea Mays
MFWYYEVLPCMAAKHDCLYLHDVGSQEDSFTKDEIISAYTRTRVPQMASGVSQRRTGTVLPPPGDDFSYSAVVSAKHTFKNGTLNTTSQPRLSPPNSSSGRSTLPSAASWGQRDLNARTTATGATSSQSHTKPKSESQSNPFSSSSVFSCTKTPSSWNDDTSTAAKISEGQQLSEKESRTLQPYKPGISKETQALSSLESSLDIDFSTIPSAWNDDDIVVPDVMPKGSDENQVANKNGELTHPASKSLVLSKKDIKMNITSKTPSDFVSSPAISKSDVSTSDGDHSLTNITPKCLASNAVECQSSHTAVEKMLEDIGSKDTDMEKLSAQISSVTLGGNDEIQSMAGNQQPDVMPCTSVDVLMDQNFGRDLAHPNPDELLLPSENKDSIVSCQYSSDKRLDWSLEMQNCSVTPLNDRMDSALLTDKIHSRQLDGSEQSSYSSFVEFPSTVDTSLWNDTENNAALTIDNITSSQMQPGFSSTDNTYALLNGGQDGLGTVYTHDNVSVYTHGNVSGHPGMGSHHHRAMGSLRNNSIGSFDKTISVNKYERRIISDTLSEFNPWDDSYSTANNFARMLRESKNNDVHCIAPSWKSGTGIKESRFSFARQDNQGNLFDSSLRNCGTGTEQNFSLLPQNSRGNIYQNGLAFQSLENEFSNNNSPGVLDMATTGTSMSKISAPPGFSAPTRVPPPGFSTAFPSQDSLNPTPVFPSGILCHGGSIPPPRFSSFSSGISTQEVSKPPTRPPSPFSSRFSSQDGLDPSSRFPFSSGFSSHDGSNQSYGSTNPENLLRGTVQGGNSNHYQSQFGRHSSDMEFDDPAILAMGKGLMPGIGDSGLEMKNTPAFQAQLQPASSDPRFQLHVQPNVQSRQNMRFTDPMQDGLNHMNDNYLASRFLAQNQGPLSPYVQIPQQPRNSQVINGHWDGWSDLRQGNNAPMSDMSRILYPSEVNKLHMLGSNDVHNRAFGM

SEQ ID NO: 173328 - protein, 379 aa, Zea Mays
MPCCQLMLDAIMSMNHTATSTPSWLRRLHAKKGISVPSNLQIDDFINGDGSQPSLCLPVPTSSYHHHKNLLDISKNQHQKATETEQCKPPNSQTQQSPRFEKPHMPQPQPKAMISNVLGTPSIDPMDTLPLKAFRKKKKSTSSTLCNKSINKEMQTTFMMSNVLDVPSCNSIETTPYNPICKQPKPNTNVTNALAIPSSTPMNTIQPRKGMKMNTKGKNRYEGKWNGNIYYTIVDTSIDKCKGTKKSICSNDFMVSSKNPKQTFEQHDSIIKGKRRFNLLSNLQEKYEKDKEVTLQEKSTKVKNNHDTRDTTSAVIERPQSIDITTIDTSINGWKATKHLIHRGQVWEIVDRKSTIRPLHKKLSTMRKRKWLHTRNNAF

SEQ ID NO: 173329 - protein, 639 aa, Zea Mays
MAAANAPIAMREALTLTSLGIAPQFVTFTHVTMESEKYICVRETSPQNSVVIIDMAMPMQPLRRPITADSALMNPNTRILALKAQIPGTTQDHLQIFNIEAKTKVKSHQMPEQVVFWKWITPKLLGLVTQTSVYHWSIEGDSEPLKMFDRTANLANNQIINYRCDPAEKWLVLIGIAPGAPERPQLVKGNMQLFSVDQQRSQALEAHAASFATFKVVGNENPSTLICFASKTTNAGQITSKLHVIELGAQPGKPGFSKKQADLFFPPDFQDDFPVAMQVSQKYGLIYVITKLGLLFVYDLETAAAVYRNRISPDPIFLTAESSSTGGFYAINRRGQVLHATVNDATVVPFVSGQLNNLELAVNLAKRANLPGAENLVVQRFQELFAQTKYKEAAELAAESPQGLLRTPETVAKFQSVPVQAGQTPPLLQYFGTLLTRGKLNAFESLELSRLVVNQNKKNLLENWLAEDKLECSEELGDLVKTVDNDLALKIYIKARATPKVVAAFAERREFDKILIYSKQVGYTPDYLFLLQTILRTDPQGAVNFALMMSQMEGGCPVDYNTITDLFLQRNMIREATAFLLDVLKPNLPEHAFLQTKVLEINLVTYPNVADAILANGMFSHYDRPRIAQLCEKAGLYLR

SEQ ID NO: 173330 - protein, 338 aa, Zea Mays
MAAANAPIAMREALTFVTFTHVTMESEKYICVRETSPQNSVVIIDMAMPMQPLRRPITADSALMNPNTRILALKAQIPGTTQDHLQIFNIEAKTKVKSHQMPEQVVFWKWITPKLLGLVTQTSVYHWSIEGDSEPLKMFDRTANLANNQIINYRCDPAEKWLVLIGIAPGAPERPQLVKGNMQLFSVDQQRSQALEAHAASFATFKVVGNENPSTLICFASKTTNAGQITSKLHVIELGAQPGKPGFSKKQADLFFPPDFQDDFPVAMQVSQKYGLIYVITKLGLLFVYDLETAAAVYRNRISPDPIFLTAESSSTGGFYAINRRGQVLHATVNDATV

SEQ ID NO: 173331 - protein, 147 aa, Zea Mays
MLRYIEGYVQKVNPGNAPLVVGQLLDDECPEDFIKGLILSVRSLLPVEPLVDECEKRNRLRLLTQFLEHLVSEGSQDVHVHNALGKIIIDSNNNPEHFLTTNPFYDSRVVGKYCEKRDPTLAVVAYRRGQCDDELINVTNKNSLFKL

SEQ ID NO: 173332 - protein, 353 aa, Zea Mays
MESGLGLERAHMGIFTELGVLYARYRSEKLMEHIKLFSTRLNIPKLIRACDEQQHWKELTYLYIQYDEFDNAATTIMNHSPDAWDHMQFKDVCVKVANVELYYKAVHFYLQEHPDLINDMLNVLALRLDHTRVVDIMRKAGQLHLVKPYMVAVQSNNVSAVNEALNELYVEEEDYERLRESVDMHDNFDQIGLAQKLEKHELLEMRRIAAYIYKKAGRWKQSIALSKKDNMYKDCMETCSQSGDRELSEDLLVYFIEQFIREYTSKVDDLVKDKIESQNEERAKEKEEKDLVAQQNMYAQLLPLALPAPPMPGMGGPPPPMGGMGMPPMGGMGMPPMGPGPMPAFGMPPMGSY

SEQ ID NO: 173333 - protein, 681 aa, Zea Mays
MPSLPKTHISYVRNIKEGLPLFLFNYDDRRLYGIYEASGNGKFCPESNAWSQDSKGKTSYPAQVAMRVKVWCFPLAENQFRNAIIANYYQKIPGVPGQKLHFFKFELDHAQTRVLMDMFTPSPSPNSFWTPPAAAPADEHAKELVLSPGWAPECEGNNNLKSEKVVKSYADIVKKNTFVEVGTRDVDVEHAGSGDESSGGFDELDCQYTPTEREDYALSDRVVQVQQQYPDKQAEVLSFDRVLQGRITFPGQQWHSDFYANTTQTEDNDAYSCEYAQEVKYAILDGSSNLPETLDSEVDKLSLGHSDLLVQLLDSESCTEAKLIDAVKQLSGRIEVMEKKQAWSNKEVKHLQGMNERLLKRIVELKGTVMTLNSKIDPLTLDDSLNQFVEQCLGSEDVIYLVGGFDGFSSLPSLDSFSPSLDILTPLKPMAVGKSYSSTVALEGKIFVLGGGDGACWFDTVDCYDRSRDDWSTCPSLTCDKGSLAGVSVNGRIYAFGGGDGTKCFSDVEMFDPVHGKWIKNQPMLEKRFALAGVALNGAIYAVGGFNGVQYLSCAERLDPREPNWKMLPKMSAGRGCHTLTVLNEKIFSIGGYDTRAKAMVSTVEVYEPRMPSWVMVEPMNYTRGYHSSAVLGGSIFTFGGVKGEADTILDVVEHYKEGCGWMTTGLKSIGRRCYCSAIVL

SEQ ID NO: 173334 - protein, 616 aa, Zea Mays
MRVKVWCFPLAENQFRNAIIANYYQKIPGVPGQKLHFFKFELDHAQTRVLMDMFTPSPSPNSFWTPPAAAPADEHAKELVLSPGWAPECEGNNNLKSEKVVKSYADIVKKNTFVEVGTRDVDVEHAGSGDESSGGFDELDCQYTPTEREDYALSDRVVQVQQQYPDKQAEVLSFDRVLQGRITFPGQQWHSDFYANTTQTEDNDAYSCEYAQEVKYAILDGSSNLPETLDSEVDKLSLGHSDLLVQLLDSESCTEAKLIDAVKQLSGRIEVMEKKQAWSNKEVKHLQGMNERLLKRIVELKGTVMTLNSKIDPLTLDDSLNQFVEQCLGSEDVIYLVGGFDGFSSLPSLDSFSPSLDILTPLKPMAVGKSYSSTVALEGKIFVLGGGDGACWFDTVDCYDRSRDDWSTCPSLTCDKGSLAGVSVNGRIYAFGGGDGTKCFSDVEMFDPVHGKWIKNQPMLEKRFALAGVALNGAIYAVGGFNGVQYLSCAERLDPREPNWKMLPKMSAGRGCHTLTVLNEKIFSIGGYDTRAKAMVSTVEVYEPRMPSWVMVEPMNYTRGYHSSAVLGGSIFTFGGVKGEADTILDVVEHYKEGCGWMTTGLKSIGRRCYCSAIVL

SEQ ID NO: 173335 - protein, 326 aa, Zea Mays
MALGDSATTPPVAKLSISGAALAALLHRCAAAAGDCDGLLFGRASHLPAPPAALSDYDDAAAAAAPPAPALSISVSGHCSLSHPSSLSDSLGRFQPHSSPAPASAPAPIGFFSSRRRTALRPSMREAVLAHSLSATLASAHPLLLILVSPSASPNHSTHSYDYRAFLLHGGRLVPASLAIVNVGPGFRDQYHAFTAESPMPWLPSAPAPGHAHTLVEQKAVDEMVDGFGIGRLQELLGAAAGQAAEIDDMYAGMLSKLEKLAREVEKSNLRVLEQACCFSSRQANAVDSELRSKDRQNGKGLFMWFQTPYLFLYGLFVTYWQHCLQ

SEQ ID NO: 173336 - protein, 336 aa, Zea Mays
MAMAAQQHRHHKRRRIALSPSPSPSLAPIPGAPTPPLDSLADELLFLVLDRVAQADPRALKSFALASRACHAAESRHRRTLRPLRADLLPAALARYPSATRLDLTLCARVPDAALASAAVSGSSALRAVDLSRSRGFGAAGVAALAAACPDLADLDLSNGVHLGDAAAAEVARARALRRLSLVRWKPLTDMGLGCVAVGCTELKDLSLKWCLGLTDLGIQLLALKCRKLTSLDLSYTMITKDSLPSIMKLPNLQELTLVGCIGIDDGALVSLERECSKSLQVLDMSQCQNITDVGVSSILKSVPNLLELDLSYCCPVTPSMVRNFQKLPKLQALKL

SEQ ID NO: 173337 - protein, 582 aa, Zea Mays
MAMAAQQHRHHKRRRIALSPSPSPSLAPIPGAPTPPLDSLADELLFLVLDRVAQADPRALKSFALASRACHAAESRHRRTLRPLRADLLPAALARYPSATRLDLTLCARVPDAALASAAVSGSSALRAVDLSRSRGFGAAGVAALAAACPDLADLDLSNGVHLGDAAAAEVARARALRRLSLVRWKPLTDMGLGCVAVGCTELKDLSLKWCLGLTDLGIQLLALKCRKLTSLDLSYTMITKDSLPSIMKLPNLQELTLVGCIGIDDGALVSLERECSKSLQVLDMSQCQNITDVGVSSILKSVPNLLELDLSYCCPSCSHVSSGALQLIGKHCSHLEELDLTDSDLDDEGLKALARCSELSSLKIGICLKISDEGLSHIGRCGVISDDGIIQIAQGCPMLESINLSYCTEITDRSLISLSKCAKLNTLEIRGCPSVSSIGLSEIAMGCRLLSKLDIKKCFGINDVGMLYLSQFAHSLRQINLSYCSVTDVGLLSLSSISGLQNMTIVHLAGITPNGLTATLMVCGGLTKVKLHEAFRSMMPPHTIKNVEARGCVFQWIDKPFKVEVEPCDVWKQQSQDVLVR

SEQ ID NO: 173338 - protein, 142 aa, Zea Mays
METQAWVVVGTRSHTELDATARRRKRRRWSSPPYAQVVQGLAQGARGRHPTRQHPGSRFLEGLRRGLSLDVQPRRPLLPLPHVVDRLQPRWRTWAAQDPNLQGLCRWEYHRDLGANLDNDLLVLKAVNYLFLHQAVKLFPLR

SEQ ID NO: 173339 - protein, 129 aa, Zea Mays
MTQKPHICATWGDTGHVQVWDLSSFLNSLAESGASAPKEDDIIHKHLPMKVFSGHKDEGYAIDWSPLVTGRLVSGDCNKCIHLWEPTSNNWNVDANPFVGHTASVEDLQWSPTEADIFASCSVDGLLAA

SEQ ID NO: 173340 - protein, 398 aa, Zea Mays
MGRTIKKARKAKPKKSKKAEKASLNYIGVFKLSNINGKKREPIPASAVDGDTDVDSDSSSDEEDEEINEDTKPILHLKKVAHAGCVNRIRSMTQKPHICATWGDTGHVQVWDLSSFLNSLAESGASAPKEDDIIHKHLPMKVFSGHKDEGYAIDWSPLVTGRLVSGDCNKCIHLWEPTSNNWNVDANPFVGHTASVEDLQWSPTEADIFASCSVDGTISIWDVRTGKKPSISVKAHKADVNVISWNRLASCMIASGCDDGSFSVHDLRSIQDSLVAHFEYHKKAITSIEWSPHEASSLAVTSEDHQLTIWDLSLERDTEEEAEFRAKMKEQANAPDDLPPQLLFAHQGQRDLKEVHWHPQIPSMIISTAIDGFNVLMPSNIDTTIPGSTDTAMPPAEP

SEQ ID NO: 173341 - protein, 300 aa, Zea Mays
MGRTIKKARKAKPKKSKKKTEASSSSNHAVASGPAKVWQPGVDALEDGEELQFDPEAYNYLRGFGIGWSCLSFDVVRDQLRLVRSEFPHTLYGVAGTQAEKASLNYIGVFKLSNINGKKREPIPASAVDGDTDVDSDSSSDEEDEEINEDTKPILHLKKVAHAGCVNRIRSMTQKPHICATWGDTGHVQVWDLSSFLNSLAESGASAPKEDDIIHKHLPMKVFSGHKDEGYAIDWSPLVTGRLVSGDCNKCIHLWEPTSNNWNVDANPFVGHTASVEDLQWSPTEADIFASCSVDGLLAA

SEQ ID NO: 173342 - protein, 703 aa, Zea Mays
MVMVMEGGRTEGDELIADYVDCLMSLDTNTRPVHSDGLILGAPGGGGGTVDAGTEPDAMRDIPSSEDPNEPVLGMTFESDEAAKAFYNDYARRLGFPFRVGRSRRSKGTEEVVVMKRFVCSREGVYKKKQTSPDEAARKRERMSMREGCNAMMEVVREADHWVVSKLEKAHNHELGTCSAKVGYLRARSSLGGSDKATMVGPDEMAFLRQNVLGEGGDAQGLLDYLKKMQANDPAFCHAIQVDKNGCVVNVFWADARAKAAYRHFGDAITFDTTYKKNKHMMPFVTFSGVNHHLQTVIFGCALLMEETEFSFIWLFETWLAAMGGKAPCSLVTDQNRAMKAAIGKVFPNSCHRFCKWSILSRTKQKLTHTYSEHPTLRDELESCVLETETISTFETTWMSIIDRYDLRKNSWLQAIYNIRQKWVPLYLMDTFFAETFPTWKLETMNDFYKKYFNTKTTLEVFLNQFDLSLAGRYEDEAKADMDAYLNKATTKTASLIEKQAAGTYTKAVFSRFQEEFTESLGFIIQKTEDGCISKYSITKYEDPSDTFCVTYNASNKMANCSCKYFEFSGILCRHILGVYIIVDPRTLPTEYFMKRWTRKARDDDALLEDNNNNTHDEDASQSTTSRYNTLCADAIRCAEKGAGSEAVYKAAKDILQKAYEEIIAYERNTGQGSQRDVININEDVTIDDAMNDKSMPDSGRKH

SEQ ID NO: 173343 - protein, 688 aa, Zea Mays
MRCRQEGRMCGIFAYLNYNVSRERRYILEVLFNGLRRLEYRGYDSAGIALDADRQVPSPAPASSSDARPYAGAPPLVFRQEGKIENLVRSVYSEVDEKDVNLDAAFSVHAGIAHTRWATHGVPAPRNSHPQSSGAGDEFLVVHNGIITNYEVLKETLTRHGFTFESDTDTEVIPKLAKFVFDKSHDEQGDVTFSQVVMEVMRQLEGAYALIFKSPHYPNELIACKRGSQLILGVNELSGQQNGKSFHDVKTLTTNGKPKELFFSSDLCAIVEHTKNYLALEDNEIVHIKDGSVSILKFDPHKEKPASVQRALSVLEMEVEQIKKGSYDHFMQKEIHEQPHSLKTTMRGRLKDGGVVLGGLKEYLKTIRRCRRVVFIGCGTSYNAALAARPFVEELTGIPVTMEVASDLLDRQGPIYREDTAVFVSQSGETADTLLALDYALENGALCVGITNTVGSTLSRKTHCGVHINAGCEIGVASTKAYTSQIVAMAMMALAIGSDQISTQARRDSIISGLNNLSSNVSEVLKLDAGMKELASSLIDSESLLVFGRGYNYATALEGALKVKEVALMHSEGMLAGEMKHGPLALVDENLPIIVIATRDACFSKQQSVIQQLLSRRGRLIVMCSRGDAAAVCPSGGSCRVIEVPQVADCLQPVINIIPLQLLAYHLTVLRGFDVDQPRNLAKSVTTQ

SEQ ID NO: 173344 - protein, 1866 aa, Zea Mays
MASDDGDKDILLLVHQVPLDMEDVPAPRLAHLLAPLHRAPPPPPPPPFRSPPPPQAAASAEHRLSFRGWLGIPRHWDDWVAKLRPLHARLWRRLGIHDAVLASTLRFKRDASAILHLASFWSPATATFAFPWGEATVTLQDVALLAGFPALGAPATAPLPPQWRPDEAALNGVRLGFNRSACKKAHHSAWVKHFLTDDNADTVFEHAAFLALWLTRFVLPGHPESTMRQAVFPIAVRLARGDRVALAPAVLASIYRDLREIKAFLIATGAAATTGNADMISSLSVYSPLYILQLWMWERFPALRPAKVNPLVDGDPLAARWHDLSRKLNPAQIREALSTGCNFVWQPYVSSMEHTGWVHSSDLAEDDELASLAQFLHPCELVGMDCIEQYLPHRVARQFGLDQDVPADVHRANQDWAIAWQTYQLEGKNVAFFIPHSEPGITTRYAQWWRQQLLPSGIDAATASAPVEWKTSKRKVKKTPAAMEAEAEKERKMKKARVSPTYTDKKRKLEELYDAKLSDWLPTARNEISDTTSDMESEEALLPNVGTTNDDIVLLMPRKQTTTAPVRALMDNDMILALGERGNFMVDEPPDIQSEPEAVVPATLDEEIVKIPEVISLDIPDKPEEGATAVMEEQKEATSVSDRSEEASALVIGEVEEKVAIEGAICVTGMNPSGNNSATVMEADERNAVPKEFGRAAKEVIEAVPQSQHEVNAGVINNSHDVVALPEEAHPVQPTNNSGGCPVVSCIMEDSKVAGDSGKIDYEYFCDFVEEQREIPCVQEISGENSRMGEKEREETSHESPQLEIVECVQDIVLRETDYDVNQKIVYPAVEDVATSDSMSTSLLGVPEPENAELNKHPYLAIKDEEDIPMEAARGEVAEMEQISTSAKGGAEEHGDFSELDHMGRADAKLHLHLNSEVPEKIDEIECKEVAGTMRLTGRYSDQKLGDVPEVGYTEDENIRGLVVNTSDRKPSEVSQVEPAKLEHSKDLVKEETDKSENIPGLECIGLEETRGDLMEECANTKSDNVPELENTGLGGTHGPIEDTDGRLKEIHDVNAELDKHNVHESDIDRSEDIMQIDPLTQDKATWLAKEETEDKTTKVQEVKYEQLRNEPPIQEDSKEKPCADSKDLSENVVVQSKEVDKLKQAGEGCQALMEKDMENASGAFVLEQTEDGHRKSLIETSINNDSEITLVEQLDGQSESLTRTGTVEIHGETIKAQDNEFYKDVVEDSNDSTNEKDVVEDSNESINAKMPCSSATVQLKEDKMEVFHEGKMEEPCAQDAELSNQREPSSDATAMEIEAVALEQDSRIICKNMEATTVEGSHTLDSGLSSDLAKVNETHAAREIKNQEVLDVDMKVAMSVCGEYQINSIGMEDVKSTKGSQNQECLDQKEDHIMEERVECEVREGSGVSYEEACELGGGRVKASGVAVDVSGPVLNKEACNTEELQAREDKKRHGVGHVNEKRVLEETSMIDTGELKSDSTVMEISMAGLRQGTLNQCASSSEKEEAVQEKHDQGLVDENTNRGSADNDALECGGVNPDVAITMFHETILTTEAVNIAGSKISSENQQKEAPFEVHSITEVEGSESNESSRKEPEGALALPQEPGNLVKVKQESLENETEMSIFRENDKVSGKDQASAEFIIDPSNTDERRENDIGRPDESAKGCERLTSDSINTVHSKFGKSSNEEDKRTQNTRSTDPKDIKESLGRIRAEPSNRVHTTSVGYYSQHAAHDPISSCKEIKVPLRDGARDSGRDRALELVVTSPREETPRWRQEQYALQILEDVQNSRIAERSRMEMEIRVLKAQVSSMERQVMNLDHFSEVKSRSSLNQQMESVHFTGKSEKNISIPKGSRSWMVSHFYYVQMQ

SEQ ID NO: 173345 - protein, 1842 aa, Zea Mays
MASDDGDKDILLLVHQVPLDMEDVPAPRLAHLLAPLHRAPPPPPPPPFRSPPPPQAAASAEHRLSFRGWLGIPRHWDDWVAKLRPLHARLWRRLGIHDAVLASTLRFKRDASAILHLASFWSPATATFAFPWGEATVTLQDVALLAGFPALGAPATAPLPPQWRPDEAALNGVRLGFNRSACKKAHHSAWVKHFLTDDNADTVFEHAAFLALWLTRFVLPGHPESTMRQAVFPIAVRLARGDRVALAPAVLASIYRDLREIKAFLIATGAAATTGNADMISSLSVYSPLYILQLWMWERFPALRPAKVNPLVDGDPLAARWHDLSRKLNPAQIREALSTGCNFVWQPYVSSMEHTGWVHSSDLAEDDELASLAQFLHPCELVGMDCIEQYLPHRVARQFGLDQDVPADVHRANQDWAIAWQTYQLEGKNVAFFIPHSEPGITTRYAQWWRQQLLPSGIDAATASAPVEWKTSKRKVKKTPAAMEAEAEKERKMKKARVSPTYTDKKRKLEELYDAKLSDWLPTARNEISDTTSDMESEEALLPNVGTTNDDIVLLMPRKQTTTAPVRALMDNDMILALGERGNFMVDEPPDIQSEPEAVVPATLDEEIVKIPEVISLDIPDKPEEGATAVMEEQKEATSVSDRSEEASALVIGEVEEKVAIEGAICVTGMNPSGNNSATVMEADERNAVPKEFGRAAKEVIEAVPQSQHEVNAGVINNSHDVVALPEEAHPVQPTNNSGGCPVVSCIMEDSKVAGDSGKIDYEYFCDFVEEQREIPCVQEISGENSRMGEKEREETSHESPQLEIVECVQDIVLRETDYDVNQKIVYPAVEDVATSDSMSTSLLGVPEPENAELNKHPYLAIKDEEDIPMEAARGEVAEMEQISTSAKGGAEEHGDFSELDHMGRADAKLHLHLNSEVPEKIDEIECKEVAGTMRLTGRYSDQKLGDVPEVGYTEDENIRGLVVNTSDRKPSEVSQVEPAKLEHSKDLVKEETDKSENIPGLECIGLEETRGDLMEECANTKSDNVPELENTGLGGTHGPIEDTDGRLKEIHDVNAELDKHNVHESDIDRSEDIMQIDPLTQDKATWLAKEETEDKTTKVQEVKYEQLRNEPPIQEDSKEKPCADSKDLSENVVVQSKEVDKLKQAGEGCQALMEKDMENASGAFVLEQTEDGHRKSLIETSINNDSEITLVEQLDGQSESLTRTEDSNDSTNEKDVVEDSNESINAKMPCSSATVQLKEDKMEVFHEGKMEEPCAQDAELSNQREPSSDATAMEIEAVALEQDSRIICKNMEATTVEGSHTLDSGLSSDLAKVNETHAAREIKNQEVLDVDMKVAMSVCGEYQINSIGMEDVKSTKGSQNQECLDQKEDHIMEERVECEVREGSGVSYEEACELGGGRVKASGVAVDVSGPVLNKEACNTEEAREDKKRHGVGHVNEKRVLEETSMIDTGELKSDSTVMEISMAGLRQGTLNQCASSSEKEEAVQEKHDQGLVDENTNRGSADNDALECGGVNPDVAITMFHETILTTEAVNIAGSKISSENQQKEAPFEVHSITEVEGSESNESSRKEPEGALALPQEPGNLVKVKQESLENETEMSIFRENDKVSGKDQASAEFIIDPSNTDERRENDIGRPDESAKGCERLTSDSINTVHSKFGKSSNEEDKRTQNTRSTDPKDIKESLGRIRAEPSNRVHTTSVGYYSQHAAHDPISSCKEIKVPLRDGARDSGRDRALELVVTSPREETPRWRQEQYALQILEDVQNSRIAERSRMEMEIRVLKAQVSSMERQVMNLDHFSEVKSRSSLNQQMESVHFTGKSEKNISIPKGSRSWMVSHFYYVQMQ

SEQ ID NO: 173346 - protein, 1473 aa, Zea Mays
MASDDGDKDILLLVHQVPLDMEDVPAPRLAHLLAPLHRAPPPPPPPPFRSPPPPQAAASAEHRLSFRGWLGIPRHWDDWVAKLRPLHARLWRRLGIHDAVLASTLRFKRDASAILHLASFWSPATATFAFPWGEATVTLQDVALLAGFPALGAPATAPLPPQWRPDEAALNGVRLGFNRSACKKAHHSAWVKHFLTDDNADTVFEHAAFLALWLTRFVLPGHPESTMRQAVFPIAVRLARGDRVALAPAVLASIYRDLREIKAFLIATGAAATTGNADMISSLSVYSPLYILQLWMWERFPALRPAKVNPLVDGDPLAARWHDLSRKLNPAQIREALSTGCNFVWQPYVSSMEHTGWVHSSDLAEDDELASLAQFLHPCELVGMDCIEQYLPHRVARQFGLDQDVPADVHRANQDWAIAWQTYQLEGKNVAFFIPHSEPGITTRYAQWWRQQLLPSGIDAATASAPVEWKTSKRKVKKTPAAMEAEAEKERKMKKARVSPTYTDKKRKLEELYDAKLSDWLPTARNEISDTTSDMESEEALLPNVGTTNDDIVLLMPRKQTTTAPVRALMDNDMILALGERGNFMVDEPPDIQSEPEAVVPATLDEEIVKIPEVISLDIPDKPEEGATAVMEEQKEATSVSDRSEEASALVIGEVEEKVAIEGAICVTGMNPSGNNSATVMEADERNAVPKEFGRAAKEVIEAVPQSQHEVNAGVINNSHDVVALPEEAHPVQPTNNSGGCPVVSCIMEDSKVAGDSGKIDYEYFCDFVEEQREIPCVQEISGENSRMGEKEREETSHESPQLEIVECVQDIVLRETDYDVNQKIVYPAVEDVATSDSMSTSLLGVPEPENAELNKHPYLAIKDEEDIPMEAARGEVAEMEQISTSAKGGAEEHGDFSELDHMGRADAKLHLHLNSEVPEKIDEIECKEVAGTMRLTGRYSDQKLGDVPEVGYTEDENIRGLVVNTSDRKPSEVSQVEPAKLEHSKDLVKEETDKSENIPGLECIGLEETRGDLMEECANTKSDNVPELENTGLGGTHGPIEDTDGRLKEIHDVNAELDKHNVHESDIDRSEDIMQIDPLTQDKATWLAKEETEDKTTKVQEVKYEQLRNEPPIQEDSKEKPCADSKDLSENVVVQSKEVDKLKQAGEGCQALMEKDMENASGAFVLEQTEDGHRKSLIETSINNDSEITLVEQLDGQSESLTRTGTVEIHGETIKAQDNEFYKDVVEDSNDSTNEKDVVEDSNESINAKMPCSSATVQLKEDKMEVFHEGKMEEPCAQDAELSNQREPSSDATAMEIEAVALEQDSRIICKNMEATTVEGSHTLDSGLSSDLAKVNETHAAREIKNQEVLDVDMKVAMSVCGEYQINSIGMEDVKSTKGSQNQECLDQKEDHIMEERVECEVREGSGVSYEEACELGGGRVKASGVAVDVSGPVLNKEACNTEEASTFSGSRSLQHCLAQLLLVLTPATVGP

SEQ ID NO: 173347 - protein, 1839 aa, Zea Mays
MASDDGDKDILLLVHQVPLDMEDVPAPRLAHLLAPLHRAPPPPPPPPFRSPPPPQAAASAEHRLSFRGWLGIPRHWDDWVAKLRPLHARLWRRLGIHDAVLASTLRFKRDASAILHLASFWSPATATFAFPWGEATVTLQDVALLAGFPALGAPATAPLPPQWRPDEAALNGVRLGFNRSACKKAHHSAWVKHFLTDDNADTVFEHAAFLALWLTRFVLPGHPESTMRQAVFPIAVRLARGDRVALAPAVLASIYRDLREIKAFLIATGAAATTGNADMISSLSVYSPLYILQLWMWERFPALRPAKVNPLVDGDPLAARWHDLSRKLNPAQIREALSTGCNFVWQPYVSSMEHTGWVHSSDLAEDDELASLAQFLHPCELVGMDCIEQYLPHRVARQFGLDQDVPADVHRANQDWAIAWQTYQLEGKNVAFFIPHSEPGITTRYAQWWRQQLLPSGIDAATASAPVEWKTSKRKVKKTPAAMEAEAEKERKMKKARVSPTYTDKKRKLEELYDAKLSDWLPTARNEISDTTSDMESEEALLPNVGTTNDDIVLLMPRKQTTTAPVRALMDNDMILALGERGNFMVDEPPDIQSEPEAVVPATLDEEIVKIPEVISLDIPDKPEEGATAVMEEQKEATSVSDRSEEASALVIGEVEEKVAIEGAICVTGMNPSGNNSATVMEADERNAVPKEFGRAAKEVIEAVPQSQHEVNAGVINNSHDVVALPEEAHPVQPTNNSGGCPVVSCIMEDSKVAGDSGKIDYEYFCDFVEEQREIPCVQEISGENSRMGEKEREETSHESPQLEIVECVQDIVLRETDYDVNQKIVYPAVEDVATSDSMSTSLLGVPEPENAELNKHPYLAIKDEEDIPMEAARGEVAEMEQISTSAKGGAEEHGDFSELDHMGRADAKLHLHLNSEVPEKIDEIECKEVAGTMRLTGRYSDQKLGDVPEVGYTEDENIRGLVVNTSDRKPSEVSQVEPAKLEHSKDLVKEETDKSENIPGLECIGLEETRGDLMEECANTKSDNVPELENTGLGGTHGPIEDTDGRLKEIHDVNAELDKHNVHESDIDRSEDIMQIDPLTQDKATWLAKEETEDKTTKVQEVKYEQLRNEPPIQEDSKEKPCADSKDLSENVVVQSKEVDKLKQAGEGCQALMEKDMENASGAFVLEQTEDGHRKSLIETSINNDSEITLVEQLDGQSESLTRTGTVEIHGETIKAQDNEFYKDVVEDSNDSTNEKDVVEDSNESINAKMPCSSATVQLKEDKMEVFHEGKMEEPCAQDAELSNQREPSSDATAMEIEAVALEQDSRIICKNMEATTVEGSHTLDSGLSSDLAKVNETHAAREIKNQEVLDVDMKVAMSVCGEYQINSIGMEDVKSTKGSQNQECLDQKEDHIMEERVECEVREGSGVSYEEACELGGGRVKASGVAVDVSGPVLNKEACNTEEAREDKKRHGVGHVNEKRVLEETSMIDTGELKSDSTVMEISMAGLRQGTLNQCASSSEKEEAVQEKHDQGLVDENTNRGSADNDALECGGVNPDVAITMFHETILTTEAVNIAGSKISSENQQKEAPFEVHSITEVEGSESNESSRKEPEGALALPQEPGNLVKVKQESLENETEMSIFRENDKVSGKDQASAEFIIDPSNTDERRENDIGRPDESAKGCERLTSDSINTVHSKFGKSSNEEDKRTQNTRSTDPKDIKESLGRIRAEPSNRVHTTSVGYYSQHAAHDPISSCKEIKVPLRDGARDSGRDRALELVVTSPREETPRWRQEQYALQILEDVQNSRIAERSRMEMEIRVLKAQVSSMERQVMNLDHFSEVKSRSSLNQQMVHLHKPYF

SEQ ID NO: 173348 - protein, 97 aa, Zea Mays
MRPDTAASASPTPKKKPDSKAALDLASWSFNVTTSVGLIMVNKALMATYGFTFATTLTGLHFATTTVMTLVFRWVGLSQPSQLPLPDLAKSGGVHRH

SEQ ID NO: 173349 - protein, 483 aa, Zea Mays
MNLKEIDLSFNNLSVVVDADWIQPFRLESAGFASCHLGPLFPVWLRQQLLHITKLDISSTGLVGNIPDWFWSFSKAASLDMSYNQLNGIMPHKIEAPLLQTLVVSSNQIGGTIPESICELKNLLFLDLSNNLLEGEIPQCSDIERLEFCLLGNNNLSGTFPAFLRNCTSMVVLDLAWNNLSGRLPSWIRELYSLQFLRLSHNSFSGNIPSGITSLSCLQYLDLSGNYFSGVIPPHLSNLTGMTMKGYCPFEIFGEMGFKFDDIWLVMTKGQQLKYSLGLVYFVSIDLSGNGLTGEIPLGITSFDALMNLNLSSNQLGGKIPNKIGAMMSLESLDLSINKLSGEIPWSLSNLTSLSYMNLSYNNLSGRIPSGRQLDTLNADNPSLMYIGNSGLCGPPLQNNCSGNGSFTPGYYHRSNRQKIEFASFYFSLVLGFVVGLWMVFCALLFMNTWRVAYFGLLDELYNKIYVFVAVKWASMTMSAAAE

SEQ ID NO: 173350 - protein, 96 aa, Zea Mays
MPYQFGHCSPIAATYEGGTDTWATTGKRGSPWLATVAIRHGRPYRVQFLSLRTINDTLKPRRPAELEQGAWSPQTEDGNILPVAVTGRSCCKCNQA

SEQ ID NO: 173351 - protein, 353 aa, Zea Mays
MLVPKPASTMISDLPEQETILKQCIAQLESVYVVRILLINQLKEALVEQESKSEVLRSQLQVARSEAEHAIQLRQRFDGAVVSNGTGSNSSLLMITPTEQTAAMIQGSGVRLTSPQLQSLNPATSLAPTVSAVGDEPKRTAAAMADKLTSLSAPVQVLSSIFSSFVAEHGASLSSKNSGPASGELSGEPPGFQIEKRPRLEKTVQASDMGAPPFPVQVPQLQQQTGAAPTQLPTQINQAPGPFAPPLPSLLPPFLQQFGQSTGGMMGVGPFGMMSGSMPPPPPLPNIMPAGFPGPSGPPPPPLPPAQNQPQQQQQSPQAPQQSPTSAGFFQSSAGMGFFPPVQVQQSPSAQRQ

SEQ ID NO: 173352 - protein, 576 aa, Zea Mays
MSGAKAGVDVETRDGGAGGSFSEERLVDKLNKLNNTAASIQTLSQWCIFHRKRARRVVDTWEKQFSSATKDKKISFLFLSNDILQNSKRKGGDYVHEFWRVLPRSLKHVYENGGEDGKKLVARLIGIWDERKVFGTRIESLKYSIFGDNPPIFDNNGNKNNSNPGSNPLNSKVARKDSSTVLKIVTAYQSVLDQHFDEDTVLNKCKSTVSVLEKIKKDIEDASTKGDQPASTMISDLPEQETILKQCIAQLESVYVVRILLINQLKEALVEQESKSEVLRSQLQVARSEAEHAIQLRQRFDGAVVSNGTGSNSSLLMITPTEQTAAMIQGSGVRLTSPQLQSLNPATSLAPTVSAVGDEPKRTAAAMADKLTSLSAPVQVLSSIFSSFVAEHGASLSSKNSGPASGELSGEPPGFQIEKRPRLEKTVQASDMGAPPFPVQVPQLQQQTGAAPTQLPTQINQAPGPFAPPLPSLLPPFLQQFGQSTGGMMGVGPFGMMSGSMPPPPPLPNIMPAGFPGPSGPPPPPLPPAQNQPQQQQQSPQAPQQSPTSAGFFQSSAGMGFFPPVQVQQSPSAQRQ

SEQ ID NO: 173353 - protein, 570 aa, Zea Mays
MSGAKAGVDVETRDGGAGGSFSEERLVDKLNKLNNTAASIQTLSQWCIFHRKRARRVVDTWEKQFSSATKDKKISFLFLSNDILQNSKRKGGDYVHEFWRVLPRSLKHVYENGGEDGKKLVARLIGIWDERKVFGTRIESLKYSIFGDNPPIFDNNGNKNNSNPGSNPLNSKVARKDSSTVLKKLTVGGMPEKIVTAYQSVLDQHFDEDTVLNKCKSTVSVLEKIKKDIEDASTKGDQPASTMISDLPEQETILKQCIAQLESVYVESKSEVLRSQLQVARSEAEHAIQLRQRFDGAVVSNGTGSNSSLLMITPTEQTAAMIQGSGVRLTSPQLQSLNPATSLAPTVSAVGDEPKRTAAAMADKLTSLSAPVQVLSSIFSSFVAEHGASLSSKNSGPASGELSGEPPGFQIEKRPRLEKTVQASDMGAPPFPVQVPQLQQQTGAAPTQLPTQINQAPGPFAPPLPSLLPPFLQQFGQSTGGMMGVGPFGMMSGSMPPPPPLPNIMPAGFPGPSGPPPPPLPPAQNQPQQQQQSPQAPQQSPTSAGFFQSSAGMGFFPPVQVQQSPSAQRQ

SEQ ID NO: 173354 - protein, 573 aa, Zea Mays
MSGAKAGVDVETRDGGAGGSFSEERLVDKLNKLNNTAASIQTLSQWCIFHRKRARRVVDTWEKQFSSATKDKKISFLFLSNDILQNSKRKGGDYVHEFWRVLPRSLKHVYENGGEDGKKLVARLIGIWDERKVFGTRIESLKYSIFGDNPPIFDNNGNKNNSNPGSNPLNSKVARKDSSTVLKKLTVGGMPEKIVTAYQSVLDQHFDEDTVLNKCKSTVSVLEKIKKDIEDASTKEQETILKQCIAQLESVYVVRILLINQLKEALVEQESKSEVLRSQLQVARSEAEHAIQLRQRFDGAVVSNGTGSNSSLLMITPTEQTAAMIQGSGVRLTSPQLQSLNPATSLAPTVSAVGDEPKRTAAAMADKLTSLSAPVQVLSSIFSSFVAEHGASLSSKNSGPASGELSGEPPGFQIEKRPRLEKTVQASDMGAPPFPVQVPQLQQQTGAAPTQLPTQINQAPGPFAPPLPSLLPPFLQQFGQSTGGMMGVGPFGMMSGSMPPPPPLPNIMPAGFPGPSGPPPPPLPPAQNQPQQQQQSPQAPQQSPTSAGFFQSSAGMGFFPPVQVQQSPSAQRQ

SEQ ID NO: 173355 - protein, 757 aa, Zea Mays
MCKGLSSLMILVAWEVWKHRNDSVFENLSPSTQAVLRSVSMEQHMGGEVAGLRRGSMARPVSVQAPTPLPARSRDVRVLHEVLPSLRSARPVPSSVADGVPDARKEELAAPDCTEEGSPEAKHCTSVEVKKGDSVHPDGDWGTVEFNVVEHGVEVASDDPQRLKHVETSNAAGQEEDSGFKIDEEGSFRPLQVSGDVAEDQTVGVKTEVAVSDVAVQRENMEDKQDGIVKAASLPTAALEAEGQFGADAELEDLESILNELSVAEPEEFESPVVEDKHSRRLSCTGVTDSYKSASRKGRSRSMDASTDSVANEFLDMLGIEHSPVGQPSDSDSESPRERLWKQFEKEALASGNAILGLDFDDGIEGPICDNVVEDFDLSAMIHEAELELQNGSQPIDTKFRAKSLEDEETEALMRQFGLNEKSFQSSPPESRSGFGSPISLPPEQSLELPPLAEGLGPFIQTKDGGFLRSMNPALFKNAKNKCSLVMQASSPIVLPAEMGSGIMDILHGLASIGIEKLSMQANKLMPLEDVNGKMMQQIAREAAPALESAERYDALDYHSIGALVEGCGNAPSGKKTGRCADLSSLGGENASEYVSLEDLAPLAMEKIEALSIEGLRIQSGMSEEDAPSNISAKPIGEFSSLQGKCAENTWSLGLEGTAGLQLLDVKQSGEVDGLMGLSITLDEWMRLDSGVVDEEEQYSDRTSKYKIRSDMCRCSSERTPVATHGHTPSKRIKGGHTNKPTLSLTQTLIDSEALIA

SEQ ID NO: 173356 - protein, 257 aa, Zea Mays
MGVSTLDYNCTVEYYRSPFIVLQGRAPAGAPEIVRYSIRVDAMDWMSDRGKWKDADVLIFNTGHWWNNEKTIRGGAYFQVGDEVKMGMSVAEAYRRSIETLSDWLRKEVNTSKTHVIYRTYAPVHFRDGDWKTGGSCHLETLPDAMPVKSLDEWADLLQPVDEFLGSDLGSELAGVDLLRVTGMTAQRKDGHLSVYLSPSGPVPRYRQDCSHWCLPGVPDAWNELLYALVMRRHKKMAGTRTPDAEEGDVFSSGSSS

SEQ ID NO: 173357 - protein, 630 aa, Zea Mays
MDAVAFPPPPAPFLDDDLDFGDFTFASAPQPQPQPPTAAFDDDWGDFVASGLGSDAGASAPTDAPAAAPSSSPWEKPRGPLPLSLFGADADDDGQEEEEGPAGPPPMDTAPQCAPSVPSNGSRPADLKDLIAGLYGYQPPHTADAVPQVKAEEDDQGFGDDDWEFTAATGQPAADQDGGGPGHADGFGKIEDISKSLSTDQEDWSSFTSADGKLNHVRLTTDGLGNHESTGEFVRASTYSPANSSAILNLYKGSKRVDDVVIAQGSAESVQSSSDLFSNNEMNSSLETDDNHSSRSTSDCILIEFYQRLREESLTAISRHVKDLRKGSTISDENNKATAMGGDIQEIYDKLKDSSLPEGFFTEEQPWKDIYITELLNCIKEEHLKDFEQEYCLAEKIEGATEDTDIAVELYKLSISTLDLLKLASKEEQGDYVGAWYSMLLSCAQELKHGVALWQEFYHANVCDRVVSEGGHYFIALGEIYRVAQILYLSLQRFKPWVLADPGMLSKMLSCLDSCTYAWTSGLETALKMVIDSSHIDSSLAKALMESIKNITKLEVPNLQKNIPNNEMQCRLTLLPSSLLPGLNLVIWNGGHYFVKVANLWANRISPDPPLLPSNPTSSMNNAATHSQSC

SEQ ID NO: 173358 - protein, 291 aa, Zea Mays
MGGDIQEIYDKLKDSSLPEGFFTEEQPWKDIYITELLNCIKEEHLKDFEQEYCLAEKIEGATEDTDIAVELYKLSISTLDLLKLASKEEQGDYVGAWYSMLLSCAQELKHGVALWQEFYHANVCDRVVSEGGHYFIALGEIYRVAQILYLSLQRFKPWVLADPGMLSKMLSCLDSCTYAWTSGLETALKMVIDSSHIDSSLAKALMESIKNITKLEVPNLQKNIPNNEMQCRLTLLPSSLLPGLNLVIWNGGHYFVKVANLWANRISPDPPLLPSNPTSSMNNAATHSQSC

SEQ ID NO: 173359 - protein, 476 aa, Zea Mays
MTKGLETMIGNSRRRRGNLLLIRMEADQGMRMDLDISKSLSTDQEDWSSFTSADGKLNHVRLTTDGLGNHESTGEFVRASTYSPANSSAILNLYKGSKRVDDVVIAQGSAESVQSSSDLFSNNEMNSSLETDDNHSSRSTSDCILIEFYQRLREESLTAISRHVKDLRGAQKGSTISDENNKATAMGGDIQEIYDKLKDSSLPEGFFTEEQPWKDIYITELLNCIKEEHLKDFEQEYCLAEKIEGATEDTDIAVELYKLSISTLDLLKLASKEEQGDYVGAWYSMLLSCAQELKHGVALWQEFYHANVCDRVVSEGGHYFIALGEIYRVAQILYLSLQRFKPWVLADPGMLSKMLSCLDSCTYAWTSGLETALKMVIDSSHIDSSLAKALMESIKNITKLEVPNLQKNIPNNEMQCRLTLLPSSLLPGLNLVIWNGGHYFVKVANLWANRISPDPPLLPSNPTSSMNNAATHSQSC

SEQ ID NO: 173360 - protein, 633 aa, Zea Mays
MDAVAFPPPPAPFLDDDLDFGDFTFASAPQPQPQPPTAAFDDDWGDFVASGLGSDAGASAPTDAPAAAPSSSPWEKPRGPLPLSLFGADADDDGQEEEEGPAGPPPMDTAPQCAPSVPSNGSRPADLKDLIAGLYGYQPPHTADAVPQVKAEEDDQGFGDDDWEFTAATGQPAADQDGGGPGHADGFGKIEDISKSLSTDQEDWSSFTSADGKLNHVRLTTDGLGNHESTGEFVRASTYSPANSSAILNLYKGSKRVDDVVIAQGSAESVQSSSDLFSNNEMNSSLETDDNHSSRSTSDCILIEFYQRLREESLTAISRHVKDLRGAQKGSTISDENNKATAMGGDIQEIYDKLKDSSLPEGFFTEEQPWKDIYITELLNCIKEEHLKDFEQEYCLAEKIEGATEDTDIAVELYKLSISTLDLLKLASKEEQGDYVGAWYSMLLSCAQELKHGVALWQEFYHANVCDRVVSEGGHYFIALGEIYRVAQILYLSLQRFKPWVLADPGMLSKMLSCLDSCTYAWTSGLETALKMVIDSSHIDSSLAKALMESIKNITKLEVPNLQKNIPNNEMQCRLTLLPSSLLPGLNLVIWNGGHYFVKVANLWANRISPDPPLLPSNPTSSMNNAATHSQSC

SEQ ID NO: 173361 - protein, 277 aa, Zea Mays
MEYRETRPGTRSSQCTHLIAPRTSPRLFLRAGYGESDPNPNRHVKSEALDIEELADQLGLGHKFYVLGASMGGYSVWGCLQYIPHRLAGAALVVPIINYWWPSFPAELSKQAFNRLIVPEQRTLWIAHNIPSLLYLWMTQRWFPSSAAAMHHPEIFSKHDMEVLQKMMAMPRTIENKSRQQGIYESIHRDLLVAFGTWEFDPMNVTNPFPQNEGSVHIWQGREDRLVLVELQRYIAKKLPWIKYHEVPEGGHMFVMVDGWTDRILKALLLGEEPLDV

SEQ ID NO: 173362 - protein, 434 aa, Zea Mays
MHDLSAASLLHRHQQQQLVTSHMTRHMYCNSLVQFTAVRCTDPPSQLKSCTQQGHHQWNKGQPTLQAFPATQRLNSRLHQISEETKKMAPKLVFVLPVVLLALALQAILRPPPPKLCGSPGGPPLTSPRIKLRDGRYLAYKEDGVQRDKARYKIITVHAFDSTKDFPSPVSKELVEGLGIYLLAYDRAGYGESDPNPNRHVKSEALDIEELADQLGLGHKFYVLGASMGGYSVWGCLQYIPHRLAGAALVVPIINYWWPSFPAELSKQAFNRLIVPEQRTLWIAHNIPSLLYLWMTQRWFPSSAAAMHHPEIFSKHDMEVLQKMMAMPRTIENKSRQQGIYESIHRDLLVAFGTWEFDPMNVTNPFPQNEGSVHIWQGREDRLVLVELQRYIAKKLPWIKYHEVPEGGHMFVMVDGWTDRILKALLLGEEPLDV

SEQ ID NO: 173363 - protein, 171 aa, Zea Mays
MRKVNLDDVNAAFDDPEDDNEDAFEDETGPLTLNAFDLIILSQGLNLAALFDRRQDCDKLQNRFLSRNPAKVILSSMEVVAQSMGFKTHIRNYKMRVEGLNADKTSHLSVMVEVFEVAPSIFMVELQRAAGDTSEYNTFVNNYCGKLDDIIWKFPTEKGKSRIPRLSKSHS

SEQ ID NO: 173364 - protein, 359 aa, Zea Mays
MAPRQKRSGPYQGCKAPTHLLHERNTPLLLLSCGPLLQLVIPGSQLPVENFTCWLAACLPTEIAPGRPPFTFKKGARLPINEGVGHLSSSPAPRSGYSTGLATLSPSIEGGGAAEMVGGGGGGPLRRVGKYEVGRTIGEGTFAKVKFAQNTETGESVAMKVLDRSSILKNKMAEQIKREISIMKLVRHPNVVRLHEVLASRKKIFIILEFITGGELFDKIIRHGRLSEADARRYFQQLIDGVDFCHKKGVYHRDLKVLSHKGYNGALADTWSCGVILYVLLAGYLPFDEVDLTTLYGKIESAEYSFPAWFSGGAKSLIRRILDPNPETRIRIEEIRSDEWFQKNYEPIKEIENEESQSR

SEQ ID NO: 173365 - protein, 373 aa, Zea Mays
MAPRQKRSGPYQGCKAPTHLLHERNTPLLLLSCGPLLQLVIPGSQLPVENFTCWLAACLPTEIAPGRPPFTFKKGARLPINEGVGHLSSSPAPRSGYSTGLATLSPSIEGGGAAEMVGGGGGGPLRRVGKYEVGRTIGEGTFAKVKFAQNTETGESVAMKVLDRSSILKNKMAEQIKREISIMKLVRHPNVVRLHEVLASRKKIFIILEFITGGELFDKIIRHGRLSEADARRYFQQLIDGVDFCHKKGVYHRDLKPENLLLDSQGNLKISDFGLSAWPAQGSFLLRTTCGTPNYVAPEVLSHKGYNGALADTWSCGVILYVLLAGYLPFDEVDLTTLYGKIESAEYSFPAWFSGGAKSLIRRILDPNPETVS

SEQ ID NO: 173366 - protein, 225 aa, Zea Mays
MAPRQKRSGPYQGCKAPTHLLHERNTPLLLLSCGPLLQLVIPGSQLPVENFTCWLAACLPTEIAPGRPPFTFKKGARLPINEGVGHLSSSPAPRSGYSTGLATLSPSIEGGGAAEMVGGGGGGPLRRVGKYEVGRTIGEGTFAKVKFAQNTETGESVAMKVLDRSSILKNKMAEQIKREISIMKLVRHPNVVRLHEVLASRKKIFIILEFITGGELFDKIVDCFG

SEQ ID NO: 173367 - protein, 53 aa, Zea Mays
MNRGYALLEFSTRPEAMDGFRILQKRDVVFGVDRSAKVSFADSYPQVDDEIMA

SEQ ID NO: 173368 - protein, 435 aa, Zea Mays
MMEKNGLTPDEQAYNVLTDALCKSGRAEEAYSFLVRKGVVLTKVTYTSLVDGFSKAGNTDFAAVLIEKMVNEGCKADLYTYSVLLQALCKQKKLNEALSILDQMTVSGVKCNIVAYTIIISEMIKEGKHDHAKSLFNEMISSGHKPSATTYTVFISSYCKIGQIEEAEHLIGEMERDGVTPDVVTYHIFINGCGHMGYMDRAFSTLKRMVDASCEPNCWTYWLLLKHFLKMSLINAHYIDTSGMWNWIELNTVWQLLERMMKHGLNPTVVTYSSIIAGFCKATRLEEACVLLDHMLGKAISPNEEIYTMLIKCCCDIKLFGKDVSFVTDMIEFGFQPQLESYHYLIVGLCDEGDYDRAKSLFCDLLGMDYNHNEVAWKILNDGLLKAGHVDFCSQLLAAMDNRHCRIDSESYSMLTDSIREASGSVVSELRGEAA

SEQ ID NO: 173369 - protein, 359 aa, Zea Mays
MLFNIPHCKSQAPVAAVVAAISSIRFSSSLPALVPPPPPLHDENPFAALRGLPGLARQLFRWAETTPCGFPRSASAFAAVLIPLARANHIRAAYPVSLRALHLDLLLPLVSLLSAPLSTAPRSLLSLLLRLSTKYSKECKARDATLDTCSTLCLSAFREMASHGVAPDVKDCNHVLRALRDAARWDDICAVHEEMLQLGIEPSIVTYNTLLDSFLKEGRKDKVAMLLKEMETRGSGCLPNDVTYNVVITGLTRKGDLEEAAELVEGMRLSKKASSFTYNPLITGLLARGCVKKVYDLQLEMENEGIMPTVVTYNAMIHGLLQSGLVEAAQVKFAEMRAMGLLPDVITYNSLLNGYCKVI

SEQ ID NO: 173370 - protein, 437 aa, Zea Mays
MDKAHLGGGLLALDASPRPLGFLNLLSPPTSSPPFHRTRTMEADDVPAVPGNKGRRSIEVDFFSDDKDKKSAAAAANDKKEDLTTINLLPGSNANDDDDDEAATRLRLPNDQDRQNRNTNELSAMQSELARMNDENQRLRGMLTQVTTSYQALQMHLVALMQARADGQPMMPPAVAQTLPVTDAAAVMPSPRQFLGLGPAAAAEETSNSSTEVGSPRPSSSAGRRQDQQQQAAERGDSPDPADPSTTARQLAQQQEASMRKARVSVRARSEAPIIADGCQWRKYGQKMAKGNPCPRAYYRCTMANGCPVRKQVQRCADDRSILITTYEGTHNHPLPPAAVAMASTTSAAASMLLSGSMPSGDNFLARAVLPCSSGMATISASAPFPTVTLDLTNGPARCSSSRATAAAPAGGRALQRHPPGFVQVLRPAHVIVIDIG

SEQ ID NO: 173371 - protein, 292 aa, Zea Mays
MARNEPLDFENEDDPLLPAPRPAKRSKVIGMDDLLLDYFQSGKKDKLKVKAAKSKHGPKGGYDSGEEDDRATQQEITVCKIFEEVQQKGKVMDARDDVPPWGQQFFRCQNPPSNLSNGGVENCHLLQSFSAIEDIGFDLEMHQGEGFLEGMLLDGWLLNLVRICGFVEDSVASWTLTNLLHSPNEKLQVSAADFWDGILSLDEAGEPLVNLGYFPSYSVLKRAMLSYGYLFDTSGTKASISGSTAAGGPDDSLPHNIIAWLRVVSACCKISSQEEQKDILKQTRNKSLQHTT

SEQ ID NO: 173372 - protein, 150 aa, Zea Mays
MVAESIAQRVTLDLNCLRVVDCITGTNKRSKILRSQVALQLLKISFGLKVANVEKILKLVTSINVKEKECDFFRLYVYLVLMDNLLFSSDAFRDKTGMVDAWRNYLRNCSTQIGCTDWRFYAPKARNKASYLLQGSILKKSSGDGKSCVR

SEQ ID NO: 173373 - protein, 152 aa, Zea Mays
MARNEPLDFENEDDPLLPAPRPAKRSKVIGMDDLLLDYFQSGKKDKLKVKAAKSKHGPKGGYDSGEEDDRATQQEITVCKIFEEVQQKGKVMDARDDVPPWGQQFFRCQNPPSNLSNGGVENCHLLQSFSAIEDIGFDLEMHQGSLCSHFPL

SEQ ID NO: 173374 - protein, 207 aa, Zea Mays
MLKVHSIFSPSEAEELLAIAISLFLDRRLEGLLLVLGDCLNSLILYFNTSEWETSCVMVAESIAQRVTLDLNCLRVVDCITGTNKRSKILRSQVALQLLKISFGLKVANVEKILKLVTSINVKEKECDFFRLYVYLVLMDNLLFSSDAFRDKTGMVDAWRNYLRNCSTQIGCTDWRFYAPKARNKASYLLQGSILKKSSGDGKSCVR

SEQ ID NO: 173375 - protein, 326 aa, Zea Mays
MLLDGWLLNLVRICGFVEDSVASWTLTNLLHSPNEKLQVSAADFWDGILSLDEAGEPLVNLGYFPSYSVLKRAMLSYGYLFDTSGTKASISGSTAAGGPDDSLPHNIIAWLRVVSACCKIRKVHSIFSPSEAEELLAIAISLFLDRRLEGLLLVLGDCLNSLILYFNTSEWETSCVMVAESIAQRVTLDLNCLRVVDCITGTNKRSKILRSQVALQLLKISFGLKVANVEKILKLVTSINVKEKECDFFRLYVYLVLMDNLLFSSDAFRDKTGMVDAWRNYLRNCSTQIGCTDWRFYAPKARNKASYLLQGSILKKSSGDGKSCVR

SEQ ID NO: 173376 - protein, 453 aa, Zea Mays
MARNEPLDFENEDDPLLPAPRPAKRSKVIGMDDLLLDYFQSGKKDKLKVKAAKSKHGPKGGYDSGEEDDRATQQEITVCKIFEEVQQKGKVMDARDDVPPWGQQFFRCQLILASSSCFCVGEGFLEGMLLDGWLLNLVRICGFVEDSVASWTLTNLLHSPNEKLQVSAADFWDGILSLDEAGEPLVNLGYFPSYSVLKRAMLSYGYLFDTSGTKASISGSTAAGGPDDSLPHNIIAWLRVVSACCKIRKVHSIFSPSEAEELLAIAISLFLDRRLEGLLLVLGDCLNSLILYFNTSEWETSCVMVAESIAQRVTLDLNCLRVVDCITGTNKRSKILRSQVALQLLKISFGLKVANVEKILKLVTSINVKEKECDFFRLYVYLVLMDNLLFSSDAFRDKTGMVDAWRNYLRNCSTQIGCTDWRFYAPKARNKASYLLQGSILKKSSGDGKSCVR

SEQ ID NO: 173377 - protein, 269 aa, Zea Mays
MARNEPLDFENEDDPLLPAPRPAKRSKVIGMDDLLLDYFQSGKKDKLKVKAAKSKHGPKGGYDSGEEDDRATQQEITVCKIFEEVQQKGKVMDARDDVPPWGQQFFRCQLILASSSCFCVGEGFLEGMLLDGWLLNLVRICGFVEDSVASWTLTNLLHSPNEKLQVSAADFWDGILSLDEAGEPLVNLGYFPSYSVLKRAMLSYGYLFDTSGTKASISGSTAAGGPDDSLPHNIIAWLRVVSACCKISSQEEQKDILKQTRNKSLQHTT

SEQ ID NO: 173378 - protein, 143 aa, Zea Mays
MPAEDILTIQVKAGWKKGTRITFPDKGNEAPNMKPADIVFIIDEKPHDVFTREGNDLVVTEKISLVEALTGYTARVTTLDGRSLSLHINSIIHPKYEEVMPGEGMPVPKDPTKKGNLRIKFNIMFPSRLTSDQKAGIKRLLGS

SEQ ID NO: 173379 - protein, 240 aa, Zea Mays
MHTYLEVAGNVVPCEAVRAHDLQDPGRHGLVDAQLLHRLHEPPVQLRRPVHLYLHLALAAVGVLARRLLLAAVALCRRRRLVGPGPGRRRILLLRRRRRRRRLQLSSGGGYCYTFVVTTCLLQRRRRLLLCYCRRRLVVGAEYCHCQQVVRRRGGRELGEELRGVYLQVGEDVPVSVEEGHVAAEVDVVQEVVVHHGEAVAGRREHHMVVADEAAAAAAVLLRLAAAASRAAQRRHLKHG

SEQ ID NO: 173380 - protein, 443 aa, Zea Mays
MQNIIGVMQNDCRRLVRAFDKSSIANFPSHEVELGDNTCNTSVKGCHDQSQPPYGMPMDTYPEQTQIGSKPADLHMSGPSARERGPSGSATVGPIFNELPRHAPEPPHRAPNLNYPVGRSAYNDGRSAYNHGRSGYVSGQSAHESFEGDYYLNPRLSQQHFPSHYAMHQPINSGSRAQESFPVPPRRPERNDQTYEPYRANRNAPRSSNQWGERQHTNMQPTPPMFDQRAGGLAPAAIGIVREEIAGAFRDKLRVSMIPGGQSYRKPYDSRFDHHPYPQGTRIPEFAKFSGDQGKSTREHIGQFLAQLGELADTEAFRVRLFSLSLTGTAFTWYATLPPNSILSWGDLEQKFHEHFFSGDYELDLVDLVTLRQEKDESVSDYIRRFQDTRNRCFQIHLTDKQLAGIAFDGLRYYLKERLEGIQFFTLAQLHQRASACEAEAKN

SEQ ID NO: 173381 - protein, 242 aa, Zea Mays
MGSYIQGDDEVPVRAGRAPGPLPPVGRGGARGHGPVPARGAAAHPDPDDRRLGLPHGLHPLLAQLRARRLPAVLQGLPVAGVLRRGDRVGVRAVRGGRHRGARGHGHGAHEAAAVRDREERELPSQRAVHHGRRGPRRLRVRVGGRPRVRGRGPHGERGVRDARAGARAPGLRQDPQRVHGQEDARAGASPRGRRPARGRQHQGHHSRGRQAQRRDGVRRQRPPRAARRRVGRQTHRRRLGS

SEQ ID NO: 173382 - protein, 750 aa, Zea Mays
MTYMFSVDAENVGDLGLPGRVYKQKVPEWTPNVQYYSSGEYQRLNHAISYNVHGTVALPVFDPSAHSCIAVVELIMTSKKINYACEVDKVCKALEAVNLKSTEIHDHPNVQICNEGRQAALVEILEILTVVCEEHKLPLAQTWVPCKYRSVLAHGGGLKKSCLSFDGSCMGEVCMSTSDVAFHVIDAHMWGFRDACVEHHLQRGQGVPGKAFISHKPCFSKDIRKFCKLAYPLVHYARMFGLAGCFAICLQSSYTGNDDYILEFFLPPDCSDEDDQNALLESVLTLMKRCLRSLKVVGDRDLSGVSLHLSNVLKLENEEFKTDAQFDNSDGSLCQSPNGDRHGGSHEFDGGNKKVLDVPEGQLLTDDFSQGNGTSAGRPNGSGASDSSVLHKTNKPPERKRGKAEKTISLEVLQQYFSGSLKNAAKSLGVCPTTMKRICRQHGISRWPSRKINKVNRSLSKLKQVIESVQGSDAAFNLTSITGPLPIPVGPSLDSLNVEKLTQSKVAELSNIAVDGDRDSLQKSLGNDGHFGIVMPQQGSTDHNNDTQLEADKASHSRSSSGEGSINSRTSEGSCQRSPANQTFVCKPIASTFAEPQLNPEEFNKEPFQEPQLPLSRMLIEDSGSSKDLKNLFTSTSDQPFLAPPNNLVPMKHSGSVTIKASFKEDIVRFRFSCSGSVIVLKEEVAKRLRMDVGTFDIKYLDDDHEWVKLTCNSDLEECMEISRLSGSHVIRLSVSDIATHFGSSCGSSG

SEQ ID NO: 173383 - protein, 629 aa, Zea Mays
MDLDPAYPPSACADAWPFDSLTTSLLFSPQLTPIPANSSFSWLTPHSPLWLFEDRHLLPLDAPAVFEEVQRPRSGNSHTSSKPAEQISHRWQFHLSLDEDGTDNSSLFKEKLTHALRYFKESTDQHLLVQVWAPVKNGDRYVLTTSGQPFVLDHQSIGLLQYRAVSMTYMFSVDAENVGDLGLPGRVYKQKVPEWTPNVQYYSSGEYQRLNHAISYNVHGTVALPVFDPSAHSCIAVVELIMTSKKINYACEVDKVCKALEAVNLKSTEIHDHPNVQICNEGRQAALVEILEILTVVCEEHKLPLAQTWVPCKYRSVLAHGGGLKKSCLSFDGSCMGEVCMSTSDVAFHVIDAHMWGFRDACVEHHLQRGQGVPGKAFISHKPCFSKDIRKFCKLAYPLVHYARMFGLAGCFAICLQSSYTGNDDYILEFFLPPDCSDEDDQNALLESVLTLMKRCLRSLKVVGDRDLSGVSLHLSNVLKLENEEFKTDAQFDNSDGSLCQSPNGDRHGGSHEFDGGNKKVLDVPEGQLLTDDFSQGNGTSAGRPNGSGASDSSVLHKTNKPPERKRGKAEKTISLEVLQQYFSGSLKNAAKSLGVCPTTMKRICRQHGISRWPSRKINKRFFAKVTWK

SEQ ID NO: 173384 - protein, 244 aa, Zea Mays
MTSLKDYTVEALVSTVDHLGFVSYKVDNLVSEKAVEVKETEFLVSSVEQRVRICQQTTDQEARSQQALLIKAPKYHRRYILPGLDLLESSIHPVSEPPRYSRQYTGRKMHKSQSSISTPVRRQATMRREPSPTPNDRSRSLSPSRKARAKSPSPRIVNTNTARETRAGSPIPNSSPMARSASTVARRPPSNSRHLRLASMQLHSDWEQQERSSSKGRRGFLRSLLTRRRWRNDESSLYSYLDEY

SEQ ID NO: 173385 - protein, 482 aa, Zea Mays
MSMPTPTQELITKDLHGSEWRFKHIYRGQPRRHLLTTGWSTFVTSKKLIAGDAFVYLRLSQSQYIVRLNKYLESSKIGFDVGMRFKMSFEGDDVPIKKFSGTVVDKGDLSPQWQGSEWKTLKVKWDEATNLNGPERVSSWEIEPFDASAPAITMPVQPSMKNKRPRETAEGLDIHALEPAQEFWLSGRPEQHEKTSVSSSEPKHQVAWTSERAGYSAMSSSICQNSAVTGSWFKGFNSSGSHPSLPEISQKLFQVTSNDARVPPWPGLSAYHADEPSSKLSCNTALCSYQTEEVAPRFSNAVEEEKKEPGMFRLFGVNLINHARSSATADKTSVGAGETSARAAGSFEDSAQLSRVTKDHTHMVNGSPREIQSHQSCSGRSRIKVQMHGNDVCRAVDLGNLDGYEQLMGEVGEMFEIKDLGSKEKEEWKVTFINDENETMEVGAVPWQEFCQMVRKIVIHSIGDRGHMEACPCLGQDGKRDY

SEQ ID NO: 173386 - protein, 326 aa, Zea Mays
MAQGAGRDPEELFEELWRACAGPLVELPQTNERVFYFLQGHLEQLQEPTDPALLAEQIKMFQVPNKILCKAETETDEMYAQITLQPEPDQVDLPQLPEPPLQETSRPVVHSFCKILTPSDTSTHGGFSVLRRHANECLPALDMSMPTPTQELITKDLHGSEWRFKHIYRGQPRRHLLTTGWSTFVTSKKLIAGDAFVYLRSETGQQRVGVRRLVQKQSTMPASVISSQSMHLGVLASASHAIRTHSIFLVYYRPRLSQSQYIVRLNKYLESSKIGFDVGMRFKMSFEGDDVPIKKFSGTVVDKGDLSPQWQGSEWKTLKVRSVRPA

SEQ ID NO: 173387 - protein, 329 aa, Zea Mays
MPVQPSMKNKRPRETAEGLDIHALEPAQEFWLSGRPEQHEKTSVSSSEPKHQVAWTSERAGYSAMSSSICQNSAVTGSWFKGFNSSGSHPSLPEISQKLFQVTSNDARVPPWPGLSAYHADEPSSKLSCNTALCSYQTEEVAPRFSNAVEEEKKEPGMFRLFGVNLINHARSSATADKTSVGAGETSARAAGSFEDSAQLSRVTKDHTHMVNGSPREIQSHQSCSGRSRIKVQMHGNDVCRAVDLGNLDGYEQLMGEVGEMFEIKDLGSKEKEEWKVTFINDENETMEVGAVPWQEFCQMVRKIVIHSIGDRGHMEACPCLGQDGKRDY

SEQ ID NO: 173388 - protein, 548 aa, Zea Mays
MAQGAGRDPEELFEELWRACAGPLVELPQTNERVFYFLQGHLEQLQEPTDPALLAEQIKMFQVPNKILCKVVNVELKAETETDEMYAQITLQPEPDQVDLPQLPEPPLQETSRPVVHSFCKILTPSDTSTHGGFSVLRRHANECLPALDMSMPTPTQELITKDLHGSEWRFKHIYRGQPRRHLLTTGWSTFVTSKKLIAGDAFVYLRLSQSQYIVRLNKYLESSKIGFDVGMRFKMSFEGDDVPIKKFSGTVVDKGDLSPQWQGSEWKTLKVKWDEATNLNGPERVSSWEIEPFDASAPAITMPVQPSMKNKRPRETAEGLDIHALEPAQEFWLSGRPEQHEKTSVSSSEPKHQVAWTSERAGYSAMSSSICQNSAVTGSWFKGFNSSGSHPSLPEISQKLFQVTSNDARVPPWPGLSAYHADEPSSKLSCNTALCSYQTEEVAPRFSNAVEEEKKEPGMFRLFGVNLINHARSSATADKTSVGAGETSARAAGSFEDSAQLSRVTKDHTHMVNGSPREIQSHQSCSGRSRIKSCGFGKSGWVRAADG

SEQ ID NO: 173389 - protein, 541 aa, Zea Mays
MAQGAGRDPEELFEELWRACAGPLVELPQTNERVFYFLQGHLEQLQEPTDPALLAEQIKMFQVPNKILCKAETETDEMYAQITLQPEPDQVDLPQLPEPPLQETSRPVVHSFCKILTPSDTSTHGGFSVLRRHANECLPALDMSMPTPTQELITKDLHGSEWRFKHIYRGQPRRHLLTTGWSTFVTSKKLIAGDAFVYLRLSQSQYIVRLNKYLESSKIGFDVGMRFKMSFEGDDVPIKKFSGTVVDKGDLSPQWQGSEWKTLKVKWDEATNLNGPERVSSWEIEPFDASAPAITMPVQPSMKNKRPRETAEGLDIHALEPAQEFWLSGRPEQHEKTSVSSSEPKHQVAWTSERAGYSAMSSSICQNSAVTGSWFKGFNSSGSHPSLPEISQKLFQVTSNDARVPPWPGLSAYHADEPSSKLSCNTALCSYQTEEVAPRFSNAVEEEKKEPGMFRLFGVNLINHARSSATADKTSVGAGETSARAAGSFEDSAQLSRVTKDHTHMVNGSPREIQSHQSCSGRSRIKSCGFGKSGWVRAADG

SEQ ID NO: 173390 - protein, 631 aa, Zea Mays
MAQGAGRDPEELFEELWRACAGPLVELPQTNERVFYFLQGHLEQLQEPTDPALLAEQIKMFQVPNKILCKVVNVELKAETETDEMYAQITLQPEPDQVDLPQLPEPPLQETSRPVVHSFCKILTPSDTSTHGGFSVLRRHANECLPALDMSMPTPTQELITKDLHGSEWRFKHIYRGQPRRHLLTTGWSTFVTSKKLIAGDAFVYLRLSQSQYIVRLNKYLESSKIGFDVGMRFKMSFEGDDVPIKKFSGTVVDKGDLSPQWQGSEWKTLKVKWDEATNLNGPERVSSWEIEPFDASAPAITMPVQPSMKNKRPRETAEGLDIHALEPAQEFWLSGRPEQHEKTSVSSSEPKHQVAWTSERAGYSAMSSSICQNSAVTGSWFKGFNSSGSHPSLPEISQKLFQVTSNDARVPPWPGLSAYHADEPSSKLSCNTALCSYQTEEVAPRFSNAVEEEKKEPGMFRLFGVNLINHARSSATADKTSVGAGETSARAAGSFEDSAQLSRVTKDHTHMVNGSPREIQSHQSCSGRSRIKVQMHGNDVCRAVDLGNLDGYEQLMGEVGEMFEIKDLGSKEKEEWKVTFINDENETMEVGAVPWQEFCQMVRKIVIHSIGDRGHMEACPCLGQDGKRDY

SEQ ID NO: 173391 - protein, 601 aa, Zea Mays
MAQGRDPEELFEELWRACAGPLVELPQTNERVFYFLQGHLEQLQEPTDPALLAEQIKMFQVPNKILCKVVNVELKAETETDEMYAQITLQPEPDQVDLPQLPEPPLQETSRPVVHSFCKILTPSDTSTHGGFSVLRRHANECLPALDMSMPTPTQELITKDLHGSEWRFKHIYRGQPRRHLLTTGWSTFVTSKKLIAGDAFVYLRSETGQQRVGVRRLVQKQSTMPASVISSQSMHLGVLASASHAIRTHSIFLVYYRPRLSQSQYIVRLNKYLESSKIGFDVGMRFKMSFEGDDVPIKKFSGTVVDKGDLSPQWQGSEWKTLKVKWDEATNLNGPERVSSWEIEPFDASAPAITMPVQPSMKNKRPRETAEGLDIHALEPAQEFWLSGRPEQHEKTSVSSSEPKHQVAWTSERAGYSAMSSSICQNSAVTGSWFKGFNSSGSHPSLPEISQKLFQVTSNDARVPPWPGLSAYHADEPSSKLSCNTALCSYQTEEVAPRFSNAVEEEKKEPGMFRLFGVNLINHARSSATADKTSVGAGETSARAAGSFEDSAQLSRVTKDHTHMVNGSPREIQSHQSCSGRSRIKSCGFGKSGWVRAADG

SEQ ID NO: 173392 - protein, 684 aa, Zea Mays
MAQGRDPEELFEELWRACAGPLVELPQTNERVFYFLQGHLEQLQEPTDPALLAEQIKMFQVPNKILCKVVNVELKAETETDEMYAQITLQPEPDQVDLPQLPEPPLQETSRPVVHSFCKILTPSDTSTHGGFSVLRRHANECLPALDMSMPTPTQELITKDLHGSEWRFKHIYRGQPRRHLLTTGWSTFVTSKKLIAGDAFVYLRSETGQQRVGVRRLVQKQSTMPASVISSQSMHLGVLASASHAIRTHSIFLVYYRPRLSQSQYIVRLNKYLESSKIGFDVGMRFKMSFEGDDVPIKKFSGTVVDKGDLSPQWQGSEWKTLKVKWDEATNLNGPERVSSWEIEPFDASAPAITMPVQPSMKNKRPRETAEGLDIHALEPAQEFWLSGRPEQHEKTSVSSSEPKHQVAWTSERAGYSAMSSSICQNSAVTGSWFKGFNSSGSHPSLPEISQKLFQVTSNDARVPPWPGLSAYHADEPSSKLSCNTALCSYQTEEVAPRFSNAVEEEKKEPGMFRLFGVNLINHARSSATADKTSVGAGETSARAAGSFEDSAQLSRVTKDHTHMVNGSPREIQSHQSCSGRSRIKVQMHGNDVCRAVDLGNLDGYEQLMGEVGEMFEIKDLGSKEKEEWKVTFINDENETMEVGAVPWQEFCQMVRKIVIHSIGDRGHMEACPCLGQDGKRDY

SEQ ID NO: 173393 - protein, 679 aa, Zea Mays
MAQGAGRDPEELFEELWRACAGPLVELPQTNERVFYFLQGHLEQLQEPTDPALLAEQIKMFQVPNKILCKAETETDEMYAQITLQPEPDQVDLPQLPEPPLQETSRPVVHSFCKILTPSDTSTHGGFSVLRRHANECLPALDMSMPTPTQELITKDLHGSEWRFKHIYRGQPRRHLLTTGWSTFVTSKKLIAGDAFVYLRSETGQQRVGVRRLVQKQSTMPASVISSQSMHLGVLASASHAIRTHSIFLVYYRPRLSQSQYIVRLNKYLESSKIGFDVGMRFKMSFEGDDVPIKKFSGTVVDKGDLSPQWQGSEWKTLKVKWDEATNLNGPERVSSWEIEPFDASAPAITMPVQPSMKNKRPRETAEGLDIHALEPAQEFWLSGRPEQHEKTSVSSSEPKHQVAWTSERAGYSAMSSSICQNSAVTGSWFKGFNSSGSHPSLPEISQKLFQVTSNDARVPPWPGLSAYHADEPSSKLSCNTALCSYQTEEVAPRFSNAVEEEKKEPGMFRLFGVNLINHARSSATADKTSVGAGETSARAAGSFEDSAQLSRVTKDHTHMVNGSPREIQSHQSCSGRSRIKVQMHGNDVCRAVDLGNLDGYEQLMGEVGEMFEIKDLGSKEKEEWKVTFINDENETMEVGAVPWQEFCQMVRKIVIHSIGDRGHMEACPCLGQDGKRDY

SEQ ID NO: 173394 - protein, 65 aa, Zea Mays
MNLHYSLDPFLVSMSGLKIGFSFINLDLILSIITPSHAPSPKFYHNSNVAAFLQDKSKEQTSYSI

SEQ ID NO: 173395 - protein, 66 aa, Zea Mays
MMMLCAEALPPSLSCPGIQHSNFPYGIVKEGGLFFLLQLAAQLVKVASSDGKMAASIAGHDDSNCI

SEQ ID NO: 173396 - protein, 53 aa, Zea Mays
MPDCPCNPCSKFSKEHLEEVVFEEGACSSVVDPLVEFYLTDYHSRRVLDLLLQ

SEQ ID NO: 173397 - protein, 86 aa, Zea Mays
MLVPSLLSMLLHHGGRSGAGLPELPAAAVSRTWNCKKGRRTDLVHVKEHLEEVVFEEGACSSVVDPLVEFYLTDYHSRRVLDLLLQ

SEQ ID NO: 173398 - protein, 64 aa, Zea Mays
MLVPSLLSMLLHHGGRSGAGLPELPAAAVSRTWNCKKGRRTDLVHVKGKVLDVFGFISCFMWGS

SEQ ID NO: 173399 - protein, 61 aa, Zea Mays
MEFTTRRAEQRKTSRCKRMRRACAVQSPASFTSLHGSSKCSRCSTSEVSTRTGRKPRVPNC

SEQ ID NO: 173400 - protein, 64 aa, Zea Mays
MGLHGSIKRIYKSTVVCGSCWYPRFCLCYYTTVVDPAPAYRSSRQQRCRGPGIVKRVGGQIWCT

SEQ ID NO: 173401 - protein, 136 aa, Zea Mays
MGANLNSSRIRMTTPVLTSVVPGAGPLRSSAYSVRLYLPAKFQASPPVPLPELNLHPDRWPGHCVAARSFSGRARDKNVVEEAEKLAMSLSRSPWANSTDYSSKSAYSVAQYSSPFRIIGRVNEVVWHSQRLQAVF

SEQ ID NO: 173402 - protein, 246 aa, Zea Mays
MRAYSRGLPPFALLAETATMAKQQNPIPIPMPLSLSLPLVLVALLLPAARGAAETPQYTTVHAESDFEVRLYGDTVWMSAPTPDIPSFHVATKLGFHRLFQYLMGANLNSSRIRMTTPVLTSVVPGAGPLRSSAYSVRLYLPAKFQASPPVPLPELNLHPDRWPGHCVAARSFSGRARDKNVVEEAEKLAMSLSRSPWANSTDYSSKSAYSVAQYSSPFRIIGRVNEVWFDVNCRSTSTAAGVESY

SEQ ID NO: 173403 - protein, 394 aa, Zea Mays
MDTESLQQGSSSSWHTTGAVSCGAAQQQKRQRCQGSSSDQAGSSSSSSLQISEPEPQQIQEEEDYYMEDDCDDDFDGYDEDDYDFDEADFNQHLADKFDDLDLPPGVEATVPWLQKTTPKEDVKEPPKSNTADENANKYTQFKQFDTVQNFSDHYYAKNSHGEPNRAWSKRVQHDWKLLEKDLPAYIFVRVAEDRMDLLRAAIIGPKGTPYHDGLFFFDIHIPSAYPCAPPLVYYHSGGLRINPNLYNNGKVCLSLLGTWDGRGCEKWNPAQSTMLQVLVSIQALILNDKPYYNEPGYESYANTPNGERLALDYNDNTFLHSCKTMLYSLRRPPEILSLATFGCMGTRFSRHASTTWRVMILGQWCQRRRRRRRRKSHQNTRAVMLEHRVVHQS

SEQ ID NO: 173404 - protein, 190 aa, Zea Mays
MDTESLQQGSSSSWHTTGAVSCGAAQQQKRQRCQGSSSDQAGSSSSSSLQISEPEPQQIQEEEDYYMEDDCDDDFDGYDEDDYDFDEADFNQHLADKFDDLDLPPGVEATVPWLQKTTPKEDVKEPPKSNTADENANKYTQFKQFDTVQNFSDHYYAKNSHGEPNRAWSKRVQHDWKLLEKDLPGPCLLL

SEQ ID NO: 173405 - protein, 665 aa, Zea Mays
MQRHSAAMRQLVHYKGHPDPLRGDALNKAVRETANEAIAAIFSTEDPKPAVATESLGKRIQGFGNTNYEPSRDDKKSFLSELSEVVGIGSASIKQGLSNFAAAHAMMTNDNGSTYRSPNLRRSLTTESERYGRYDPSEIQRESRASSDASKNAPSGPWGPTSSSTPTDETSSSQPGIKTREERLLETIVTASGVRLQPTRDALQIFFAEASKLDAVALSRALESKLNSPLWQVRMKAICVLEAIVRKQDTDPYSIIASYFTENTASVVKCSELPQVSLREKASKVLNMLIGEQPTGTAATKAAMPTPVQMPDLIDTGDQDDLATSSGHASIEQNSGNSAYVSSVDDLLGGEPISDTSVTADSNGSDPFADVSFHEAETKETNDLFSGLTVEEKSSTTMHDSSSDKNELPDIFGSSPDSFNQGSVTDQGTVNDLIAGLNLNGTGHAQSAVKAEPNSNSGSQFFDTKNESGHVPSAATLNDILGQNSLYQQQQTPLQYSFPQHMMLNQSFPGQQLNYGAMGILLAQQQQLLQSFGNFNAGLGNSSFNSMNGGNTSVLPDIFNSSNQPQNHVAVMSSSKKDDNKAFDFVSQHVVQESETGSNEHVQMLERAQVFDGHNSWEFQKLHLVTASQIGCVIHTAGLALFEHMRRKGCSIRLEDEMLRCVLCI

SEQ ID NO: 173406 - protein, 380 aa, Zea Mays
MDRIVGGKFKLGRKIGCGSFGEIYLATHVDTYEIVAVKIESSKTKHPQLFYEAKLYNTLQGGSGIANVKWCGVDGEENVLVIDLLGPSLEDLFCYCGRKFTLKTVLMLADQMITRIEFMHSKGYLHRDIKPDNFLMGLGRKANQVYIIDFGLAKRYRDSTTNRHIPYRENKSLTGTARYASCNTHLGIEQSRRDDLVSLGYVLLYFLRGSLPWQGLKAATKAQKYDKICEKKISTPIEVLCKSCPVQFSSYFHYCHSLAFDQRPDYAFVKRLFRDLFISQDYEFDYVFDWTVLKYKQGHKQKQSPGAPIARPIQAHGPKQAGVNGVINHNEAQEHVETSRPTGQAAWSQDKQATNNDRNPDVRHTVNLAQLFRGVFWVFD

SEQ ID NO: 173407 - protein, 739 aa, Zea Mays
MYGNKWAELTKFLPGRTDNAIKNHWNSSVKKKVDSYISSGLLSQVPCLSLIECPAQCDSLSAMDQQNNGGTDCNDQNTSVVLSSDLQVNVDANKKEAHDSHSSLCQGVCYPSTETVGSVLPDDLEMDMDEGSGNSIFADDQTLCSTSNQEQSMVPFVVAQEMPVSVLSSVSSAEQKRHLISDAKSLKSELWKDVCLQTLITGDTDDPDASSRLNNPDSSKMDTNFLKEAYPLHTPNPSSVIETVYEPMALVTISPPFICSDGLSFAPENRSKPGEMSDCEAEMVTCSNNFFGNAEQSAKLASSDDRPEAFTMTESTTNCGGEQLTDAKEPVASTAKERLSKDIETMPDKKKGEGALFYEPPRFPGLDVPFISCDLVTSADLQEFSPLGIRQWMRSTMNVPTPLRLWGSPTHDESPDALKTAAESFPCTSSIMKKRQRSLLSPTPDERIEKKSGIAKGVTDISYMITATCSMNATNDEDIVTESAVCAKQPSLKHLDKKLEFSDINKENSDGASEQAKDAQNTQLVDEQHSSPNVVNPNTDLQDNIQPVQILVEQSSNNLISSDHGAKPSCKEVISSKSKPTKLLVEKSSPCINVDYEYVNLLADTPGIKRGLESPSAWKSPWYIDMHMHFQGFVSPADRTYDALGLVNRLSKHSAAAAVEACEMLASGNTTSDKENKDNTDGKELVTRKSQIKIMAEARVLDFDESPAPARTADKKLGSCHRRSVSSPILPSPNLRSFR

SEQ ID NO: 173408 - protein, 794 aa, Zea Mays
MPSDKAKAPKKKGEEDPGIPPAPCEGEISHEPHRQRSLNGWQKVLNPELVKGPWSKEEDEIIVQMVNKYGPKKWSAIAQALPGRIGKQCRERWHNHLNPAINKEAWTQEEEITLIHAHRMYGNKWAELTKFLPGRTDNAIKNHWNSSVKKKVDSYISSGLLSQVPCLSLIECPAQCDSLSAMDQQNNGGTDCNDQNTSVVLSSDLQVNVDANKKEAHDSHSSLCQGVCYPSTETVGSVLPDDLEMDMDEGSGNSIFADDQTLCSTSNQEQSMVPFVVAQEMPVSVLSSVSSAEQKRHLISDAKSLKSELWKDVCLQTLITGDTDDPDASSRLNNPDSSKMDTNFLKEAYPLHTPNPSSVIETVYEPMALVTISPPFICSDGLSFAPENRSKPGEMSDCEAEMVTCSNNFFGNAEQSAKLASSDDRPEAFTMTESTTNCGGEQLTDAKEPVASTAKERLSKDIETMPDKKKGEGALFYEPPRFPGLDVPFISCDLVTSADLQEFSPLGIRQWMRSTMNVPTPLRLWGSPTHDESPDALKTAAESFPCTSSIMKKRQRSLLSPTPDERIEKKSGIAKGVTDISYMITATCSMNATNDEDIVTESAVCAKQPSLKHLDKKLEFSDINKENSDGASEQAKDAQNTQLVDEQHSSPNVVNPNTDLQDNIQPVQILVEQSSNNLISSDHGAKPSCKEVISSKSKPTKLLVEKSSPCINVDYEYVNLLADTPGIKRGLESPSAWKSPWYIDMHMHFQAEARVLDFDESPAPARTADKKLGSCHRRSVSSPILPSPNLRSFR

SEQ ID NO: 173409 - protein, 151 aa, Zea Mays
MIKAFEDGNHDALVDPRLGSEYNDNEMARMIACAAACVRHSSRRRPRMGQVVRALEGDVSLDDLNEGVRPGHSRFVGSYGSSTSDYDTSQYKEDLKKFRKMALGGSGLQSSSAQTPTSEHGENPSVSVSSSDGDGGGGTGEEREDRRQAAS

SEQ ID NO: 173410 - protein, 491 aa, Zea Mays
MSTSPPPATSPPGAPPNGTASPTAAPPPPLPPAPSNSSSPTPATPTGAPPTAPAPPSTDSPAPPGTPPAPVSPNAAALPAPGRATPASASPPTPSSSGSGLTTSVVVGIAVGGFAVLLLGCLFCLCLFRSNKRSRRRHRHHPPPPPPPHLLHYYGHPPPPPPPPHKGDQHQSWQHNAPPPPPDHVIKINSHPTLPPPPHNVHSSGSASNHSGGESRPALSPGTALSFSRSTFTYEQLMTATNGFSDANLLGQGGFGFVHKGVLPDGTEVAVKQLRDGSGQGEREFQAEVEIISRVHHKHLVSLVGYCISGAHRLLVYEFVPNNTLEFHLHGRGRPTLDWPTRLKIALGSAKGLAYLHEDCHPKIIHRDIKASNILLDLRFEAKVADFGLAKFTSDANTHVSTRVMGTFGYLAPEYAASGKLTEKSDVFSFGVMLLELITGRRPVNSRQADDNLVDWVSCAWRSKLNLQYIVLRLTGSTHSFHLSYKKGSFI

SEQ ID NO: 173411 - protein, 346 aa, Zea Mays
MSTSPPPATSPPGAPPNGTASPTAAPPPPLPPAPSNSSSPTPATPTGAPPTAPAPPSTDSPAPPGTPPAPVSPNAAALPAPGRATPASASPPTPSSSGSGLTTSVVVGIAVGGFAVLLLGCLFCLCLFRSNKRSRRRHRHHPPPPPPPHLLHYYGHPPPPPPPPHKGDQHQSWQHNAPPPPPDHVIKINSHPTLPPPPHNVHSSGSASNHSGGESRPALSPGTALSFSRSTFTYEQLMTATNGFSDANLLGQGGFGFVHKGVLPDGTEVAVKQLRDGSGQGEREFQAEVEIISRVHHKHLVSLVGYCISGAHRLLVYEFVPNNTLEFHLHGMFSSCFCTVITSSHS

SEQ ID NO: 173412 - protein, 412 aa, Zea Mays
MSTSPPPATSPPGAPPNGTASPTAAPPPPLPPAPSNSSSPTPATPTGAPPTAPAPPSTDSPAPPGTPPAPVSPNAAALPAPGRATPASASPPTPSSSGSGLTTSVVVGIAVGGFAVLLLGCLFCLCLFRSNKRSRRRHRHHPPPPPPPHLLHYYGHPPPPPPPPHKGDQHQSWQHNAPPPPPDHVIKINSHPTLPPPPHNVHSSGSASNHSGGESRPALSPGTALSFSRSTFTYEQLMTATNGFSDANLLGQGGFGFVHKGVLPDGTEVAVKQLRDGSGQGEREFQAEVEIISRVHHKHLVSLVGYCISGAHRLLVYEFVPNNTLEFHLHGRGRPTLDWPTRLKIALGSAKGLAYLHEDCHPKIIHRDIKASNILLDLRFEAKVADFGLAKFTSDANTHVSTRVMGTFGQGL

SEQ ID NO: 173413 - protein, 302 aa, Zea Mays
MAAAAAAAVAHLSIHGRLRRSPEHRPSITTTTTSSSSSSAHRPSLLRCRAFKQEAGDGDPAEADARKRRKGPLYKLKAAIQGLAGSRSAAAEVYGGEYQYQRAVEKAEEIFFSVTTQLGRYVITMMSSGVVLGVGFQLSGGDSQMNELIWYSWLGGVIIGTMIGANSVLEEHCKAGPRNVVITGSTRGLGKALAREFLLSGDRVVITSRSPESVLQTIKELEENIQEGLSVAKKKQRNILSHAKVVGTDCDVCKPEDVKELVNFAINELGSVDIWVGNSLQFCSLNLYLIWSTFCFAKEIFK

SEQ ID NO: 173414 - protein, 361 aa, Zea Mays
MAAAAAAAVAHLSIHGRLRRSPEHRPSITTTTTSSSSSSAHRPSLLRCRAFKQEAGDGDPAEADARKRRKGPLYKLKAAIQGLAGSRSAAAEVYGGEYQYQRAVEKAEEIFFSVTTQLGRYVITMMSSGVVLGVGFQLSGGDSQMNELIWYSWLGGVIIGTMIGANSVLEEHCKAGPRNVVITGSPESVLQTIKELEENIQEGLSVAKKKQRNILSHAKVVGTDCDVCKPEDVKELVNFAINELGSVDIWINNAGTNKGFRPLVTFSDDDITQIVSTNLVGSLLCTREAMNVMQYQEKGGHIFNMDGAGSGGSSTPLTAVYGSTKCGLKQFQGSLLNESRRSKVGVHTASPGMVLTDLLLR

SEQ ID NO: 173415 - protein, 484 aa, Zea Mays
MAAAAAAAVAHLSIHGRLRRSPEHRPSITTTTTSSSSSSAHRPSLLRCRAFKQEAGDGDPAEADARKRRKGPLYKLKAAIQGLAGSRSAAAEVYGGEYQYQRAVEKAEEIFFSVTTQLGRYVITMMSSGVVLGVGFQLSGGDSQMNELIWYSWLGGVIIGTMIGANSVLEEHCKAGPRNVVITGSTRGLGKALAREFLLSGDRVVITSRSPESVLQTIKELEENIQEGLSVAKKKQRNILSHAKVVGTDCDVCKPEDVKELVNFAINELGSVDIWINNAGTNKGFRPLVTFSDDDITQIVSTNLVGSLLCTREAMNVMQYQEKGGHIFNMDGAGSGGSSTPLTAVYGSTKCGLKQFQGSLLNESRRSKVGVHTASPETVARTLVPRMRVVKGSGKAINYLTPPRILLALVTAWVRRGRWFDDEGRAVYAAEADRIRNWAESRARFSFTDAMEMYTENTWVSVFSLSVVCAFIILSSSGGPLPGT

SEQ ID NO: 173416 - protein, 506 aa, Zea Mays
MAAAAAAAVAHLSIHGRLRRSPEHRPSITTTTTSSSSSSAHRPSLLRCRAFKQEAGDGDPAEADARKRRKGPLYKLKAAIQGLAGSRSAAAEVYGGEYQYQRAVEKAEEIFFSVTTQLGRYVITMMSSGVVLGVGFQLSGGDSQMNELIWYSWLGGVIIGTMIGANSVLEEHCKAGPRNVVITGSTRGLGKALAREFLLSGDRVVITSRSPESVLQTIKELEENIQEGLSVAKKKQRNILSHAKVVGTDCDVCKPEDVKELVNFAINELGSVDIWINNAGTNKGFRPLVTFSDDDITQIVSTNLVGSLLCTREAMNVMQYQEKGGHIFNMDGAGSGGSSTPLTAVYGSTKCGLKQFQGSLLNESRRSKVGVHTASPGMVLTDLLLRNKQMFNLICELPETVARTLVPRMRVVKGSGKAINYLTPPRILLALVTAWVRRGRWFDDEGRAVYAAEADRIRNWAESRARFSFTDAMEMYTENTWVSVFSLSVVCAFIILSSSGGPLPGT

SEQ ID NO: 173417 - protein, 727 aa, Zea Mays
METTDEFAVPPRPALVHPDADGVRTPSALGPLSPEDPPPAFMERDWRHGGDNTAAYPGCSPFQPSAAGRPVSISLPASPTGGFDISSRTEAELQRDAAAVTDAPPPRMMMLPPFAPAPAMALEQPGKVVFRSQPIPAAPPVGDGGHDDEFGRSAPAAMALEQPGKVVFRSQPIIPGAPPEGDGAARGHDDFGRSAPAAKTRRDSRDTSYDSFKTWSGKLEKQIATHLLGSSLQQQPEHGEEPEEDDAASDRRNSSMPKVQRFFAALEGPELDKLRVLTPMTPSIRYTSTTSAVDANARWRAFVSFVAAVLLWPAHVPLAVADADEEADVVLSYWWQSSEELILPSDKTWPFLLRFPVSAFGMCLGMSSQAILWKRIAISASTRFLHITVKINLVLWCASVALMAAVSALYGCKLVLYFEAVRREYYHPIRVNFFFAPWIACLFLAIGVPDVVAATLPHWLWYVLMAPIVCLELKIYGQWISGGQRRLSRVANPSNHLSIVGNFVGALLGGIMGLKEGPMFFFSVGLAHYMVLFVTLYQRLPTSETLPRDLHPVFFLFVAAPSVACLAWARITGEFGYGSRVAYFIAMFLYASLAVRINLFRGFSFSLAWWAYTFPMTSAAIASIRYSSEVKNAFTQCMCIGLAAAATLAVAALFLATLLHAVVYRDLFPNDISIAITERRRSKPLVGEKMLLRLRSGKKVQQALSTAPADAAADLEAARAATTTSYT

SEQ ID NO: 173418 - protein, 225 aa, Zea Mays
MAEQTQPQGEGGASPKHESLMEKLADKLHVGGGKADSSSSSDSDSDERPRPSAPPADELKQPSFSDAAATAAAEAKAKVFRLFGREQPIHKALGGGKPADVFLWRNKNISAGVLGGATAIWILFELLGYHLLTFVCHGLIFALGVLFLWSNASSFIHKAPPKIPEVIIPEDLVVNIALSTRYEINRAFANLRQIALGRDLKKFLMGLRRPPLKRSGRLRGSMTSS

SEQ ID NO: 173419 - protein, 221 aa, Zea Mays
MAEQTQPQGEGGASPKHESLMEKLADKLHVGGGKADSSSSSDSDSDERPRPSAPPADELKQPSFSDAAATAAAEAKAKVFRLFGREQPIHKALGGGKPADVFLWRNKNISAGVLGGATAIWILFELLGYHLLTFVCHGLIFALGVLFLWSNASSFIHKAPPKIPEVIIPEDLVVNIALSTRYEINRAFANLRQIALGRDLKKFLMVLLKKNSGSSRIDLYF

SEQ ID NO: 173420 - protein, 299 aa, Zea Mays
MVGACRLDVAYEHFKEKPHMFQFVPNEKQVQAANKLLKSLPQRGRRKKLDGVPVFSAQNLNIAVATNDGIRWYTPYFFDKNLLDNILEASMDQHFHSIMQNRHTRRRRDIVDDSLTSEIIEESAESLLEPPEVQELMNEIGPAGIPLNVVTKAAEIQFLDVVDKVLLGNKWLRKASGIQPKFPYVVDSFEERTAVSIANIATTSSLTASNDDSSCQNNQETQSSEPSGDNSSYRNHNNEDHNHFPFSNLLPNIWPGHDRKFKSQESDNKFSRYDADVKNEQSQLKEDNGRLDKRVGANE

SEQ ID NO: 173421 - protein, 232 aa, Zea Mays
MNISRYTPYFFDKNLLDNILEASMDQHFHSIMQNRHTRRRRDIVDDSLTSEIIEESAESLLEPPEVQELMNEIGPAGIPLNVVTKAAEIQFLDVVDKVLLGNKWLRKASGIQPKFPYVVDSFEERTAVSIANIATTSSLTASNDDSSCQNNQETQSSEPSGDNSSYRNHNNEDHNHFPFSNLLPNIWPGHDRKFKSQESDNKFSRYDADVKNEQSQLKEDNGRLDKRVGANE

SEQ ID NO: 173422 - protein, 342 aa, Zea Mays
MKRTPMWFKRMLSPSKKTENSPVFRFFMDLNDAVSYVKRLNVPSGMVGACRLDVAYEHFKEKPHMFQFVPNEKQAANKLLKSLPQRGRRKKLDGVPVFSAQNLNIAVATNDGIRWYTPYFFDKNLLDNILEASMDQHFHSIMQNRHTRRRRDIVDDSLTSEIIEESAESLLEPPEVQELMNEIGPAGIPLNVVTKAAEIQFLDVVDKVLLGNKWLRKASGIQPKFPYVVDSFEERTAVSIANIATTSSLTASNDDSSCQNNQETQSSEPSGDNSSYRNHNNEDHNHFPFSNLLPNIWPGHDRKFKSQESDNKFSRYDADVKNEQSQLKEDNGRLDKRVGANE

SEQ ID NO: 173423 - protein, 388 aa, Zea Mays
MNKSESLDEHGFLTAAAGEAHKLGFGDPVAISAETGLGMAELYEILRPLFEEYMFQLRNNDLNQDDPISEVETEAHDGDESKLPLQLAIVGRPNVGKSTLLNTLLQEQRVLVGPEAGLTRDSIRAQFQFDSRTVYLVDTAGWMERSGKEKGPASLSVVQSRKNLMRAHIVALVLDAEKIAKSKSSMNHPEIVIARQAIEEGRGLVVIVNKMDLLRDNQTLFNKVMDAVPREIQTVIPQVTGIPAVFVSALEGRGRIAVMRQVIDTYEKWCLRLSTSRLNRWLRKVMSRHSWKDSATQPKVKYFTQVKARPPTFVAFMSGKTQLSDTDTRFLTKSLKEDFDIGGIPIRIIQRSVPRKAYAKRNNTRNTGPRVVRMKTDKRTAVSDPALS

SEQ ID NO: 173424 - protein, 311 aa, Zea Mays
MAAAVAVLRAALRRGRPAAASLLHRLPNPSARSLPPPPPLGRALRPLSRLGFSAGFGHSSSTEDFGFGYSPATEDSAAAAKPKTKTKARKHPMKQSRFDFTKVDAALLPTVILVGRPNVGKSALFNRFIRRREALVYNTPGDHVTRDIREGVAKLGDLRFRVLDSAGLETAATSGSILARTADMTGNVLARSQFAIFLIDVRDGLQPLDLEVGQWLRKHASGIHTLVAMNKSESLDEHGFLTAAAGEAHKLGFGDPVAISAETGLGMAELYEILRPLFEEYMFQLRNSGYCWLDGKIREGERASIFECCAV

SEQ ID NO: 173425 - protein, 483 aa, Zea Mays
MAAAVAVLRAALRRGRPAAASLLHRLPNPSARSLPPPPPLGRALRPLSRLGFSAGFGHSSSTEDFGFGYSPATEDSAAAAKPKTKTKARKHPMKQSRFDFTKVDAALLPTVILVGRPNVGKSALFNRFIRRREALVYNTPGDHVTRDIREGVAKLGDLRFRVLDSAGLETAATSGSILARTADMTGNVLARSQFAIFLIDVRDGLQPLDLEVGQWLRKHASGIHTLVAMNKSESLDEHGFLTAAAGEAHKLGFGDPVAISAETGLGMAELYEILRPLFEEYMFQLRNNDLNQDDPISEVETEAHDGDESKLPLQLAIVGRPNVGKSTLLNTLLQEQRVLVGPEAGLTRDSIRAQFQFDSRTVYLVDTAGWMERSGKEKGPASLSVVQSRKNLMRAHIVALVLDAEKIAKSKSSMNHPEIVIARQAIEEGRGLVVIVNKMDLLRDNQTLFNKVMDAVPREIQTVIPQEYQLFSCQRWRGGGGLL

SEQ ID NO: 173426 - protein, 319 aa, Zea Mays
MRYSGHCLKNTCFSFEILAIVGRPNVGKSTLLNTLLQEQRVLVGPEAGLTRDSIRAQFQFDSRTVYLVDTAGWMERSGKEKGPASLSVVQSRKNLMRAHIVALVLDAEKIAKSKSSMNHPEIVIARQAIEEGRGLVVIVNKMDLLRDNQTLFNKVMDAVPREIQTVIPQVTGIPAVFVSALEGRGRIAVMRQVIDTYEKWCLRLSTSRLNRWLRKVMSRHSWKDSATQPKVKYFTQVKARPPTFVAFMSGKTQLSDTDTRFLTKSLKEDFDIGGIPIRIIQRSVPRKAYAKRNNTRNTGPRVVRMKTDKRTAVSDPALS

SEQ ID NO: 173427 - protein, 224 aa, Zea Mays
MKAGPQQVLDSLFKIPETRTYEPSSMDWKKVVKKLQTINYTAASNNHERPKDGGGYRELRGVAARHYDKMKEYYQKAAFAYSKGDRSYASYLAEEGKHYRELGRIEDEKASRNIFEARNKHITNTVTIDLHGQHVQHAMNLLKIHMMICICIPSVLLRVITGCGSEGTGKGKIKRSVIELAEKEHIEWREENSGTVALRLGGPREYRFLEHESDSDLVGNFNID

SEQ ID NO: 173428 - protein, 163 aa, Zea Mays
MKAGPQQVLDSLFKIPETRTYEPSSMDWKKVVKKLQTINYTAASNNHERPKDGGGYRELRGVAARHYDKMKEYYQKAAFAYSKGDRSYASYLAEEGKHYRELGRIEDEKASRNIFEARNKHITNTVTIDLHGQHVQHAMNLLKIHMMICICIPCYRACGEGTY

SEQ ID NO: 173429 - protein, 309 aa, Zea Mays
METNHQSARRNDTCHLDMFSGNGLSVENLTAGNRRSLRQLTDEISNTGLQSELGHEFLWGEPQISYAEAVKEAPRSSTLPSRSTVMKAGPQQVLDSLFKIPETRTYEPSSMDWKKVVKKLQTINYTAASNNHERPKDGGGYRELRGVAARHYDKMKEYYQKAAFAYSKGDRSYASYLAEEGKHYRELGRIEDEKASRNIFEARNKHITNTVTIDLHGQHVQHAMNLLKIHMMICICIPSVLLRVITGCGSEGTGKGKIKRSVIELAEKEHIEWREENSGTVALRLGGPREYRFLEHESDSDLVGNFNID

SEQ ID NO: 173430 - protein, 534 aa, Zea Mays
MKPSLSKKKGKKKKKSSLPAAAPAPPPAEGAADTEACPPLPGTITLTAATAAAAVVSETESSSSGEASTCPSACFTASSSGTASSHSFSALSSSASTASSSAAGEERRDLTWLLDAFASATFDQIDSAYREAGGDPFVAAGILSSTQDTHPPQPPQPAPQPPPPPDLSPRSGSGGRKAGRRPKRVAVAATGMVADVIGKEYTRPAANSVVSMPNAWKGRDGESDGSGSGGRKDSVEEAEQFLCSMLGDNSELGMGVVRDVLGQYGYDVEKALDALLDISGVSSVENMETNHQSARRNDTCHLDMFSGNGLSVENLTAGNRRSLRQLTDEISNTGLQSELGHEFLWGEPQISYAEAVKEAPRSSTLPSRSTVMKAGPQQVLDSLFKIPETRTYEPSSMDWKKVVKKLQTINYTAASNNHERPKDGGGYRELRGVAARHYDKMKEYYQKAAFAYSKGDRSYASYLAEEGKHYRELGRIEDEKASRNIFEARNKHITNTVTIDLHGQHVQHAMNLLKIHMMICICIPCYRACGEGTY

SEQ ID NO: 173431 - protein, 404 aa, Zea Mays
MRPAEIMDRRRFAETEGKRAHDPLYSPRRAARATATGFPVGEHGEVLAGPVIVGAGPAGLAVAACLTMRGVPYVLLERHGCVASLWRHRTYRRLRLHLPKRFCELPLMPFPPSYPAYPTREQFLAYLEDYIATFGIRPFFRQAVVSAEHDGDFWCVRTLDGGGTSREYRSKWLVVATGENAEPVVPDIDGIHAFRGLVIHSSDYRSGESYRGKKVLVIGCGNSGMEVSLDLSNHNVHTSMVVRDSVHVLPREIMGVSTFDTARLGIPRPNIGPMELKRVSGKTPVLDVGTIAKIKSGDIKVYPAIQSFQEHGVQFIDGKSESFDVVILATGYKSNVPYWLKDKDLFSEKNGFPHNSNEWKGKNGLYAAGFSRRGLLGVSMDATNIADDILGCWNDFGYERHKRK

SEQ ID NO: 173432 - protein, 1656 aa, Zea Mays
MSSSKSPSPGQQTPPASSPPAAPVVSLAAVPASSEAMALGPPGAAINQQAAPALTPAQIAASLADLSHAVRDMQITMNAMLTGHLPFPNPQAANPPQPLHPSLTAQPPPAALPPPTQPPAPLPPLARQPISYQYGMPIDPGPSSTASPTTAPIHMIRFPPSPSPIPSWAQGAPTVSPPVYSEALPRPALTTSLPSSTVGGPPGMLLGGGDDPLFPGRGPLRPHVPAATAAWSPYHGLPQDDNVETAAYGGAEARAPPRYYKLDFATYDGSEDPLNWLNHCEQFFRGQRTPASDRTWLASYHLKGPAQTWYYALEQDEGMPSWDRFAELCRLRFGPAVRGSRLAELGRLPFLSTVQEYSDRFQALLCRARDVSPMQKTELFVGGLPEYLRVDVELRDPQDLQTAMYLARAFERRVAAWPPFQQRGSRPPQRAQGSGRVTPAPPGALPTSTTTPGDSTTPTRPFRRLSPGEQQERRRQGLCFNCDEPYVRGHVCQRLFYLEVDDFLDEASGEGGVDPLEESAAPDVTGANALVVSLHALAGIRTDKTLLLPVTINGERLLALMDTGSTHNFLNADTMSRLGLAMAGGEHLRVTVANGDRLPCAGITRDVPVIINDESFSITCVGMRLGCFDFILGVDFLETLGTIQWNFRALTLSFQRQGRRIHWQGVRATQQPAPQQLVVAVVDTAQQPLMDVLLQQHGAIFDEPTGLPPARPYDHRIHLLPGTAPVAVRPYRYAQLQKDELERQCEAMLTQGIIRPSTSPFSAPVLLVRKADRSWRFCIDYRALNAKTSKDKFPIPVVDELLDELHGARFFSKLDLRSGYHQVRMHTDDIAKTAFRTHHGHYEFLVMPFGLSNAPATFQALMNDVLRPYLRKFVLVFFDDILIYSASWAEHLQHVGIVLETLQANHLHLKRSKCSFGATSVAYLGHVISEGGVAMDADKVAAVASWPPPRSARGLRGFLGLAGYYRKFIKDFGLIAAPLTRLLRRDAFAWDDDATTAFHALKHALTTGPVLQMPGFAKLFVVDCDASGAGFGAVLHQGAGPLAYFSKPFAARHLKLAAYERELIGLVQAVRHWRPYLWGRHFSVRTDHYSLKFLLDQRLSTVPQHQWTSKLFGFDFSVEYRPGRLNTVADALSRRDSEATVEDTAMAALAISGPTFSLLDDIRGALAAAPDGQHLLQQLRDGVLAAPWRLFDGLLLHGTRIFVPNYDDLRHQVLTLAHSAGHEGIQKTLHRLRADFYMPHDRALVQDWVRTCTTCQQNKTLAQQPGGLLQPLEVPSQVWADISMDFIEGLPKVAGKSVILTVVDRFSKYAHFIALGHPYTASSVARAFFDGIVRLHGFPLSIVSDRDPVFTGHVWRDLFRMAGVTLKMSTAFHPQTDGQSEVVNKIIAMYLRCVTGDRPRAWVDWLSWAEYCYNTSYHTALRATPFEVVYGRSPPSMLPYTPGTTRTEAADDMLRSRDEMLAEVRQRLLQAQQLAKKYYDAGHREVQFQVGDWVWLRLLHRTFQSLHPRAKGKLGPRYAGPFRVQERIGSVAYRLQLPDGARIHDVFHVSLLKPHRGDPPATPGTLDPVMDGRLLPVPAKVLRAQLRRGVWQVLVQWRGLAEDDATWEKLEEFRVAYPNLQLEDELFEKAGRDVMYGQAYVRRNRAKAAQVGPKAQ

SEQ ID NO: 173433 - protein, 170 aa, Zea Mays
MSGTRSSAPSNTSAVHSSRTTDCTHLTRWTTSLPRPPDTWTGDLPVSSSSTRTPRLYTSEACDAFLVSATSGAQYPRERDLAAIGFASCARPRSEMQPYPSLLTNTLEALMLPWTNLPLFSAWTCATPLAAPRAIFHLVSQSNGVRSSPLFPERSTGSMSTSFDHVKSLD

SEQ ID NO: 173434 - protein, 421 aa, Zea Mays
MRRKQLLPPWLLVVLFLSWSSAAPVPASSTTTTTTTLPGQMRRRRYYDSIFSLGDSYADTGNGPVVFGWHALASPVMRPPYGSTFFGRPTGRNCDGRLVIDFLAESLGLPLVPPFLQAQARHGTGSFRRGANFAVGGATALDASFFHRWDPPGGSVFPLNASLGVQLQWFQSLKRSLCATPKGMCVALHDPRGHDHDDTDEHELTRCDRLLRRSLFFVGAFGANDYLLAMAATSLEQVGSLVPAVVRTISAAVERLIVEHGAATVVVPGVIPVGCAPPVLATFADPDPAGYDPRTGCLRSINEVATRHNALLQDGLRELRARHAAATVVYADFFGPVIDMVTSPAKVRRRRADALLRRTWAVQLQQARFLRRPRRQRVQGPVGSFVLGRRPPDGGSLPIRRRRLAERHNVAAAGKRGRRWW

SEQ ID NO: 173435 - protein, 162 aa, Zea Mays
MAKLLGRDYSRVLTTVRGTIGYLAPEWISGLPITHKADVYSFGMILLEILSGRRNSEKIEEGRFTYFPSYVAVKLSEGDDVMWLLDSSLESNADAEQLQRACRVACWCIQDAEDHRPMMGQAVHMLEGAMDAQVPPVPRSLQNYVGVEDSTTAEFYISEGSC

SEQ ID NO: 173436 - protein, 526 aa, Zea Mays
MVVWQSFDNPTDVLLSGGYLGFNKINGNINSLGIHFNLSFDATRRRGFIIQYPEGRRFAGAFPEWMDILEDGNYTLIFNDTYTYIRLDDTSFVRFGKQGDCDSILWSAPESLCDYDPYCGPYSLCTLSGSGSCICPVGFNSVSTDAWITAGCSRNDSLNCENVEVTFYPIDGIHRYPLEAFALEVTNMSECESACLRDCTCTAFAYNASCLLWFSELRNTIVLDSGLNGIRMYVRTAARQQSGSGTVPPFSFWKRVPLEWMIGVITLIVISLILLLRCRSKPYSARTVGDHGSLVVFSFAQIKNSTKRFSEKLGEGGFGCVFKGMLPGCTPVAVKKLKDHRQDEKQFRAEVRTIELCPKIADFGMAKLLGRDYSRVLTTVRGTIGYLAPEWISGLPITHKADVYSFGMILLEILSGRRNSEKIEEGRFTYFPSYVAVKLSEGDDVMWLLDSSLESNADAEQLQRACRVACWCIQDAEDHRPMMGQAVHMLEGAMDAQVPPVPRSLQNYVGVEDSTTAEFYISEGSC

SEQ ID NO: 173437 - protein, 143 aa, Zea Mays
MSQLLHLPDLAAPRTRMGSALAAGARVKQGEAGTARGRVLRVADPVRRECLVPVPPPPVLAAGRRGDDDDVDEERQRYYLNLGYAIRTLREELPDVLCKDHSFDIYRHCLQRPSQHIQGPGKLQEALLGAAPHRPGLLQGVVG

SEQ ID NO: 173438 - protein, 215 aa, Zea Mays
MAVSIAVSHFCGEGETRTPAASQKASARHRFRSPENIHIHYHSVSYYFFLLTVVDSSLYIARPPKLAKTKMSQLLHLPDLAAPRTRMGSALAAGARVKQGEAGTARGRVLRVADPVRRECLVPVPPPPVLAAGRRGDDDDVDEERQRYYLNLGYAIRTLREELPDVLCKDHSFDIYRFHSNSIAWPFLLLGWRTRLSCWGITGHGCLLALAHILG

SEQ ID NO: 173439 - protein, 1179 aa, Zea Mays
MDAPDVQQSMGYKESRGGMPKFFHALGPALLISMGYIDLGKWVAAVEAGSCFGFDLVLLALLFNFTAIVCQYLAACIGTVTGKNLAEICHQEYNQPTCIFLGVQAGLSLLTSELTMIFGIALGFNLLFEYDDLITGICFATVVPNLLPYAISHLGKKMEGTINACIAGFALLSYVLGLLVSQPQIPLTMNVIFPKISGESAYSLMALLGANIMAHNFYIHSSVVQGQKKSSAVGLGALFHDHLFSILFIFTGIFMVNYVLMNSAAAESTNTLLITFQDVVELMNQIFVNPLAPTIFLVVLLFSSHIISLTSAIGSQVISHHLFEMLFGDSGWMNNLKGYTGSPVVLPYTVLVLVALISVAFSLYLAVTPLRSGSHEAESHEWSVHSQRELLNTSQEREDVKVDNVTYEEDQRSDVVPSPRDVPDSHPELALDYIDTSDTAVESDHDSQQSTAYASTAPETCSSPSFTREESKSVVAVNWPEPLEKVPTSTVMEESTVENVVSRITTERDVLVETDVVSGKDKEDIRTLESEKSIVDSTPYVSDDGPPSLTFSRGKGSDAGNGSGSLSRLSGLGRAARRQLAATLDEFWGHLFDYHGKLTQEASTKKFGILLGIDLRTPSTSVRTDKQAAEILKSPLVRDSMRGAAFLSSSVDMMSPKNETSNLELAYGLQRGPGMGLSSWSQGMQLPNTQLQSSSNSLLEQSARLNSNFSSSYSDNNQFYQPATIHGYQLTSYLKQMNASPSLYSSMPLDPQRLPKSSVSAVPNYADSMMHARNHNLLASLGGTTTQLPATSRVGSMMPERSYYDPSSVDGNENAGSPAYSKKYHSSPDMSGIIAASRAALLNEAKLGAAIGPQSYLSRLAAERSQYASSTARPAAPLAFDELSPPKLQSDIFSAQSSMRPSARSLWAKQPFEQLFGMSSAELSKGDFNLPGRSGGVAKDDFSYKESETKLLQSLRLCIMKLLKLEGSGWLFKQNGGCDEDLIDRVAAAEKLLMQGTAENQLLLHGGDLQQHSSDQAGIQYMRTLPNCGEDCVWRASLVVSFGVWCVRRVLDMSLVESRPELWGKYTYVLNRLQGILDPAFSKPRGALTICTCLQKDTRVRNSPPHSGLTAMGPVPTPIRGAFTTAGVVLEMIKDVEAAVSGRKGRSGTAAGDVAFPKGKENLASVLKRYKRRLASKGQ

SEQ ID NO: 173440 - protein, 1151 aa, Zea Mays
MPPRVQPANMYIPWCSSWIVFVDVRADYGICFATVMEGTINACIAGFALLSYVLGLLVSQPQIPLTMNVIFPKISGESAYSLMALLGANIMAHNFYIHSSVVQGQKKSSAVGLGALFHDHLFSILFIFTGIFMVNYVLMNSAAAESTNTLLITFQDVVELMNQIFVNPLAPTIFLVVLLFSSHIISLTSAIGSQVISHHLFGINLPLSGHRLLLKVFAIVPTLYWAKVAGAEGIYQLLIICQIIQAMLLPSSVVPLFRVASSRSIMGAHRVSLHLEILVFLAFLLMLFSNIIFVAEMLFGDSGWMNNLKGYTGSPVVLPYTVLVLVALISVAFSLYLAVTPLRSGSHEAESHEWSVHSQRELLNTSQEREDVKVDNVTYEEDQRSDVVPSPRDVPDSHPELALDYIDTSDTAVESDHDSQQSTAYASTAPETCSSPSFTREESKSVVAVNWPEPLEKVPTSTVMEESTVENVVSRITTERDVLVETDVVSGKDKEDIRTLESEKSIVDSTPYVSDDGPPSLTFSRGKGSDAGNGSGSLSRLSGLGRAARRQLAATLDEFWGHLFDYHGKLTQEASTKKFGILLGIDLRTPSTSVRTDKQAAEILKSPLVRDSMRGAAFLSSSVDMMSPKNETSNLELAYGLQRGPGMGLSSWSQGMQLPNTQLQSSSNSLLEQSARLNSNFSSSYSDNNQFYQPATIHGYQLTSYLKQMNASPSLYSSMPLDPQRLPKSSVSAVPNYADSMMHARNHNLLASLGGTTTQLPATSRVGSMMPERSYYDPSSVDGNENAGSPAYSKKYHSSPDMSGIIAASRAALLNEAKLGAAIGPQSYLSRLAAERSQYASSTARPAAPLAFDELSPPKLQSDIFSAQSSMRPSARSLWAKQPFEQLFGMSSAELSKGDFNLPGRSGGVAKDDFSYKESETKLLQSLRLCIMKLLKLEGSGWLFKQNGGCDEDLIDRVAAAEKLLMQGTAENQLLLHGGDLQQHSSDQAGIQYMRTLPNCGEDCVWRASLVVSFGVWCVRRVLDMSLVESRPELWGKYTYVLNRLQGILDPAFSKPRGALTICTCLQKDTRVRNSPPHSGLTAMGPVPTPIRGAFTTAGVVLEMIKDVEAAVSGRKGRSGTAAGDVAFPKGKENLASVLKRYKRRLASKGQ

SEQ ID NO: 173441 - protein, 1116 aa, Zea Mays
MEGTINACIAGFALLSYVLGLLVSQPQIPLTMNVIFPKISGESAYSLMALLGANIMAHNFYIHSSVVQGQKKSSAVGLGALFHDHLFSILFIFTGIFMVNYVLMNSAAAESTNTLLITFQDVVELMNQIFVNPLAPTIFLVVLLFSSHIISLTSAIGSQVISHHLFGINLPLSGHRLLLKVFAIVPTLYWAKVAGAEGIYQLLIICQIIQAMLLPSSVVPLFRVASSRSIMGAHRVSLHLEILVFLAFLLMLFSNIIFVAEMLFGDSGWMNNLKGYTGSPVVLPYTVLVLVALISVAFSLYLAVTPLRSGSHEAESHEWSVHSQRELLNTSQEREDVKVDNVTYEEDQRSDVVPSPRDVPDSHPELALDYIDTSDTAVESDHDSQQSTAYASTAPETCSSPSFTREESKSVVAVNWPEPLEKVPTSTVMEESTVENVVSRITTERDVLVETDVVSGKDKEDIRTLESEKSIVDSTPYVSDDGPPSLTFSRGKGSDAGNGSGSLSRLSGLGRAARRQLAATLDEFWGHLFDYHGKLTQEASTKKFGILLGIDLRTPSTSVRTDKQAAEILKSPLVRDSMRGAAFLSSSVDMMSPKNETSNLELAYGLQRGPGMGLSSWSQGMQLPNTQLQSSSNSLLEQSARLNSNFSSSYSDNNQFYQPATIHGYQLTSYLKQMNASPSLYSSMPLDPQRLPKSSVSAVPNYADSMMHARNHNLLASLGGTTTQLPATSRVGSMMPERSYYDPSSVDGNENAGSPAYSKKYHSSPDMSGIIAASRAALLNEAKLGAAIGPQSYLSRLAAERSQYASSTARPAAPLAFDELSPPKLQSDIFSAQSSMRPSARSLWAKQPFEQLFGMSSAELSKGDFNLPGRSGGVAKDDFSYKESETKLLQSLRLCIMKLLKLEGSGWLFKQNGGCDEDLIDRVAAAEKLLMQGTAENQLLLHGGDLQQHSSDQAGIQYMRTLPNCGEDCVWRASLVVSFGVWCVRRVLDMSLVESRPELWGKYTYVLNRLQGILDPAFSKPRGALTICTCLQKDTRVRNSPPHSGLTAMGPVPTPIRGAFTTAGVVLEMIKDVEAAVSGRKGRSGTAAGDVAFPKGKENLASVLKRYKRRLASKGQ

SEQ ID NO: 173442 - protein, 1167 aa, Zea Mays
MLDSVGYIWNFQIFGIALGFNLLFEYDDLITGICFATVVPNLLPYAISHLGKKMEGTINACIAGFALLSYVLGLLVSQPQIPLTMNVIFPKISGESAYSLMALLGANIMAHNFYIHSSVVQKKSSAVGLGALFHDHLFSILFIFTGIFMVNYVLMNSAAAESTNTLLITFQDVVELMNQIFVNPLAPTIFLVVLLFSSHIISLTSAIGSQVISHHLFGINLPLSGHRLLLKVFAIVPTLYWAKVAGAEGIYQLLIICQIIQAMLLPSSVVPLFRVASSRSIMGAHRVSLHLEILVFLAFLLMLFSNIIFVAEMLFGDSGWMNNLKGYTGSPVVLPYTVLVLVALISVAFSLYLAVTPLRSGSHEAESHEWSVHSQRELLNTSQEREDVKVDNVTYEEDQRSDVVPSPRDVPDSHPELALDYIDTSDTAVESDHDSQQSTAYASTAPETCSSPSFTREESKSVVAVNWPEPLEKVPTSTVMEESTVENVVSRITTERDVLVETDVVSGKDKEDIRTLESEKSIVDSTPYVSDDGPPSLTFSRGKGSDAGNGSGSLSRLSGLGRAARRQLAATLDEFWGHLFDYHGKLTQEASTKKFGILLGIDLRTPSTSVRTDKQAAEILKSPLVRDSMRGAAFLSSSVDMMSPKNETSNLELAYGLQRGPGMGLSSWSQGMQLPNTQLQSSSNSLLEQSARLNSNFSSSYSDNNQFYQPATIHGYQLTSYLKQMNASPSLYSSMPLDPQRLPKSSVSAVPNYADSMMHARNHNLLASLGGTTTQLPATSRVGSMMPERSYYDPSSVDGNENAGSPAYSKKYHSSPDMSGIIAASRAALLNEAKLGAAIGPQSYLSRLAAERSQYASSTARPAAPLAFDELSPPKLQSDIFSAQSSMRPSARSLWAKQPFEQLFGMSSAELSKGDFNLPGRSGGVAKDDFSYKESETKLLQSLRLCIMKLLKLEGSGWLFKQNGGCDEDLIDRVAAAEKLLMQGTAENQLLLHGGDLQQHSSDQAGIQYMRTLPNCGEDCVWRASLVVSFGVWCVRRVLDMSLVESRPELWGKYTYVLNRLQGILDPAFSKPRGALTICTCLQKDTRVRNSPPHSGLTAMGPVPTPIRGAFTTAGVVLEMIKDVEAAVSGRKGRSGTAAGDVAFPKGKENLASVLKRYKRRLASKGQ

SEQ ID NO: 173443 - protein, 1169 aa, Zea Mays
MLDSVGYIWNFQIFGIALGFNLLFEYDDLITGICFATVVPNLLPYAISHLGKKMEGTINACIAGFALLSYVLGLLVSQPQIPLTMNVIFPKISGESAYSLMALLGANIMAHNFYIHSSVVQGQKKSSAVGLGALFHDHLFSILFIFTGIFMVNYVLMNSAAAESTNTLLITFQDVVELMNQIFVNPLAPTIFLVVLLFSSHIISLTSAIGSQVISHHLFGINLPLSGHRLLLKVFAIVPTLYWAKVAGAEGIYQLLIICQIIQAMLLPSSVVPLFRVASSRSIMGAHRVSLHLEILVFLAFLLMLFSNIIFVAEMLFGDSGWMNNLKGYTGSPVVLPYTVLVLVALISVAFSLYLAVTPLRSGSHEAESHEWSVHSQRELLNTSQEREDVKVDNVTYEEDQRSDVVPSPRDVPDSHPELALDYIDTSDTAVESDHDSQQSTAYASTAPETCSSPSFTREESKSVVAVNWPEPLEKVPTSTVMEESTVENVVSRITTERDVLVETDVVSGKDKEDIRTLESEKSIVDSTPYVSDDGPPSLTFSRGKGSDAGNGSGSLSRLSGLGRAARRQLAATLDEFWGHLFDYHGKLTQEASTKKFGILLGIDLRTPSTSVRTDKQAAEILKSPLVRDSMRGAAFLSSSVDMMSPKNETSNLELAYGLQRGPGMGLSSWSQGMQLPNTQLQSSSNSLLEQSARLNSNFSSSYSDNNQFYQPATIHGYQLTSYLKQMNASPSLYSSMPLDPQRLPKSSVSAVPNYADSMMHARNHNLLASLGGTTTQLPATSRVGSMMPERSYYDPSSVDGNENAGSPAYSKKYHSSPDMSGIIAASRAALLNEAKLGAAIGPQSYLSRLAAERSQYASSTARPAAPLAFDELSPPKLQSDIFSAQSSMRPSARSLWAKQPFEQLFGMSSAELSKGDFNLPGRSGGVAKDDFSYKESETKLLQSLRLCIMKLLKLEGSGWLFKQNGGCDEDLIDRVAAAEKLLMQGTAENQLLLHGGDLQQHSSDQAGIQYMRTLPNCGEDCVWRASLVVSFGVWCVRRVLDMSLVESRPELWGKYTYVLNRLQGILDPAFSKPRGALTICTCLQKDTRVRNSPPHSGLTAMGPVPTPIRGAFTTAGVVLEMIKDVEAAVSGRKGRSGTAAGDVAFPKGKENLASVLKRYKRRLASKGQ

SEQ ID NO: 173444 - protein, 1143 aa, Zea Mays
MIFGIALGFNLLFEYDDLITGICFATVMEGTINACIAGFALLSYVLGLLVSQPQIPLTMNVIFPKISGESAYSLMALLGANIMAHNFYIHSSVVQGQKKSSAVGLGALFHDHLFSILFIFTGIFMVNYVLMNSAAAESTNTLLITFQDVVELMNQIFVNPLAPTIFLVVLLFSSHIISLTSAIGSQVISHHLFGINLPLSGHRLLLKVFAIVPTLYWAKVAGAEGIYQLLIICQIIQAMLLPSSVVPLFRVASSRSIMGAHRVSLHLEILVFLAFLLMLFSNIIFVAEMLFGDSGWMNNLKGYTGSPVVLPYTVLVLVALISVAFSLYLAVTPLRSGSHEAESHEWSVHSQRELLNTSQEREDVKVDNVTYEEDQRSDVVPSPRDVPDSHPELALDYIDTSDTAVESDHDSQQSTAYASTAPETCSSPSFTREESKSVVAVNWPEPLEKVPTSTVMEESTVENVVSRITTERDVLVETDVVSGKDKEDIRTLESEKSIVDSTPYVSDDGPPSLTFSRGKGSDAGNGSGSLSRLSGLGRAARRQLAATLDEFWGHLFDYHGKLTQEASTKKFGILLGIDLRTPSTSVRTDKQAAEILKSPLVRDSMRGAAFLSSSVDMMSPKNETSNLELAYGLQRGPGMGLSSWSQGMQLPNTQLQSSSNSLLEQSARLNSNFSSSYSDNNQFYQPATIHGYQLTSYLKQMNASPSLYSSMPLDPQRLPKSSVSAVPNYADSMMHARNHNLLASLGGTTTQLPATSRVGSMMPERSYYDPSSVDGNENAGSPAYSKKYHSSPDMSGIIAASRAALLNEAKLGAAIGPQSYLSRLAAERSQYASSTARPAAPLAFDELSPPKLQSDIFSAQSSMRPSARSLWAKQPFEQLFGMSSAELSKGDFNLPGRSGGVAKDDFSYKESETKLLQSLRLCIMKLLKLEGSGWLFKQNGGCDEDLIDRVAAAEKLLMQGTAENQLLLHGGDLQQHSSDQAGIQYMRTLPNCGEDCVWRASLVVSFGVWCVRRVLDMSLVESRPELWGKYTYVLNRLQGILDPAFSKPRGALTICTCLQKDTRVRNSPPHSGLTAMGPVPTPIRGAFTTAGVVLEMIKDVEAAVSGRKGRSGTAAGDVAFPKGKENLASVLKRYKRRLASKGQ

SEQ ID NO: 173445 - protein, 1185 aa, Zea Mays
MSVPCCLHWHCHREESCRDMPPRVQPANMYIPWCSSWIVFVDVRADYGICFATVVPNLLPYAISHLGKKMEGTINACIAGFALLSYVLGLLVSQPQIPLTMNVIFPKISGESAYSLMALLGANIMAHNFYIHSSVVQGQKKSSAVGLGALFHDHLFSILFIFTGIFMVNYVLMNSAAAESTNTLLITFQDVVELMNQIFVNPLAPTIFLVVLLFSSHIISLTSAIGSQVISHHLFGINLPLSGHRLLLKVFAIVPTLYWAKVAGAEGIYQLLIICQIIQAMLLPSSVVPLFRVASSRSIMGAHRVSLHLEILVFLAFLLMLFSNIIFVAEMLFGDSGWMNNLKGYTGSPVVLPYTVLVLVALISVAFSLYLAVTPLRSGSHEAESHEWSVHSQRELLNTSQEREDVKVDNVTYEEDQRSDVVPSPRDVPDSHPELALDYIDTSDTAVESDHDSQQSTAYASTAPETCSSPSFTREESKSVVAVNWPEPLEKVPTSTVMEESTVENVVSRITTERDVLVETDVVSGKDKEDIRTLESEKSIVDSTPYVSDDGPPSLTFSRGKGSDAGNGSGSLSRLSGLGRAARRQLAATLDEFWGHLFDYHGKLTQEASTKKFGILLGIDLRTPSTSVRTDKQAAEILKSPLVRDSMRGAAFLSSSVDMMSPKNETSNLELAYGLQRGPGMGLSSWSQGMQLPNTQLQSSSNSLLEQSARLNSNFSSSYSDNNQFYQPATIHGYQLTSYLKQMNASPSLYSSMPLDPQRLPKSSVSAVPNYADSMMHARNHNLLASLGGTTTQLPATSRVGSMMPERSYYDPSSVDGNENAGSPAYSKKYHSSPDMSGIIAASRAALLNEAKLGAAIGPQSYLSRLAAERSQYASSTARPAAPLAFDELSPPKLQSDIFSAQSSMRPSARSLWAKQPFEQLFGMSSAELSKGDFNLPGRSGGVAKDDFSYKESETKLLQSLRLCIMKLLKLEGSGWLFKQNGGCDEDLIDRVAAAEKLLMQGTAENQLLLHGGDLQQHSSDQAGIQYMRTLPNCGEDCVWRASLVVSFGVWCVRRVLDMSLVESRPELWGKYTYVLNRLQGILDPAFSKPRGALTICTCLQKDTRVRNSPPHSGLTAMGPVPTPIRGAFTTAGVVLEMIKDVEAAVSGRKGRSGTAAGDVAFPKGKENLASVLKRYKRRLASKGQ

SEQ ID NO: 173446 - protein, 1173 aa, Zea Mays
MDAPDVQQSMGYKESRGGMPKFFHALGPALLISMGYIDLGKWVAAVEAGSCFGFDLVLLALLFNFTAIVCQYLAACIGTVTGKNLAEICHQEYNQPTCIFLGVQAGLSLLTSELTMIFGIALGFNLLFEYDDLITGICFATVVPNLLPYAISHLGKKMEGTINACIAGFALLSYVLGLLVSQPQIPLTMNVIFPKISGESAYSLMALLGANIMAHNFYIHSSVVQGQKKSSAVGLGALFHDHLFSILFIFTGIFMVNYVLMNSAAAESTNTLLITFQDVVELMNQIFVNPLAPTIFLVVLLFSSHIISLTSAIGSQVISHHLFGINLPLSGHRLLLKVFAIVPTLYWAKVAGAEGIYQLLIICQIIQAMLLPSSVVPLFRVASSRSIMGAHRVSLHLEILVFLAFLLMLFSNIIFVAEMLFGDSGWMNNLKGYTGSPVVLPYTVLVLVALISVAFSLYLAVTPLRSGSHEAESHEWSVHSQRELLNTSQEREDVKVDNVTYEEDQRSDVVPSPRDVPDSHPELALDYIDTSDTAVESDHDSQQSTAYASTAPETCSSPSFTREESKSVVAVNWPEPLEKVPTSTVMEESTVENVVSRITTERDVLVETDVVSGKDKEDIRTLESEKSIVDSTPYVSDDGPPSLTFSRGKGSDAGNGSGSLSRLSGLGRAARRQLAATLDEFWGHLFDYHGKLTQEASTKKFGILLGIDLRTPSTSVRTDKQAAEILKSPLVRDSMRGAAFLSSSVDMMSPKNETSNLELAYGLQRGPGMGLSSWSQGMQLPNTQLQSSSNSLLEQSARLNSNFSSSYSDNNQFYQPATIHGYQLTSYLKQMNASPSLYSSMPLDPQRLPKSSVSAVPNYADSMMHARNHNLLASLGGTTTQLPATSRVGSMMPERSYYDPSSVDGNENAGSPAYSKKYHSSPDMSGIIAASRAALLNEAKLGAAIGPQSYLSRLAAERSQYASSTARPAAPLAFDELSPPKLQSDIFSAQSSMRPSARSLWAKQPFEQLFGMSSAELSKGDFNLPGRSGGVAKDDFSYKESETKLLQSLRLCIMKLLKLEGSGWLFKQNGGCDEDLIDRVAAAEKLLMQGTAENQLLLHGGDLQQHSSDQAGIQYMRTLPNCGEDCVWRASLVVSFGVWCVRRVLDMSLVESRPELWGKYTYVLNRLQGWTII

SEQ ID NO: 173447 - protein, 125 aa, Zea Mays
MTNNSSVPSVFIFLLSIKSYTSLPVDLFQTKGLNVDLLQTSSLELEAIKITVAGTRLGPSYANDHDGSPFVPARTPLSEQGGQAASLAGREAQRHGIRVGVLERGWREGRAEKFQPWSHEGRLRY

SEQ ID NO: 173448 - protein, 148 aa, Zea Mays
MRQGAMSLGFRTCDVLAPWRHTASSACSMKCPSRFCPRIGLRTVFGIVLCEEATALVIVRLHGASGHKSKSQDCTDRVVSGPSYANDHDGSPFVPARTPLSEQGGQAASLAGREAQRHGIRVGVLERGWREGRAEKFQPWSHEGRLRY

SEQ ID NO: 173449 - protein, 92 aa, Zea Mays
MKCPSRFCPRIGLRTVFGIVLCEEATALVIVRLHGASGHKSKSQDCTDRVVSGDTLYGTSMDYLSDFFYLALASVVLCVQSIVHIFVSQESY

SEQ ID NO: 173450 - protein, 229 aa, Zea Mays
MTTAARPTWAPAKGGNEQGGTRIFGPSQKFSSRDLAAHTSLKPRKDGQQTQEELQKRNLREELEERERKHYSSKDKSYAERDRRKSSSHLLLEGSKRETEDKIVPREIDADDSDVEPKSDDESDEDDDDDDTEALMAELERIKKERAEEKLRKERQQAEEEAKMKEAELMRGNPLININNAGSFSVKRRWDDDVVFKNQARGETKTPKRFINDTIRSDFHRKFLQRYMK

SEQ ID NO: 173451 - protein, 94 aa, Zea Mays
MAELERIKKERAEEKLRKERQQAEEEAKMKEAELMRGNPLININNAGSFSVKRRWDDDVVFKNQARGETKTPKRFINDTIRSDFHRKFLQRYMK

SEQ ID NO: 173452 - protein, 434 aa, Zea Mays
MRVDSSSADSEGQSSHPKTTPQAMSTVTTASSPPTYAYKWQRLFAERCNQARIGVSGIPGVTHLIRNAKGGGVRRLPPLSATRHHGCSQSYNAIYSFGDSIADTGNLCTGSGGCPSWLTTGQPPYGNTHFGHPTGRCTDGRVILDFLADHFGLPLLPPSKAIGAGDVRKGANMAIIGATTMDLEFFNKHGLGSSIWNNGPLGTQIQWFQQLMPSICGADCQSYFNSSLFVVGEFGGNDYNAPLFGGKAMAEVRSYVPEIVDRIASGVETLIGLGAVDVVVPGVLPIGCFPLYLTLYPGSSKDGDYDEAGCLRSYNNLSSYHNELLRQAVSGLQSKHGGGVRLMYADFYAQVADMVRSPESYGLQYGLRVCCGAGGQGSYNYYNKARCGMAGSSACGDPEKYLVWDGIHLTEAAYRSIADGWLKGTYCSPGILRR

SEQ ID NO: 173453 - protein, 437 aa, Zea Mays
MRVDSSSADSEGQSSHPKTTPQAMSTVTTASSPPTYAYKWQRLFAERCNQARIGVSGIPGVTHLIRNAKGGGVRRLPPLSATRHHGCSQSYNAIYSFGDSIADTGNLCTGSGGCPSWLTTGQPPYGNTHFGHPTGRCTDGRVILDFLADHFGLPLLPPSKAIGAGDVRKGANMAIIGATTMDLEFFNKHGLGSSIWNNGPLGTQIQWFQQLMPSICGAGDDHCQSYFNSSLFVVGEFGGNDYNAPLFGGKAMAEVRSYVPEIVDRIASGVETLIGLGAVDVVVPGVLPIGCFPLYLTLYPGSSKDGDYDEAGCLRSYNNLSSYHNELLRQAVSGLQSKHGGGVRLMYADFYAQVADMVRSPESYGLQYGLRVCCGAGGQGSYNYYNKARCGMAGSSACGDPEKYLVWDGIHLTEAAYRSIADGWLKGTYCSPGILRR

SEQ ID NO: 173454 - protein, 846 aa, Zea Mays
MASGPPSPSGKPYSRKSHASSKAPSVPSFDAHNGQLLPTVTFSLPSTTTARRELRRRLSSELSQVRAAVKRLNSLPAPAPSSALSATDPSTPHPPYPPASKHKSKKGGGVPQPHLSAEARRKLYAPVFKTCAALLSRLMKHKHSWVFNKPVDASALGLHDYHTIITKPMDLGTVKSKLGAGQYKSPREFAGDVRLTFQNAMTYNPKGQDVHFMAEQLLNMFEEKWPEIEAEIAQLSPQPPTPSSAAPKKPKPKEIDNSRPLERSDSTVHAAGIEATPKTHTGRPQVLKKPKAREPNKRDMTFWEKQRLSNNLQDLPPEKLDNVVQIIKKRNLSLSQHDDEIEVDIDSFDVETLWELDRFVTNYRKSITKNKRKAELSAVRPDEADPDQEPEKVEHVRQGKADQDQIPAVQEPIPEPETVDVDPPKESAAGGPVIRTQIVHQQMVLMLGNHPERSIYKPAAAFWHMQNWLFVIQILTIFGKLRGEEVPVHGIGEGEASSNLNGDLMPCYKKTPQVGAPWVFFFMMKLSRPPSEYHTSLKKLAAIVQGIAKKQARVFPVSFVRRPLRLFPVGTRARTHRVIPGSGQMLPLRRLPPLPLPRGPAPRRLLSAAASAAAVSPLPWPGLSAWRRAPPSDLRTWGPNGPCASGDVDEPAADAGAASSLAEMGALVLSTADPLAKARRTHAAFSRWAAGLPIGQATAPDHPARPDKPLVVTQKEITTHKEMGVPLNAYMLHNLAHVELNAIDLAWDTVVRFAPLRDTLGDGFFADFARVADDESRHFRWYSQRLGELGFSYGDMPVHNLLWRECAKSSSDVSARLAVIPLVQVPHHCRFLLCDACPVYMLYFCS

SEQ ID NO: 173455 - protein, 566 aa, Zea Mays
MLIHLRKVQQMIMRDVWVNHHLVIWKIRRERMLVDQVVLEALAVTRVHPLVIRTQIVHQQMVLMLGNHPERSIYKPAAAFWHMQNWLFVIQILTIFGKLRGEEVPVHGIGEGEASSNLNGDLMPCYKKTPQVGAPWVFFFMMKLSRPPSEYHTSLKKLAAIVQGIAKKQARVFPVSFVRRPLRLFPVGTRARTHRVIPGSGQMLPLRRLPPLPLPRGPAPRRLLSAAASAAAVSPLPWPGLSAWRRAPPSDLRTWGPNGPCASGDVDEPAADAGAASSLAEMGALVLSTADPLAKARRTHAAFSRWAAGLPIGQATAPDHPARPDKPLVVTQKEITTHKEMGVPLNAYMLHNLAHVELNAIDLAWDTVVRFAPLRDTLGDGFFADFARVADDESRHFRWYSQRLGELGFSYGDMPVHNLLWRECAKSSSDVSARLAVIPLVQEARGLDAGPRLVQRLSGFGDHRSADIVARVAEEELAHVSVGLYWFLKVCQMMGREPGDTFKDLIKEYSVVLKGPFNYPARDEAGIPREWYDEKFKQEAAQKLSEVHDRLACIVEMEKESASLND

SEQ ID NO: 173456 - protein, 904 aa, Zea Mays
MEKLEESETKVGFLWYEHIYKLDKGPETQMHTLAKNIAGTSLVYTKYFKMIEEGTYYILEICSCTSHVIVQIRKGKLSFEQLNNIKYRALYGITITKLTQGVTADEEELMDEGIRSLIPFMSWSIQKENPLLRLTVENCELSSIGVIILLDCLTNAKQLLDVLSIADNHLGSPVAAALARFLGSHVRALNATDIGLGTVGFQILEETLPTEVALSHINISVSLGSAPAIADSLAIRVGGQAMSRFWKPGSEKPSTLLVDDEEGGVVFLPSSSSVSSSGFGYASLERQRQRLPVYKYRKAILYLVERHATTIVVGETGSGKSTQIPQYLKEAGWADGGRLIGCTQPRRLAVQMVASRVAEEVGVKLGEEVGYTIRFEDQTNPGMTMIKFLTDGVLIREMMEDPLLTKYSVIMVDEAHERSISTDMLLGLLKKIQRRRPELRLIISSATIEARSMSTFFNIRRKNSLLGSSDNLPSPEPAVLSVEIHYVEEPVSDYLQATVNTVLLIHEKEPPGDILVFLTGQDDIEAAVKLLNEEIQHLGRHYLDLLILPLYSGLPRGDQDLIFAPTSKGKRKVVLSTNIAETSLTLEGVVYVVDSGFSKQKCYNPISDIESLVVAPISKASARQRAGRAGRVRPGKCFRIYTEEYYLTEMQSEGIPEMQRSNLVSCIIQLKALGIDNILGFDWPASPSPEAMIRALEVLFSLGILDEDAKLTVPIGFQVAEIPLDPMISKMILSANDFGCSDEILTIASFLSVQSVWVSVRGVKKEFDEAKLRFAAAEGDHVTFLNIYKGFHQSGKSSQWCYKNFLNYQALAVRKAIIAGSFTNACHLEEYSQNGMYKTIRTLQEVYIHPSSVLFRVNPKWVVYQSLVSTDKHYMRNVIAIEPSWLTEAAPHFYQFRAFNPAPH

SEQ ID NO: 173457 - protein, 933 aa, Zea Mays
MEKLEESETKVGFLWYEHIYKLDKGPETQMHTLAKNIAGTSLVYTKYFKMIEEGTYYILEICSCTSHVIVQIRKGKLSFEQLNNIKYRALYGITITKLTQGVTADEEELMDEGIRSLIPFMSWSIQKENPLLRLTVENCELSSIGVIILLDCLTNAKQLLDVLSIADNHLGSPVAAALARFLGSHVRALNATDIGLGTVGFQILEETLPTEVALSHINISVSLGSAPAIADSLAIRVGGQAMSRFWKPGSEKPSTLLVDDEEGGVVFLPSSSSVSSSGFGYASLERQRQRLPVYKYRKAILYLVERHATTIVVGETGSGKSTQIPQYLKEAGWADGGRLIGCTQPRRLAVQMVASRVAEEVGVKLGEEVGYTIRFEDQTNPGMTMIKFLTDGVLIREMMEDPLLTKYSVIMVDEAHERSISTDMLLGLLKKIQRRRPELRLIISSATIEARSMSTFFNIRRKNSLLGSSDNLPSPEPAVLSVEIHYVEEPVSDYLQATVNTVLLIHEKEPPGDILVFLTGQDDIEAAVKLLNEEIQHLGRHYLDLLILPLYSGLPRGDQDLIFAPTSKGKRKVVLSTNIAETSLTLEGVVYVVDSGFSKQKCYNPISDIESLVVAPISKASARQRAGRAGRVRPGKCFRIYTEEYYLTEMQSEGIPEMQRSNLVSCIIQLKALGIDNILGFDWPASPSPEAMIRALEVLFSLGILDEDAKLTVPIGFQVAEIPLDPMISKMILSANDFGCSDEILTIASFLSVQSVWVSVRGVKKEFDEAKLRFAAAEGDHVTFLNIYKGFHQSGKSSQWCYKNFLNYQALKKVVDIRGQLLRIVKSFGIQLKSCDRDMQAVRKAIIAGSFTNACHLEEYSQNGMYKTIRTLQEVYIHPSSVLFRVNPKWVVYQSLVSTDKHYMRNVIAIEPSWLTEAAPHFYQFRAFNPAPH

SEQ ID NO: 173458 - protein, 227 aa, Zea Mays
MPALHRRKAPFQGLPHHSRPRPLSGTIPAFQGLPPPPRSAALSPVLLEYGTASPPRDPCLLPPRSLVPPATARNSEPHSPPPYQSPHLRRSPRPLSTTPGPRHRCRPSVSSSPPTSACGIRYRKKRQEENTSPQPRCSPFTTQAQSIAPSTRAPATTAPSLLMVMPPRVVLRSRPRCRGLSYEADTPCGCPHKGFGSCSSKLLRVCFHIRHSGSPHGSRRRVTPDSA

SEQ ID NO: 173459 - protein, 195 aa, Zea Mays
MKYLVPLPPPFGLALIGKVYMVLAAACSLSMGPAVTLVDGLDGLAGGIAALALIALSVAALPICSEFSVFGASMSGACIGFLFHNRYRASVVMSRVGSFALGGAVATIASCSGMFLPMLIACSLFFVELLFAILQVPFHMAKNSFRGTSRHPLKIRPSHYYLRLLGIKEPYIVAGAYMISCFLTLLAGYLGLVSA

SEQ ID NO: 173460 - protein, 157 aa, Zea Mays
MGGLFFVPVGIFVAKREVGSNSNGVNGAAMITLIFAMVGLLDDISSLAVDHNYKIPRWIRFLVQIVAGIYFSNWLGSTDISTPYSMKYLVPLPPPFGLALIGKVYMVLAAACSLSMGPAVTLVDGLDGLAGGIAALALIALSVAALPICSDTGPPWL

SEQ ID NO: 173461 - protein, 98 aa, Zea Mays
MKEGDFEIFGTVVAAVVVAGLLMELGTVIVAALTLAPRQFARLLHVAASKVLSCHSLELRAQSYVASSRSSLKKCIHEISEHEFRDNNVAMNKNWLQK

SEQ ID NO: 173462 - protein, 87 aa, Zea Mays
MVALQAHEIRAIFSCHFCSLTQVLFFLPFLLPRSGHLTTSKPSPVSSAFLAIATTRRLETAAAMATAQKEDLLREITKKEEESTCFE

SEQ ID NO: 173463 - protein, 73 aa, Zea Mays
MMHRTAEAFSLWRRLPVNNPVQLAQSQLDPTRFTRGFTGVLEGLTLTGSVPKIIPLQFRAMMAPSACDSEFKS

SEQ ID NO: 173464 - protein, 438 aa, Zea Mays
MLCLSSGCFFASTSFLPSSFSMYAVTLSSALFLLEKYAGAVSVAAAGVILGWPFSILVFLPVTVYSLIRGSFRRVFLSGFVTSLCFLVLSFVADYYCYGRLTFSVFNLLKYNVIGGGESHLYGTEGFSFYFRNGFNNFNFAFILALLFLGVVPFARKKYAPDLLIVVSPVYIWLAFMSLQAHKEERFLYPIYSLICVAAAAVIDSLPDFFHDKYSSDQSIFEKIAKGLRPLILGFILCASHSRTFSMLNGYGAPLQIYQHLEHHDDTGPGSILCVGSEWHRYPSSFFIPSYISEVRWIDDGFRGLLPFPFNETLGGTTAAPSYFNNKNKAAEGQYLKDIGACNLLVELDLRRPYPSRGSDLSTWEALAALPFLDRELSPALYRSFFIPYRWQQNNVFGLYKLLRSLQIFTAIDFLIPMCNGVPIFVPLILPSYKFITR

SEQ ID NO: 173465 - protein, 192 aa, Zea Mays
MLNGYGAPLQIYQHLEHHDDTGPGSILCVGSEWHRYPSSFFIPSYISEVRWIDDGFRGLLPFPFNETLGGTTAAPSYFNNKNKAAEGQYLKDIGACNLLVELDLRRPYPSRGSDLSTWEALAALPFLDRELSPALYRSFFIPYRWQQNNVFGLYKLLRSLQIFTAIDFLIPMCNGVPIFVPLILPSYKFITR

SEQ ID NO: 173466 - protein, 262 aa, Zea Mays
MSLQAHKEERFLYPIYSLICVAAAAVIDSLPDFFHDKYSSDQSIFEKIAKGLRPLILGFILCASHSRTFSMLNGYGAPLQIYQHLEHHDDTGPGSILCVGSEWHRYPSSFFIPSYISEVRWIDDGFRGLLPFPFNETLGGTTAAPSYFNNKNKAAEGQYLKDIGACNLLVELDLRRPYPSRGSDLSTWEALAALPFLDRELSPALYRSFFIPYRWQQNNVFGLYKLLRSLQIFTAIDFLIPMCNGVPIFVPLILPSYKFITR

SEQ ID NO: 173467 - protein, 267 aa, Zea Mays
MSLSSARQRRATAASPPTDDGYAKDAKDRRRRPGGDGDSEDEGIKWFLPFLALGLLRHMSASSNLIHDCDEVFNYWEPLHFLLYRSGFQTWEYSSDFALRSYLYLFFHALVAGPASLIFGEHKVRVFYSVRIFLGLISTITETVLVVALSRRYGKRLACYVLAMLCLSSGCFFASTSFLPSSFSMYAVTLSSALFLLEKYAGAVSVAAAGVILGWPFSILVFLPVTVYSLIRGSFRRVFLSGFVTSLCFLVSLSNLFIDMCCSCSCY

SEQ ID NO: 173468 - protein, 264 aa, Zea Mays
MVMDILGPSLWDVWNNNSHSMSVEMVACIGIEAISILEKMHSKGYVHGDVKPENFLLGPPGTPEEKKLFLVDLGLATKWKDAGTGHHVEYDQRPDIFRGTVRYASVHAHLGRTGSRRDDLESLAYTLIFLLRGRLPWQGYQGENKGFLVCKKKMATSPESLCGICPQPFRNFVEYVVNLKFDEEPNYARCISLFDGIVGPNPDIRPINTDGAQKLVYQVGQKRGRLIVDENDDEQPKKKIRMGMPATQWISVYNARRPMKQRSA

SEQ ID NO: 173469 - protein, 244 aa, Zea Mays
MGMPATQWISVYNARRPMKQRYHYNVADNRLVQHIQKGNEDGLFISSVASSSNLWALIMDAGTGFTSQVYELSSYFLHKEWIMEQWERNFYITALAGANNGSSLVIMSRGTQYAQQSYKVSDTFPFKWINKKWKEGFYVTAMATAGSRWAVVMSRNAGFTSQVVELDFLYPSEGIHMRWDNGYRITATAATWDQAAFILSIPRRKPTDETQETLRTSAFPSQHVKDKWSNNLYLASICYGRSVS

SEQ ID NO: 173470 - protein, 304 aa, Zea Mays
MATSPESLCISLFDGIVGPNPDIRPINTDGAQKLVYQVGQKRGRLIVDENDDEQPKKKIRMGMPATQWISVYNARRPMKQRYHYNVADNRLVQHIQKGNEDGLFISSVASSSNLWALIMDAGTGFTSQVYELSSYFLHKEWIMEQWERNFYITALAGANNGSSLVIMSRGTQYAQQSYKVSDTFPFKWINKKWKEGFYVTAMATAGSRWAVVMSRNAGFTSQVVELDFLYPSEGIHMRWDNGYRITATAATWDQAAFILSIPRRKPTDETQETLRTSAFPSQHVKDKWSNNLYLASICYGRSVS

SEQ ID NO: 173471 - protein, 1173 aa, Zea Mays
MLTKFETKSNRVKGLAFHPRRPWILSSLHSGVVQMWDYRMGTLLNRFDEHDGPVRGVHFHATQPLFVSGGDDYKIKVWNYKTQRCLFTLHGHLDYIRTVQFHHECPWIVSASDDQTIRIWNWQSRTCVAVLTGHNHYVMCASFHPKEDLVVSASLDQTVRVWDIGALRKKSASPADDILRLTQMNTDLFGDTKAWEVDTLRGHMNNVSCVMFHAKQDIIVSNSEDKSIRVWDATKRTGIQTFRREHDRFWILAAHPEMNLLAAGHDSGMIVFKLERERPAFCVSGDTVFYVKDRFLKFFEYSTQKEVQLAPIRRPGSVSLNQSPRTLSYSPTENAVLICFDADGGSYELYIAPKDSAGKADYLQEAKKGAGGSAVFVARNRFAVLERSSNQVLVKNLKNEIMKKSPLPIATDAIYYAGTGNLLCKAEDRVAIFDLQQRLVLGELQTPAVKYIVWSSDMESVAFLSKHVVVIASKKLVHQCTLHETTRVKSGAWDENGVFIYTTLNHMKYCLPNGDSGIIKTLDVPIYITRVIGNNIFCLDRDGKNKLIAVDATEYIFKLALLRKRYDHVMSMIKNSQLCGQAVISYLQQKGFPEVALHFVKDEKTRFNLALESGNIQIAVASAKEIDDKDHWYRLGIEALRQGNVGIVEYAYQRTKSFERLAFLYLITGYLDKVGFMYKIAGQNNNLMGQFHNALYLGHVNKRVEILENAGQLPLAYVLAVTHGLTEIAERIAAELGEHVPLLPEGKSHSLLIPPAPLTACGDWPLLRVVRGIFEGGLDSTGRAELEEDDEASGADWGDEDLDIVDASEVVANGGDYFDAEGEPNEEEGEEGGWDLEDLELPPDTETPKSAGNARSPVFVTPTAGIPVSQIWTQKSSLAGEHAAAGNFDTAMRLLSRQLGIKNFAPLKPLFLDLHMGSHSYLRALAAAPVISVAVEKGWNESASPNVRGPPALIFSFSQMEDRLKAAYKATTEGRFPEALRQFLSILHTIPVIVVDSRREVDEVKELIEIVREYILGLKMELKRKELRDDVTRQQELAAYFTNCKLQRIHMRLVLSSAMALCFKQKNYATAAHFARMLLENSPQEAQARKARQVLQACQDKDDSHQLNYDFRNPFIVCGATYVPIYRGQKDISCPYCGSRFAPSIEGQLCTICELAIVGADASGLVCSPTQMK

SEQ ID NO: 173472 - protein, 1196 aa, Zea Mays
MLTKFETKSNRVKGLAFHPRRPWILSSLHSGVVQMWDYRMGTLLNRFDEHDGPVRGVHFHATQPLFVSGGDDYKIKVWNYKTQRCLFTLHGHLDYIRTVQFHHECPWIVSASDDQTIRIWNWQSRTCVAVLTGHNHYVMCASFHPKEDLVVSASLDQTVRVWDIGALRKKSASPADDILRLTQMNTDLFGGIDAVVKYVLEGHDRGVNWASFHPTLPLIVSGADDRQVKIWRMNDTKAWEVDTLRGHMNNVSCVMFHAKQDIIVSNSEDKSIRVWDATKRTGIQTFRREHDRFWILAAHPEMNLLAAGHDSGMIVFKLERERPAFCVSGDTVFYVKDRFLKFFEYSTQKEVQLAPIRRPGSVSLNQSPRTLSYSPTENAVLICFDADGGSYELYIAPKDSAGKADYLQEAKKGAGGSAVFVARNRFAVLERSSNQVLVKNLKNEIMKKSPLPIATDAIYYAGTGNLLCKAEDRVAIFDLQQRLVLGELQTPAVKYIVWSSDMESVAFLSKHVVVIASKKLVHQCTLHETTRVKSGAWDENGVFIYTTLNHMKYCLPNGDSGIIKTLDVPIYITRVIGNNIFCLDRDGKNKLIAVDATEYIFKLALLRKRYDHVMSMIKNSQLCGQAVISYLQQKGFPEVALHFVKDEKTRFNLALESGNIQIAVASAKEIDDKDHWYRLGIEALRQGNVGIVEYAYQRTKSFERLAFLYLITGYLDKVGFMYKIAGQNNNLMGQFHNALYLGHVNKRVEILENAGQLPLAYVLAVTHGLTEIAERIAAELGEHVPLLPEGKSHSLLIPPAPLTACGDWPLLRVVRGIFEGGLDSTGRAELEEDDEASGADWGDEDLDIVDASEVVANGGDYFDAEGEPNEEEGEEGGWDLEDLELPPDTETPKSAGNARSPVFVTPTAGNFDTAMRLLSRQLGIKNFAPLKPLFLDLHMGSHSYLRALAAAPVISVAVEKGWNESASPNVRGPPALIFSFSQMEDRLKAAYKATTEGRFPEALRQFLSILHTIPVIVVDSRREVDEVKELIEIVREYILGLKMELKRKELRDDVTRQQELAAYFTNCKLQRIHMRLVLSSAMALCFKQKNYATAAHFARMLLENSPQEAQARKARQVLQACQDKDDSHQLNYDFRNPFIVCGATYVPIYRGQKDISCPYCGSRFAPSIEGQLCTICELAIVGADASGLVCSPTQMK

SEQ ID NO: 173473 - protein, 238 aa, Zea Mays
MERGGGGGDEMMMTSGATGRIVPVFRSVLSRRALLRVAVALHSLFLWLLLLARGLRRHRAGTGADASASEAGAGAGTWSARRWRLRLQAAEEEDVRRRRALAEEVPMEEDRGTRWATFLVTGARRNALFCRLWAPAVDEMRGILVIIHGLNEHSGRYVHFAEQLTACGFGVYAMDWIGHGGSDGLHGYVPSLDYVIEDIEVLVDRILMENPGVPCFLLGHSTGGAVVLKRNGAKTLAK

SEQ ID NO: 173474 - protein, 77 aa, Zea Mays
MWAWGCVRDREAPSCPRSRSPPRRSCSRSPAVIVAPTSPVVTAASTSTPMGSGCGPQISFQTAKLGGDSPTRADLPW

SEQ ID NO: 173475 - protein, 70 aa, Zea Mays
MARRIAGVAALNLLSVLMAATCAAGRDFYVGGRAGWAPNPAEPFNAWAERNRFQVNDTLGTARTRTPCCW

SEQ ID NO: 173476 - protein, 263 aa, Zea Mays
MLNMMTDLSCGPSSKAKGGQPAAAPGSGGDRQGRGKIEIKRIENTTNRQVTFCKRRNGLLKKAYELSVLCDAEVALVVFSSRGRLYEYANNSVKSTIERYKKANSDTSNSGTVAEVNAQHYQQESSKLRQAIDSLQNANSRTIVGDSIHTMGLRELKQMEGKLEKAINKIRARKNELLYAEVEYMQRREMDLQTDNMYLRSKIAENNNETGQPAMNMIGVPSTSEYDHMASFVDSRNFLQVNMQQQQPQHYSHQLQPTTLQLG

SEQ ID NO: 173477 - protein, 138 aa, Zea Mays
MVWKGKKLHLRMDSNIYDKKKWASLLYCSVKSTIERYKKANSDTSNSGTVAEVNAQHYQQESSKLRQAIDSLQNANRTIVGDSIHTMGLRELKQMEGKLEKAINKIRARKNELLYAEVEYMQRREMDLQTDNMYLRSK

SEQ ID NO: 173478 - protein, 509 aa, Zea Mays
MRSLRLILLRVTKEDCYPNSVSYKWLSRNFSVSSNDAKRLLQDFVNKHGTDLQVIYSVSGWLKSNPQNYCVKLISGPKLEEARQIFKDSCSVQIYSIQACIPKDTAVLWNPEFVQAEELFNQPFDYENCLRDNRFCGVLNSFVKRTSNGKHVSSLPPKPLNSAAAAAQSKPSVTPKEQFVTARRQDLPVSSKQGADTKSEKDNSTVLDKAGNGPVVKEQSVDAHASKSKAQNGKAMPSNGGSLANMWGRASAKPKPPSTTNSTAVASVAATADAQICAKEEADGNSSDDEHGIKYKRGSTNANNRKRRAVFDYSDDEEDDNIVSIASPELPKQHTPDPVVGIAEDAEVNQKNLETEHHVPNNGKGSSTGVDSDFTSECKIKTIDPMNDSGITLKEKSSDPPINDKKQDSAAEPASTSPKRRKVLKTRIDERGREVTEVVWENEASADDKAEQNVNTIDATASGATVPSKPKPATNADKSKAPSKTAAGNKKAAKAGAKQGSIMSFFKKA

SEQ ID NO: 173479 - protein, 90 aa, Zea Mays
MDPTGRECTHHHGLGGCELGTGGVASQQTADSNVGRELESQSHPIVSVSRLVNTCLLLVLQDDDSYTSLELESQSHPCGRPKPAAKQLNA

SEQ ID NO: 173480 - protein, 452 aa, Zea Mays
MVSYKWLSRNFSVSSNDAKRLLQDFVNKHGTDLQVIYSVSGWLKSNPQNYCVKLISGPKLEEARQIFKDSCSVQIYSIQACIPKDTAVLWNPEFVQAEELFNQPFDYENCLRDNRFCGVLNSFVKRTSNGKHVSSLPPKPLNSAAAAAQSKPSVTPKEQFVTARRQDLPVSSKQGADTKSEKDNSTVLDKAGNGPVVKEQSVDAHASKSKAQNGKAMPSNGGSLANMWGRASAKPKPPSTTNSTAVASVAATADAQICAKEEADGNSSDDEHGIKYKRGSTNANNRKRRAVFDYSDDEEDDNIVSIASPELPKQHTPDPVVGIAEDAEVNQKNLETEHHVPNNGKGSSTGVDSDFTSECKIKTIDPMNDSGITLKEKSSDPPINDKKQDSAAEPASTSPKRRKVLKTRIDERGREVTEVVWENEASADDKAEQNVNTIDATASGRPAALPIN

SEQ ID NO: 173481 - protein, 322 aa, Zea Mays
MEAANKPISSICFKPGNEDFVYISAGNEILSFDVRMGTQSKPLETYNYNRDEINQIAVSSKGFLAAADDSGDVKIVNTIQKCLYKRLREAHTSICSSVQFIPWRPWTAITGGLDSKLAAWDFSKGRTLFSIDYGSPELQNGSSSGSAGQCFNPAFVHSVAVSEEGILGGLYKVCAVARGDGAVDVVDLEYELAPAKSKGPPRAAILTTRSKGAELGDGSCNQSRAKRIHLDYTMGGHTAAVSCVAFSAFGEKGKFLISGGNDASVKLWDWSKGFYSETNSKVDLVLDIDVKKKVNWLCTAPTDSDNLIVCDTSKVVKVYSFR

SEQ ID NO: 173482 - protein, 385 aa, Zea Mays
MLLRPSRGLSCLQPFSLHQSRAAMSETESAAAAPVAAAESKPRRLRGHKKGAVTCCVASSARPGVVASSGEDGCLCWFDLRTKDALLTMEAANKPISSICFKPGNEDFVYISAGNEILSFDVRMGTQSKPLETYNYNRDEINQIAVSSKGFLAAADDSGDVKIVNTIQKCLYKRLREAHTSICSSVQFIPWRPWTAITGGLDSKLAAWDFSKGRTLFSIDYVAVSEEGILGGLYKVCAVARGDGAVDVVDLEYELAPAKSKGPPRAAILTTRSKGAELGDGSCNQSRAKRIHLDYTMGGHTAAVSCVAFSAFGEKGKFLISGGNDASVKLWDWSKGFYSETNSKVDLVLDIDVKKKVNWLCTAPTDSDNLIVCDTSKVVKVYSFR

SEQ ID NO: 173483 - protein, 366 aa, Zea Mays
MLLRPSRGLSCLQPFSLHQSRAAMSETESAAAAPVAAAESKPRRLRGHKKGAVTCCVASSARPGVVASSGEDGCLCWFDLRTKDALLTMEAANKPISSICFKPGNEDFVYISAGNEILSFDVRMGTQSKPLETYNYNRDEINQIAVSSKGFLAAADDSGDVKICSSVQFIPWRPWTAITGGLDSKLAAWDFSKGRTLFSIDYVAVSEEGILGGLYKVCAVARGDGAVDVVDLEYELAPAKSKGPPRAAILTTRSKGAELGDGSCNQSRAKRIHLDYTMGGHTAAVSCVAFSAFGEKGKFLISGGNDASVKLWDWSKGFYSETNSKVDLVLDIDVKKKVNWLCTAPTDSDNLIVCDTSKVVKVYSFR

SEQ ID NO: 173484 - protein, 215 aa, Zea Mays
MAAHQDSAASGSGPPRRPRVLLAASGSVAAIKFEVLCRSVAEWADVHAVATASALEFIDVASFPGGVPLYTDDQEWSSWKRVGDKVLHIELRRWADVLVIAPLSANTLAKVRRTHASWSSRSPSPVAADNSACCQVAGGLCDNLLTCVVRAWDYSKPVYVAPAMNTFMWGNPFTARHLAVLRDLGMSVVPPVNGAMAEPSEICKTLMLFFGPQHL

SEQ ID NO: 173485 - protein, 371 aa, Zea Mays
MGESSILLINGSLQRRVHGLVGAFFKSPQLKAQVTADMQRRLAPALAAWKVRCASAPPLRIQDHAKTIVFEILVRGLIGLEAGPEMQQLKHQFQEFIVGLMSLPIKLPGTRLYRSLQAKKRMATLIQGIIQEKRRRRRAALEDGGEGEGEAGPPRDVIDVLISGGDELTDELISDNMIDLMIPAEDSVPVLITLAVKYLSECPLALQQLEEENMQLKRRKTDVGETLQWTDYMSLSFTQHVITETLRMGNIINGIMRKAVRDVEVKGHLIPKGWCVFVYFRSVHLDDKRYDEPYRFNPWRWKEKDTSTMGFTPFGGGQRLCPGLDLARLEASIFLHHLVTSFRWVAEEDHIVNFPTVRLKRGMPVRLTSKD

SEQ ID NO: 173486 - protein, 169 aa, Zea Mays
MGSMKHLHEENMQLKRRKTDVGETLQWTDYMSLSFTQHVITETLRMGNIINGIMRKAVRDVEVKGHLIPKGWCVFVYFRSVHLDDKRYDEPYRFNPWRWKEKDTSTMGFTPFGGGQRLCPGLDLARLEASIFLHHLVTSFRWVAEEDHIVNFPTVRLKRGMPVRLTSKD

SEQ ID NO: 173487 - protein, 420 aa, Zea Mays
MASPPHSVEVRTPGDSPRPTAALLSPSVAAPQPSNASRLLLLLTAAVAAATAFVLLRPPITVVTAASATARPLSKLSKPVVLLISSDGFRFGYQYKAPLPHIRRLFANGTSAAEGLIPVFPTLTFPNHYSIVTGLYPSSHGIINNYFPDPISGDYFTMKNHDPKWWLGEPLWATAAAQGVLSATFFWPGSEVTKGSWNCPDKYCRHYNGSVPFEERVDTILGYFDLPPNQMPQFMTLYFEDPDHQGHQVGPDDPSITDAVVHIDEMLGRLIAGLEARGMFEDVNIILVGDHGMVGTCDRKLVFLEELAPWIELKSDWVLSVTPLLAIRPPDGVSPAEVVAKMNEGLGSGKVKNGEYLKMYLKEELPTRLHYSESYRIPPIIGLVGEGYKIEMKRSKRNECGGAHGFIVINLNMDKKKRPK

SEQ ID NO: 173488 - protein, 266 aa, Zea Mays
MLFSQAAGGGDGGAGLHLPPGVLDPSQTLGGGHGMSLQELCLKREQQQQQQFAPSSWLTAQHHQQELELPGSAVFGLARPLDQQEYMGNSTTESTAGLSGFVGFSPSAAGGAAASAHMSATALLQKAAQMGATLSRPSNQGQMAGTHSSSTTNAGTGTANAAAAAASNVPGTGAAGALGFGSPHHFGAEERTTRPADRDAGNGSGNAAAVAAGGGNEGLTRDFLGLRAFSHGDILSMAGFDPCMSSASPAAYEQGHHHPSSKQWHV

SEQ ID NO: 173489 - protein, 134 aa, Zea Mays
MHLFISGGRRRHRDPNGAPRPRGRGEVTRDGGKGDGDLLLLHSFPRPIWTVGVAWTRRSLLAAAAGWASGAAAARGATATRPRRDDWREGGRRTTGAAESRAKVGFGSHRWMGGRAQDPTLYYARVLRETGPQF

SEQ ID NO: 173490 - protein, 308 aa, Zea Mays
MEFSFGTKRWVQKELKDKGEEVEVKQETNETDGYALGLHAPGFFDKVLHVQKCFLQSEPADKVLAVVQETWMDPAIGLTPYDVHKHVGFLKHLMIRTGRNISTGTPEVMVNFVTSCYKPDVLMPLVDKITKIPEVADVLYKLIEDSAGLKGDGSEIVLDLFCGTGTIGLTFARRAKHIYGYEVVPEAIEDARKNAKLNGINNATFVQGDLNKINESFGKEFPKPDIIISDPNRPGMHMKLIKWLLEVKAPRIVYVSCNPATCARDLDYLCHGVEEKDLRGFYELKSVIPVDMFPHTPHIECVCLLELR

SEQ ID NO: 173491 - protein, 228 aa, Zea Mays
MVRRLRRGAFAEAAKLRTLEPHHDAIEAPCPLAADCGGCKTQSLAYAAQIRHKHHQVRDLLVNFGKFDPKRLESSEPDDILKPTVQCDEIFRYRNKMEFSFGTKRWVQKELKDKGEEVEVKQETNETDGYALGLHAPGFFDKVLHVQKCFLQSEPADKVLAVVQETWMDPAIGLTPYDVHKHVGFLKHLMIRTGRLMFFTSLLKILLGLKEMALKLFLICFVELEPLV

SEQ ID NO: 173492 - protein, 264 aa, Zea Mays
MAAHAVTPLTICCLRRGVPLNHSRRLLAVAAAAPESPAPTPAPSQLPLPPVPPRKGYFPKRGETVELTCEALAFKGKGVCKVAGSTFVLLCDGAPCPLAADCGGCKTQSLAYAAQIRHKHHQVRDLLVNFGKFDPKRLESSEPDDILKPTVQCDEIFRYRNKMEFSFGTKRWVQKELKDKGEEVEVKQETNETDGYALGLHAPGFFDKVLHVQKCFLQSEPADKVLAVVQETWMDPAIGLTPYDVHKHVGFLKHLMIRTGRLVS

SEQ ID NO: 173493 - protein, 360 aa, Zea Mays
MEFSFGTKRWVQKELKDKGEEVEVKQETNETDGYALGLHAPGFFDKVLHVQKCFLQSEPADKVLAVVQETWMDPAIGLTPYDVHKHVGFLKHLMIRTGRNISTGTPEVMVNFVTSCYKPDVLMPLVDKITKIPEVVSVINNVNSSVGNSSVGEQEYTLYGKPNITEMLRGLAFQISANSFFQTNTKQADVLYKLIEDSAGLKGDGSEIVLDLFCGTGTIGLTFARRAKHIYGYEVVPEAIEDARKNAKLNGINNATFVQGDLNKINESFGKEFPKPDIIISDPNRPGMHMKLIKWLLEVKAPRIVYVSCNPATCARDLDYLCHGVEEKDLRGFYELKSVIPVDMFPHTPHIECVCLLELR

SEQ ID NO: 173494 - protein, 536 aa, Zea Mays
MAAHAVTPLTICCLRRGVPLNHSRRLLAVAAAAPESPAPTPAPSQLPLPPVPPRKGYFPKRGETVVLLCDGALPGERLIARVRRLRRGAFAEAAKLRTLEPHHDAIEAPCPLAADCGGCKTQSLAYAAQIRHKHHQVRDLLVNFGKFDPKRLESSEPDDILKPTVQCDEIFRYRNKMEFSFGTKRWVQKELKDKGEEVEVKQETNETDGYALGLHAPGFFDKVLHVQKCFLQSEPADKVLAVVQETWMDPAIGLTPYDVHKHVGFLKHLMIRTGRNISTGTPEVMVNFVTSCYKPDVLMPLVDKITKIPEVVSVINNVNSSVGNSSVGEQEYTLYGKPNITEMLRGLAFQISANSFFQTNTKQADVLYKLIEDSAGLKGDGSEIVLDLFCGTGTIGLTFARRAKHIYGYEVVPEAIEDARKNAKLNGINNATFVQGDLNKINESFGKEFPKPDIIISDPNRPGMHMKLIKWLLEVKAPRIVYVSCNPATCARDLDYLCHGVEEKDLRGFYELKSVIPVDMFPHTPHIECVCLLELR

SEQ ID NO: 173495 - protein, 518 aa, Zea Mays
MAAHAVTPLTICCLRRGVPLNHSRRLLAVAAAAPESPAPTPAPSQLPLPPVPPRKGYFPKRGETVELTCEALAFKGKGVCKVAGSTFVLLCDGALPGERLIARVRRLRRGAFAEAAKLRTLEPHHDAIEAPCPLAADCGGCKTQSLAYAAQIRHKHHQMEFSFGTKRWVQKELKDKGEEVEVKQETNETDGYALGLHAPGFFDKVLHVQKCFLQSEPADKVLAVVQETWMDPAIGLTPYDVHKHVGFLKHLMIRTGRNISTGTPEVMVNFVTSCYKPDVLMPLVDKITKIPEVVSVINNVNSSVGNSSVGEQEYTLYGKPNITEMLRGLAFQISANSFFQTNTKQADVLYKLIEDSAGLKGDGSEIVLDLFCGTGTIGLTFARRAKHIYGYEVVPEAIEDARKNAKLNGINNATFVQGDLNKINESFGKEFPKPDIIISDPNRPGMHMKLIKWLLEVKAPRIVYVSCNPATCARDLDYLCHGVEEKDLRGFYELKSVIPVDMFPHTPHIECVCLLELR

SEQ ID NO: 173496 - protein, 56 aa, Zea Mays
MSYFTLKFVKEHPEWEIKNGAVFFQKAKESQPCKEIPSLQLINQTLSYARELERIV

SEQ ID NO: 173497 - protein, 266 aa, Zea Mays
MDPKMTEVTQMFARFKAAYARNDLNTCVTLLSQLKVHLTQFPSLPPLFQQTPNIVEELKLARDIYEHAVVLSVKLEDQDAFERDFCQLKPYYMDTCGIIPASPEEYPILGLNLLRLLVQNRIAEFHTELELLPAKALEHPCIKHAVELEQSFMEGAYNRVLSARQAVPHETYVYFIDLLAKTVRDEIAGCSEKGSTRNGRLRTVLSSSRRRRNHSPARRSHPCSLSTRRSATPGSWSVLYDLNQSLVVLSPPVAAWHGLYCPLHLG

SEQ ID NO: 173498 - protein, 166 aa, Zea Mays
MSSTQGMTQGDSSCVQPHMDSSNIAADSLASIWISFPPPHHFFVCAWVPSTPPSVTYLLRCQTPEVPRADSGYRYFLGYFWSSTELVLLDCILYFLPFDLSVFHNNSPLISQFSITTVGAHIRESVHQTTLYQLVIRIIALYLMDQSQNSSKNLENHTGPKLELTE

SEQ ID NO: 173499 - protein, 128 aa, Zea Mays
MAVVDAMALSTPTPARAEQPDITRDTPLYLECAPENILSPTSAPVDEEVNNEVGERILTKANIDQTVEGVSAEDIDPDRVELRRESQINNLSGLNLFIKSFLGGLKRQQILSLCMMFPISGTFVCCYR

SEQ ID NO: 173500 - protein, 378 aa, Zea Mays
MARDDDGAPAPGVPGQVYLPAWRRAYDRLVKMLRQAYAQAEELSVEREHLISELQFLQSASRERQEISQVRLQQICKDKELSKRVLEAETAARLGGKELQIHCHQKLAELAESDLENFKSCISNLAAENTELKEKLKMVESQVQISTDNSDHEKSGKYTKEELQKLKKAYKTMRSEKDKEISALQAEKNFVWNQLKNMEKDYTGTIKSKHIEVKQATEAAQKLLQNVDELQAAAQKKDGEIDKLQIEVSNAKQRISILEDELQNLRSLVKDKDHKTGKNEDGEPETRRMLKKDANKANRKSKSEWLPLEDISRTSQVTPDRREVKTTRALASETNQKRKRSSFKSSMSWVTRDVTQGFCKLKLLCHLCSSRQVSLFQG

SEQ ID NO: 173501 - protein, 100 aa, Zea Mays
MGGRDRCSLGVSLIAPSSPWRCFISNSPHITTVSCCYPTYCPEFTSYLIFFWETVSLKHSCNMILKDISLFQISHIFNPDQIKNTKEHNSASNDKIFLGL

SEQ ID NO: 173502 - protein, 163 aa, Zea Mays
MIKINSIIIFHQCLLICCASPSGGPGYSHFLSKIGCSFVTEDHAEPINPIATSANITTSMDMRLMMNKIKIVEFISVLLSIGSAAAKTRLIQLGAIKYPFNNFLHHHVENIIGSCLESKQDRLIDHVLDDCKLVTRILEAEKNSALSSDLTKHTLSSEGRSPP

SEQ ID NO: 173503 - protein, 134 aa, Zea Mays
MFELKGCSFVTEDHAEPINPIATSANITTSMDMRLMMNKIKIVEFISVLLSIGSAAAKTRLIQLGAIKYPFNNFLHHHVENIIGSCLESKQDRLIDHVLDDCKLVTRILEAEKNSALSSDLTKHTLSSEGRSPP

SEQ ID NO: 173504 - protein, 111 aa, Zea Mays
MQHKLRKTPDQVVAIAREMVAYARSLGCTDVEFSPEDADRLEQVVVLLPMAALPLEVDSRAPGHGVGAAARSGRHSTHAHRRSKVKARRPSASIQYAAKTGPLPSPPNSNL

SEQ ID NO: 173505 - protein, 334 aa, Zea Mays
MARKCSSCGNNGHNSRTCSGHGAGGGGVRLFGVQLHVGSSPVAMKKCFSMECLSSSASAAPAYYAAALAATNSASPSASSSSSLVSVEEAPEKMAHGYLSDGLMGRAAQERKKAGVPWTEDEHRRFLAGLEKLGKGDWRGISRHFVTTRTPTQVASHAQKYFLRQSSLTHKKRRSSLFDVVENAERAATSSIKGMERLRLKDAITTATATGSAEPGTGTTAQLPPALSLGVGRPPARPDHAALPPSSLLSLQLPRCSAGIGRTAPSLALAPPKHSHPSSSLTAAKAGGLAPDLELKISTARQSEHQQQVQMGPSLPPPPPPPQRTPFLGTIRVT

SEQ ID NO: 173506 - protein, 335 aa, Zea Mays
MARKCSSCGNNGHNSRTCSGHGAGGGGVRLFGVQLHVGSSPVAMKKCFSMECLSSSASAAPAYYAAALAATNSASPSASSSSSLVSVEEAPEKMAHGYLSDGLMGRAAQERKKGRSMDGGRAQAIPGGPGEAREGRLARHLPALRDDADPDAGGQPRPEVLPPAEQPDAQEAQVQPLRRGGERREGGDELHQGHGAPAAQGRHHDRDRDWLRRTRNRDDGTAPAGPVARRRQATSEARPRRAASEQPAVPAAAAVLGGNWPHGAEPGPGAAETQPPFFVADGGKGWWPGAGPGAEDLDRPAERAPAAGPDGAIAAAAAAAAAEDALSGDHQGHMT

SEQ ID NO: 173507 - protein, 219 aa, Zea Mays
MDGGRAQAIPGGPGEAREGRLARHLPALRDDADPDAGGQPRPEVLPPAEQPDAQEAQVQPLRRGGERREGGDELHQGHGAPAAQGRHHDRDRDWLRRTRNRDDGTAPAGPVARRRQATSEARPRRAASEQPAVPAAAAVLGGNWPHGAEPGPGAAETQPPFFVADGGKGWWPGAGPGAEDLDRPAERAPAAGPDGAIAAAAAAAAAEDALSGDHQGHMT

SEQ ID NO: 173508 - protein, 333 aa, Zea Mays
MARKCSSCGNNGHNSRTCSGHGAGGGGVRLFGVQLHVGSSPVAMKKCFSMECLSSSASAAPAYYAAALAATNSASPSASSSSSLVSVEEAPEKMAHGYLSDGLMGRAAQERKKGVPWTEDEHRRFLAGLEKLGKGDWRGISRHFVTTRTPTQVASHAQKYFLRQSSLTHKKRRSSLFDVVENAERAATSSIKGMERLRLKDAITTATATGSAEPGTGTTAQLPPALSLGVGRPPARPDHAALPPSSLLSLQLPRCSAGIGRTAPSLALAPPKHSHPSSSLTAAKAGGLAPDLELKISTARQSEHQQQVQMGPSLPPPPPPPQRTPFLGTIRVT

SEQ ID NO: 173509 - protein, 446 aa, Zea Mays
MVRRRPVMASKSRARASEANRNPSSSSVGEPAQTAANVGVAAGELGVDAGELGVGVGCGAAGESATIPFVVYGGELGDAVAAECAPPLASSSSAKCSSRADCWKHMVKKEVIEDGVVHFFAVCNYCKTELSAGSAAGTGHLNRHYKACLAKLGKTQGGGTQTHLNFAADGTISTWVYNPQVARDEIAKFIVCEDLPIMLGESQNFKNLIQRAFCPQYQPVTRKTTKSDLIAIYKNKLAALKESFKKVQFSFALTSDIWTSSHQKTCYVSVVAHYLDDSYALNKRVIGFRMMDESHTGDAIANHILEVVRDFEIDGKILSITLDNASANTTAIDILTPRLQSYIQGYIIHHRCVCHIINLVVQAGITVANKYLNNIRAAIRFITSTPQMISRFAEYCKAQDMRPRKFGLDMKIRWNSTYHMLKSLEGYEQLITVFVNANGGKVSKIL

SEQ ID NO: 173510 - protein, 267 aa, Zea Mays
MESFGVPPAPVAAPEKRKKPLDLKDPVPAAAAAAANGGGATKASPAAKWAEKKKLVGGDAGYVLEDVPHLTDYLPQLPTYPNPLQDNPAYSVVKQYFVNPDDTVTQKIVVHKTSARGTHFRRAGPRQRVYFQPDEVNAAIVTCGGLCPGLNTVIRELVCGLYDMYGVTSVVGIEGGYKGFYSKNTVALTPRSVNGIHKRGGTVLGTSRGGHDTAKIVDCLQDRGINQVYIIGGDGTQKGASVIYESVDGASNALWSASQRPSIMTSR

SEQ ID NO: 173511 - protein, 323 aa, Zea Mays
MESFGVPPAPVAAPEKRKKPLDLKDPVPAAAAAAANGGGATKASPAAKWAEKKKLVGGDAGYVLEDVPHLTDYLPQLPTYPNPLQDNPAYSVVKQYFVNPDDTVTQKIVVHKTSARGTHFRRAGPRQRVYFQPDEVNAAIVTCGGLCPGLNTVIRELVCGLYDMYGVTSVVGIEGGYKGFYSKNTVALTPRSVNGIHKRGGTVLGTSRGGHDTAKIVDCLQDRGINQVYIIGGDGTQKGASVIYEEVRRRGLKCAVVGVPKTIDNDIAVIDKSFGFDTAVEEAQRAINAAHVEAESAENGIGVVKLMGRNSGLLLNPGVALLP

SEQ ID NO: 173512 - protein, 486 aa, Zea Mays
MMNAAIRCASTSVAQRSSGGFWTWLTGARSNEIPPPDFTLPGVTIPPPLPDHVEAGKTRVTTLPNGVKIASETSAGSSCSVGVYVDCGSVYEAPETTGASQLLKTMAFTTTANRSELRVVREIEAIGGSAKASASREMMSYTYGALKTYMPEMVEVLIDCVRNPAFLDWEVKEQILRLQAELAKSSSFPENFLLEALHSTGYSGALANPLIVPEYSVSRLNADVLEQFITENYTASRIVLAASGVDHDELVSIAEPLLSDIPSVSGTTRPKSTYIGGEYRRSADSSSTDVALAFEVPSGWLKEKDCVTVSVLQALLGGGGKFSWGRQGKGLHSRLNRLVNEFDQIKSISAFKDVHSNTGIFGIHTSTDASFVPKAIDLAARELTSLATPGQVDQSQLDRAKASAKYAILANLESQASLTEDMGRQVLAFGERKPAEHLLKAVDGVTMKDITSVAEKIISSPLTMASHGNVLNMPTYESVSGKFRSK

SEQ ID NO: 173513 - protein, 211 aa, Zea Mays
MASFFRDARLPQQRVVEGVPFPAVLVPSARAGSCAGGVDKFLAAVRCERASRLEPLVRDAGALLLRGFPATTAADFDRAVDAFGYEELPIVGSVAPRTNVVGRVFTANDSPPDQKIPFHHEMAQVPTFPSKLFFFCEVEPKSGGETPVVPSHYVYKRMKEKFPGFVEKLEKDMIVYTRVLGEGDNPSSSIGRGWQSTFLTKDKAVAEERRK

SEQ ID NO: 173514 - protein, 138 aa, Zea Mays
MASFFRDARLPQQRVVEGVPFPAVLVPSARAGSCAGGVDKFLAAVRCERASRLEPLVRDAGALLLRGFPATTAADFDRAVDAFGYEELPIVGSVAPRTNVVGRVFTANDSPPDQKIPFHHEMAQGVLEWRRKDLFAQV

SEQ ID NO: 173515 - protein, 141 aa, Zea Mays
MASFFRDARLPQQRVVEGVPFPAVLVPSARAGSCAGGVDKFLAAVRCERASRLEPLVRDAGALLLRGFPATTAADFDRAVDAFGYEELPIVGSVAPRTNVVGRVFTANDSPPDQKIPFHHEMAQHVRTRMGVGRRRWTLAA

SEQ ID NO: 173516 - protein, 148 aa, Zea Mays
MIVHLSARLIPWPWCRPLIINSRAEEIERIILFLSSPITAVCGRERGQRQRRSAYSTRLCCVQNQAPSCCRLAGPDGTAGRSDACTAHAGTEQTARDGWRRARGAGPIPRTTSPPHGARFSEPLHAPSGTRWCSPHVSGLCSAARRGF

SEQ ID NO: 173517 - protein, 258 aa, Zea Mays
MILRSAPRRLHLLRPHHLRLLSAAALASAVPIPAPAQSPIEWAEAPLASVRPATADASLFHVSLDLSAHRGLLASHTAAGQFLRFRLPASSYHIFLAIASPPPPPALETLALAGPPSCFEFLVKRLPGTPSARLCDLRPGDLVHVGASVVGRGFDVARISDARDVLVFATGSGISPIRSLIESGFAENKKTDVRLFYGVRNLQRMAYQERFEDWESRGVKIVPVLSRPDSQWTGERECVLKDEEYCKPSISGSNFVWA

SEQ ID NO: 173518 - protein, 629 aa, Zea Mays
MAEELLMSDSTIKVFGALRMSVKMLLMWNSRMEIDGGGDSIVATSLLDASNLIVLKESSVIHSNANLGVRGQGLLNLSGDGDTIEAQHLILSLFYSIQVGPGSVLRGPLVNRSSDDVAPKLNCEADSCPVEIIHPPEDCNLNSSLSFTLQVCRVEDIDVWGLVQGTVIHFNRARSVTVHTSGTISASGLGCRTGVGQGKMLSRGICGGGGHGGKGGDGFYKGNLAEGGAIYGNADLPCELGSGSGNDSTELSTAGGGIIAMGSWEYSLPSLALYGSVESNGGSYTNGSVGGPGGGSGGTILLFVHTLSLAESSVLSSVGGFGNAGSGGGGGGRIHFHWSNIPTGDEYVPVAAVKGSILASGGVSKGLGYSGGNGTVTGKACPKGLYGTFCKECPLGTYKNVTGSSKSLCFPCPPGELPHRAIYINVRVLSGGSVLFFGGHGCHELASVLGTLSNVEGFAFQRDVSYTAFLDRVHGEEVALNKLGLWRVPHPWLNMFVPRSRIADFDRGVFKGILQGTDIVGPLIVYPLNKSMWDDGMSAATPSEDVFYAVSLLFSSVAPNDLARLQEQNRRILRFCDLAGIQYKTYLARHTDRSDWVRHFGAAKWNRFVEMKNKYDPKRLLSPGQDIFN

SEQ ID NO: 173519 - protein, 691 aa, Zea Mays
MACHICPLFNLRLLLLLGAVLGNGGLGRGGGAEASDRADPDPYSILMWHDYSPPSPPLPPPDPPSPTATCEGDLHGKGDFHTRCEVSEEVELDGDVYITGNGSLVLLSGASLTCEKYGCVISANFSGEVRLSRGVRVTAGRVSLVATNITVADTVVVNTTALAGDPPDRTSGVPTGTHGDGGGHGGRGASCFVKEGQTQEDSWGGDAYAWSDLEHPWSYGSKGGSTSVEKDYGGDGGGIVWLFAEDLVMNGTVLANGGDSNEKGGGGSGGSIFIRAASMHGGGKISASGGDGLAGGGGGRVSINVFSRHDDTQIFVHGGRSSGCPDNAGAAGTLYEAVPKSLIVSNNNLSTQTDTLLLEFPNQPLWTNVFVRNRAKVAVPLLWSRVQVEGQLSLLSGAILTFGLTRYPYSEFELMAEELLMSDSTIKVFGALRMSVKMLLMWNSRMEIDGGGDSIVATSLLDASNLIVLKESSVIHSNANLGVRGQGLLNLSGDGDTIEAQHLILSLFYSIQVGPGSVLRGPLVNRSSDDVAPKLNCEADSCPVEIIHPPEDCNLNSSLSFTLQVCRVEDIDVWGLVQGTVIHFNRARSVTVHTSGTISASGLGCRTGVGQGKMLSRGICGGGGHGGKGGDGFYKGNLAEGGAIYGNADLPCELGSGSGNDSTELSTAGDGLMGVFFAKSCPLWLSRIKWW

SEQ ID NO: 173520 - protein, 1029 aa, Zea Mays
MACHICPLFNLRLLLLLGAVLGNGGLGRGGGAEASDRADPDPYSILMWHDYSPPSPPLPPPDPPSPTATCEGDLHGKGDFHTRCEVSEEVELDGDVYITGNGSLVLLSGASLTCEKYGCVISANFSGEVRLSRGVRVTAGRVSLVATNITVADTVVVNTTALAGDPPDRTSGVPTGTHGDGGGHGGRGASCFVKEGQTQEDSWGGDAYAWSDLEHPWSYGSKGGSTSVEKDYGGDGGGIVWLFAEDLVMNGTVLANGGDSNEKGGGGSGGSIFIRAASMHGGGKISASGGDGLAGGGGGRVSINVFSRHDDTQIFVHGGRSSGCPDNAGAAGTLYEAVPKSLIVSNNNLSTQTDTLLLEFPNQPLWTNVFVRNRAKVAVPLLWSRVQVEGQLSLLSGAILTFGLTRYPYSEFELMAEELLMSDSTIKVFGALRMSVKMLLMWNSRMEIDGGGDSIVATSLLDASNLIVLKESSVIHSNANLGVRGQGLLNLSGDGDTIEAQHLILSLFYSIQVGPGSVLRGPLVNRSSDDVAPKLNCEADSCPVEIIHPPEDCNLNSSLSFTLQVCRVEDIDVWGLVQGTVIHFNRARSVTVHTSGTISASGLGCRTGVGQGKMLSRGICGGGGHGGKGGDGFYKGNLAEGGAIYGNADLPCELGSGSGNDSTELSTAGGGIIAMGSWEYSLPSLALYGSVESNGGSYTNGSVGGPGGGSGGTILLFVHTLSLAESSVLSSVGGFGNAGSGGGGGGRIHFHWSNIPTGDDGGVSKGLGYSGGNGTVTGKACPKGLYGTFCKECPLGTYKNVTGSSKSLCFPCPPGELPHRAIYINVRVLSGGSVLFFGGHGCHELASVLGTLSNVEGFAFQRDVSYTAFLDRVHGEEVALNKLGLWRVPHPWLNMFVPRSRIADFDRGVFKGILQGTDIVGPLIVYPLNKSMWDDGMSAATPSEDVFYAVSLLFSSVAPNDLARLQEQNRRILRFCDLAGIQYKTYLARHTDRSDWVRHFGAAKWNRFVEMKNKYDPKRLLSPGQDIFN

SEQ ID NO: 173521 - protein, 667 aa, Zea Mays
MACHICPLFNLRLLLLLGAVLGNGGLGRGGGAEASDRADPDPYSILMWHDYSPPSPPLPPPDPPSPTATCEGDLHGKGDFHTRCEVSEEVELDGDVYITGNGSLVLLSGASLTCEKYGCVISANFSGEVRLSRGVRVTAGRVSLVATNITVADTVVVNTTALAGDPPDRTSGVPTGTHGDGGGHGGRGASCFVKEGQTQEDSWGGDAYAWSDLEHPWSYGSKGGSTSVEKDYGGDGGGIVWLFAEDLVMNGTVLANGGDSNEKGGGGSGGSIFIRAASMHGGGKISASGGDGLAGGGGGRVSINVFSRHDDTQIFVHGGRSSGCPDNAGAAGTLYEAVPKSLIVSNNNLSTQTDTLLLEFPNQPLWTNVFVRNRAKVAVPLLWSRVQVEGQLSLLSGAILTFGLTRYPYSEFELMAEELLMSDSTIKVFGALRMSVKMLLMWNSRMEIDGGGDSIVATSLLDASNLIVLKESSVIHSNANLGVRGQGLLNLSGDGDTIEAQHLILSLFYSIQVGPGSVLRGPLVNRSSDDVAPKLNCEADSCPVEIIHPPEDCNLNSSLSFTLQVCRVEDIDVWGLVQGTVIHFNRARSVTVHTSGTISASGLVEESAKGWDILVAMERSQEKLAQRVFMEHFARNALWEHTKMLLDLLNLYAFHALLVNSLTVLYT

SEQ ID NO: 173522 - protein, 79 aa, Zea Mays
MLQGLRTLFGMHRVGKTPVLLCSLHNSNRVRLLDLPSFDGIGTLLSTKEVRTIELAAGGLLFTGDCSGELKVWRWAPKD

SEQ ID NO: 173523 - protein, 102 aa, Zea Mays
MSDRYRMPHCYTALEELIYTFGGPWLFGLFLSGLLILLALVLSVARMKFVGTDELPGPAPTQQGSQIDHSFPFLESLNEGLKSHTVMYTGCISWVPTPSVNL

SEQ ID NO: 173524 - protein, 80 aa, Zea Mays
MSDRYRMPHCYTALEELIYTFGGPWLFGLFLSGLLILLALVLSVARMKFVGTDELPGPAPTQQGSQIDHSFPFLESLNEG

SEQ ID NO: 173525 - protein, 82 aa, Zea Mays
MSDRYRMPHCYTALEELIYTFGGPWLFGLFLSGLLILLALVLSVARMKFVGTDELPGPAPTQQGSQIDHSFPFLESLNEVIE

SEQ ID NO: 173526 - protein, 790 aa, Zea Mays
MACHICPLFNLRLLLLLGAVLGNGGLGRGGGAEASDRADPDPYSILMWHDYSPPSPPLPPPDPPSPTATCEGDLHGKGDFHTRCEVSEEVELDGDVYITGNGSLVLLSGASLTCEKYGCVISANFSGEVRLSRGVRVTAGRVSLVATNITVADTVVVNTTALAGDPPDRTSGVPTGTHGDGGGHGGRGASCFVKEGQTQEDSWGGDAYAWSDLEHPWSYGSKGGSTSVEKDYGGDGGGIVWLFAEDLVMNGTVLANGGDSNEKGGGGSGGSIFIRAASMHGGGKISASGGDGLAGGGGGRVSINVFSRHDDTQIFVHGGRSSGCPDNAGAAGTLYEAVPKSLIVSNNNLSTQTDTLLLEFPNQPLWTNVFVRNRAKVAVPLLWSRVQVEGQLSLLSGAILTFGLTRYPYSEFELMAEELLMSDSTIKVFGALRMSVKMLLMWNSRMEIDGGGDSIVATSLLDASNLIVLKESSVIHSNANLGVRGQGLLNLSGDGDTIEAQHLILSLFYSIQVGPGSVLRGPLVNRSSDDVAPKLNCEADSCPVEIIHPPEDCNLNSSLSFTLQVCRVEDIDVWGLVQGTVIHFNRARSVTVHTSGTISASGLGCRTGVGQGKMLSRGICGGGGHGGKGGDGFYKGNLAEGGAIYGNADLPCELGSGSGNDSTELSTAGGGIIAMGSWEYSLPSLALYGSVESNGGSYTNGSVGGPGGGSGGTILLFVHTLSLAESSVLSSVGGFGNAGSGGGGGGRIHFHWSNIPTGDDGGVSKGLGYSGGNGTVTGKACPKGLYGTFC

SEQ ID NO: 173527 - protein, 634 aa, Zea Mays
MACHICPLFNLRLLLLLGAVLGNGGLGRGGGAEASDRADPDPYSILMWHDYSPPSPPLPPPDPPSPTATCEGDLHGKGDFHTRCEVSEEVELDGDVYITGNGSLVLLSGASLTCEKYGCVISANFSGEVRLSRGVRVTAGRVSLVATNITVADTVVVNTTALAGDPPDRTSGVPTGTHGDGGGHGGRGASCFVKEGQTQEDSWGGDAYAWSDLEHPWSYGSKGGSTSVEKDYGGDGGGIVWLFAEDLVMNGTVLANGGDSNEKGGGGSGGSIFIRAASMHGGGKISASGGDGLAGGGGGRVSINVFSRHDDTQIFVHGGRSSGCPDNAGAAGTLYEAVPKSLIVSNNNLSTQTDTLLLEFPNQPLWTNVFVRNRAKVAVPLLWSRVQVEGQLSLLSGAILTFGLTRYPYSEFELMAEELLMSDSTIKVFGALRMSVKMLLMWNSRMEIDGGGDSIVATSLLDASNLIVLKESSVIHSNANLGVRGQGLLNLSGDGDTIEAQHLILSLFYSIQVGPGSVLRGPLVNRSSDDVAPKLNCEADSCPVEIIHPPEDCNLNSSLSFTLQVCRVEDIDVWGLVQGTVIHFNRARSVTVHTSGTISASGLVEESAKGWDILVAMERSQEKLAQRVFMEHFA

SEQ ID NO: 173528 - protein, 804 aa, Zea Mays
MACHICPLFNLRLLLLLGAVLGNGGLGRGGGAEASDRADPDPYSILMWHDYSPPSPPLPPPDPPSPTATCEGDLHGKGDFHTRCEVSEEVELDGDVYITGNGSLVLLSGASLTCEKYGCVISANFSGEVRLSRGVRVTAGRVSLVATNITVADTVVVNTTALAGDPPDRTSGVPTGTHGDGGGHGGRGASCFVKEGQTQEDSWGGDAYAWSDLEHPWSYGSKGGSTSVEKDYGGDGGGIVWLFAEDLVMNGTVLANGGDSNEKGGGGSGGSIFIRAASMHGGGKISASGGDGLAGGGGGRVSINVFSRHDDTQIFVHGGRSSGCPDNAGAAGTLYEAVPKSLIVSNNNLSTQTDTLLLEFPNQPLWTNVFVRNRAKVAVPLLWSRVQVEGQLSLLSGAILTFGLTRYPYSEFELMAEELLMSDSTIKVFGALRMSVKMLLMWNSRMEIDGGGDSIVATSLLDASNLIVLKESSVIHSNANLGVRGQGLLNLSGDGDTIEAQHLILSLFYSIQVGPGSVLRGPLVNRSSDDVAPKLNCEADSCPVEIIHPPEDCNLNSSLSFTLQVCRVEDIDVWGLVQGTVIHFNRARSVTVHTSGTISASGLGCRTGVGQGKMLSRGICGGGGHGGKGGDGFYKGNLAEGGAIYGNADLPCELGSGSGNDSTELSTAGGGIIAMGSWEYSLPSLALYGSVESNGGSYTNGSVGGPGGGSGGTILLFVHTLSLAESSVLSSVGGFGNAGSGGGGGGRIHFHWSNIPTGDEYVPVAAVKGSILASGGVSKGLGYSGGNGTVTGKACPKGLYGTFC

SEQ ID NO: 173529 - protein, 376 aa, Zea Mays
MAEELLMSDSTIKVFGALRMSVKMLLMWNSRMEIDGGGDSIVATSLLDASNLIVLKESSVIHSNANLGVRGQGLLNLSGDGDTIEAQHLILSLFYSIQVGPGSVLRGPLVNRSSDDVAPKLNCEADSCPVEIIHPPEDCNLNSSLSFTLQVCRVEDIDVWGLVQGTVIHFNRARSVTVHTSGTISASGLGCRTGVGQGKMLSRGICGGGGHGGKGGDGFYKGNLAEGGAIYGNADLPCELGSGSGNDSTELSTAGGGIIAMGSWEYSLPSLALYGSVESNGGSYTNGSVGGPGGGSGGTILLFVHTLSLAESSVLSSVGGFGNAGSGGGGGGRIHFHWSNIPTGDDGGVSKGLGYSGGNGTVTGKACPKGLYGTFC

SEQ ID NO: 173530 - protein, 90 aa, Zea Mays
MRNSNSAKRMFLKYANRNPTTNVKIPDTYQTTTLTPPHENSCRNNTILFPFPDQMLADRELPQEKAAICSTNLGSQPQGAISPEKNCPGV

SEQ ID NO: 173531 - protein, 359 aa, Zea Mays
MEHTNHRRRRQALATVSATTTLLLLLLCLAALTTAEALREHRDEGGASSSGGSGSGCGSNAAGGKQSPAVWVFGDSYADTGNLGDLGRELTREWYDPYGTTFPGRPAGRFSDGRVLTDFIASAMGVPTPVAYKLRRGAARGLVARGMNFAVGGAGVLDTGNFQRNIGEQIDLFQAQRPPSPPSARGCDAGVAVVVVSGNDYSYAADKDNSTSAAIAYIPAVVRQLREQLLRLRDEAGMRKVVVTNLHPMGCTPLFTRALNYTACDPLANAGAAQHNAALQSVLAALDPANRTFLLLDLNTPFAALVDGAAAATAEERFAEPRRPCCESFSADGHCGQQDDSGRRQYRSVLPGSVRRGSS

SEQ ID NO: 173532 - protein, 278 aa, Zea Mays
MRVESSGGLPLPELERQQAGAKRRRRRARAAAAAAAPRTMAAPATAVQRLFEACREVFTGAGPGAVPPPAGVERIKSVLDSITAADVRLTSSMPYFRRVDPYGTPKITYLHLYKCEAFSIGIFCLPSRGVIPLHNHPGMTVFSKLLFGAMHIKSYDWAASQQDTPDVQLQAGPRLAKVKVDGILTAPHETAVLYPEDGGNMHCFTAQNACAVLDVLGPPYDDGSGRHCQYYNVRSSAISVGSTILPGGDRYEWLEESEPSRDFYLVGSTYMGPKILDH

SEQ ID NO: 173533 - protein, 282 aa, Zea Mays
MDGESKLLASGGEDCTIRLWSMSTRAKNHPLIATFHGHEKALSFLSVAWHKSSLLVSCSKDSKVKVWDTVSPSSGSSSCVGSAHLNSNGPPIAMKCHESLCYIAAGAEVTAIDLRTMKKASVLALQNHRILSCEMMPSEWLICTGTKDRALLWDIRKAQELPNTVAEMQSSGPVTLLHLDQYKLQSFVEQPDKVMVTDLFSIGILWGRASTHGHGHGHGGILGSAWHVHDKIGKQQEGRKDPSCPAAHPAGFPQLFGLAAQPTGMPDAMVPLPLRPAGGSSL

SEQ ID NO: 173534 - protein, 381 aa, Zea Mays
MMDRNSIWFCQGPAAKKLNIDLPETEIVETHRNHSARITCLRLFPLIDTPLFRSDTQKNEKALVTSSTDRTIRLCWKGYSRCYKGHSAPVTALADRLLMDGESKLLASGGEDCTIRLWSMSTRAKNHPLIATFHGHEKALSFLSVAWHKSSLLVSCSKDSKVKVWDTVSPSSGSSSCVGSAHLNSNGPPIAMKCHESLCYIAAGAEVTAIDLRTMKKASVLALQNHRILSCEMMPSEWLICTGTKDRALLWDIRKAQELPNTVAEMQSSGPVTLLHLDQYKVVTGVPSDGQVHVWETRTGHSLNTLGCGEPSRLGVRSRVSAMAVDGCRIAMAGSSPEGCMLHYRDFATASAPVVSLPGKEKEVSRFWRPQEFDDSEEEEY

SEQ ID NO: 173535 - protein, 292 aa, Zea Mays
MDGESKLLASGGEDCTIRLWSMSTRAKNHPLIATFHGHEKALSFLSVAWHKSSLLVSCSKDSKVKVWDTVSPSSGSSSCVGSAHLNSNGPPIAMKCHESLCYIAAGAEVTAIDLRTMKKASVLALQNHRILSCEMMPSEWLICTGTKDRALLWDIRKAQELPNTVAEMQSSGPVTLLHLDQYKVVTGVPSDGQVHVWETRTGHSLNTLGCGEPSRLGVRSRVSAMAVDGCRIAMAGSSPEGCMLHYRDFATASAPVVSLPGKEKEVSRFWRPQEFDDSEEEDSKASWNNQTR

SEQ ID NO: 173536 - protein, 486 aa, Zea Mays
MSAPPVRTLADLDGDVLAHCAGYLGARDVASLAMACRPLRAAAYCDAVWYRLFRDQWPFEKVPCDALGLRELYIHRHTEIHQMKFGDPISALYYLDPAGTTPSHVMMDRNSIWFCQGPAAKKLNIDLPETEIVETHRNHSARITCLRLFPLIDTPLFRSDTQKNEKALVTSSTDRTIRLCWKGYSRCYKGHSAPVTALADRLLMDGESKLLASGGEDCTIRLWSMSTRAKNHPLIATFHGHEKALSFLSVAWHKSSLLVSCSKDSKVKVWDTVSPSSGSSSCVGSAHLNSNGPPIAMKCHESLCYIAAGAEVTAIDLRTMKKASVLALQNHRILSCEMMPSEWLICTGTKDRALLWDIRKAQELPNTVAEMQSSGPVTLLHLDQYKVVTGVPSDGQVHVWETRTGHSLNTLGCGEPSRLGVRSRVSAMAVDGCRIAMAGSSPEGCMLHYRDFATASAPVVSLPGKEKEVSRFWRPQEFDDSEEEEY

SEQ ID NO: 173537 - protein, 495 aa, Zea Mays
MSAPPVRTLADLDGDVLAHCAGYLGARDVASLAMACRPLRAAAYCDAVWYRLFRDQWPFEKVPCDALGLRELYIHRHTEIHQMKFGDPISALYYLDPAGTTPSHVMMDRNSIWFCQGPAAKKLNIDLPETEIVETHRNHSARITCLRLFPLIDTPLFRSDTQKNEKALVTSSTDRTIRLCWKGYSRCYKGHSAPVTALADRLLMDGESKLLASGGEDCTIRLWSMSTRAKNHPLIATFHGHEKALSFLSVAWHKSSLLVSCSKDSKVKVWDTVSPSSGSSSCVGSAHLNSNGPPIAMKCHESLCYIAAGAEVTAIDLRTMKKASVLALQNHRILSCEMMPSEWLICTGTKDRALLWDIRKAQELPNTVAEMQSSGPVTLLHLDQYKVVTGVPSDGQVHVWETRTGHSLNTLGCGEPSRLGVRSRVSAMAVDGCRIAMAGSSPEGCMLHYRDFATASAPVVSLPGKEKEVSRFWRPQEFDDSEEEDSKASWNNQTR

SEQ ID NO: 173538 - protein, 613 aa, Zea Mays
MFLSPVKSSDRKNADSEMGSSKLHGFHLDADYPEGSLGSREAETGEYCKGSSFLTKNEGSGKPLKKGKKSQKRRKKAAHKTGDQFEDDREACSGTDEGHRSIKIKEDSELESLGWPSSTSNKRSRQLFFGESSAQIKDENKDVDSDDRPGMPAAVSVYEQKVNSKSTARKVKRQPEISNSEMVTRKKAKVTKDPHHDGSTTSDVKQQACTCGVKTEKKKRKSSTTKVSAEEGKVSSNIGTTTQGDTTQADLSSKGKSCRKIGIQQALIEECKSTKVANDTGSDKFSHSVNNVIDLKDKLSHCLSSRLLRRWCMFEWFYSAIDYPWFAKSEFVEYLNHVKLGHVPRLTRVEWGVIRSSLGKPRRLSKQFLHEEREKLSQYRDSVRQHYAELRSGVREGLPTDLARPLAVGQRVIACHPRTRELHDGNILTVDNNRCRVQFDRPELGVEFVMDIDCMPLHPMENESLRQKNIVNKYLSEVKLEDQMNDLGSGGAARFASNVNVNCGDAAFQIPSSHPVNSLTKQAKAKATVNEVAIAAQQAMYNQPCSLSQIQEREADIRALAELSRALDKKEALLVELRHMNEEVSRKQKDGETVRVEAFQDAICYGACAAKRF

SEQ ID NO: 173539 - protein, 388 aa, Zea Mays
MNIAGTTTQGDTTQADLSSKGKSCRKIGIQQALIEECKSTKVANDTGSDKFSHSVNNVIDLKDKLSHCLSSRLLRRWCMFEWFYSAIDYPWFAKSEFVEYLNHVKLGHVPRLTRVEWGVIRSSLGKPRRLSKQFLHEEREKLSQYRDSVRQHYAELRSGVREGLPTDLARPLAVGQRVIACHPRTRELHDGNILTVDNNRCRVQFDRPELGVEFVMDIDCMPLHPMENESLRQKNIVNKYLSEVKLEDQMNDLGSGGAARFASNVNVNCGDAAFQIPSSHPVNSLTKQAKVGTVDSIVQAKATVNEVAIAAQQAMYNQPCSLSQIQEREADIRALAELSRALDKKEALLVELRHMNEEVSRKQKDGETVRVEAFQDAICYGACAAKRF

SEQ ID NO: 173540 - protein, 641 aa, Zea Mays
MFLSPVKSSDRKNADSEMGSSKLHGFHLDADYPEGSLGSREAETGEYCKGSSFLTKNEGSGKPLKKGKKSQKRRKKAAHKTGDQFEDDREACSGTDEGHRSIKIKEDSELESLGWPSSTSNKRSRQLFFGVEKKYVLVLHTLADLSVNILPPSSVMESESSAQIKDENKDVDSDDRPGMPAAVSVYEQKVNSKSTARKVKRQPEISNSEMVTRKKAKVTKDPHHDGSTTSDVKQQACTCGVKTEKKKRKSSTTKVSAEEGKVSSNIGTTTQGDTTQADLSSKGKSCRKIGIQQALIEECKSTKVANDTGSDKFSHSVNNVIDLKDKLSHCLSSRLLRRWCMFEWFYSAIDYPWFAKSEFVEYLNHVKLGHVPRLTRVEWGVIRSSLGKPRRLSKQFLHEEREKLSQYRDSVRQHYAELRSGVREGLPTDLARPLAVGQRVIACHPRTRELHDGNILTVDNNRCRVQFDRPELGVEFVMDIDCMPLHPMENESLRQKNIVNKYLSEVKLEDQMNDLGSGGAARFASNVNVNCGDAAFQIPSSHPVGTVDSIVQAKATVNEVAIAAQQAMYNQPCSLSQIQEREADIRALAELSRALDKKEALLVELRHMNEEVSRKQKDGETVRVEAFQDAICYGACAAKRF

SEQ ID NO: 173541 - protein, 598 aa, Zea Mays
MFLSPVKSSDRKNADSEMGSSKLHGFHLDADYPEGSLGSREAETGEYCKGSSFLTKNEGSGKPLKKGKKSQKRRKKAAHKTGDQFEDDREACSGTDEGHRSIKIKEDSELESLGWPSSTSNKRSRQLFFGESSAQIKDENKDVDSDDRPGMPAAVSVYEQKVNSKSTARKVKRQPEISNSEMVTRKKAKVTKDPHHDGSTTSDVKQQACTCGVKTEKKKRKSSTTKVIPKLLFVDHFCKEKYVSAEEGKVSSNIGTTTQGDTTQADLSSKGKSCRKIGIQQALIEECKSTKVANDTGSDKFSHSVNNVIDLKDKLSHCLSSRLLRRWCMFEWFYSAIDYPWFAKSEFVEYLNHVKLGHVPRLTRVEWGVIRSSLGKPRRLSKQFLHEEREKLSQYRDSVRQHYAELRSGVREGLPTDLARPLAVGQRVIACHPRTRELHDGNILTVDNNRCRVQFDRPELGVEFVMDIDCMPLHPMENESLRQKNIVNKYLSEVKLEDQMNDLGSGGAARFASNVNVNCGDAAFQIPSSHPVNSLTKQAKVGTVDSIVQAKATVNEVAIAAQQAMYNQPCSLSQIQEREADIRALAELSRALDKKLYW

SEQ ID NO: 173542 - protein, 618 aa, Zea Mays
MFLSPVKSSDRKNADSEMGSSKLHGFHLDADYPEGSLGSREAETGEYCKGSSFLTKNEGSGKPLKKGKKSQKRRKKAAHKTGDQFEDDREACSGTDEGHRSIKIKEDSELESLGWPSSTSNKRSRQLFFGESSAQIKDENKDVDSDDRPGMPAAVSVYEQKVNSKSTARKVKRQPEISNSEMVTRKKAKVTKDPHHDGSTTSDVKQQACTCGVKTEKKKRKSSTTKVSAEEGKVSSNIAMNIAGTTTQGDTTQADLSSKGKSCRKIGIQQALIEECKSTKVANDTGSDKFSHSVNNVIDLKDKLSHCLSSRLLRRWCMFEWFYSAIDYPWFAKSEFVEYLNHVKLGHVPRLTRVEWGVIRSSLGKPRRLSKQFLHEEREKLSQYRDSVRQHYAELRSGVREGLPTDLARPLAVGQRVIACHPRTRELHDGNILTVDNNRCRVQFDRPELGVEFVMDIDCMPLHPMENESLRQKNIVNKYLSEVKLEDQMNDLGSGGAARFASNVNVNCGDAAFQIPSSHPVNSLTKQAKAKATVNEVAIAAQQAMYNQPCSLSQIQEREADIRALAELSRALDKKEALLVELRHMNEEVSRKQKDGETVRVEAFQDAICYGACAAKRF

SEQ ID NO: 173543 - protein, 657 aa, Zea Mays
MFLSPVKSSDRKNADSEMGSSKLHGFHLDADYPEGSLGSREAETGEYCKGSSFLTKNEGSGKPLKKGKKSQKRRKKAAHKTGDQFEDDREACSGTDEGHRSIKIKEDSELESLGWPSSTSNKRSRQLFFGVEKKYVLVLHTLADLSVNILPPSSVMESESSAQIKDENKDVDSDDRPGMPAAVSVYEQKVNSKSTARKVKRQPEISNSEMVTRKKAKVTKDPHHDGSTTSDVKQQACTCGVKTEKKKRKSSTTKVIPKLLFVDHFCKEKYVSAEEGKVSSNIGTTTQGDTTQADLSSKGKSCRKIGIQQALIEECKSTKVANDTGSDKFSHSVNNVIDLKDKLSHCLSSRLLRRWCMFEWFYSAIDYPWFAKSEFVEYLNHVKLGHVPRLTRVEWGVIRSSLGKPRRLSKQFLHEEREKLSQYRDSVRQHYAELRSGVREGLPTDLARPLAVGQRVIACHPRTRELHDGNILTVDNNRCRVQFDRPELGVEFVMDIDCMPLHPMENESLRQKNIVNKYLSEVKLEDQMNDLGSGGAARFASNVNVNCGDAAFQIPSSHPVGTVDSIVQAKATVNEVAIAAQQAMYNQPCSLSQIQEREADIRALAELSRALDKKEALLVELRHMNEEVSRKQKDGETVRVEAFQDAICYGACAAKRF

SEQ ID NO: 173544 - protein, 511 aa, Zea Mays
MESESSAQIKDENKDVDSDDRPGMPAAVSVYEQKVNSKSTARKVKRQPEISNSEMVTRKKAKVTKDPHHDGSTTSDVKQQACTCGVKTEKKKRKSSTTKVIPKLLFVDHFCKEKYVSAEEGKVSSNIGTTTQGDTTQADLSSKGKSCRKIGIQQALIEECKSTKVANDTGSDKFSHSVNNVIDLKDKLSHCLSSRLLRRWCMFEWFYSAIDYPWFAKSEFVEYLNHVKLGHVPRLTRVEWGVIRSSLGKPRRLSKQFLHEEREKLSQYRDSVRQHYAELRSGVREGLPTDLARPLAVGQRVIACHPRTRELHDGNILTVDNNRCRVQFDRPELGVEFVMDIDCMPLHPMENESLRQKNIVNKYLSEVKLEDQMNDLGSGGAARFASNVNVNCGDAAFQIPSSHPVNSLTKQAKVGTVDSIVQAKATVNEVAIAAQQAMYNQPCSLSQIQEREADIRALAELSRALDKKEALLVELRHMNEEVSRKQKDGETVRVEAFQDAICYGACAAKRF

SEQ ID NO: 173545 - protein, 650 aa, Zea Mays
MFLSPVKSSDRKNADSEMGSSKLHGFHLDADYPEGSLGSREAETGEYCKGSSFLTKNEGSGKPLKKGKKSQKRRKKAAHKTGDQFEDDREACSGTDEGHRSIKIKEDSELESLGWPSSTSNKRSRQLFFGVEKKYVLVLHTLADLSVNILPPSSVMESESSAQIKDENKDVDSDDRPGMPAAVSVYEQKVNSKSTARKVKRQPEISNSEMVTRKKAKVTKDPHHDGSTTSDVKQQACTCGVKTEKKKRKSSTTKVSAEEGKVSSNIGTTTQGDTTQADLSSKGKSCRKIGIQQALIEECKSTKVANDTGSDKFSHSVNNVIDLKDKLSHCLSSRLLRRWCMFEWFYSAIDYPWFAKSEFVEYLNHVKLGHVPRLTRVEWGVIRSSLGKPRRLSKQFLHEEREKLSQYRDSVRQHYAELRSGVREGLPTDLARPLAVGQRVIACHPRTRELHDGNILTVDNNRCRVQFDRPELGVEFVMDIDCMPLHPMENESLRQKNIVNKYLSEVKLEDQMNDLGSGGAARFASNVNVNCGDAAFQIPSSHPVNSLTKQAKVGTVDSIVQAKATVNEVAIAAQQAMYNQPCSLSQIQEREADIRALAELSRALDKKEALLVELRHMNEEVSRKQKDGETVRVEAFQDAICYGACAAKRF

SEQ ID NO: 173546 - protein, 641 aa, Zea Mays
MFLSPVKSSDRKNADSEMGSSKLHGFHLDADYPEGSLGSREAETGEYCKGSSFLTKNEGSGKPLKKGKKSQKRRKKAAHKTGDQFEDDREACSGTDEGHRSIKIKEDSELESLGWPSSTSNKRSRQLFFGVEKKYVLVLHTLADLSVNILPPSSVMESESSAQIKDENKDVDSDDRPGMPAAVSVYEQKVNSKSTARKVKRQPEISNSEMVTRKKAKVTKDPHHDGSTTSDVKQQACTCGVKTEKKKRKSSTTKVSAEEGKVSSNIGTTTQGDTTQADLSSKGKSCRKIGIQQALIEECKSTKVANDTGSDKFSHSVNNVIDLKDKLSHCLSSRLLRRWCMFEWFYSAIDYPWFAKSEFVEYLNHVKLGHVPRLTRVEWGVIRSSLGKPRRLSKQFLHEEREKLSQYRDSVRQHYAELRSGVREGLPTDLARPLAVGQRVIACHPRTRELHDGNILTVDNNRCRVQFDRPELGVEFVMDIDCMPLHPMENESLRQKNIVNKYLSEVKLEDQMNDLGSGGAARFASNVNVNCGDAAFQIPSSHPVNSLTKQAKAKATVNEVAIAAQQAMYNQPCSLSQIQEREADIRALAELSRALDKKEALLVELRHMNEEVSRKQKDGETVRVEAFQDAICYGACAAKRF

SEQ ID NO: 173547 - protein, 638 aa, Zea Mays
MFLSPVKSSDRKNADSEMGSSKLHGFHLDADYPEGSLGSREAETGEYCKGSSFLTKNEGSGKPLKKGKKSQKRRKKAAHKTGDQFEDDREACSGTDEGHRSIKIKEDSELESLGWPSSTSNKRSRQLFFGESSAQIKDENKDVDSDDRPGMPAAVSVYEQKVNSKSTARKVKRQPEISNSEMVTRKKAKVTKDPHHDGSTTSDVKQQACTCGVKTEKKKRKSSTTKVIPKLLFVDHFCKEKYVSAEEGKVSSNIGTTTQGDTTQADLSSKGKSCRKIGIQQALIEECKSTKVANDTGSDKFSHSVNNVIDLKDKLSHCLSSRLLRRWCMFEWFYSAIDYPWFAKSEFVEYLNHVKLGHVPRLTRVEWGVIRSSLGKPRRLSKQFLHEEREKLSQYRDSVRQHYAELRSGVREGLPTDLARPLAVGQRVIACHPRTRELHDGNILTVDNNRCRVQFDRPELGVEFVMDIDCMPLHPMENESLRQKNIVNKYLSEVKLEDQMNDLGSGGAARFASNVNVNCGDAAFQIPSSHPVNSLTKQAKVGTVDSIVQAKATVNEVAIAAQQAMYNQPCSLSQIQEREADIRALAELSRALDKKEALLVELRHMNEEVSRKQKDGETVRVEAFQDAICYGACAAKRF

SEQ ID NO: 173548 - protein, 259 aa, Zea Mays
MSMAVQFSMASSRKVRNANKRYTKINEDWQDKDETNVHKSKVRKKKLSDMLGSQWSKDELERFYGAYRKYGKDWRKVAGAIRDRTSEMVEALYNINKAYLSLPEGTATAAGLIAMMTDHYNILDGSNSDHESNDSPKASRKPQKRGRARFQSVSKTSDARYADLGQSQPSSSSYGCLSLLTKKCAGDLLVGNRPRAVGKRTPRVPGASIYYRDDRGVTDRRAKTVANNGDDEGAHVAALALAEVFQRGGSPQVSETSKW

SEQ ID NO: 173549 - protein, 249 aa, Zea Mays
MAWISDIRGTISWAVIFDLLILCEAVTEVHLQAGTTDKHFWRFSTSGQYSAKAAYELFFLGSTAFGPLKGFGKLGLLPNASSFCGWSCITDAGQQIVWQKGISLTLRSVLSVISKRKQSNTFSFLVFLQDNSGSRCCKRWGLPNLSPDLDATNLDSWWNSAAEKLPGDLQAGFNSIVILGAWSIWRPRNDCVFNGMSPSVTTAITLASDELRMWSLAGAKGLNLLSALVFVFDPGWGFFLEFLGFWVCV

SEQ ID NO: 173550 - protein, 267 aa, Zea Mays
MASSRKVRNANKRYTKINEDWQDKDETNVHKSKVRKKKLSDMLGSQWSKDELERFYGAYRKYGKDWRKFFLCPSRQNRDIKIHLVAGAIRDRTSEMVEALYNINKAYLSLPEGTATAAGLIAMMTDHYNILDGSNSDHESNDSPKASRKPQKRGRARFQSVSKTSDARYADLGQSQPSSSSYGCLSLLTKKCAGDLLVGNRPRAVGKRTPRVPGASIYYRDDRGVTDRRAKTVANNGDDEGAHVAALALAEVFQRGGSPQVSETSKW

SEQ ID NO: 173551 - protein, 61 aa, Zea Mays
MNLNEYTKSKNFTKEVLFHRLSRTTSKSLSFLRLLMCGRAQVSLILLQSAVKFLNKNSGHL

SEQ ID NO: 173552 - protein, 174 aa, Zea Mays
MSRTFKSTTGLSRRFLNLIAANHSPGVKSLHRIGLGRIFNSTPAPIPNGDRLESAAGQEDYMVRPRALDIIRLPTPVMSFRSSASFESKEWKLDCFPFSDCKVFCMDQSGRGFLFDANSCGVSTVAHLHTPKALIDLHVEDNATATIHKHLRRATHLFYGMSIAIYSDANFAFV

SEQ ID NO: 173553 - protein, 123 aa, Zea Mays
MSRTFKSTTGLSRRFLNLIAANHSPGVKSLHRIGLGRIFNSTPAPIPNGDRLESAAGQEDYMVRPRALDIIRLPTPSGRGFLFDANSCGVSTVAHLHTPKLMQRCRRLLIFTWRTMQPRRYTR

SEQ ID NO: 173554 - protein, 162 aa, Zea Mays
MSSSSVPLVAALSNYKPVGWKCRMAAGRRRDFCSVVQMRFGLPTVNVSMLIMADGNEKDFDEEFSGSANVTTSNVQEEVQESKCKEQVENASTTPDDLQLHEGTNESQEWAQFASSSGKKLTPRRKPIVQVEHDTKSGERRPSDGDTFEELHARTASGGQNC

SEQ ID NO: 173555 - protein, 60 aa, Zea Mays
MWRGIIVVCSGGASGVRVCVPSVSVSVYQFLSDVSASVSYEPCRMLSVCSSTCVFCLNNP

SEQ ID NO: 173556 - protein, 93 aa, Zea Mays
MKHGSIINMEIPVAICFVVVACFEFPVTHDIELCKYRRHICNEHHTKFQVMQCCLVLTLSDISLSRDSDPLLSSWFKSLDLVTCDSWKYRRHK

SEQ ID NO: 173557 - protein, 760 aa, Zea Mays
MGLFSKGFDVQESVFLPESNYSDIKPAICCLDDRCKFTQSFLDMTTAPSVLLWHHRKMLMESNSTNGSQQSMSCALDEDHQQLFRDQNEPCIGADRPCSSNLSVICSSQKFAEDRISINIPQDKAIDATNDKPLDKDEKEKHPISNLVQELNEHPIGRVTPTAPRTTSHRNRFTSISRAFGDGSKLLPEDHMLTGFASGSKKPRSQVSYSGSPRSEELGLKNKDHFRKIQSHVSVKTSDAKKLPDSSRSGHSSPELLTCIANVLVTVGDRGWREYDTQITMDSDVHSEQRICVKLAEGTKYAHKVCQVLQPGATNRYTHAMMWKGGAEWCLEFPDRSQWLIFKQMHDECYSHNIRAASVRNIPTPGVHLVGIHDDNDMVSFVRSEDYLVHIGTDVEIALDEARVLYNMDSDDEEWISSRQKFLVRDNNATLELAEDLFERVMDKLEKFAYSHDSNELSIVQMKELETDDLPLDIIEVIHAYWQAKRQKKGMPLIRHFQFAMWKVYEQQLHEWESKVCRMQGSSNGYQGKKMPPKPALFAFCLRPRGLDVPYKGPKQRSHKKLMSTGCHSFSRQHDGFYRQVSGRRYNECTVDGRICELYDIGSLYSLTGYSPRFSTRTGSLRAFESSESSTPRFFRTNIVKRSATVAFSDDHQPSPSFRPQRVKRSASDHWNTVIHDWQNSKHLFPGSPPVDIEELKLRDAASAAQHAAAMAKLKREKAHCLMQKADLALHKATVALMIADAIKSSSRNKSRDCRRGFDE

SEQ ID NO: 173558 - protein, 689 aa, Zea Mays
MGLFSKGFDVQESVFLPESNYSDIKPAICCLDDRCKFTQSFLDMTTAPSVLLWHHRKMLMESNSTNGSQQSMSCALDEDHQQLFRDQNEPCIGADRPCSSNLSVICSSQKFAEDRISINIPQDKAIDATNDKPLDKDEKEKHPISNLVQELNEHPIGRVTPTAPRTTSHRNRFTSISRAFGDGSKLLPEDHMLTGFASGSKKPRSQVSYSGSPRSEELGLKNKDHFRKIQSHVSVKTSDAKKLPDSSRSGHSSPELLTCIANVLVTVGDRGWREYDTQITMDSDVHSEQRICVKLAEGTKYAHKVCQVLQPGATNRYTHAMMWKGGAEWCLEFPDRSQWLIFKQMHDECYSHNIRAASVRNIPTPGVHLVGIHDDNDMVSFVRSEDYLVHIGTDVEIALDEARVLYNMDSDDEEWISSRQKFLVRDNNATLELAEDLFERVMDKLEKFAYSHDSNELSIVQMKELETDDLPLDIIEVIHAYWQAKRQKKGMPLIRHFQFAMWKVYEQQLHEWESKVCRMQGSSNGYQGKKMPPKPALFAFCLRPRGLDVPYKGPKQRSHKKLMSTGCHSFSRQHDGFYRQGSLQEQVLFGHLSPRKVLHQDFSGQILSKGVQPLLSLMITSRRLPSALRELNGAHLTIGTLSFMTGRTQSISFRARPLLILRSSNCGMLQAQHSTLLPWRSSRGKRLTA

SEQ ID NO: 173559 - protein, 541 aa, Zea Mays
MLTGFASGSKKPRSQVSYSGSPRSEELGLKNKDHFRKIQSHVSVKTSDAKKLPDSSRSGHSSPELLTCIANVLVTVGDRGWREYDTQITMDSDVHSEQRICVKLAEGTKYAHKVCQVLQPGATNRYTHAMMWKGGAEWCLEFPDRSQWLIFKQMHDECYSHNIRAASVRNIPTPGVHLVGIHDDNDMVSFVRSEDYLVHIGTDVEIALDEARVLYNMDSDDEEWISSRQKFLVRDNNATLELAEDLFERVMDKLEKFAYSHDSNELSIVQMKELETDDLPLDIIEVIHAYWQAKRQKKGMPLIRHFQFAMWKVYEQQLHEWESKVCRMQGSSNGYQGKKMPPKPALFAFCLRPRGLDVPYKGPKQRSHKKLMSTGCHSFSRQHDGFYRQGYSPRFSTRTGSLRAFESSESSTPRFFRTNIVKRSATVAFSDDHQPSPSFRPQRVKRSASDHWNTVIHDWQNSKHLFPGSPPVDIEELKLRDAASAAQHAAAMAKLKREKAHCLMQKADLALHKATVALMIADAIKSSSRNKSRDCRRGFDE

SEQ ID NO: 173560 - protein, 109 aa, Zea Mays
MASSATASGGKFDEKLPGEKPPKHPGKHRKFLPVAEGKGMGSLEKQQNDKILSSLLARNSDEPLDVSKAITMYKVKKEKQRRKEKNMPSKSDKLKPQKKPHKKSSKKRA

SEQ ID NO: 173561 - protein, 197 aa, Zea Mays
MAEEPAIVVAASSSCEVDLGNLMAYDPCHHVAAAASASREELRQECLRKGTELAQAVADALFALPPTEDRDGPIVHLPPHTVRLPREKHLPKPKPPTKWELFAKAKGITKRKKNKREWDEQTQSWKRTYGYDRVNDDKDVPILEAKLTDEPGVDPFAQRRDEKKKRVEKQEKSRLENLKKAAKSYTACCEGLAHHRN

SEQ ID NO: 173562 - protein, 341 aa, Zea Mays
MAEEPAIVVAASSSCEVDLGNLMAYDPCHHVAAAASASRMRGLAGAKKLREELRQECLRKGTELAQAVADALFALPPTEDRDGPIVHLPPHTVRLPREKHLPKPKPPTKWELFAKAKGITKRKKNKREWDEQTQSWKRTYGYDRVNDDKDVPILEAKLTDEPGVDPFAQRRDEKKKRVEKQEKSRLENLKKAAKVGALPSHIQLAAKALPITGTKADLPKKSRKEDLESVVGMASSATASGGKFDEKLPGEKPPKHPGKHRKFLPVAEGKGMGSLEKQQNDKILSSLLARNSDEPLDVSKAITMYKVKKEKQRRKEKNMPSKSDKLKPQKKPHKKSSKKRA

SEQ ID NO: 173563 - protein, 1164 aa, Zea Mays
MSHCPRASLSLAPPSPFLFPHCPSPRRRRRPRGRSLHLTSRPLLTLARFDPPRLFRLKVSDSSASPGEAAHAHAHHSNHRAHAHHSPAPSLLPWPRALIGSLAPVWREGLFLVRCSVFAAVVSVAGALSWFAQLRARSFVEARLLPAACSALSEYLQREVRLGKVRSISPIGITLQTCSIGPHEEEFSCAEVPVMKIRVRPFASLRRGRVVVDAVLSEPSALVAQKKDFSWLGIPAPSEGTVKRHSGEEGIDYRTKTRRLAREKAAEQWNEERDKAAREAAEKGYTIPSGQSVPLSSNEILEADGPTEIGKSSPPLCADQMHKNDHHLATGIDSGSKHADLEKSFGFKSPIPGINLWSRVISSPSRLRYMRKAPSKVIPDVDNSSQQRILRRSADAAVSYFQNTGHINIDDSSPGPGKGSSDGGHANVGGSGINSNDETVSNSKTASTSLAESPSHSQLSSQCSSSNLDNLLLWHNLEDLQIGQAKNPSGNKPVPHQENIFGNFGSCTHAHNWVPFWPFQLKSCPVSFNSPWASLDLQIEKLKSQFAIGPGDFSAELTEGVSEIHPGGVQNALPITLDSVYFNGGNLMLLGYGDQEPREMKHASGHVKFKNNYNRVHVHVTGNCMEWRQDRSSQGGGYLSTDVFVDIAEETWHANLNIVDAFAPLFERILEIPVVWHKGRATGEVHICMSKGDSFPSIHGQLDVKGLAFQILDAPSSFSDIVAKLSFRGQRVFLHNASGWFGDAPVEASGDLGLNPEDGEFHLMCQVPSVEVNALMRTMKMKPLMFPLAGSVTAVFNCQGPLDAPVFVGSGIVSRKSFSVSGMPPSAASEAVMQNKEAGAVAAFDHIPFSHVSANFTFNLDNSVADLYGIRACLLDGGEIRGAGNAWICPEGEGDDSAMDINLSGTILLDKVLHRYIPGGIQLIPLKIGELNGETRLSGSLIRPKFDIKWAAPNAEDSFSDARGNIVIAHDYIMVNSSSVSFDLNSRVQTSYINDYLLNKETYQMKKIMPLIVEGVDLDLRMRGFEFAHIASSIPFDSPRPLHLKASGRVKFQGKIMKSSNIADGNINGVLQSNIDQNKLETNASKLVGDISLSGIKLNQLMLAPQSTGFLSISRDSMMVRNLTLDELEFASLRGFVQKVCWMIMLRQNFSLIFRKEEAMVCCQ

SEQ ID NO: 173564 - protein, 1247 aa, Zea Mays
MSHCPRASLSLAPPSPFLFPHCPSPRRRRRPRGRSLHLTSRPLLTLARFDPPRLFRLKVSDSSASPGEAAHAHAHHSNHRAHAHHSPAPSLLPWPRALIGSLAPVWREGLFLVRCSVFAAVVSVAGALSWFAQLRARSFVEARLLPAACSALSEYLQREVRLGKVRSISPIGITLQTCSIGPHEEEFSCAEVPVMKIRVRPFASLRRGRVVVDAVLSEPSALVAQKKDFSWLGIPAPSEGTVKRHSGEEGIDYRTKTRRLAREKAAEQWNEERDKAAREAAEKGYTIPSGQSVPLSSNEILEADGPTEIGKSSPPLCADQMHKNDHHLATGIDSGSKHADLEKSFGFKSPIPGINLWSRVISSPSRLRYMRKAPSKVIPDVDNSSQQRILRRSADAAVSYFQNTGHINIDDSSPGPGKGSSDGGHANVGGSGINSNDETVSNSKTASTSLAESPSHSQLSSQCSSSNLDNLLLWHNLEDLQIGQAKNPSGNKPVPHQENIFGNFGSCTHAHNWVPFWPFQLKSCPVSFNSPWASLDLQIEKLKSQFAIGPGDFSAELTEGVSEIHPGGVQNALPITLDSVYFNGGNLMLLGYGDQEPREMKHASGHVKFKNNYNRVHVHVTGNCMEWRQDRSSQGGGYLSTDVFVDIAEETWHANLNIVDAFAPLFERILEIPVVWHKGRATGEVHICMSKGDSFPSIHGQLDVKGLAFQILDAPSSFSDIVAKLSFRGQRVFLHNASGWFGDAPVEASGDLGLNPEDGEFHLMCQVPSVEVNALMRTMKMKPLMFPLAGSVTAVFNCQGPLDAPVFVGSGIVSRKSFSVSGMPPSAASEAVMQNKEAGAVAAFDHIPFSHVSANFTFNLDNSVADLYGIRACLLDGGEIRGAGNAWICPEGEGDDSAMDINLSGTILLDKVLHRYIPGGIQLIPLKIGELNGETRLSGSLIRPKFDIKWAAPNAEDSFSDARGNIVIAHDYIMVNSSSVSFDLNSRVQTSYINDYLLNKETYQMKKIMPLIVEGVDLDLRMRGFEFAHIASSIPFDSPRPLHLKASGRVKFQGKIMKSSNIADGNINGVLQSNIDQNKLETNASKLVGDISLSGIKLNQLMLAPQSTGFLSISRDSMMLNATGRPDENFSIEVNGPLLFTSNEVIQDVRLLSIFLQKGQLRSNICYHPENLTSLEVRNLTLDELEFASLRGFVQKAELQLNFQKRRGHGLLSIIRPKFSGVLGEALDIAARWSGDVVEDETRGSWC

SEQ ID NO: 173565 - protein, 2103 aa, Zea Mays
MSHCPRASLSLAPPSPFLFPHCPSPRRRRRPRGRSLHLTSRPLLTLARFDPPRLFRLKVSDSSASPGEAAHAHAHHSNHRAHAHHSPAPSLLPWPRALIGSLAPVWREGLFLVRCSVFAAVVSVAGALSWFAQLRARSFVEARLLPAACSALSEYLQREVRLGKVRSISPIGITLQTCSIGPHEEEFSCAEVPVMKIRVRPFASLRRGRVVVDAVLSEPSALVAQKKDFSWLGIPAPSEGTVKRHSGEEGIDYRTKTRRLAREKAAEQWNEERDKAAREAAEKGYTIPSGQSVPLSSNEILEADGPTEIGKSSPPLCADQMHKNDHHLATGIDSGSKHADLEKSFGFKSPIPGINLWSRVISSPSRLRYMRKAPSKVIPDVDNSSQQRILRRSADAAVSYFQNTGHINIDDSSPGPGKGSSDGGHANVGGSGINSNDETVSNSKTASTSLAESPSHSQLSSQCSSSNLDNLLLWHNLEDLQIGQAKNPSGNKPVPHQENIFGNFGSCTHAHNWVPFWPFQLKSCPVSFNSPWASLDLQIEKLKSQFAIGPGDFSAELTEGVSEIHPGGVQNALPITLDSVYFNGGNLMLLGYGDQEPREMKHASGHVKFKNNYNRVHVHVTGNCMEWRQDRSSQGGGYLSTDVFVDIAEETWHANLNIVDAFAPLFERILEIPVVWHKGRATGEVHICMSKGDSFPSIHGQLDVKGLAFQILDAPSSFSDIVAKLSFRGQRVFLHNASGWFGDAPVEASGDLGLNPEDGEFHLMCQVPSVEVNALMRTMKMKPLMFPLAGSVTAVFNCQGPLDAPVFVGSGIVSRKSFSVSGMPPSAASEAVMQNKEAGAVAAFDHIPFSHVSANFTFNLDNSVADLYGIRACLLDGGEIRGAGNAWICPEGEGDDSAMDINLSGTILLDKVLHRYIPGGIQLIPLKIGELNGETRLSGSLIRPKFDIKWAAPNAEDSFSDARGNIVIAHDYIMVNSSSVSFDLNSRVQTSYINDYLLNKETYQMKKIMPLIVEGVDLDLRMRGFEFAHIASSIPFDSPRPLHLKASGRVKFQGKIMKSSNIADGNINGVLQSNIDQNKLETNASKLVGDISLSGIKLNQLMLAPQSTGFLSISRDSMMLNATGRPDENFSIEVNGPLLFTSNEVIQDVRLLSIFLQKGQLRSNICYHPENLTSLEAELQLNFQKRRGHGLLSIIRPKFSGVLGEALDIAARWSGDVITMEKSILEQANSKYEVQGEYVFPGTRDRFPVESQSNGFIEKAMGGHLGSIMSSMGRWRMRLEVPGAEVAEMLPLARLLSRSTDPVIRSRSKELFMQCLHSVGFNAESLNDQLKALEIYHDWLDDDTMEDIAFPGLAELRGYWRGSLDASGGGNGDTMADFDFNGEDWEWGTYKTQRVLASGSFSNNDGLRLDKLFIQKDNATLHADGSILGPLTNLHFAVLNFPVGLIPALVQAIESSTTDSIHFLRQWLTPIKGILHMEGDLRGTLAKPECDVQIRLLDGTIGGIDLGRAEVLASVTPTSRFVFDANFEPTIQSGHVNIQGSIPVTYVDNSSIEESPEEADGKQGIIRIPVWARDRGSSNEISEARMVRDKTEEGWEFQLAEKLKGLSYNMLEPGEVRIDADIKDGGMMLITALSPYANWLQGYADVFLQVKGTVDQPVVDGSATFNRAIVNSPFLRTPLTNFAGTIQVISNRLCISSMESRVGRKGRLSMKGSLPLKNSEPSANDKIDLKCEVLDIRAKNILSGQVDSQLQVTGSILRPDLSGMIRLSHGEAYLPHDKGNGAAVTRLTSNKSSYLLSGFDQSTTSQDVSRILGSLSTSAERDQSDTEKTLEHGSFNPNIDARLNDLKLTLGPELRIVYPLILNFAVSGDLELNGMVHPKYLRPKGILTFENGEVNLVATQVRLKNDHLNAAKFEPDLGLDPVLDLVLVGSEWQFKIQSRASMWQDNLVVTSTRSVDQDVLSPSEAAKVFESQLAESLLEGDGQLAFKKLATATLETLMPRIEGKGEFGQARWRLVYAPQIPSLLSVDPTVDPLKSLANNISFATEVEVQLGKRLQASVVRQMKDSEMAMQWTLIYQLTSRLRVLFQSTPSNRLLFEYSATSQE

SEQ ID NO: 173566 - protein, 831 aa, Zea Mays
MLWRMRLEVPGAEVAEMLPLARLLSRSTDPVIRSRSKELFMQCLHSVGFNAESLNDQLKALEIYHDWLDDDTMEDIAFPGLAELRGYWRGSLDASGGGNGDTMADFDFNGEDWEWGTYKTQRVLASGSFSNNDGLRLDKLFIQKDNATLHADGSILGPLTNLHFAVLNFPVGLIPALVQAIESSTTDSIHFLRQWLTPIKGILHMEGDLRGTLAKPECDVQIRLLDGTIGGIDLGRAEVLASVTPTSRFVFDANFEPTIQSGHVNIQGSIPVTYVDNSSIEESPEEADGKQGIIRIPVWARDRGSSNEISEARMVRDKTEEGWEFQLAEKLKGLSYNMLEPGEVRIDADIKDGGMMLITALSPYANWLQGYADVFLQVKGTVDQPVVDGSATFNRAIVNSPFLRTPLTNFAGTIQVISNRLCISSMESRVGRKGRLSMKGSLPLKNSEPSANDKIDLKCEVLDIRAKNILSGQVDSQLQVTGSILRPDLSGMIRLSHGEAYLPHDKGNGAAVTRLTSNKSSYLLSGFDQSTTSQDVSRILGSLSTSAERDQSDTEKTLEHGSFNPNIDARLNDLKLTLGPELRIVYPLILNFAVSGDLELNGMVHPKYLRPKGILTFENGEVNLVATQVRLKNDHLNAAKFEPDLGLDPVLDLVLVGSEWQFKIQSRASMWQDNLVVTSTRSVDQDVLSPSEAAKVFESQLAESLLEGDGQLAFKKLATATLETLMPRIEGKGEFGQARWRLVYAPQIPSLLSVDPTVDPLKSLANNISFATEVEVQLGKRLQASVVRQMKDSEMAMQWTLIYQLTSRLRVLFQSTPSNRLLFEYSATSQE

SEQ ID NO: 173567 - protein, 1301 aa, Zea Mays
MPPSAASEAVMQNKEAGAVAAFDHIPFSHVSANFTFNLDNSVADLYGIRACLLDGGEIRGAGNAWICPEGEGDDSAMDINLSGTILLDKVLHRYIPGGIQLIPLKIGELNGETRLSGSLIRPKFDIKWAAPNAEDSFSDARGNIVIAHDYIMVNSSSVSFDLNSRVQTSYINDYLLNKETYQMKKIMPLIVEGVDLDLRMRGFEFAHIASSIPFDSPRPLHLKASGRVKFQGKIMKSSNIADGNINGVLQSNIDQNKLETNASKLVGDISLSGIKLNQLMLAPQSTGFLSISRDSMMLNATGRPDENFSIEVNGPLLFTSNEVIQDVRLLSIFLQKGQLRSNICYHPENLTSLEVRNLTLDELEFASLRGFVQKAELQLNFQKRRGHGLLSIIRPKFSGVLGEALDIAARWSGDVITMEKSILEQANSKYEVQGEYVFPGTRDRFPVESQSNGFIEKAMGGHLGSIMSSMGRWRMRLEVPGAEVAEMLPLARLLSRSTDPVIRSRSKELFMQCLHSVGFNAESLNDQLKALEIYHDWLDDDTMEDIAFPGLAELRGYWRGSLDASGGGNGDTMADFDFNGEDWEWGTYKTQRVLASGSFSNNDGLRLDKLFIQKDNATLHADGSILGPLTNLHFAVLNFPVGLIPALVQAIESSTTDSIHFLRQWLTPIKGILHMEGDLRGTLAKPECDVQIRLLDGTIGGIDLGRAEVLASVTPTSRFVFDANFEPTIQSGHVNIQGSIPVTYVDNSSIEESPEEADGKQGIIRIPVWARDRGSSNEISEARMVRDKTEEGWEFQLAEKLKGLSYNMLEPGEVRIDADIKDGGMMLITALSPYANWLQGYADVFLQVKGTVDQPVVDGSATFNRAIVNSPFLRTPLTNFAGTIQVISNRLCISSMESRVGRKGRLSMKGSLPLKNSEPSANDKIDLKCEVLDIRAKNILSGQVDSQLQVTGSILRPDLSGMIRLSHGEAYLPHDKGNGAAVTRLTSNKSSYLLSGFDQSTTSQDVSRILGSLSTSAERDQSDTEKTLEHGSFNPNIDARLNDLKLTLGPELRIVYPLILNFAVSGDLELNGMVHPKYLRPKGILTFENGEVNLVATQVRLKNDHLNAAKFEPDLGLDPVLDLVLVGSEWQFKIQSRASMWQDNLVVTSTRSVDQDVLSPSEAAKVFESQLAESLLEGDGQLAFKKLATATLETLMPRIEGKGEFGQARWRLVYAPQIPSLLSVDPTVDPLKSLANNISFATEVEVQLGKRLQASVVRQMKDSEMAMQWTLIYQLTSRLRVLFQSTPSNRLLFEYSATSQE

SEQ ID NO: 173568 - protein, 2066 aa, Zea Mays
MSHCPRASLSLAPPSPFLFPHCPSPRRRRRPRGRSLHLTSRPLLTLARFDPPRLFRLKVSDSSASPGEAAHAHAHHSNHRAHAHHSPAPSLLPWPRALIGSLAPVWREGLFLVRCSVFAAVVSVAGALSWFAQLRARSFVEARLLPAACSALSEYLQREVRLGKVRSISPIGITLQTCSIGPHEEEFSCAEVPVMKIRVRPFASLRRGRVVVDAVLSEPSALVAQKKDFSWLGIPAPSEGTVKRHSGEEGIDYRTKTRRLAREKAAEQWNEERDKAAREAAEKGYTIPSGQSVPLSSNEILEADGPTEIGKSSPPLCADQMHKNDHHLATGIDSGSKHADLEKSFGFKSPIPGINLWSRVISSPSRLRYMRKAPSKVIPDVDNSSQQRILRRSADAAVSYFQNTGHINIDDSSPGPGKGSSDGGHANVGGSGINSNDETVSNSKTASTSLAESPSHSQLSSQCSSSNLDNLLLWHNLEDLQIGQAKNPSGNKPVPHQENIFGNFGSCTHAHNWVPFWPFQLKSCPVSFNSPWASLDLQIEKLKSQFAIGPGDFSAELTEGVSEIHPGGVQNALPITLDSVYFNGGNLMLLGYGDQEPREMKHASGHVKFKNNYNRVHVHVTGNCMEWRQDRSSQGGGYLSTDVFVDIAEETWHANLNIVDAFAPLFERILEIPVVWHKGRATGEVHICMSKGDSFPSIHGQLDVKGLAFQILDAPSSFSDIVAKLSFRGQRVFLHNASGWFGDAPVEASGDLGLNPEDGEFHLMCQVPSVEVNALMRTMKMKPLMFPLAGSVTAVFNCQGPLDAPVFVGSGIVSRKSFSVSGMPPSAASEAVMQNKEAGAVAAFDHIPFSHVSANFTFNLDNSVADLYGIRACLLDGGEIRGAGNAWICPEGEGDDSAMDINLSGTILLDKVLHRYIPGGIQLIPLKIGELNGETRLSGSLIRPKFDIKWAAPNAEDSFSDARGNIVIAHDYIMVNSSSVSFDLNSRVQTSYINDYLLNKETYQMKKIMPLIVEGVDLDLRMRGFEFAHIASSIPFDSPRPLHLKASGRVKFQGKIMKSSNIADGNINGVLQSNIDQNKLETNASKLVGDISLSGIKLNQLMLAPQSTGFLSISRDSMMVRNLTLDELEFASLRGFVQKAELQLNFQKRRGHGLLSIIRPKFSGVLGEALDIAARWSGDVITMEKSILEQANSKYEVQGEYVFPGTRDRFPVESQSNGFIEKAMGGHLGSIMSSMGRWRMRLEVPGAEVAEMLPLARLLSRSTDPVIRSRSKELFMQCLHSVGFNAESLNDQLKALEIYHDWLDDDTMEDIAFPGLAELRGYWRGSLDASGGGNGDTMADFDFNGEDWEWGTYKTQRVLASGSFSNNDGLRLDKLFIQKDNATLHADGSILGPLTNLHFAVLNFPVGLIPALVQAIESSTTDSIHFLRQWLTPIKGILHMEGDLRGTLAKPECDVQIRLLDGTIGGIDLGRAEVLASVTPTSRFVFDANFEPTIQSGHVNIQGSIPVTYVDNSSIEESPEEADGKQGIIRIPVWARDRGSSNEISEARMVRDKTEEGWEFQLAEKLKGLSYNMLEPGEVRIDADIKDGGMMLITALSPYANWLQGYADVFLQVKGTVDQPVVDGSATFNRAIVNSPFLRTPLTNFAGTIQVISNRLCISSMESRVGRKGRLSMKGSLPLKNSEPSANDKIDLKCEVLDIRAKNILSGQVDSQLQVTGSILRPDLSGMIRLSHGEAYLPHDKGNGAAVTRLTSNKSSYLLSGFDQSTTSQDVSRILGSLSTSAERDQSDTEKTLEHGSFNPNIDARLNDLKLTLGPELRIVYPLILNFAVSGDLELNGMVHPKYLRPKGILTFENGEVNLVATQVRLKNDHLNAAKFEPDLGLDPVLDLVLVGSEWQFKIQSRASMWQDNLVVTSTRSVDQDVLSPSEAAKVFESQLAESLLEGDGQLAFKKLATATLETLMPRIEGKGEFGQARWRLVYAPQIPSLLSVDPTVDPLKSLANNISFATEVEVQLGKRLQASVVRQMKDSEMAMQWTLIYQLTSRLRVLFQSTPSNRLLFEYSATSQE

SEQ ID NO: 173569 - protein, 2167 aa, Zea Mays
MSHCPRASLSLAPPSPFLFPHCPSPRRRRRPRGRSLHLTSRPLLTLARFDPPRLFRLKVSDSSASPGEAAHAHAHHSNHRAHAHHSPAPSLLPWPRALIGSLAPVWREGLFLVRCSVFAAVVSVAGALSWFAQLRARSFVEARLLPAACSALSEYLQREVRLGKVRSISPIGITLQTCSIGPHEEEFSCAEVPVMKIRVRPFASLRRGRVVVDAVLSEPSALVAQKKDFSWLGIPAPSEGTVKRHSGEEGIDYRTKTRRLAREKAAEQWNEERDKAAREAAEKGYTIPSGQSVPLSSNEILEADGPTEIGKSSPPLCADQMHKNDHHLATGIDSGSKHADLEKSFGFKSPIPGINLWSRVISSPSRLRYMRKAPSKVIPDVDNSSQQRILRRSADAAVSYFQNTGHINIDDSSPGPGKGSSDGGHANVGGSGINSNDETVSNSKTASTSLAESPSHSQLSSQCSSSNLDNLLLWHNLEDLQIGQAKNPSGNKPVPHQENIFGNFGSCTHAHNWVPFWPFQLKSCPVSFNSPWASLDLQIEKLKSQFAIGPGDFSAELTEGVSEIHPGGVQNALPITLDSVYFNGGNLMLLGYGDQEPREMKHASGHVKFKNNYNRVHVHVTGNCMEWRQDRSSQGGGYLSTDVFVDIAEETWHANLNIVDAFAPLFERILEIPVVWHKGRATGEVHICMSKGDSFPSIHGQLDVKGLAFQILDAPSSFSDIVAKLSFRGQRVFLHNASGWFGDAPVEASGDLGLNPEDGEFHLMCQVPSVEVNALMRTMKMKPLMFPLAGSVTAVFNCQGPLDAPVFVGSGIVSRKSFSVSGMPPSAASEAVMQNKEAGAVAAFDHIPFSHVSANFTFNLDNSVADLYGIRACLLDGGEIRGAGNAWICPEGEGDDSAMDINLSGTILLDKVLHRYIPGGIQLIPLKIGELNGETRLSGSLIRPKFDIKWAAPNAEDSFSDARGNIVIAHDYIMVNSSSVSFDLNSRVQTSYINDYLLNKETYQMKKIMPLIVEGVDLDLRMRGFEFAHIASSIPFDSPRPLHLKASGRVKFQGKIMKSSNIADGNINGVLQSNIDQNKLETNASKLVGDISLSGIKLNQLMLAPQSTGFLSISRDSMMLNATGRPDENFSIEVNGPLLFTSNEVIQDVRLLSIFLQKGQLRSNICYHPENLTSLEVRNLTLDELEFASLRGFVQKAELQLNFQKRRGHGLLSIIRPKFSGVLGEALDIAARWSGDVGWGNTDSGKMISTLLRRLLFSYVVAQQSNEAQLKRRPRRAQYCSITMEKSILEQANSKYEVQGEYVFPGTRDRFPVESQSNGFIEKAMGGHLGSIMSSMGRWRMRLEVPGAEVAEMLPLARLLSRSTDPVIRSRSKELFMQCLHSVGFNAESLNDQLKALEIYHDWLDDDTMEDIAFPGLAELRGYWRGSLDASGGGNGDTMADFDFNGEDWEWGTYKTQRVLASGSFSNNDGLRLDKLFIQKDNATLHADGSILGPLTNLHFAVLNFPVGLIPALVQAIESSTTDSIHFLRQWLTPIKGILHMEGDLRGTLAKPECDVQIRLLDGTIGGIDLGRAEVLASVTPTSRFVFDANFEPTIQSGHVNIQGSIPVTYVDNSSIEESPEEADGKQGIIRIPVWARDRGSSNEISEARMVRDKTEEGWEFQLAEKLKGLSYNMLEPGEVRIDADIKDGGMMLITALSPYANWLQGYADVFLQVKGTVDQPVVDGSATFNRAIVNSPFLRTPLTNFAGTIQVISNRLCISSMESRVGRKGRLSMKGSLPLKNSEPSANDKIDLKCEVLDIRAKNILSGQVDSQLQVTGSILRPDLSGMIRLSHGEAYLPHDKGNGAAVTRLTSNKSSYLLSGFDQSTTSQDVSRILGSLSTSAERDQSDTEKTLEHGSFNPNIDARLNDLKLTLGPELRIVYPLILNFAVSGDLELNGMVHPKYLRPKGILTFENGEVNLVATQVRLKNDHLNAAKFEPDLGLDPVLDLVLVGSEWQFKIQSRASMWQDNLVVTSTRSVDQDVLSPSEAAKVFESQLAESLLEGDGQLAFKKLATATLETLMPRIEGKGEFGQARWRLVYAPQIPSLLSVDPTVDPLKSLANNISFATEVEVQLGKRLQASVVRQMKDSEMAMQWTLIYQLTSRLRVLFQSTPSNRLLFEYSATSQE

SEQ ID NO: 173570 - protein, 1989 aa, Zea Mays
MSHCPRASLSLAPPSPFLFPHCPSPRRRRRPRGRSLHLTSRPLLTLARFDPPRLFRLKVSDSSASPGEAAHAHAHHSNHRAHAHHSPAPSLLPWPRALIGSLAPVWREGLFLVRCSVFAAVVSVAGALSWFAQLRARSFVEARLLPAACSALSEYLQREVRLGKVRSISPIGITLQTCSIGPHEEEFSCAEVPVMKIRVRPFASLRRGRVVVDAVLSEPSALVAQKKDFSWLGIPAPSEGTVKRHSGEEGIDYRTKTRRLAREKAAEQWNEERDKAAREAAEKGYTIPSGQSVPLSSNEILEADGPTEIGKSSPPLCADQMHKNDHHLATGIDSGSKHADLEKSFGFKSPIPGINLWSRVISSPSRLRYMRKAPSKVIPDVDNSSQQRILRRSADAAVSYFQNTGHINIDDSSPGPGKGSSDGGHANVGGSGINSNDETVSNSKTASTSLAESPSHSQLSSQCSSSNLDNLLLWHNLEDLQIGQAKNPSGNKPVPHQENIFGNFGSCTHAHNWVPFWPFQLKSCPVSFNSPWASLDLQIEKLKSQFAIGPGDFSAELTEGVSEIHPGGVQNALPITLDSVYFNGGNLMLLGYGDQEPREMKHASGHVKFKNNYNRVHVHVTGNCMEWRQDRSSQGGGYLSTDVFVDIAEETWHANLNIVDAFAPLFERILEIPVVWHKGRATGEVHICMSKGDSFPSIHGQLDVKGLAFQILDAPSSFSDIVAKLSFRGQRVFLHNASGWFGDAPVEASGDLGLNPEDGEFHLMCQVPSVEVNALMRTMKMKPLMFPLAGSVTAVFNCQGPLDAPVFVGSGIVSRKSFSVSGMPPSAASEAVMQNKEAGAVAAFDHIPFSHVSANFTFNLDNSVADLYGIRACLLDGGEIRGAGNAWICPEGEGDDSAMDINLSGTILLDKVLHRYIPGGIQLIPLKIGELNGETRLSGSLIRPKFDIKWAAPNAEDSFSDARGNIVIAHDYIMVNSSSVSFDLNSRVQTSYINDYLLNKETYQMKKIMPLIVEGVDLDLRMRGFEFAHIASSIPFDSPRPLHLKASGRVKFQGKIMKSSNIADGNINGVLQSNIDQNKLETNASKLVGDISLSGIKLNQLMLAPQSTGFLSISRDSMMLNATGRPDENFSIEVNGPLLFTSNEVIQDVRLLSIFLQKGQLRSNICYHPENLTSLEVRNLTLDELEFASLRGFVQKAELQLNFQKRRGHGLLSIIRPKFSGVLGEALDIAARWSGDVADFDFNGEDWEWGTYKTQRVLASGSFSNNDGLRLDKLFIQKDNATLHADGSILGPLTNLHFAVLNFPVGLIPALVQAIESSTTDSIHFLRQWLTPIKGILHMEGDLRGTLAKPECDVQIRLLDGTIGGIDLGRAEVLASVTPTSRFVFDANFEPTIQSGHVNIQGSIPVTYVDNSSIEESPEEADGKQGIIRIPVWARDRGSSNEISEARMVRDKTEEGWEFQLAEKLKGLSYNMLEPGEVRIDADIKDGGMMLITALSPYANWLQGYADVFLQVKGTVDQPVVDGSATFNRAIVNSPFLRTPLTNFAGTIQVISNRLCISSMESRVGRKGRLSMKGSLPLKNSEPSANDKIDLKCEVLDIRAKNILSGQVDSQLQVTGSILRPDLSGMIRLSHGEAYLPHDKGNGAAVTRLTSNKSSYLLSGFDQSTTSQDVSRILGSLSTSAERDQSDTEKTLEHGSFNPNIDARLNDLKLTLGPELRIVYPLILNFAVSGDLELNGMVHPKYLRPKGILTFENGEVNLVATQVRLKNDHLNAAKFEPDLGLDPVLDLVLVGSEWQFKIQSRASMWQDNLVVTSTRSVDQDVLSPSEAAKVFESQLAESLLEGDGQLAFKKLATATLETLMPRIEGKGEFGQARWRLVYAPQIPSLLSVDPTVDPLKSLANNISFATEVEVQLGKRLQASVVRQMKDSEMAMQWTLIYQLTSRIGCSSCVVQRLGGLIIVFFVDKQALISCTCTIAQLYCIYILSRKQSF

SEQ ID NO: 173571 - protein, 2123 aa, Zea Mays
MSHCPRASLSLAPPSPFLFPHCPSPRRRRRPRGRSLHLTSRPLLTLARFDPPRLFRLKVSDSSASPGEAAHAHAHHSNHRAHAHHSPAPSLLPWPRALIGSLAPVWREGLFLVRCSVFAAVVSVAGALSWFAQLRARSFVEARLLPAACSALSEYLQREVRLGKVRSISPIGITLQTCSIGPHEEEFSCAEVPVMKIRVRPFASLRRGRVVVDAVLSEPSALVAQKKDFSWLGIPAPSEGTVKRHSGEEGIDYRTKTRRLAREKAAEQWNEERDKAAREAAEKGYTIPSGQSVPLSSNEILEADGPTEIGKSSPPLCADQMHKNDHHLATGIDSGSKHADLEKSFGFKSPIPGINLWSRVISSPSRLRYMRKAPSKVIPDVDNSSQQRILRRSADAAVSYFQNTGHINIDDSSPGPGKGSSDGGHANVGGSGINSNDETVSNSKTASTSLAESPSHSQLSSQCSSSNLDNLLLWHNLEDLQIGQAKNPSGNKPVPHQENIFGNFGSCTHAHNWVPFWPFQLKSCPVSFNSPWASLDLQIEKLKSQFAIGPGDFSAELTEGVSEIHPGGVQNALPITLDSVYFNGGNLMLLGYGDQEPREMKHASGHVKFKNNYNRVHVHVTGNCMEWRQDRSSQGGGYLSTDVFVDIAEETWHANLNIVDAFAPLFERILEIPVVWHKGRATGEVHICMSKGDSFPSIHGQLDVKGLAFQILDAPSSFSDIVAKLSFRGQRVFLHNASGWFGDAPVEASGDLGLNPEDGEFHLMCQVPSVEVNALMRTMKMKPLMFPLAGSVTAVFNCQGPLDAPVFVGSGIVSRKSFSVSGMPPSAASEAVMQNKEAGAVAAFDHIPFSHVSANFTFNLDNSVADLYGIRACLLDGGEIRGAGNAWICPEGEGDDSAMDINLSGTILLDKVLHRYIPGGIQLIPLKIGELNGETRLSGSLIRPKFDIKWAAPNAEDSFSDARGNIVIAHDYIMVNSSSVSFDLNSRVQTSYINDYLLNKETYQMKKIMPLIVEGVDLDLRMRGFEFAHIASSIPFDSPRPLHLKASGRVKFQGKIMKSSNIADGNINGVLQSNIDQNKLETNASKLVGDISLSGIKLNQLMLAPQSTGFLSISRDSMMLNATGRPDENFSIEVNGPLLFTSNEVIQDVRLLSIFLQKGQLRSNICYHPENLTSLEVRNLTLDELEFASLRGFVQKAELQLNFQKRRGHGLLSIIRPKFSGVLGEALDIAARWSGDVITMEKSILEQANSKYEVQGEYVFPGTRDRFPVESQSNGFIEKAMGGHLGSIMSSMGRWRMRLEVPGAEVAEMLPLARLLSRSTDPVIRSRSKELFMQCLHSVGFNAESLNDQLKALEIYHDWLDDDTMEDIAFPGLAELRGYWRGSLDASGGGNGDTMADFDFNGEDWEWGTYKTQRVLASGSFSNNDGLRLDKLFIQKDNATLHADGSILGPLTNLHFAVLNFPVGLIPALVQAIESSTTDSIHFLRQWLTPIKGILHMEGDLRGTLAKPECDVQIRLLDGTIGGIDLGRAEVLASVTPTSRFVFDANFEPTIQSGHVNIQGSIPVTYVDNSSIEESPEEADGKQGIIRIPVWARDRGSSNEISEARMVRDKTEEGWEFQLAEKLKGLSYNMLEPGEVRIDADIKDGGMMLITALSPYANWLQGYADVFLQVKGTVDQPVVDGSATFNRAIVNSPFLRTPLTNFAGTIQVISNRLCISSMESRVGRKGRLSMKGSLPLKNSEPSANDKIDLKCEVLDIRAKNILSGQVDSQLQVTGSILRPDLSGMIRLSHGEAYLPHDKGNGAAVTRLTSNKSSYLLSGFDQSTTSQDVSRILGSLSTSAERDQSDTEKTLEHGSFNPNIDARLNDLKLTLGPELRIVYPLILNFAVSGDLELNGMVHPKYLRPKGILTFENGEVNLVATQVRLKNDHLNAAKFEPDLGLDPVLDLVLVGSEWQFKIQSRASMWQDNLVVTSTRSVDQDVLSPSEAAKVFESQLAESLLEGDGQLAFKKLATATLETLMPRIEGKGEFGQARWRLVYAPQIPSLLSVDPTVDPLKSLANNISFATEVEVQLGKRLQASVVRQMKDSEMAMQWTLIYQLTSRLRVLFQSTPSNRLLFEYSATSQE

SEQ ID NO: 173572 - protein, 207 aa, Zea Mays
MSWDIESDDGDLDDEVDDGPEDEPEHDAEDAPAEPAIRTAAAPAAPPKDTERQLSKKELKKKELAELDAVLAELGLSANSSSTAQDAEKKGTNQIGDAEKKEDAPAPPESKASKKKKKKDKSSKEGKETQEALDGSEETASAGPDEDTSAVDVKERLKKMASMKKKKSSRETDTAAKIAAAEAAARSARLAAAKKKEKSHYNQQPVR

SEQ ID NO: 173573 - protein, 234 aa, Zea Mays
MPFFLRLVSVTDAIIRLGRASCVQYGNQFLDIESDDGDLDDEVDDGPEDEPEHDAEDAPAEPAIRTAAAPAAPPKDTERQLSKKELKKKELAELDAVLAELGLSANSSSTAQDAEKKGTNQIGDAEKKEDAPAPPESKASKKKKKKDKSSKEGKETQEALDGSEETASAGPDEDTSAVDVKERLKKMASMKKKKSSRETDTAAKIAAAEAAARSARLAAAKKKEKSHYNQQPVR

SEQ ID NO: 173574 - protein, 181 aa, Zea Mays
MAGLPICPVAKRTSVFDDPTVEIQELTAVIKKDITALNSAVVDLQALCNSQNESGSLSKDTSNHSTTVVDNLKNRLMSATKEFKEVLTMRTENLKVHENRRQMFSSSAAKDASNPFIRQRPLVARDPSESSVPPAPWASDSASTPLFQSLSHSSNNWQCSRTVTCRAELRPFKMWNQQSMS

SEQ ID NO: 173575 - protein, 267 aa, Zea Mays
MAGLPICPVAKRTSVFDDPTVEIQELTAVIKKDITALNSAVVDLQALCNSQNESGSLSKDTSNHSTTVVDNLKNRLMSATKEFKEVLTMRTENLKVHENRRQMFSSSAAKDASNPFIRQRPLVARDPSESSVPPAPWASDSASTPLFQRKKTNGDHGASSSQPFAQQQQLAVQQDSYMQSRAEALQNVESTIHELSNIFTQLATMVSQQGELAIRIDENMEETVANVEGAQGQLLKYLNSISSNRWLMMKIFFVLMVFLMIFIFFVA

SEQ ID NO: 173576 - protein, 340 aa, Zea Mays
MIPTRSAQASFRDRTNEFRAAVERARRHAVPSSSSAPAAPSSSSTGPLDGLIAATSARSEFNNRASKIGLGIHQTSQKLSRLAKLAKRTSVFDDPTVEIQELTAVIKKDITALNSAVVDLQALCNSQNESGSLSKDTSNHSTTVVDNLKNRLMSATKEFKEVLTMRTEVHENRRQMFSSSAAKDASNPFIRQRPLVARDPSESSVPPAPWASDSASTPLFQRKKTNGDHGASSSQPFAQQQQLAVQQDSYMQSRAEALQNVESTIHELSNIFTQLATMVSQQGELAIRIDENMEETVANVEGAQGQLLKYLNSISSNRWLMMKIFFVLMVFLMIFIFFVA

SEQ ID NO: 173577 - protein, 257 aa, Zea Mays
MIPTRSAQASFRDRTNEFRAAVERARRHAVPSSSSAPAAPSSSSTGPLDGLIAATSARSEFNNRASKIGLGIHQTSQKLSRLAKLAKRTSVFDDPTVEIQELTAVIKKDITALNSAVVDLQALCNSQNESGSLSKDTSNHSTTVVDNLKNRLMSATKEFKEVLTMRTENLKVHENRRQMFSSSAAKDASNPFIRQRPLVARDPSESSVPPAPWASDSASTPLFQSLSHSSNNWQCSRTVTCRAELRPFKMWNQQSMS

SEQ ID NO: 173578 - protein, 952 aa, Zea Mays
MTEPRRVSFRDGCLASRKAEEAAWRRHQAAAWLQAMAINKLQPGAVTKIITNAPSNSQPLTAFQYFENIRNFLVAVNKLKLTSFEASDLDKDNLDAGTVGKIVDCVISLKSYHEWKQAGGANGPNKYMKSPLAVRSSQIQSENVASGPSPSLKRLDLTEVDADTQTFQNLDPNMKDCAFADAVEKLQKVIVDSMLSSKENIDQDILKKVPSKLIGAVLASQLGKEQFKHLQLLSPEKLIAENEPTHCIEHPNSPIESKQLLLQAHETELLDLKKMFQDVKVNFRSLQTQFRDDMAKLGENIQDLSKAALGYNQAVKENRNLYNMLQELRGNIRVFCRIRPLLHSESISSIEHVGTDGSVMVCDPVKPQSAHKIFQFNKVFGPTTTQDEVYKETQPLVRSVMDGYNVCIFAYGQTGSGKTHTMCGPSGGLSKDYGINYMALNDLFNISTSREDVKYDIRVQMVEIYNEQVRDLLNEDRSSTKLDIRASLNNGLSNLPDAKICPVQSPSDVINLMQLGEKHRASGSTAMNHRSSRSHSILTVHVNGKDIAGNVSRSSLHLVDLAGSERVDRSEATGDRLKEAQHINKSLSCLGDVINALAQKNSHIPYRNSKLTQLLQSSLGGNAKMLMFAHISPDAESCAETLSTLKFAQRASTVELGTALANKESSEVRELKEQVDTLKKALASKELEKTTLKVKGSATTSERTKQVLDCTPPRPRRLSLENASDKARMPERKILKSPRSAVGITHDKECNTDAFRHANHHESLIQMSAACAEVLVREEEKIICTVDTVEFCQLPTEAYNLLKQSGLNTPEAAPCRSRNLRTEASCGDALSSTTKLEKIMAGTAVKKGSQLKKSIQSSIGRLIHGTERRNAQHSAQGTPTKIIASGCHNNVSPVTADIRLRRRQSLTGIPPPLPTMSRRSSLGGRSDTSSNDKRGAKTPPPVNSAAKAKRWL

SEQ ID NO: 173579 - protein, 83 aa, Zea Mays
MCCSGYPRYNCCYHWGGSWNSCSLIFFSLQGYPPKLALTVIIWAAAGSGSGTHVFFSLHCIVIVHTYSSTWCPCVEEIVQSTS

SEQ ID NO: 173580 - protein, 107 aa, Zea Mays
MSGEEADGSKPQGGGVHYGTFQGPPSYPPPRPPPSLSAHHRGDYQAVPVLERRFYCTSLVYSYLLSNPSCPVPVPTVCNLEITRQVCGDVAMIDFPVVALVLDGSCS

SEQ ID NO: 173581 - protein, 78 aa, Zea Mays
MSCGSDVCRDSCSSSGSEEFRRSWPSKVTADDSVAPARSSDVAAPASWIDRKLLVDPKMMFVWDKIGEGAHGKVYKGK

SEQ ID NO: 173582 - protein, 170 aa, Zea Mays
MPTDERSAKPQPPFPPPRRAFHPQPAAESSVPSSASPRPASLPAAHHSRSAPPRRRITPGRQARFPRPPRFPSRRSLKGSIPRPHPAHSIAQSPLAQGFHPAAASSAFHRSRVSIPPSPHPAHSIPRPQGFPSRNHRSRIPSRNHRYRIHGFNRLPPRSPSIHGEVAGYF

SEQ ID NO: 173583 - protein, 417 aa, Zea Mays
MVIVWTGLSYLHPGKVPSGVPRRLSSPLPWESSSLGHWTTARDLFSVPPAYIFGAILPAFMVAGLYFFDHSVASQLAQQKEYNLKKPSAYHYDILVLGFVVLLCGLLGIPPSNGVLPQSPMHTKSLAVLKRQLLSKKMVDTAKESIGGSATSLEIYGKMEEVFIKMDSEQNTDSVDRELKNFKDAVLQEGDEEGRLAREFDPRKHIEAHLPVRVNEQRLSNLLQSILVGGCVGAMPVIRMIPTSVLWGYFAYMAIDSLPGNQFWERIQLLFITESRRYKVLEGPHASFVESVVPKTVTIFTIFQLVYLLICFGITWIPIAGILFPVPFFLMIVIRQYLLPKFFDPVVLRELDAAEYEELDGVPLEHKLEDEASEVGSCPSRPDAEILDELTTNRGELKHRSSSLREERPIQVTEPTG

SEQ ID NO: 173584 - protein, 665 aa, Zea Mays
MDLLRHPFKGVVTDIKGRATWYKHDWVAGLHSGFRILAPTMYIFFASALPVIAFGAQLSTATNGILSTVETLASTAICGIIHSILGGQPLLIVGVAEPTIIMYTYLYNFAKNHQALGEQLYLAWTGWVCIWTAIMLFLLATFNASNVISRFTRIAGELFGMLITVLFLQEAIKGMISEFSVPEDADSSSPIYQFQWLYVNGLLGVIFSIGLLYTALRTRRARSWLYGTGWFRSFIADYGVPLMVIVWTGLSYLHPGKVPSGVPRRLSSPLPWESSSLGHWTTARDLFSVPPAYIFGAILPAFMVAGLYFFDHSVASQLAQQKEYNLKKPSAYHYDILVLGFVVLLCGLLGIPPSNGVLPQSPMHTKSLAVLKRQLLSKKMVDTAKESIGGSATSLEIYGKMEEVFIKMDSEQNTDSVDRELKNFKDAVLQEGDEEGRLAREFDPRKHIEAHLPVRVNEQRLSNLLQSILVGGCVGAMPVIRMIPTSVLWGYFAYMAIDSLPGNQFWERIQLLFITESRRYKVLEGPHASFVESVVPKTVTIFTIFQLVYLLICFGITWIPIAGILFPVPFFLMIVIRQYLLPKFFDPVVLRELDAAEYEELDGVPLEHKLEDEASEVGSCPSRPDAEILDELTTNRGELKHRSSSLREERPIQVTVASSAVQPSL

SEQ ID NO: 173585 - protein, 73 aa, Zea Mays
MSWLMCCVKESQLLSLRCIFLGIVQCHLIIHHACITSKMNNIQFVYKGKQSILCYTKSSYISFLLYMYILIRP

SEQ ID NO: 173586 - protein, 126 aa, Zea Mays
MTSPSTPCGNDYSGTTTFTTTMSSMHQFISSHVDRTVLMPPLVGLLQRLLQRLLKKIYQNGGSLMSSSLKRGISSSKKPAGTGSQKKGASTGSSPIFFSSSVLHRRRNYSRSYISNQTWCSFYSSS

SEQ ID NO: 173587 - protein, 82 aa, Zea Mays
MMLPATPLLLLPASSRALIESCALRSTELLSRSRSIVPQLTSASSTSQSYQGLAAAGACWLVTLVSLPPPSRSLSVFFFIFI

SEQ ID NO: 173588 - protein, 109 aa, Zea Mays
MEPNTKVYRDRAAERRILHRGLGVGPGQKQSNTNNFDEYEESIEDMDSMGVASADLNFQSSGLLSAKRIMENMGWKQGEALGKSRKGIVEPIQPSINKHGAGLGWRQTR

SEQ ID NO: 173589 - protein, 292 aa, Zea Mays
MPLTTDLENEPTANHPYDEANQDVLEHSSGLETTILDNENEIPGPPSEWMEETLINLYLSGYSNNEVNAESSLVIAHSNEEDRIETTGNKLDSLTSDSASASLHDATSQQTEVETETKNSAYVYESLGEEEEKWHAQYGQVERSNDDQHLPPTIDIWDWDVVQDHVNKGQPVVRLVGCLSRGSNKLHPSLPTRGGLVRTAPVREVHLDLVQVSTGKLYRLRNPSRKYLATLSAYDSSNPTKDWGFPDINLNKQSTAKCQSEVLADKSCGGGSVSAANTMARAEHKSLQGQSC

SEQ ID NO: 173590 - protein, 442 aa, Zea Mays
MGGGDDAAAGVGDGFAWDADSQLYYHASTAFYHDPVAGWYYSSRDSQYYVYKNGNYMPLTTDLENEPTANHPYDEANQDVLEHSCLETTILDNENEIPGPPSEWMEETLINLYLSGYSNNEVNAESSLVIAHSNEEDRIETTGNKLDSLTSDSASASLHDATSQQTEVETETKNSAYVYESLGEEEEKWHAQYGQVERSNDDQHLPPTIDIWDWDVVQDHVNKGQPVVRLVGCLSRGSNKLHPSLPTRGGLVRTAPVREVHLDLVQVSTGKLYRLRNPSRKYLATLSAYDSSNPTKDWGFPDINLNKQSTAKCQSEVLADKSCGGGSVSAANTMEPNTKVYRDRAAERRILHRGLGVGPGQKQSNTNNFDEYEESIEDMDSMGVASADLNFQSSGLLSAKRIMENMGWKQGEALGKSRKGIVEPIQPSINKHGAGLGWRQTR

SEQ ID NO: 173591 - protein, 272 aa, Zea Mays
MNPQPIIHMMRPTKMSWNTLQAWKQLYLTMRMKYQDLHQNGYSNNEVNAESSLVIAHSNEEDRIETTGNKLDSLTSDSASASLHDATSQQTEVETETKNSAYVYESLGEEEEKWHAQYGQVERSNDDQHLPPTIDIWDWDVVQDHVNKGQPVVRLVGCLSRGSNKLHPSLPTRGGLVRTAPVREVHLDLVQVSTGKLYRLRNPSRKYLATLSAYDSSNPTKDWGFPDINLNKQSTAKCQSEVLADKSCGGGSVSAANTMARAEHKSLQGQSC

SEQ ID NO: 173592 - protein, 367 aa, Zea Mays
MNPQPIIHMMRPTKMSWNTLQAWKQLYLTMRMKYQDLHQNGYSNNEVNAESSLVIAHSNEEDRIETTGNKLDSLTSDSASASLHDATSQQTEVETETKNSAYVYESLGEEEEKWHAQYGQVERSNDDQHLPPTIDIWDWDVVQDHVNKGQPVVRLVGCLSRGSNKLHPSLPTRGGLVRTAPVREVHLDLVQVSTGKLYRLRNPSRKYLATLSAYDSSNPTKDWGFPDINLNKQSTAKCQSEVLADKSCGGGSVSAANTMEPNTKVYRDRAAERRILHRGLGVGPGQKQSNTNNFDEYEESIEDMDSMGVASADLNFQSSGLLSAKRIMENMGWKQGEALGKSRKGIVEPIQPSINKHGAGLGWRQTR

SEQ ID NO: 173593 - protein, 366 aa, Zea Mays
MNPQPIIHMMRPTKMSWNTLAWKQLYLTMRMKYQDLHQNGYSNNEVNAESSLVIAHSNEEDRIETTGNKLDSLTSDSASASLHDATSQQTEVETETKNSAYVYESLGEEEEKWHAQYGQVERSNDDQHLPPTIDIWDWDVVQDHVNKGQPVVRLVGCLSRGSNKLHPSLPTRGGLVRTAPVREVHLDLVQVSTGKLYRLRNPSRKYLATLSAYDSSNPTKDWGFPDINLNKQSTAKCQSEVLADKSCGGGSVSAANTMEPNTKVYRDRAAERRILHRGLGVGPGQKQSNTNNFDEYEESIEDMDSMGVASADLNFQSSGLLSAKRIMENMGWKQGEALGKSRKGIVEPIQPSINKHGAGLGWRQTR

SEQ ID NO: 173594 - protein, 200 aa, Zea Mays
MAQRLIKKNVDTLISTNPPGFIPREITDLLEKSFEWNVSFTESTIIYGSVSFQVNAINAEMDGGNMLPTTPSSQPSSTIFSQVGHGSGVAQNRGAAFIREPSLTPESHKVSSSAKCNIQTTPHQGDNLLQGTEIITSPPNVQAPSGAAYSVLDGSTNKAHKSVVGKRSRTSPSKKVAKKLFRDEDTGDDDVAGSADVDAE

SEQ ID NO: 173595 - protein, 414 aa, Zea Mays
MSSQVSTSHGLHPPGKLGTFESPHAWPLSAPTAQPEAGRGDDQEVRLLSVAWNQDCGCFAAGTSNGFRIFNCDPFKETFRRDLKSGGFGIVEMLFRCNILALVGGGSNVQYPPNKVMIWDDHQSRCIGEFAFRSDVRAVKLAKDYIVIVLERKIFVYNFTDLKLLYQIDTLSNPKGLCCLSHNSNTSVLACPGVHQGHVRVEHFGLKMAKTISAHDSHISCMSLTMDGLLLATASTKGTLIRIFNTMDGTRLQEVRRGLDRAEIYSIAVSPNVQWLAVSSDKGTVHIFSLRVRVAGEDASNEQRTAESPRMDHQSSSSSIDPLIQANTGSNASSSLSFMRGILPKYFSSEWSFAQFHLPEVTRYIVAFGAQNTVMMVGLDGRCSFDQVNGGQMLQKEYFRFLKSDSPPLRSAAI

SEQ ID NO: 173596 - protein, 133 aa, Zea Mays
MGRPSPLTPWPSGASFDPPLATDLTPPASRCGSTPCRSLVASVRAVVKKREEEEEEEEEMKVGEWAGMGVRVEVGSARRAAAGVGEGWRRRRRWRVCRARREEAKATAMIGLGGRIEIGFAVGGHRRGSQKRD

SEQ ID NO: 173597 - protein, 83 aa, Zea Mays
MQNYSFLLNNLRLVTPNRPPGSLELNRTQKQSSLAVETRTATLREGERSIKQCTRWKIDAVKSCHEAFSRLSASSRRLRSSAC

SEQ ID NO: 173598 - protein, 68 aa, Zea Mays
MVTPEKFCESMHLCKKGMKISLPTREGTCGLCHHVVVEILIMLKDPNMQLEVIDLLTKTCSKAQNYEQ

SEQ ID NO: 173599 - protein, 55 aa, Zea Mays
MISRYVNEGCTLMALWFFRDMASRGIVVDQYTAVALLTCCGRLKNKIIGRSVLAH

SEQ ID NO: 173600 - protein, 195 aa, Zea Mays
MQPSSKKQKTSGGSQEQSIDELNDVTAASGVNIRADGSGATELEKEKEESRPKNVKPNKEEDDKMRANAANVAARQAVGGSDMLSKWQLMAEQARQKREGIDVSAASQPGRGPGSRQLSKFGKGPGEHPEGSKRSHSMAFGTGGMKRPGRTAFAGPQRLISVKDVICALEREPQMTKSRLIYRLHERLPVDSTVD

SEQ ID NO: 173601 - protein, 510 aa, Zea Mays
MLIPILQAHLDRDKDMQLQTVWAKLRRNEVNKDDFLRVIRNIVGDQMLKQAAHKVFVQMQAQAQRNSQANSSQQSLFSQLSAQQMASSGSAQLHDQKIRPPGPPNQGQKNQVSSSPQAFAPPSGTQPQNSVHYLAHDNPNQNPDAKGTNVVPNQPSRMNTSVPLQTKNKQHQPTQLQQASQQIYGASNPGAQAYPRSITGSLRSPSLVPETQPSMHAPGMAPAKMVPPPTHPMMQHNATAWQMHQNRELKTNAPPPNANMKQNSESVGKVRMAGTGNSSAKGKQGTPNSTPNASGGTKSSKKSGGQKKSLEAAGSMQPSSKKQKTSGGSQEQSIDELNDVTAASGVNIRADGSGATELEKEKEESRPKNVKPNKEEDDKMRANAANVAARQAVGGSDMLSKWQLMAEQARQKREGIDVSAASQPGRGPGSRQLSKFGKGPGEHPEGSKRSHSMAFGTGGMKRPGRTAFAGPQRLISVKDVICALEREPQMTKSRLIYRLHERLPVDSTVD

SEQ ID NO: 173602 - protein, 577 aa, Zea Mays
MSKAPDDHLQATEQEGSVHSSQQAGQQHVNTADQFSKTELTEGSKIEQPVQVEQQSSHLQQAYPEIQLQQAETDSFQLAEKETGYFGQQSSAGAKVDVAQPSVVQQNAKQTVGQQASSGTQDTKKGPSIPFNMLIPILQAHLDRDKDMQLQTVWAKLRRNEVNKDDFLRVIRNIVGDQMLKQAAHKVFVQMQAQAQRNSQANSSQQSLFSQLSAQQMASSGSAQLHDQKIRPPGPPNQGQKNQVSSSPQAFAPPSGTQPQNSVHYLAHDNPNQNPDAKGTNVVPNQPSRMNTSVPLQTKNKQHQPTQLQQASQQIYGASNPGAQAYPRSITGSLRSPSLVPETQPSMHAPGMAPAKMVPPPTHPMMQHNATAWQMHQNRELKTNAPPPNANMKQNSESVGKVRMAGTGNSSAKGKQADGSGATELEKEKEESRPKNVKPNKEEDDKMRANAANVAARQAVGGSDMLSKWQLMAEQARQKREGIDVSAASQPGRGPGSRQLSKFGKGPGEHPEGSKRSHSMAFGTGGMKRPGRTAFAGPQRLISVKDVICALEREPQMTKSRLIYRLHERLPVDSTVD

SEQ ID NO: 173603 - protein, 591 aa, Zea Mays
MSKAPDDHLQATEQEGSVHSSQQAGQQHVNTADQFSKTELTEGSKIEQPVQVEQQSSHLQQAYPEIQLQQAETDSFQLAEKETGYFGQQSSAGAKVDVAQPSVVQQNAKQTVGQQASSGTQDTKKGPSIPFNMLIPILQMQAQAQRNSQANSSQQSLFSQLSAQQMASSGSAQLHDQKIRPPGPPNQGQKNQVSSSPQAFAPPSGTQPQNSVHYLAHDNPNQNPDAKGTNVVPNQPSRMNTSVPLQTKNKQHQPTQLQQASQQIYGASNPGAQAYPRSITGSLRSPSLVPETQPSMHAPGMAPAKMVPPPTHPMMQHNATAWQMHQNRELKTNAPPPNANMKQNSESVGKVRMAGTGNSSAKGKQGTPNSTPNASGGTKSSKKSGGQKKSLEAAGSMQPSSKKQKTSGGSQEQSIDELNDVTAASGVNIRADGSGATELEKEKEESRPKNVKPNKEEDDKMRANAANVAARQAVGGSDMLSKWQLMAEQARQKREGIDVSAASQPGRGPGSRQLSKFGKGPGEHPEGSKRSHSMAFGTGGMKRPGRTAFAGPQRLISVKDVICALEREPQMTKSRLIYRLHERLPVDSTVD

SEQ ID NO: 173604 - protein, 628 aa, Zea Mays
MSKAPDDHLQATEQEGSVHSSQQAGQQHVNTADQFSKTELTEGSKIEQPVQVEQQSSHLQQAYPEIQLQQAETDSFQLAEKETGYFGQQSSAGAKVDVAQPSVVQQNAKQTVGQQASSGTQDTKKGPSIPFNMLIPILQAHLDRDKDMQLQTVWAKLRRNEVNKDDFLRVIRNIVGDQMLKQAAHKVFVQMQAQAQRNSQANSSQQSLFSQLSAQQMASSGSAQLHDQKIRPPGPPNQGQKNQVSSSPQAFAPPSGTQPQNSVHYLAHDNPNQNPDAKGTNVVPNQPSRMNTSVPLQTKNKQHQPTQLQQASQQIYGASNPGAQAYPRSITGSLRSPSLVPETQPSMHAPGMAPAKMVPPPTHPMMQHNATAWQMHQNRELKTNAPPPNANMKQNSESVGKVRMAGTGNSSAKGKQGTPNSTPNASGGTKSSKKSGGQKKSLEAAGSQEQSIDELNDVTAASGVNIRADGSGATELEKEKEESRPKNVKPNKEEDDKMRANAANVAARQAVGGSDMLSKWQLMAEQARQKREGIDVSAASQPGRGPGSRQLSKFGKGPGEHPEGSKRSHSMAFGTGGMKRPGRTAFAGPQRLISVKDVICALEREPQMTKSRLIYRLHERLPVDSTVD

SEQ ID NO: 173605 - protein, 468 aa, Zea Mays
MQAQMQRNSQANSSQQSLFSQLSAQQMASSGSAQLHDQKIRPPGPPNQGQKNQVSSSPQAFAPPSGTQPQNSVHYLAHDNPNQNPDAKGTNVVPNQPSRMNTSVPLQTKDKQHQPTQLQQASQQIYGANNPGAQAYPRSITGSLRSPSPVPETQPSMHAPGMAPAKMVPPPTHPMMQHNATAWKMHQNRELKTNAPPPNANMKQNSESVGKVRMAGTGNSSAKGKQGTPNSTPNASGGTKSSKKSGGQKKSLEAAGSMQPSSKKQKKSGAPQEQSIDELNDVTAASGVNIRDNKEIDICREMLDKMGYPKLELGLSAMPKDQLADNLAYNSLKGLILSKALMAQKDAEDESTRIAFENLRSEVISLRNEALEKDKILLSLVERLKSSDARLASLSEVEQKMEKFEKKKEADAKRIADLEYALSIQARLQRFEVEGLEKKLDEITENFNVEQTEREISDTKRLRVQKNV

SEQ ID NO: 173606 - protein, 390 aa, Zea Mays
MGNSIYRFLCGLCAPSSSEHGLHGAHPAVAALGRDVLSFQSTSQVPDELSRHVVSSKKAQANWYKKLLVAWKKARPPPKTPEEAAAFVVQTLKNHQKADVEGLLSFYGLPHPNAAAAAAGAPAARPPPKKAQQGAKFELHTLPIDPKSVADGDTVNVYVDAADPREAGSVPREVQKAAAERARARAAKDYQKADALQKVIVDAGYRPVPNARGEEVLAKKYRIRLRGIDAPESAMPYGKEAKEALLKLVQGKSLKGLILSKALMAQKDAEDESTRIAFENLRSEVISLRNEALEKDKILLSLVERLKSSDARLASLSEVEQKMEKFEKKKEADAKRIADLEYALSIQARLQRFEVEGLEKKLDEITENFNVEQTEREISDTKRLRVQKNV

SEQ ID NO: 173607 - protein, 359 aa, Zea Mays
MLIPILQAHLDRDKDMQLQTVWAKLRRNEVNKDDFLRVTVNIVGDQMLKQAAHKVFVQMQAQMQRNSQANSSQQSLFSQLSAQQMASSGSAQLHDQKIRPPGPPNQGQKNQVSSSPQAFAPPSGTQPQNSVHYLAHDNPNQNPDAKGTNVVPNQPSRMNTSVPLQTKDKQHQPTQLQQASQQIYGANNPGAQAYPRSITGSLRSPSPVPETQPSMHAPGMAPAKMVPPPTHPMMQHNATAWKMHQNRELKTNAPPPNANMKQNSESVGKVRMAGTGNSSAKGKQGTPNSTPNASGGTKSSKKSGGQKKSLEAAGSMQPSSKKQKKSGAPQEQSIDELNDVTAASGVNIRDNKEIDICRE

SEQ ID NO: 173608 - protein, 483 aa, Zea Mays
MSKAPDDHLQATEQEGSVHPSQQAGQQHVNAAYQFSKTELTEGSKNEQPVQVEQLSSHLQQAYPEIQLQQAETDSFQLAEKETGYFGQQSFAGAKVDVAQPSVVQQNVKQTVGQQASSGTQDTRKGPSIPFNMLIPILQAHLDRDKDMQLQTVWAKLRRNEVNKDDFLRVTVNIVGDQMLKQAAHKVFVQMQAQMQRNSQANSSQQSLFSQLSAQQMASSGSAQLHDQKIRPPGPPNQGQKNQVSSSPQAFAPPSGTQPQNSVHYLAHDNPNQNPDAKGTNVVPNQPSRMNTSVPLQTKDKQHQPTQLQQASQQIYGANNPGAQAYPRSITGSLRSPSPVPETQPSMHAPGMAPAKMVPPPTHPMMQHNATAWKMHQNRELKTNAPPPNANMKQNSESVGKVRMAGTGNSSAKGKQGTPNSTPNASGGTKSSKKSGGQKKSLEAAGSMQPSSKKQKKSGAPQEQSIDELNDVTAASGVNIRLL

SEQ ID NO: 173609 - protein, 115 aa, Zea Mays
MSAQTRGIDAPESAMPYGKEAKEALLKLVQGKSLKVYVYDEDRYGRCVGDIYCDGVFVQEQMLKKGFAWHYTAYDQRPELAKWEKQAQTGRKGLWAASKPQKPWEWRKDKRNGTA

SEQ ID NO: 173610 - protein, 109 aa, Zea Mays
MNPNCTEFKFPQIKAHPWHKVFNKRMPPEAVDLVSRLLQYSPNLRCTAVEALVHPFFDELRDPNTRLPNGRFLPPLFNFKPHELKGVPADIVARLVPEHAKKQCSYVGS

SEQ ID NO: 173611 - protein, 203 aa, Zea Mays
MVLSVSARDIKPQNLLVNPHTHQLKLCDFGSAKVLVKGEPNISYICSRYYRAPELIFGATEYTTAIDIWSAGCVLAELMLGQVLGTPTREEIKCMNPNCTEFKFPQIKAHPWHKVFNKRMPPEAVDLVSRLLQYSPNLRCTAVEALVHPFFDELRDPNTRLPNGRFLPPLFNFKPHELKGVPADIVARLVPEHAKKQCSYVGS

SEQ ID NO: 173612 - protein, 142 aa, Zea Mays
MDDHSSSSSLFKSTETGHIIVTTTGGKNGQPKQAKCLETGETVAIKKVLQDKRYKNRELQTIRLLDHPNVVALKHCFFSTTEKDELYLNLVLDYVPKIVHRVVKHHNKMHQHMPLIYVKLYMYQICRALAYIHGTIGVCQRY

SEQ ID NO: 173613 - protein, 362 aa, Zea Mays
MFRPPRPCRIESGEKGMGIGSAESQSQFLLGRVEEEAYHLEGESADSTIRSMRHQVVPLTANDRIPEDVPSGSQFDGTMDSRYYTNLLVNGIEESQATRSDVRIQHGRATAKSSQGRSKNFRDEEDILLVSAWLNVGMDPIQGVDQTHGTLWRRIHEYFNANKKVEARNHSGWSIDDKVANACVMFKAEDPKDKKFSYLHCWKILKDKPKWMDRRKEIGSAKKSATKKQKTTTNSSPASVANAIAVDAPLGGADHDEPSCRPDGKKKEKQKLRQRSSMEVVDYLIAKKKDSDLEKDLKKEERCNKAFALQEERIKLDKEKFAFQRQLEEDRIIGLDLSTMNYKQQQYYEDRQNEILARRFNI

SEQ ID NO: 173614 - protein, 114 aa, Zea Mays
MSRSLSMRGSMRSRRDLPPPGKTIERLESMVDGGNFYEAQQMYKSTSARYIAVHKYSEALDILQSGALVQLKLGQVTCGGELAVLFVDILITGEFPYSEQFFGQVFSFIKQHSA

SEQ ID NO: 173615 - protein, 111 aa, Zea Mays
MSRSLSMRGSMRSRRDLPPPGKTIERLESMVDGGNFYEAQQMYKSTSARYIAVHKYSEALDILQSGALVQLKLGQVTCGGELAVLFVDILITGEFPYSEQFFERYMRHSQG

SEQ ID NO: 173616 - protein, 90 aa, Zea Mays
MMRSSPARSRKKKFTNGDAHFPICKICTVKRFARLERDAYPLFRTLRQKYKTSTDRDAVFQELLDEIAAKFYNIQRQNPLEGLFSEMFRI

SEQ ID NO: 173617 - protein, 220 aa, Zea Mays
MSGSYGSDDYRGGGGGGVVVEAGAEEDTIKVVVVTVVLMTTVVAEVAAMEDETRRTKRVVKVATMLVVMDKLLKVLLPTVVLQCRLLIATVVAQAHTHQAMVPRLHTNMVVPQAGKAACLLHMLVDMVVSPCLGVEDLGVHRHLIVAALVFILVVLVLNQLEKSSNVMKIVTRHVTTQGFTYQICLLMSLLRNYRSYLEESARLGGSSKNVVTKTSGPGT

SEQ ID NO: 173618 - protein, 198 aa, Zea Mays
MSTITSEVDDEIVDVKPIVSMSVEGWNTSNSKKSHSRLDNIIMEAIKNLNEPTGSHRTTIANYIEEQYWPPSDFDHLLSAKLKYLATSGKLLKVNRKYRIAPSLLEDVQREPLKLGSDASRTLTRSQVDAELVRMATMTVEAAAAAAAHAVAEAEAIMAEAEAAAREAEAAEAEARAAQAFAEAAVLTLKNRNAAKLV

SEQ ID NO: 173619 - protein, 183 aa, Zea Mays
MGAPKQRWTSEEEAALRAGVARHGVGNWRMILNDPELSSTLRYRSNVDLKDKWRNMNVIVTSSSTRDRGRTSTRRTRAAPKNNDQLLAMSTITSEVDDEIVDVKPIVSMSVEGWNTSNSKKSHSRLDNIIMEAIKNLNEPTGSHRTTIANYIEEQYWPPSDFDHLLSAKLKYLATSGKLLKVI

SEQ ID NO: 173620 - protein, 108 aa, Zea Mays
MKAAPTNTNLMVEFLLAKKQALGSFPLVHLRKHLRLNRMTAHEHCLCLMGMLKLIWVLMEYYCGVLSHSSETLLGESSVGYPNHFGQCLKVFDGERAQQVELHLAAQS

SEQ ID NO: 173621 - protein, 54 aa, Zea Mays
MCRANSARSSSAFFCPISIASIFPVNRSTASIIRSQRSSPFCSVPAIASRISRV

SEQ ID NO: 173622 - protein, 162 aa, Zea Mays
MLNQELTTYCLDVSGLLGTVAPCVLYGSNVERLAAGQGTFANSCLPYTGLYLLGNSLFGWNCLAPWFSHPTRTAIRQRYNLEGSFEAFTRQCGCCGDLVEDEERREHLEAACDLATHYLCHPCALCQEGRELRRRVPHPGFNNGHSVFVMMPPMEQTMGRGM

SEQ ID NO: 173623 - protein, 632 aa, Zea Mays
MEMCRGGRKGSRAAETLPMAAIAGLGHGDASAGAGADGDVQRWEEGIAGGRDLADVIFTNESNIVRWKNKRQQAVDSKVGRLDNFIECVKAPIQEVGVPKIPMIYGRVGVIALDNARQSAKIIDQSLTPGKIYDGDGFNYIKESFENGTLHLIGLLSDGGVQLSYKRTTRFTFICSIQLLLKGVSERGAKKIRVHNLTDGRDVLDGSRVGFVETLENDLLELRGKGIDAQIASGGGRMYVTMDRYENDWDVVKRDWDAQVLEEAPYKFKSALEAVKTLRAQPKANDQYLPPFVIVDDSGKAVGPVLDGDAVVTINFRADRMVMLAKALEYADFNNFDRVPVPEIRYAGMLQYDGELKLPNRYLVSTPEINRTSGEYLVKNGIRTFACRQPGKTTRSSSHALPPPYFSLLDTPPATDIPYRQVPFPRLALVACFRPAHLPPVLAMGAGANNHEESSPLIPAAVAAPAYEKPVSAHAFGGVPRESWNSGILSCLGRNDEFCSSDVEVCLLGTVAPCVLYGSNVERLAAGQGTFANSCLPYTGLYLLGNSLFGWNCLAPWFSHPTRTAPQGSPPWIQQWALRLCHDAAHGADHGAWHVSYSTTFPTLVLSVLPVVYHLLLLALMCDVSPSVNTSL

SEQ ID NO: 173624 - protein, 653 aa, Zea Mays
MEMCRGGRKGSRAAETLPMAAIAGLGHGDASAGAGADGDVQRWEEGIAGGRDLADVIFTNESNIVRWKNKRQQAVDSKVGRLDNFIECVKAPIQEVGVPKIPMIYGRVGVIALDNARQSAKIIDQSLTPGKIYDGDGFNYIKESFENGTLHLIGLLSDGGVQLSYKRTTRFTFICSIQLLLKGVSERGAKKIRVHNLTDGRDVLDGSRVGFVETLENDLLELRGKGIDAQIASGGGRMYVTMDRYENDWDVVKRDWDAQVLEEAPYKFKSALEAVKTLRAQPKANDQYLPPFVIVDDSGKAVGPVLDGDAVVTINFRADRMVMLAKALEYADFNNFDRVPVPEIRYAGMLQYDGELKLPNRYLVSTPEINRTSGEYLVKNGIRTFACRQPGKTTRSSSHALPPPYFSLLDTPPATDIPYRQVPFPRLALVACFRPAHLPPVLAMGAGANNHEESSPLIPAAVAAPAYEKPVSAHAFGGVPRESWNSGILSCLGRNDEFCSSDVEVCLLGTVAPCVLYGSNVERLAAGQGTFANSCLPYTGLYLLGNSLFGWNCLAPWFSHPTRTAIRQRYNLEGSFEAFTRQCGCCGDLVEDEERREHLEAACDLATHYLCHPCALCQEGRELRRRVPHPGFNNGHSVFVMMPPMEQTMGRGM

SEQ ID NO: 173625 - protein, 61 aa, Zea Mays
MSLAPRRILHRCGLTQLPNQPTKHDQAASMETGPGKYRHPNMTRVEACNTQILNLELVEEI

SEQ ID NO: 173626 - protein, 589 aa, Zea Mays
MGIHGFLVNCSQLQSLTISTNIGLTGWLPASIVNLSTTMQGLMLADTGIVGSIPLEIGNLFNLQFFSVSNTSVSGAVPDSIGKLVNLVELNLYNTNLSGLIPSSIGNLSELAALVAFNSNLEGPIPKSIGRLKNLYALDISSNRLNGSIPVEIFQLPLLSRYLGLLHNSLSGTLPAEVGSLINLNILALSRNQLSGEIPGSIGDCTVLQELGLDDNLFEGAIPQSLSNIKGLTGLNLSMNKLSGVIPEAIGSMRNLQQLYLAHNNLSGTIPIILQNLTLSELDLSFNNLQGEVPKEGIFKILANLSITGNNDLCGGVTELRLPPCHINVVKSNKKEKLKSLTIGLATTGALLFLAFAIAAQLICKKLRQRQTRSFQPPKIEEHYERVSYQTLENGTNGFSEANLLGKGSFGEVYKCTFQDEGNIAAVKVFRLEQTRSIKSFVAECEALRRVRHRCLIKIITCCSSINHQGQEFKALVFEFMPNGILNDWIHSKSAMPTLRNSLSLEQRLNIAVDIIDALDYLHNHCQPPIVHCDLKPSNILLAEDMSARVGDFSISRILPESASKALHISRSPMVECGVDNSAVICNDN

SEQ ID NO: 173627 - protein, 125 aa, Zea Mays
MRKLLGPIRLANFTIGLSNSGRPVHLDVLLRYCDSEDDKRGVLCFGIKIWTTLCNSHTSIHPSIHPSIHLSELLRLQDERTNRKKKAFDDTLEDTPPSPTPLLFPHDSAHCEASSSTRSCNWTSY

SEQ ID NO: 173628 - protein, 243 aa, Zea Mays
MEKNPTARIDVLKLDLSSLKSVRAFVDQFNSMKLPLNILINNAGVMFCPFQLSKDGVEMQFATNHLGHFLLTNLLLDTMKATAKSTGIEGRIVNLSSVAHHHTYPKGIDFDNLNDEKIYNDKMAYGQSKLANLLHAKELSRRLKEEGANITVNSVHPGLIMTNLMRHSFVLMKVLQVATYILWKNVPQGAATTCYVGLSPQLKGVTGKYFADCNVEKTSKLARSEELAKQLWDFSEELIKSAK

SEQ ID NO: 173629 - protein, 300 aa, Zea Mays
MGRRGSYDRLEALSLEIERKLHKALMSNSQRLQILQQLFADIALKVDDRARDAIMSESDDGIAPADEREDGWLCFYEILANHFVRVPESGRRILELIVQLWSQSFAANIFALLFQKWLFEAPLDEKEISLRYSSALVQGATNVFWIDIQTNTRHFLSLYHYLLEDVALVPERLSKISLQAGRDLFLLLSRFMFFYDQDHMLSSFLEHFPNFPNSFLVGGPADYFVIELADQLQKLKIEPVLLHYLSRMSILQGLELRLSTSTRLKACLYSFTSPGGPTYPTRAVRHAAWNTLDLLFPDPD

SEQ ID NO: 173630 - protein, 169 aa, Zea Mays
MFFYDQDHMLSSFLEHFPNFPNSFLVGGPADYFVIELADQLQKLKIEPVLLHYLSRMSILQGLELRLSTSTRLKACLYSFTSPGGPTYPTRAVRHAAWNTLDLLFPIGRYPRHVISLFFRLLYPWYWPSSCWNFVMTCAMTVYYYILNLLVSCWENMRRRPSHRRTHGE

SEQ ID NO: 173631 - protein, 306 aa, Zea Mays
MSESDDGIAPADEREDGWLCFYEILANHFVRVPESGRRILELIVQLWSQSFAANIFALLFQKWLFEAPLDEKEISLRYSSALVQGATNVFWIDIQTNTRHFLSLYHYLLEDVALVPERLSKISLQAGRDLFLLLSRFMFFYDQDHMLSSFLEHFPNFPNSFLVGGPADYFVIELADQLQKLKIEPVLLHYLSRMSILQGLELRLSTSTRLKACLYSFTSPGGPTYPTRAVRHAAWNTLDLLFPIGRYPRHVISLFFRLLYPWYWPSSCWNFVMTCAMTVYYYILNLLVSCWENMRRRPSHRRTHGE

SEQ ID NO: 173632 - protein, 335 aa, Zea Mays
MSNSQRLQILQQLFADIALKVDDRARDAIMSESDDGIAPADEREDGWLCFYEILANHFVRVPESGRRILELIVQLWSQSFAANIFALLFQKWLFEAPLDEKEISLRYSSALVQGATNVFWIDIQTNTRHFLSLYHYLLEDVALVPERLSKISLQAGRDLFLLLSRFMFFYDQDHMLSSFLEHFPNFPNSFLVGGPADYFVIELADQLQKLKIEPVLLHYLSRMSILQGLELRLSTSTRLKACLYSFTSPGGPTYPTRAVRHAAWNTLDLLFPIGRYPRHVISLFFRLLYPWYWPSSCWNFVMTCAMTVYYYILNLLVSCWENMRRRPSHRRTHGE

SEQ ID NO: 173633 - protein, 301 aa, Zea Mays
MGRRGSYDRLEALSLEIERKLHKALMSNSQRLQILQQLFADIALKVDDRARDAIMSESDDGIAPADEREDGWLCFYEILANHFVRVPESGRRILELIVQLWSQSFAANIFALLFQKWLFEAPLDEKEISLRYSSALVQGATNVFWIDIQTNTRHFLSLYHYLLEDVALVPERLSKISLQAGRDLFLLLSRFMFFYDQDHMLSSFLEHFPNFPNSFLVGGPADYFVIELADQLQKLKIEPVLLHYLSRMSILQGLELRLSTSTRLKACLYSFTSPGGPTYPTRAVRHAAWNTLDLLFPLLFI

SEQ ID NO: 173634 - protein, 440 aa, Zea Mays
MAKALLSSSLLPALPGAAGGSRSAARPMLLPPLRLRRGRRGASACEVRAGLHGLDSVGGPHLQAALERAEAALYTLADAAVAAADTAAGAGADAGQAAAVQKNSGWFGFISEALEVVLKVLKDGLSAVHVPYSYGFAIILLTIIVKAATLPLTKKQVESTLAMQNLQPQIKAIQQRYAGNQERIQLETARLYKQAGVNPLAGCFPTLATIPVWIGLYQALSNVANEGLLTEGFFWIPSLGGPTTIAARQSGSGITWLFPFVDGHPPLGWHDTICYLVLPVLLVASQYVSMEIMKPPQSDDPSQKNTMLILKFLPFMIGWFSLSVPSGLSIYWFTNNVLSTAQQVWLRKMGGAKPVVTEGDNLASRFRQLKEEENRRKFSKALAAGDSDASSSTYDMDDEESDETIEEGGPVEEASTSSDKKLPNYSGKKGKRSKRKRMVQ

SEQ ID NO: 173635 - protein, 223 aa, Zea Mays
MAKALLSSSLLPALPGAAGGSRSAARPMLLPPLRLRRGRRGASACEVRAGLHGLDSVGGPHLQAALERAEAALYTLADAAVAAADTAAGAGADAGQAAAVQKNSGWFGFISEALEVVLKVLKDGLSAVHVPYSYGFAIILLTIIVKAATLPLTKKQVESTLAMQNLQPQIKAIQQRYAGNQDTARDCSVIQASWCKPFSRMFSNVSNNSCMDWSLPGPFKCSK

SEQ ID NO: 173636 - protein, 262 aa, Zea Mays
MAKALLSSSLLPALPGAAGGSRSAARPMLLPPLRLRRGRRGASACEVRAGLHGLDSVGGPHLQAALERAEAALYTLADAAVAAADTAAGAGADAGQAAAVQKNSGWFGFISEALEVVLKVLKDGLSAVHVPYSYGFAIILLTIIVKAATLPLTKKQVESTLAMQNLQPQIKAIQQRYAGNQERIQLETARLYKQAGVNPLAGCFPTLATIPVWIGLYQALSNVANEKDFSGFHHWEVLQQLQLGKVVLELHGSSHLWMVILR

SEQ ID NO: 173637 - protein, 70 aa, Zea Mays
MEASRSSRMIGYQTSTILTTAWQPSPCWKRKGWNPSASNWGSSPLLHYRNLCFYRIQLLYNVCGGGGGGG

SEQ ID NO: 173638 - protein, 64 aa, Zea Mays
MGKRDFERLHHVAFFEAMATELPDEYASQEVNHLTLSYFAVGGLSLLRELDRINKDEIAKWVCL

SEQ ID NO: 173639 - protein, 857 aa, Zea Mays
MGRESNDEEPAMRENWQAVAAGSRLGEDNLKVCCWAGLGYMKLILYGVPEEQLQEHQQSLVQYTEEHKEQIPDIVRHILSAGTDISEARKVSKKDANSSSNGDAYRESLSWLQWLMFKNEPAAMLDDLERSNAGERAVCGSVWGHNDVAYRCRTCESDPTCAICVPCFQNGNHKDHDYSIIYTGGGCCDCGDATAWKREGFCSKHKGAEQIKPLPVELACSVGPVLDVLLQFWKERICLLEPHHAKGSDGSSCKRIAEELTTSISSMLLEFCTRSENLLSFLSLRIREFPDMLDALIRSDRLLDKKVARKLHEFLLKLISDPAFKYEFAKVFIHYYPITFGEVIKGCNDSLLEDYPLMTTFSVQIFTVPTLTPRLVREVDLLGVLLGCLTDLFLSCIGEDGRLQTNKWGNLFDASIRLLDDTRYVLSHEEVSKHVAYGRPDLTRSWIKLLSLVQGMDPQKRVTSIHAEDENEHLSAPFVLGHYLGIVQNLLMRGSFSPPDQHESTDVTVCSTAIKGVESAENQRHAKVGRVSQESSVSDLSSRDSSLCCGLPSPAAWLVLQCLKAIESWLWLENDIALRSKLSSLDASSNDSHKLMALLEDPLTSLTGNSSNTNMCVMDVKINEGSQTDCTADYYEASSSPVQGQGQEAMPLVSNSTGKGKMHGSSNSTVVQLHPEDAITYTLTDGSILYAHPDSRIEELGILNTRGWPHVVFDVSSQETSFHIPLHRMLSLLLRKAMKKCFGEDGHSDVQSNEFFPQILRGCEPYGFASIVMEHPLRVRVFCAQVRAGMWRKNGDAAILSAEWYRSVQWFEQGLESDLFLLQCCAALSSPELFVRTIQERFGLSSYTDLGLAEQNE

SEQ ID NO: 173640 - protein, 283 aa, Zea Mays
MDYMTRSLCLHYDSLLCPELLVLSTDATVQLRQFIAGYGFHLCPLTNTGASRRCSSAAPAKLGSKRPCSSGSGGGPLSVAGGKEVAADESKIQGAGATVGVRRRRTAIAKKLRRSTTPTKEGGEKRKRISTPPSSSSSIRSGGPDPKTKRKFLCARSFVHIGIETMDSENAKLRRALAHLIRVVERRCADIVDVVHGAFQPVSGPVLNEMNRALVQIEDLTKDLDHLALEKDWEMEHMAPSPIAESSETEDELLLDYDSELNPDDIVGYDDGRDYSTDDTYPY

SEQ ID NO: 173641 - protein, 130 aa, Zea Mays
MAAKREISSTLRNLKFMQRGAAAQKAEEKAEVEVQEEEVVMAPSGGFASSAQVVRKCIVIMEGNPHPGAIKGRMSFQNFNPSIDRQEVTSKQNQLPPVTVTKTMQTPAEGMKFQHQDVEILAFPVQKAYL

SEQ ID NO: 173642 - protein, 88 aa, Zea Mays
MAAKREISSTLRNLKFMQRGAAAQKAEEKAEVEVQEEEVVMAPSGGFASSAQVVRKCIVIMEGNPHPGAIKGRMSFQNFNPSIDMCRN

SEQ ID NO: 173643 - protein, 92 aa, Zea Mays
MPLLSQIETDGGKSLDFSNYPYIFMRWKEQYFVNVGVDCGLTIAGFYYVCFSCSDGSISGFYYDPNSSPFQKLELKCTNEKSSGFTFSSYEL

SEQ ID NO: 173644 - protein, 205 aa, Zea Mays
MRASGQEANTGHPSPPRCSLLSAGRSFAGTQNVSSLQKDEAWKVNVRIHGCDLEQGYLCGTMEALNVPLADTPVVTFWEGEIVDAKNYTFFTGKWEASPEDDIRHWSKFPSFMPLLSQIETDGGKSLDFSNYPYIFMRWKEQYFVNVGVDCGLTIAGFYYVCFSCSDGSISGFYYDPNSSPFQKLELKCTNEKSSGFTFSSYELQ

SEQ ID NO: 173645 - protein, 105 aa, Zea Mays
MSILLVLPNTSTLVKFIKSLRPSFSLKSRVTVRKEIMDLYIEEKNMLYAQFKKLSCRVSFTMDTWTSIQNKSYLCVTAHWIDDNWNMQKRIINFMHVEGNHSGKK

SEQ ID NO: 173646 - protein, 111 aa, Zea Mays
MLHIMDRGICSFTLSWSSQSSAYLISESMTLSSSASELGLVAGAEENGIARGFGGATAAARGRSRTALRWDPEEAEARRRTGTEEAAARRAAAKRAMAREEAARWRRMKPD

SEQ ID NO: 173647 - protein, 171 aa, Zea Mays
MVTASSFTAIFFRSAFVACFAEVKAFFVRGAVVGDVSLLSKILAALATGVIAIVVANPTDLVNVRLQVDGKANTVKRSYSRALNVYAIIIRHVTLTIMGSHCIADSEEQKVHVIADERPLELLAKAYAINSFDIDPQNPSDVVFTLEWESVGVLPCGEKKDNFYYRGTSEF

SEQ ID NO: 173648 - protein, 89 aa, Zea Mays
MASILLRGRGGATEKPLKLGLLPRSLPQAYQSADPAAKEGTINATTCGCNSHNCCWWRDTSHNNVHRQRGRGCHALEGHHPWPPLSVPL

SEQ ID NO: 173649 - protein, 86 aa, Zea Mays
MGSSSLLCLQEYFASDDMCLEDGILAIVKQDERPLELLAKAYAINSFDIDPQNPSDVVFTLEWESVGVLPCGEKKDNFYYRGTSEF

SEQ ID NO: 173650 - protein, 69 aa, Zea Mays
MCLEDGILAIVKQDERPLELLAKAYAINSFDIDPQNPSDVVFTLEWESVGVLPCGEKKDNFYYRGTSEF

SEQ ID NO: 173651 - protein, 186 aa, Zea Mays
MSAFCYHHLGVPLTEMWRSYLLLKSKGEEEIVQLRKRLADYSMKESQILDDKYKLRIIFGLQAAATLSIPILIPRKALVATRRKGIANWHAKKLAKQHRVDLAKVKAFFVRGAVVGDVSLLSKILAALATGVIAIVVANPTDLVNVRLQVDGKANTVKRSYSRALNVYAIIIRHVTLTIMGKYFAS

SEQ ID NO: 173652 - protein, 311 aa, Zea Mays
MNQQEAPTGVGEFLRDFGIPMVLWRLLQEVGYIEAPKYQWSRTVLRGQPWYEVVVRIPERARKPSWPHWMFHAEGMTPWEGAQVTALEVLTTICYQKWEEIQATSMRLFPAVALSDPVVYHHQARVMENIPIGQDSVESASARVLMVVLELQLTRGHSRQMWQQLYTGSYAAFKMMEMAKNRACTQAQEQLEETKIQAERIIGLEHQVTELQMQHQVDHHRIKDLEHQLTNAHSKSKVLSQQQEEIRSYVVTVREELKETMGFLSHQDQVLEELHRTYPMEFQTAQRLVNHLQQTVHMLNGAFYSAPTPTD

SEQ ID NO: 173653 - protein, 131 aa, Zea Mays
MKTFPLSRGSTISLALFSDVSNSRELLDLMQSGKLEPAVALLNASLITESLKRCGISDNTTYILAACFDASDEEMKAVEKLISGTEIDLTELERRANQPQILKHYKIPPQELSISTLPDAIVCRIAARDAL

SEQ ID NO: 173654 - protein, 97 aa, Zea Mays
MMSCAAIEQDPMDGDFTSKRFKRHDSDGTIWLQNVQSSRVEDIEYLTSIIILLYFRFFECSISIQFLRVVSCSAAPCAILTMDLNTLLKSVLYVINL

SEQ ID NO: 173655 - protein, 126 aa, Zea Mays
MALGPLDVFSLKWRMYADFIGSAGSIFELSTTLYPGYFLPLASLGNLAKAIARGFKDPSFRVIQNHFAESGNLGEVAAKEEVWEVGAQLLGLSIGVLIMVYMYSSLCFICCLYLTAFLYGNLIDQL

SEQ ID NO: 173656 - protein, 125 aa, Zea Mays
MERMLGGDKSSDMVNRLLKLYKNEKYILFFEQFGSREPTFLVTFKESATSMSVLRSLWQAHWLHKNQLRQDEVFPWLEESIVALENGFTDFLEQLGSAGWDQDLIILKVPKEPVLVLEHLEDQEV

SEQ ID NO: 173657 - protein, 140 aa, Zea Mays
MEKNAELYSQVAHFGLWAAVPLSRYPYTPGIPSIRDPPRPYTGPCSPHPPQAGASAGEVCPGGFIRAPAWRRRCLPAAASLKRRGLCSRRGTGTVSSRGFSLLNREFLISATPSDFPILHPNSQRNCRVCIWNGTGMNLQ

SEQ ID NO: 173658 - protein, 182 aa, Zea Mays
MLSTPAAGWRFRRGGLPWRLHTCSCLASPLSSSGGEPEKARPLLAERYRDGVVKRYISDGSSKLQLRLEKHESPVNGVEDENADSLIPQAILDFVLPAGFPGSVSADYLDYMLLQFPTNVTGWICHVLVTSSLLKIGTGCRCWVLYRNFCSCICCCYQMGIKGWHWGLWTSSHWWTLWSTFR

SEQ ID NO: 173659 - protein, 163 aa, Zea Mays
MLSTPAAGWRFRRGGLPWRLHTCSCLASPLSSSGGEPEKARPLLAERYRDGVVKRYISDGSSKLQLRLEKHESPVNGVEDENADSLIPQAILDFVLPAGFPGSVSADYLDYMLLQFPTNVTGWICHVLVTSSLLKAVGVGSFTGTSAAASAAAIRWTLWSTFR

SEQ ID NO: 173660 - protein, 373 aa, Zea Mays
MLSTPAAGWRFRRGGLPWRLHTCSCLASPLSSSGGEPEKARPLLAERYRDGVVKRYISDGSSKLQLRLEKHESPVNGVEDENADSLIPQAILDFVLPAGFPGSVSADYLDYMLLQFPTNVTGWICHVLVTSSLLKAVGVGSFTGTSAAASAAAIRWVSKDGIGAFGRLLIGGRFGALFDDDPKKWRMYADFIGSAGSIFELSTTLYPGYFLPLASLGNLAKAIARGFKDPSFRVIQNHFAESGNLGEVAAKEEVWEVGAQLLGLSIGVLIMDKTGVKSSYLTLVLTWLSVRLLHLWLRYQSISVLKFRTINLKRGRILVKSHVAQHTVPGYVACNEEENILTWERYLRPQVSFGVPMERMLGGDKSSDMEAKA

SEQ ID NO: 173661 - protein, 78 aa, Zea Mays
MFVEESTSEVAWRKAVLVGRRLKATASLTQSRPVPSKVYQGPMRRGAADDTASLYQLLSCANPVVYMHGPEGGKSMHV

SEQ ID NO: 173662 - protein, 83 aa, Zea Mays
MLYILSSMKRNQISCRICSTKLWPLGRLHITTHKGNIKLHTLAPSPPGTLQVGRPKASTGSRNPQGHNQYKHPSARGSKSNPR

SEQ ID NO: 173663 - protein, 86 aa, Zea Mays
MVLPSIRHHHHNTSSTRLVWLLLLSDLDSFHRPQLSFARLSTTTVHPCTRLPQHRHRELSSTSASRRFLLQVVASALRQRHDYGGF

SEQ ID NO: 173664 - protein, 90 aa, Zea Mays
MLYILSSMKRNQISCRICSTKLWPLGRLHITTHKGNIKLHTLAPSPPGTLQVGRPKASTGSRNPQGHNQYKHPSARGSKSNPRSSSLTRV

SEQ ID NO: 173665 - protein, 68 aa, Zea Mays
MIKFSKVSDPFDNFGNRLSNYVIVLDNIREGHEVIEGVEVKIKKNAQDQLKALVQLEFESEWTFRTIL

SEQ ID NO: 173666 - protein, 84 aa, Zea Mays
MGHAHGIACLALSAPSPCSSGGTDGGTNNCTEMLAPCRVVPCPVLSCPSWGSSSSQTVLCCVVLCGPSVHYSIGPCPCSICLRL

SEQ ID NO: 173667 - protein, 617 aa, Zea Mays
MREPEHLVPVLAGGARAAAVRVAALPAQVQQQRRVPDPLHVPGVPGGQHLQREQLSARGGREPATRRRLPGAVLQHLDRHGVHGGVRRQQSQQRAPVPLPMRRAGAGGSALPGFQRMPCDNSSFVGFRRRFGSYSYREHGAGAATPPGSGCLVAVMPTVPPPDRDSRHNYVAGLRNGFLLEWTAVSGDCSKCTASGGECMYPANGLAFSCNCPDGIHYPVSCGSKRTGRRTIMSIVLMAVAGTLLLPCIYLLICHIKGQKPRFLISKMTVNKNERNIEALISSHGSLAPKRYKYSEATKITSCTNNKLGEGGYGVVFKGRLNDGRLVAVKFLHDYKAKGEEFVNEVMSIGRTSHVNIVSLYGFCLEGSKRALIYEYMANGSLDKHIYSENPKQILGWERLYAIAVGIARGLEYLHYCCNTRIVHFDIKPQNILLDHNFCPKIADFGLAKLCHTKESKLSVTGARGTIGFIAPEVHSRAFGVASTKSDVYSYGMLLLEMVGGRKNMKLMVEKSSQTYFPDWIYDHYAQNDGLLACEVTHEDEEIARKMILIGLWCIQILPMHRPTMTEVLDMFERGLDELDMPSKQNFSQVLEDLAYNMNAESTNPSSTARTQASVAC

SEQ ID NO: 173668 - protein, 615 aa, Zea Mays
MREPEHLVPVLAGGARAAAVRVAALPAQVQQQRRVPDPLHVPGVPGGQHLQREQLSARGGREPATRRRLPGAVLQHLDRHGVHGGVRRQQSQQRAPVPLPMRRAGAGGSALPGFQRMPCDNSSFVGFRRRFGSYSYREHGAGAATPPGSGCLVAVMPTVPPPDRDSRHNYVAGLRNGFLLEWTAVSGDCSKCTASGGECMYPANGLAFSCNCPDGIHYPVSCGEKLTCTLIYSVLMAVAGTLLLPCIYLLICHIKGQKPRFLISKMTVNKNERNIEALISSHGSLAPKRYKYSEATKITSCTNNKLGEGGYGVVFKGRLNDGRLVAVKFLHDYKAKGEEFVNEVMSIGRTSHVNIVSLYGFCLEGSKRALIYEYMANGSLDKHIYSENPKQILGWERLYAIAVGIARGLEYLHYCCNTRIVHFDIKPQNILLDHNFCPKIADFGLAKLCHTKESKLSVTGARGTIGFIAPEVHSRAFGVASTKSDVYSYGMLLLEMVGGRKNMKLMVEKSSQTYFPDWIYDHYAQNDGLLACEVTHEDEEIARKMILIGLWCIQILPMHRPTMTEVLDMFERGLDELDMPSKQNFSQVLEDLAYNMNAESTNPSSTARTQASVAC

SEQ ID NO: 173669 - protein, 307 aa, Zea Mays
MHACRVPAAGPLLCPAIAMLLLALLLASLPTTAAAAAVKMSMVPCAPAQCGNLSIYYPFWLTGTHQRHCGYKAFEVTCEERKVYLKNSYWAYQVLDISYENSSFVVTNVNLQKDGSFCNLNLVSNASSGLSAAPFRISSRNLELFFLSGCPGQARQRQPSPPSSWAQMNCSDYDNGSAAKSFAWLAGKYRPDDTLKPPLPLNCTVSSLMPVLGYQGAGPADYDRLMNLGFLLEHNFTAEDCAACASTGDRCSVDPDDDQLVCNCSDGQYWFFCGANGKGRKTILIGKNSGFSYAKKPAAAYKRTLRL

SEQ ID NO: 173670 - protein, 661 aa, Zea Mays
MHACRVPAAGPLLCPAIAMLLLALLLASLPTTAAAAAVKMSMVPCAPAQCGNLSIYYPFWLTGTHQRHCGYKAFEVTCEERKVYLKNSYWAYQVLDISYENSSFVVTNVNLQKDGSFCNLNLVSNASSGLSAAPFRISSRNLELFFLSGCPGQARQRQPSPPSSWAQMNCSDYDNGSAAKSFAWLAGKYRPDDTLKPPLPLNCTVSSLMPVLGYQGAGPADYDRLMNLGFLLEHNFTAEDCAACASTGDRCSVDPDDDQLVCNCSDGQYWFFCGANGKGRKTILIVSISVAASLFLPCIYVLVWHRQKLRFFLCKKTSSSIQENIEALISSYGSLAPKRYKYSEVTKITSCINNKLGEGGYGVVFKGMLDDSRLVAVKFLHDSKGDGEEFVNEVMSIGRTSHINIVSLFGFCLEGSKRALIYEYMPNGSLDKYIYSDNPKEVLGWDRLYTIAIGIARGLEYLHHSCNTRIVHFDIKPQNILLDQNFQPKIADFGLAKLCHTKESKLSMTGARGTPGFIAPEVHSRTFGVVSTKSDVYSYGMMLLEMVGGRKNVKSFAQVSSEKYFPHWIYDHFGQNDGLLACEGTPEKEEIAKKMALVGMWCIQILPLHRPTITKVLEMFDRGLDELDMPPRQNFSQTFEDPTYNFNAENMSTSSGTKTQR

SEQ ID NO: 173671 - protein, 277 aa, Zea Mays
MHACRVPAAGPLLCPAIAMLLLALLLASLPTTAAAAAVKMSMVPCAPAQCGNLSIYYPFWLTGTHQRHCGYKAFEVTCEERKVYLKNSYWAYQVLDISYENSSFVVTNVNLQKDGSFCNLNLVSNASSGLSAAPFRISSRNLELFFLSGCPGQARQRQPSPPSSWAQMNCSDYDNGSAAKSFAWLAGKYRPDDTLKPPLPLNCTVSSLMPVLGYQGAGPADYDRLMNLGFLLEHNFTAEDCAACASTGDRCSVDPDDDQLVCNCSDGQYWFFCGSLP

SEQ ID NO: 173672 - protein, 234 aa, Zea Mays
MALVPFSLLLFLVSLSVWVALPLPLPVAAAHGGPGEHCSPFLCGNVSISFPFGIIQKDAEQTNCGAGIGFQVRCHNTIPHLGYYQNEITLRILSIFYHNRSLLIADRPRWPTYFNTTTSTEGCRIPTANTSSRLVPPLSVSSDNQNLIFYSCTKPPSPGEGLVATVCHNNTFVRAADGRRSDESGGYVLQGCTATRVPVLGVSGKVNASNYDQLVWDGFLATWQLPPTPSGLVW

SEQ ID NO: 173673 - protein, 52 aa, Zea Mays
MCLAIIQTAGLNAPINGITDTNQPKTFICRRSRLVLRILLRCAGRGGVHHEG

SEQ ID NO: 173674 - protein, 175 aa, Zea Mays
MSLVRRSNVFDPFSMDLWDPFDTMFRSIVPSATSTNSETAAFASARIDWKETPEAHVFKADLPGVKKEEVKVEVEDGNMLVISGQRSREKEDKDDKWHRVERSSGQFVRRFRLPENTKVDQVKAGLENGVLTVTVPKAEEKKPEVKAGLENGVLTVTVPKAEEKKPEVKAIEISG

SEQ ID NO: 173675 - protein, 416 aa, Zea Mays
MAAKRLYNGVIREAMMQKHMQSLFRCLEPLLRRVVKEELHAGLTLMQSPRYIERLPAERAAWRLAFRTPPQLPIFTGSKIEDEAGNPLEVILVDADTGSPAALPQALRVELVPVYGDFPQDGREDWSDDEFQRNVVKERAGKRPLLTGDVSLALRDGRATVGELQFTDNSSWVRCRKFRIAARVVPGAWDGARVQEAMTEAFIVRDHRGELYRKHYPPVLADDVWRLEKIGKEGAFHRKLRRSNVGTVQEFVRMLMVKPDELRAILGDGMTDRMWEATTNHARTCATDDKVYAHSTPHGTIYVDSVFNVVRVDIGGAEWPLHQLNRGQTMVVQQMLQDAYEHRHSLQEAEPFMVHGHAASDVPLLQNAVPALVDTPPLWFPNAAEMDFPVDDVVPVPQANSSFGYQWTGQAFHMPG

SEQ ID NO: 173676 - protein, 103 aa, Zea Mays
MDAQLRRRLPPLFHLWFPLVLRHLLLEAPRLHPQRTHIALLFLEAVWTTNIHDCIHGKIWPVMGAGYHTIHHTTYRHNYGHYTIWMDWMFGTLNEPEDILKKA

SEQ ID NO: 173677 - protein, 76 aa, Zea Mays
MLCSAPSEDFFLQGWFIFGPDVRSLFLTIFPFLAPMVVFYIFVPKHFINDFPGHWGVLVMVIAIVFTIYILCIPIY

SEQ ID NO: 173678 - protein, 185 aa, Zea Mays
MGLLHVNTNTLVVGDHCVGHGSATLDSRNGGNMKDYFETTYKFLELSPHVLIPMHGRINLWPKYMLCGYLRNRRAREASILHSIENGAQTLFDIVSKTYSDVDRKLWIPASFNVRLHVDHLNSLHKLPKDFSLENFKESCGVHFMLRWAVAYVHSRSSPAILAASALAGGLAIACALRRNYCKQS

SEQ ID NO: 173679 - protein, 422 aa, Zea Mays
MSGEWRLLKYVEEAEFGPDAGINTVYIVGSLELRLDDLPESCKWMSKECALRLLSEAKPGNDRIGQYAYIGLLNSELSSNCTASPALPFQEYPPGITLVPMKSRTLAPFRTTNLVVVRSTNGAGGSTCSDFFASGEALLIDPGCSSQVHAELADLIDSLPKRLLVLVTHHHQDHIEGLSVVQRCNPNAVLLTHQSTMDRIGKGTWQIDYTSVTGGEKICIGDQELQVVFAPGHTDGHMGLLHVNTNTLVVGDHCVGHGSATLDSRNGGNMKDYFETTYKFLELSPHVLIPMHGRINLWPKYMLCGYLRNRRAREASILHSIENGAQTLFDIVSKTYSDVDRKLWIPASFNVRLHVDHLNSLHKLPKDFSLENFKESCGVHFMLRWAVAYVHSRSSPAILAASALAGGLAIACALRRNYCKQS

SEQ ID NO: 173680 - protein, 303 aa, Zea Mays
MASPSYRLAAAITAPSTGEFLVVRQPRPPSPPEEEEDYRRFVDSDLYDLPSAPLGPLEGAPRSEVAIGGADSVASRLDLSRLDVSAALDQIFHQFGLPAGMSGEWRLLKYVEEAEFGPDAGINTVYIVGSLELRLDDLPESCKWMSKECALRLLSEAKPGNDRIGQYAYIGLLNSELSSNCTASPALPFQEYPPGITLVPMKSRTLAPFRTTNLVVVRSTNGAGGSTCSDFFASGEALLIDPGCSSQVHAELADLIDSLPKRLLVLVTHHHQDHIEGLSVVQRCNPNAVLLTHQSTMDRIGKD

SEQ ID NO: 173681 - protein, 226 aa, Zea Mays
MDRIGKGTWQIDYTSVTGGEKICIGDQELQVVFAPGHTDGHMGLLHVNTNTLVVGDHCVGHGSATLDSRNGGNMKDYFETTYKFLELSPHVLIPMHGRINLWPKYMLCGYLRNRRAREASILHSIENGAQTLFDIVSKTYSDVDRKLWIPASFNVRLHVDHLNSLHKLPKDFSLENFKESCGVHFMLRWAVAYVHSRSSPAILAASALAGGLAIACALRRNYCKQS

SEQ ID NO: 173682 - protein, 235 aa, Zea Mays
MSPLNQQQVLLKKALAKKPNAKKMSEFGLKPSAALLKSRTQQLPAPVQPRRRVRVLFEDPDATDSDSDSDDEERRRRGLPVAASSADTPASGSTPTASSSSSASTAPFAHPSPSSVLEPSKEARNTQSPEATPARPSTDSAQLPEDPEFYQDLLRGLQLPDIDPLDFRAGLDALDLSDADFGLDDEHDLLLGDFGDEEMEIDLDLDDINDVFPEMPGCDLGRGMDDFLQTVDFCV

SEQ ID NO: 173683 - protein, 154 aa, Zea Mays
MFHLPSLSSSLHCSGCMRSACYITEKASQTFDRIRRWRVTPAQNPSLQLIYLLLAPTRINFRRRPFLFVARLTPTPPPLPWPRRRIRPRRRRPSQPSPEAGSSKRRSGARVSKRRRSTTLCSSTRPPMTSCSPMCPSTSRSPHPSSPSVSGLHQ

SEQ ID NO: 173684 - protein, 137 aa, Zea Mays
MRSACYITEKASQTFDRIRRWRVTPAQNPSLQLIYLLLAPTRINFRRRPFLFVARLTPTPPPLPWPRRRIRPRRRRPSQPSPEAGSSKRRSGARVSKRRRSTTLCSSTRPPMTSCSPMCPSTSRSPHPSSPSVSGLQ

SEQ ID NO: 173685 - protein, 641 aa, Zea Mays
MVLTSLASGSLSRFHQCRWGYKNLSVVEGVVEGYRNAQIPLDVIWNDDDHMDAAKDFTLDPVNYPRPKLLAFLDKIHAQGMKYIVLIDPGIAVNSSYGVYQRGMERDIFIKLDGQPYLAQVWPGPVYFPDFLNPNGVSWWIDEVRRFHDLVPVDGLWIDMNEASNFCTGKCTIPKTHQCPIPDTKTPWLCCLDCKNLTNTRWDEPPYKINASGQTARLGFNTIATSATHYNGILEYNAHSLYGFSQAIATHTALQGLQGKRPFILTRSTFVGSGAYAAHWTGDNKGTWENLRYSISTMLNFGIFGMPMVGSDICGFYPSPTEELCNRWIELGAFYPFSRDHANFASPRQELYVWDSVAKSARNALGMRYKLLPYLYTLNYQAHLTGAPVARPVFFSFPDFTPCYGLSTQFLLGPGVMVSPVLEQGATSVSAMFPPGTWYNLFDMSKVVVSRSGAPVKLDAPLNEINVHVYQNTILPMQRGGFVSKDARATPFTLVVAFPFGATQADAEGAVYVDDDERPEMVLAEGQASYVRFHASVRGKAVTVRSEVLMGSYSLHKGLVVEKLSVLGLEGTGKDLAIQVDGTDATAVATSSPYFAAGGNAKLQGEEGVEDSKNGVMVEIGGLALPLGKSFTMTWNMRIEA

SEQ ID NO: 173686 - protein, 528 aa, Zea Mays
MVKKKLKKLYGRDAREFFNQVMVEQPLLPFLIPLGLFAWFIERWVVPFSNWVPLAAAVWATIQYGRIKRRTTVEDLNKRWKHLILNTTPTTPIEPCEWLNKLLLEVWPNYMEPKLSKRFQSTVERRLKNRKPKLIDKIELQEFSLGSCPPTLGDQGMRWITSGDQQVMCLGFDWNSHEMSVMFLAKLAKPLIGTCRIVINSIHIKGDLLLSPILDGEAILYSFESTPEVRIGVAFGSGGSQAIPGMELPGVSTWLVKLLTETLGKTMVEPRRLCFSLPSVDLRKRAVGGVLSVTVVSASNLCKSTANDIGNCQSSNGGATYGIADNKVSQTFVEVEVGNLMRKTSTSKGLNPTWNSTFNMVLHGETGIVKFLLYELDSGGVKFNYLTSCEIKVKYVHDGSTIFWAIGHNSGVVAKHTEHCGQEVGMVVPFEDINGELTVSLVLKEWQFSDGSVTLSNSLGNGLQSSFDGSTKLQSTTGRKVRVRVVEGRALTANSKSGKCDPYVKLQYGKICLVMKALVVRELIWRDF

SEQ ID NO: 173687 - protein, 656 aa, Zea Mays
MVKKKLKKLYGRDAREFFNQVMVEQPLLPFLIPLGLFAWFIERWVVPFSNWVPLAAAVWATIQYGRIKRRTTVEDLNKRWKHLILNTTPTTPIEPCEWLNKLLLEVWPNYMEPKLSKRFQSTVEEFSLGSCPPTLGDQGMRWITSGDQQVMCLGFDWNSHEMSVMFLAKLAKPLIGTCRIVINSIHIKGDLLLSPILDGEAILYSFESTPEVRIGVAFGSGGSQAIPGMELPGVSTWLVKLLTETLGKTMVEPRRLCFSLPSVDLRKRAVGGVLSVTVVSASNLCKSTANDIGNCQSSNGGATYGIADNKVSQTFVEVEVGNLMRKTSTSKGLNPTWNSTFNMVLHGETGIVKFLLYELDSGGVKFNYLTSCEIKVKYVHDGSTIFWAIGHNSGVVAKHTEHCGQEVGMVVPFEDINGELTVSLVLKEWQFSDGSVTLSNSLGNGLQSSFDGSTKLQSTTGRKVRVRVVEGRALTANSKSGKCDPYVKLQYGKALYRTKTLTHTVRPVWNHKFEFDEISGGEYLKIKCYNADMFGDESIGSARVNLEGLLEGATRDVWVPLEKVDSGEIRLEIEAIKNDHNNSLQSSSSKAGSGWIELVIIEARDLVAADLRGTSDPYVRVHYGSKKKRTKVRWSFTKHCLHSGTRHSSSWKPENP

SEQ ID NO: 173688 - protein, 201 aa, Zea Mays
MCCVFCARPPDQRPSAPPAGHARRLAPPSRPSAGPLTLRPPRVLSVVARRGTEARSSSRSGGGGDAGRGAVVDVDLRVLRGQEADQRRRCGRHGRRVGARRRGGGRVEPLHRPARPRGRHRRLLRRQPPRPRRLRPRLQGGDGEWAADRCEEAVSGVTARRARVPERGPAPAQGAAPEPGVPAWLLCFLRPQDARLSLLPQ

SEQ ID NO: 173689 - protein, 536 aa, Zea Mays
MKTGHLMLMEPQNLGNTDDQFVWPWMGVLVNVPTEWKNGRQVGESGNRLKEQLSRFCPQKVIPLWSYRGHTGNAIVEFAKDWTGFKNALAFENHFEAEGYGKRDWKLKYSGSEMFGWVARADDHRCQGPIGDYLRKNGDLKTVGDLETEGTRKTDKLVANLASQIEVKNKHVQELESKCNETTASLDRMMEQREQILQKYNEEIRKMQQIARRHSQMIIDDNKKLHKELESKMQELDLRSKELDDIALQRDCDRRNLQQEKEKNKIKTKHLMMATMEQQKADENVLKLVEEHKREKQAALGKILRLQQQLDAKQKLELEVQTLESKMKVMMHMPGDQDSESKKKMDELAEELKEKVDELEAMESLNQTLIIKERKSNDELQHARKELIDGFMELAVVGRANIGIKRMGELDLKAFGIACKKRLPKEDAEVISATLCSKWQEEIRNPSWYPFKVKVVDGKEMEILKEDDEMLQELKEEHGEEIYGLVTKALLEINEYNPSGRYPVPELWNYKEGRKATLKEAVQHVMRQWKSHKRKR

SEQ ID NO: 173690 - protein, 330 aa, Zea Mays
MQQIARRHSQMIIDDNKKLHKELESKMQELDLRSKELDDIALQRDCDRRNLQQEKEKNKIKTKHLMMATMEQQKADENVLKLVEEHKREKQAALGKILRLQQQLDAKQKLELEVQTLESKMKVMMHMPGDQDSESKKKMDELAEELKEKVDELEAMESLNQTLIIKERKSNDELQHARKELIDGFMELAVVGRANIGIKRMGELDLKAFGIACKKRLPKEDAEVISATLCSKWQEEIRNPSWYPFKVKVVDGKEMEILKEDDEMLQELKEEHGEEIYGLVTKALLEINEYNPSGRYPVPELWNYKEGRKATLKEAVQHVMRQWKSHKRKR

SEQ ID NO: 173691 - protein, 565 aa, Zea Mays
MAQLVETYACSPATERGRGILLAGDPKTDTIAYCTGRSVIIRRLDAPLDAWAYPDHAYPTTVARFSPNGEWVASADASGCVRVWGRYGDRALKAEFRPLSGRVDDLRWSPDGLRIVVSGDGKGKSFVRAFVWDSGSTVGEFDGHSKRVLSCDFKPTRPFRIVTCGEDFLANFYEGPPFKFKHSIRDHSNFVNCIRYAPDGSKFITVSSDKKGLIYDGKTGEKIGELSTEGNHTGSIYAVSWSPDSKQNDHLVTVSLGGTFNVFSASNPDQEPVTFAGHLKTVSSLVFFPQSSPRTILSTSYDGVIMRWIQGVGFGGRLVRRNNTQIKCFAAVEEELVTSGYDNKVFRIPLNGNQCGDAESVDIGGQPNALNLAIQKPEFALITTDSGIVLLHNSKVISTTKVNYAITSSSVSPDGTYAVVGAQDGKLRIYSISGDTLTEEALLEKHRGAITSLHYSPDVSMFASADTNREAVVWDRASREVKLKNMLYHTARINSLAWSPDSRLVATGSLDTCAIVYEIDKPVASRVTIKGAHLGGVHGLTFLDNDILVTAGEDACIRVWKVVQQ

SEQ ID NO: 173692 - protein, 646 aa, Zea Mays
MAQLVETYACSPATERGRGILLAGDPKTDTIAYCTGRSVIIRRLDAPLDAWAYPDHAYPTTVARFSPNGEWVASADASGCVRVWGRYGDRALKAEFRPLSGRVDDLRWSPDGLRIVVSGDGKGKSFVRAFVWDSGSTVGEFDGHSKRVLSCDFKPTRPFRIVTCGEDFLANFYEGPPFKFKHSIRDHSNFVNCIRYAPDGSKFITVSSDKKGLIYDGKTGEKIGELSTEGNHTGSIYAVSWSPDSKQVLTVSADKSAKVWDIMEDASGKLNRTLSCPGIGGVDDMLVGCLWQNDHLVTVSLGGTFNVFSASNPDQEPVTFAGHLKTVSSLVFFPQSSPRTILSTSYDGVIMRWIQGVGFGGRLVRRNNTQIKCFAAVEEELVTSGYDNKVFRIPLNGNQCGDAESVDIGGQPNALNLAIQKPEFALITTDSGIVLLHNSKVISTTKVNYAITSSSVSPDGTYAVVGAQDGKLRIYSISGDTLTEEALLEKHRGAITSLHYSPDVSMFASADTNREAVVWDRASREVKLKNMLYHTARINSLAWSPDSRLVATGSLDTCAIVYEIDKPVASRVTIKGAHLGGVHGLTFLDNDILVTAGEDACIRVWKEDSFVSGSGIPASDFVRSCENIGILLLLFLPQVPKIVVNN

SEQ ID NO: 173693 - protein, 544 aa, Zea Mays
MAQLVETYACSPATERGRGILLAGDPKTDTIAYCTGRSVIIRRLDAPLDAWAYPDHAYPTTVARFSPNGEWVASADASGCVRVWGRYGDRALKAEFRPLSGRVDDLRWSPDGLRIVVSGDGKGKSFVRAFVWDSGSTVGEFDGHSKRVLSCDFKPTRPFRIVTCGEDFLANFYEGPPFKFKHSIRDHSNFVNCIRYAPDGSKFITVSSDKKGLIYDGKTGEKIGELSTEGNHTGSIYAVSWSPDSKQVLTVSADKSAKVWDIMEDASGKLNRTLSCPGIGGVDDMLVGCLWQNDHLVTVSLGGTFNVFSASNPDQEPVTFAGHLKTVSSLVFFPQSSPRTILSTSYDGVIMRWIQGVGFGGRLVRRNNTQIKCFAAVEEELVTSGYDNKVFRIPLNGNQCGDAESVDIGGQPNALNLAIQKPEFALITTDSGIVLLHNSKVISTTKVNYAITSSSVSPDGTYAVVGAQDGKLRIYSISGDTLTEEALLEKHRGAITSLHYSPDVSMFASADTNREAVVWDRASRGQAEEHVVPHSQDKLPGLVT

SEQ ID NO: 173694 - protein, 347 aa, Zea Mays
MGAADKWLLPLVSVSVVSLLLFLSALSGFSASSALFARLPPPSYVRRGAAAPPSFAYLLAGGRGDGRKLLRLLLAVYHPRNRYLLHLSADAPDSERAELAAAAARAAPAARAFGNVDVVGRPTAGTPMGSSGLAATLRAAAAMLRLDAEWDWFITLSAADYPLLTQDDLIHVFSSVPRHLNFIDHTSDIGWKESQRVQPVIVDAGIYLAGRNQFFQATEKRDTPDGFKFFTGSPWVILNRHFVEYCVFGWENLPRTLLMYFTNVMLPLEGYFHSVACNSDFHNFTVNNDLRPVPGAWCTGKRRWFSDPCSQWSNVNIVRPGPQAEKFRTYINQIMEESKSSNNSCKQ

SEQ ID NO: 173695 - protein, 669 aa, Zea Mays
MQIVMEKSGQNAHILLSMLVKHLEHKNVLKQPDMNLDIIEVTSRLAGHSKAQSSTALMASISDMVRHMGKSMQSLASDAGPGDNMVKWNSRYGKAVDECLVQLSRKVGDAGPILDTLAVVLENISSSMIVARSTIFAAYRTAQIVASLPNLSHQSKAFPEALFHQLLLAMVYPDCGTHLGAHRIFSVVLVPSAVAPCSFSDTSRTRKIDLRRTLSRTTSVFSSSAALFGKLKRDMLSFRESPLHDNTKLLPISEDADEISANDAKLFKSQTIQRMASTKDISLPSSTDASTLSEQTPNQEKDAVTLMLSVRQANLLLSSLWTQALSPENVPRNYEAISHTYSLMLLFSRAKGSGADVLVGSFQLAFSLRSVSLQAGFLPPSRRRSLFTLATSMLVFFSKAFNVPALIPVVKHVLTESTVDPFLCLIEDCRLQALDSAAQSCKLYGSKEDDDQALKSLSNIDMNEHQSKETSVSLILDSLEDLSESELSTIRKQLIEEFSADDICLGSHFTETPSKSAAQNGKLHHKSMEVIPFGFVFEDDTLVEASDSLVEPHLRHLPCNSVLDVDRLLNSVLETSQHVGRMSVSTDQDLPFKEVANQCEALLIGKQQKLSICMSVREKKDGESSIEKSSQQDPQAYTFLCTADEQWHLNSCKLPVLCPYDRFLATSGC

SEQ ID NO: 173696 - protein, 847 aa, Zea Mays
MFNLENQIPKLCHLAQEMGEKEKICILHAAGLQALSSMIWFMGEHSHMSAELDNVVSAVLENYESPYANADNDAAIEDRRIQWVDEVLKAEGHEPPAVTILTRVPSWKVIRTVHGELSLTIEESTSPNFWSGICLHNLARISREATTVRRVLEVIFRYFDNNNLWSPSKGFALCVLLDMQIVMEKSGQNAHILLSMLVKHLEHKNVLKQPDMNLDIIEVTSRLAGHSKAQSSTALMASISDMVRHMGKSMQSLASDAGPGDNMVKWNSRYGKAVDECLVQLSRKVGDAGPILDTLAVVLENISSSMIVARSTIFAAYRTAQIVASLPNLSHQSKAFPEALFHQLLLAMVYPDCGTHLGAHRIFSVVLVPSAVAPCSFSDTSRTRKIDLRRTLSRTTSVFSSSAALFGKLKRDMLSFRESPLHDNTKLLPISEDADEISANDAKLFKSQTIQRMASTKDISLPSSTDASTLSEQTPNQEKDAVTLMLSVRQANLLLSSLWTQALSPENVPRNYEAISHTYSLMLLFSRAKGSGADVLVGSFQLAFSLRSVSLQAGFLPPSRRRSLFTLATSMLVFFSKAFNVPALIPVVKHVLTESTVDPFLCLIEDCRLQALDSAAQSCKLYGSKEDDDQALKSLSNIDMNEHQSKETSVSLILDSLEDLSESELSTIRKQLIEEFSADDICLGSHFTETPSKSAAQNGKLHHKSMEVIPFGFVFEDDTLVEASDSLVEPHLRHLPCNSVLDVDRLLNSVLETSQHVGRMSVSTDQDLPFKEVANQCEALLIGKQQKLSICMSVREKKDGESSIEKSSQQDPQAYTFLCTADEQWHLNSCKLPVLCPYDRFLATSGC

SEQ ID NO: 173697 - protein, 515 aa, Zea Mays
MLVKHLEHKNVLKQPDMNLDIIEVTSRLAGHSKAQSSTALMASISDMVRHMGKSMQSLASDAGPGDNMVKWNSRYGKAVDECLVQLSRKVGDAGPILDTLAVVLENISSSMIVARSTIFAAYRTAQIVASLPNLSHQSKAFPEALFHQLLLAMVYPDCGTHLGAHRIFSVVLVPSAVAPCSFSDTSRTRKIDLRRTLSRTTSVFSSSAALFGKLKRDMLSFRESPLHDNTKLLPISEDADEISANDAKLFKSQTIQRMASTKDISLPSSTDASTLSEQTPNQEKDAVTLMLSVRQANLLLSSLWTQALSPENVPRNYEAISHTYSLMLLFSRAKGSGADVLVGSFQLAFSLRSVSLQAGFLPPSRRRSLFTLATSMLVFFSKAFNVPALIPVVKHVLTESTVDPFLCLIEDCRLQALDSAAQSCKLYGSKEDDDQALKSLSNIDMNEHQSKETSVSLILDSLEDLSEMTFVWDLILLKHLRNLQHKMENCTTNLWRLFHSDLFLKMILSLKHLTA

SEQ ID NO: 173698 - protein, 697 aa, Zea Mays
MSMGVVSREVLSACERLCFICPSLRTRSRHPVKRYKKLLAEIFPRTQDEEPNDRKIGKLCEYISRNPMRVPKITFYLEQKCYKELRAERYGSVKVVIAIYRKVICSCQEQLPLFANSLLTIVETLLEQNRQDDLRKLACQTLFDFINNQVDSTYMFNLENQIPKLCHLAQEMGEKEKICILHAAGLQALSSMIWFMGEHSHMSAELDNVVSAVLENYESPYANADNDAAIEDRRIQWVDEVLKAEGHEPPAVTILTRVPSWKVIRTVHGELSLTIEESTSPNFWSGICLHNLARISREATTVRRVLEVIFRYFDNNNLWSPSKGFALCVLLDMQIVMEKSGQNAHILLSMLVKHLEHKNVLKQPDMNLDIIEVTSRLAGHSKAQSSTALMASISDMVRHMGKSMQSLASDAGPGDNMVKWNSRYGKAVDECLVQLSRKVGDAGPILDTLAVVLENISSSMIVARSTIFAAYRTAQIVASLPNLSHQSKAFPEALFHQLLLAMVYPDCGTHLGAHRIFSVVLVPSAVAPCSFSDTSRTRKIDLRRTLSRTTSVFSSSAALFGKLKRDMLSFRESPLHDNTKLLPISEDADEISANDAKLFKSQTIQRMASTKDISLPSSTDASTLSEQTPNQEKDAVTLMLSVRQANLLLSSLWTQALSPENVPRNYEAISHTYSLMLLFSRAKVPTFWLVAFSLLFH

SEQ ID NO: 173699 - protein, 417 aa, Zea Mays
MQIVMEKSGQNAHILLSMLVKHLEHKNVLKQPDMNLDIIEVTSRLAGHSKAQSSTALMASISDMVRHMGKSMQSLASDAGPGDNMVKWNSRYGKAVDECLVQLSRKVGDAGPILDTLAVVLENISSSMIVARSTIFAAYRTAQIVASLPNLSHQSKAFPEALFHQLLLAMVYPDCGTHLGAHRIFSVVLVPSAVAPCSFSDTSRTRKIDLRRTLSRTTSVFSSSAALFGKLKRDMLSFRESPLHDNTKLLPISEDADEISANDAKLFKSQTIQRMASTKDISLPSSTDASTLSEQTPNQEKDAVTLMLSVRQANLLLSSLWTQALSPENVPRNYEAISHTYSLMLLFSRAKGSGADVLVGSFQLAFSLRSVSLQAGFLPPSRRRSLFTLATSMLVFFSKAFNVPALIPVVKHVLTES

SEQ ID NO: 173700 - protein, 400 aa, Zea Mays
MLVKHLEHKNVLKQPDMNLDIIEVTSRLAGHSKAQSSTALMASISDMVRHMGKSMQSLASDAGPGDNMVKWNSRYGKAVDECLVQLSRKVGDAGPILDTLAVVLENISSSMIVARSTIFAAYRTAQIVASLPNLSHQSKAFPEALFHQLLLAMVYPDCGTHLGAHRIFSVVLVPSAVAPCSFSDTSRTRKIDLRRTLSRTTSVFSSSAALFGKLKRDMLSFRESPLHDNTKLLPISEDADEISANDAKLFKSQTIQRMASTKDISLPSSTDASTLSEQTPNQEKDAVTLMLSVRQANLLLSSLWTQALSPENVPRNYEAISHTYSLMLLFSRAKGSGADVLVGSFQLAFSLRSVSLQAGFLPPSRRRSLFTLATSMLVFFSKAFNVPALIPVVKHVLTES

SEQ ID NO: 173701 - protein, 94 aa, Zea Mays
MVSIGTRTLRRFIPIFAGEVLCQCCHTRLFCSHIFRFPCSYRRRVHFAVGLLDLALDGGTESFPCFLNLLCSCAVRRRSEQCSRDGSGCLASHL

SEQ ID NO: 173702 - protein, 570 aa, Zea Mays
MAALARGAAMKGGGDKNKKVAAGGRLLSVVAVGCFLLFVVVVFTLSSRRYATLVLDARDRRGDFHPSQLQGGSHGGGGGEGDLKHLLVAQRSNDDDDKAVTEAELEESGIRGKISINVVGAGGQAEMEEAAPESSAAAAAAADATSNSDDDRARPGDIMTRAAAAASVKQQRQPLCDLSGSRADVCDLTGDIRLNATASEFIVVDPAAADDGPTTAYEIRPYARKGDATSMGRVTAVTVRVRATADAAPRCTVTHAEPAVAFSVGGYTGNLFHDFTDVIVPLYGTAQRYRGDVRLVVTDAGSSSSWWLAKYDAVLRGLSRHPPLHLHLAKAAGEVHCFGHVVLGLRARRELMVEPDPDPDRGRPDGVGMADFARFLRRALSLPRDAPTRPAAASSDDRRKPRLLVVSRRGTRRLLNADAVARVAEEVGFEAVVSELEVSRDAAGVGRLINSFDALVGVHGAGLTNMVFLPPGATVVQIVPWGGLQWIARMDFGDPADAMGLRYIQYEIAVHESSLADKYPRDHEIFTNPTALHKKGFKFLRHTFLIGQDITLDVDRFRVVLLQALRNLTE

SEQ ID NO: 173703 - protein, 179 aa, Zea Mays
MRTVRYFDGRTYEWVGLSRQPNIISKVKRMLGQFTPAQWDKDEWHPTRGPWRFIQVLSLCVVFMAVELNTFFLKFCLWIPPRNPLIVYRLVLWWLIAIPTIREYNTYLQDSKPFKKVGSFCWLSLAICIVELLICIKFGHGLFPKSMPSWLITFWSAVALLLVLFVWTWKYRTMKRKMI

SEQ ID NO: 173704 - protein, 288 aa, Zea Mays
MKYLHPDLGVELPERSYGTDCRIYVPDHPKSRFNNVYEIIFDEFVIAHILGWWGKAIMIRNQPLLWVLSIGFELMELTFRHMLPNFNECWWDSIVLDILICNWFGIWTGMRTVRYFDGRTYEWVGLSRQPNIISKVKRMLGQFTPAQWDKDEWHPTRGPWRFIQVLSLCVVFMAVELNTFFLKFCLWIPPRNPLIVYRLVLWWLIAIPTIREYNTYLQDSKPFKKVGSFCWLSLAICIVELLICIKFGHGLFPKSMPSWLITFWSAVALLLVLFVWTWKYRTMKRKMI

SEQ ID NO: 173705 - protein, 1367 aa, Zea Mays
MALTMVTFVLRFTHPCACAGPRCSCRCVRRDTTPQTPLVSDLPSHYQGLLTPFLTAIRHPILSFETRVAAARRHSPDHAAQSPSRFYAGVSVFSRSADPQSLTLQRRTLRRAGFPRRAQSSGTGGGLHETCEPAVAATALVVMLLTSVLRGRVRLLHRHRSLTMPSPLFLSRNPNTSLGTTNPHLSSPPVSAAMSTTGVYVPPMRRLRSVIASTNGSLAPPPSAAAQAQQTRTPEWLVDGRSLSPQSPPQLRRRDIPPLPRPPLPEHYRQQSAGFARYAYDDFSEDDSDKDIDRTSVSSKGASTLDNVDEWKWKLHMLLRNDDEQEIISRERKDRRDFEQLAQLADRMRLHSRQYSRVVVFSKVPLPNYRSDLDDKRPQREVSIPAGLQREVDALLAGYVARKGTYIGNFPSSAFSRSSSTDSFATDEGFFEQQDNQTSTSAVMDRIQRRKSLQLRNQQAAWQESNDGQSMMEFRRSLPAYKEKQTLLEAISQNQVIVVSGETGCGKTTQLPQYILESEIDAARGATCSIICTQPRRISAIAVSERVAAERGEKIGESVGYKVRLEGMRGRDTRLLFCTTGVLLRRLLVDRNLKGVTHVIVDEIHERGMNEDFLLIVLKDLLPRRPELRLILMSATLNAELFSSYFGGAPMIHIPGFTYPVRSHFLEDILEITGHWLTPYNQIDDYGQEKSWKMQKQALQKRKSQIASVVEDAVEAADLRDYSSRTRDSLSCWNPDSIGFNLIENVLCHICQKERSGAILVFMTGWDDINALKEQLQANPLLGNPSAVLLLACHGSMASSEQKLIFDKPEPGVRKIVLATNLAETSITINDVVFVVDCGKAKETSYDALNNTPCLLPTWISKASARQRRGRAGRVQPGECYHLYPRCVYDAFADYQLPELLRTPLQSLCLQIKSLRLGSISEFLSRALQSPESLSVQNAIEYLKVIGAFDQNEELTVLGKHLSMLPVEPKLGKMLIFGAIFNCLDPILTIVSGLSVRDPFLTPFDKKDLAESAKLQFSCRDYSDHLALVRAYDGWREAERDRAGYDYCWKNFLSVQTLKAIDSLRRQFLFLLKDTGLVDENMTMCNKWSRDENLVRAVICAGLYPGVSSVLNKEKSISLKTMEDGQVMLYSSSVNGKETKIPFPWLVFNEKVKVNSVFLRDSTAISDSILLLFGGCIKQGGLDGHLKMLGGYLEFFMNRDLASTYLQNPRMDIQTSEELLSAIRLLVTEDPCSGRFVYGRQEPRSKKAKTMLSPSSLSEAGGNGGDNAKNQLQTYLTRAGHSNPTYKTKQIKSYLFRSTVEFNGMQFVGQPCANKKLAEKDAASEALNWLTGDGGAITDSRGAQDADPMSLLMQPPRRRRHSHRRRN

SEQ ID NO: 173706 - protein, 1143 aa, Zea Mays
MALTMVTFVLRFTHPCACAGPRCSCRCVRRDTTPQTPLVSDLPSHYQGLLTPFLTAIRHPILSFETRVAAARRHSPDHAAQSPSRFYAGVSVFSRSADPQSLTLQRRTLRRAGFPRRAQSSGTGGGLHETCEPAVAATALVVMLLTSVLRGRVRLLHRHRSLTMPSPLFLSRNPNTSLGTTNPHLSSPPVSAAMSTTGVYVPPMRRLRSVIASTNGSLAPPPSAAAQAQQTRTPEWLVDGRSLSPQSPPQLRRRDIPPLPRPPLPEHYRQQSAGFARYAYDDFSEDDSDKDIDRTSVSSKGASTLDNVDEWKWKLHMLLRNDDEQEIISRERKDRRDFEQLAQLADRMRLHSRQYSRVVVFSKVPLPNYRSDLDDKRPQREVSIPAGLQREVDALLAGYVARKGTYIGNFPSSAFSRSSSTDSFATDEGFFEQQDNQTSTSAVMDRIQRRKSLQLRNQQAAWQESNDGQSMMEFRRSLPAYKEKQTLLEAISQNQVIVVSGETGCGKTTQLPQYILESEIDAARGATCSIICTQPRRISAIAVSERVAAERGEKIGESVGYKVRLEGMRGRDTRLLFCTTGVLLRRLLVDRNLKGVTHVIVDEIHERGMNEDFLLIVLKDLLPRRPELRLILMSATLNAELFSSYFGGAPMIHIPGFTYPVRSHFLEDILEITGHWLTPYNQIDDYGQEKSWKMQKQALQKRKSQIASVVEDAVEAADLRDYSSRTRDSLSCWNPDSIGFNLIENVLCHICQKERSGAILVFMTGWDDINALKEQLQANPLLGNPSAVLLLACHGSMASSEQKLIFDKPEPGVRKIVLATNLAETSITINDVVFVVDCGKAKETSYDALNNTPCLLPTWISKASARQRRGRAGRVQPGECYHLYPRCVYDAFADYQLPELLRTPLQSLCLQIKSLRLGSISEFLSRALQSPESLSVQNAIEYLKVIGAFDQNEELTVLGKHLSMLPVEPKLGKMLIFGAIFNCLDPILTIVSGLSVRDPFLTPFDKKDLAESAKLQFSCRDYSDHLALVRAYDGWREAERDRAGYDYCWKNFLSVQTLKAIDSLRRQFLFLLKDTGLVDENMTMCNKWSRDENLVRAVICAGLYPGVSSVLNKEKSISLKTMEDGQVMLYSLMVKKPRFHSPG

SEQ ID NO: 173707 - protein, 1318 aa, Zea Mays
MALTMVTFVLRFTHPCACAGPRCSCRCVRRDTTPQTPLVSDLPSHYQGLLTPFLTAIRHPILSFETRVAAARRHSPDHAAQSPSRFYAGVSVFSRSADPQSLTLQRRTLRRAGFPRRAQSSGTGGGLHETCEPAVAATALVVMLLTSVLRGRVRLLHRHRSLTMPSPLFLSRNPNTSLGTTNPHLSSPPVSAAMSTTGVYVPPMRRLRSVIASTNGSLAPPPSAAAQAQQTRTPEWLVDGRSLSPQSPPQLRRRDIPPLPRPPLPEHYRQQSAGFARYAYDDFSEDDSDKDIDRTSVSSKGASTLDNVDEWKWKLHMLLRNDDEQEIISRERKDRRDFEQLAQLADRMRLHSRQYSRVVVFSKVPLPNYRSDLDDKRPQREVSIPAGLQREVDALLAGYVARKGTYIGNFPSSAFSRSSSTDSFATDEGFFEQQDNQTSTSAVMDRIQRRKSLQLRNQQAAWQESNDGQSMMEFRRSLPAYKEKQTLLEAISQNQVGYKVRLEGMRGRDTRLLFCTTGVLLRRLLVDRNLKGVTHVIVDEIHERGMNEDFLLIVLKDLLPRRPELRLILMSATLNAELFSSYFGGAPMIHIPGFTYPVRSHFLEDILEITGHWLTPYNQIDDYGQEKSWKMQKQALQKRKSQIASVVEDAVEAADLRDYSSRTRDSLSCWNPDSIGFNLIENVLCHICQKERSGAILVFMTGWDDINALKEQLQANPLLGNPSAVLLLACHGSMASSEQKLIFDKPEPGVRKIVLATNLAETSITINDVVFVVDCGKAKETSYDALNNTPCLLPTWISKASARQRRGRAGRVQPGECYHLYPRCVYDAFADYQLPELLRTPLQSLCLQIKSLRLGSISEFLSRALQSPESLSVQNAIEYLKVIGAFDQNEELTVLGKHLSMLPVEPKLGKMLIFGAIFNCLDPILTIVSGLSVRDPFLTPFDKKDLAESAKLQFSCRDYSDHLALVRAYDGWREAERDRAGYDYCWKNFLSVQTLKAIDSLRRQFLFLLKDTGLVDENMTMCNKWSRDENLVRAVICAGLYPGVSSVLNKEKSISLKTMEDGQVMLYSSSVNGKETKIPFPWLVFNEKVKVNSVFLRDSTAISDSILLLFGGCIKQGGLDGHLKMLGGYLEFFMNRDLASTYVSLKRELENLIHCKLQNPRMDIQTSEELLSAIRLLVTEDPCSGRFVYGRQEPRSKKAKTMLSPSSLSEAGGNGGDNAKNQLQTYLTRAGHSNPTYKTKQIKSYLFRSTVEFNGMQFVGQPCANKKLAEKDAASEALNWLTGDGGAITDSRGAQDADPMSLLMQPPRRRRHSHRRRN

SEQ ID NO: 173708 - protein, 814 aa, Zea Mays
MRGRDTRLLFCTTGVLLRRLLVDRNLKGVTHVIVDEIHERGMNEDFLLIVLKDLLPRRPELRLILMSATLNAELFSSYFGGAPMIHIPGFTYPVRSHFLEDILEITGHWLTPYNQIDDYGQEKSWKMQKQALQKRKSQIASVVEDAVEAADLRDYSSRTRDSLSCWNPDSIGFNLIENVLCHICQKERSGAILVFMTGWDDINALKEQLQANPLLGNPSAVLLLACHGSMASSEQKLIFDKPEPGVRKIVLATNLAETSITINDVVFVVDCGKAKETSYDALNNTPCLLPTWISKASARQRRGRAGRVQPGECYHLYPRCVYDAFADYQLPELLRTPLQSLCLQIKSLRLGSISEFLSRALQSPESLSVQNAIEYLKVIGAFDQNEELTVLGKHLSMLPVEPKLGKMLIFGAIFNCLDPILTIVSGLSVRDPFLTPFDKKDLAESAKLQFSCRDYSDHLALVRAYDGWREAERDRAGYDYCWKNFLSVQTLKAIDSLRRQFLFLLKDTGLVDENMTMCNKWSRDENLVRAVICAGLYPGVSSVLNKEKSISLKTMEDGQVMLYSSSVNGKETKIPFPWLVFNEKVKVNSVFLRDSTAISDSILLLFGGCIKQGGLDGHLKMLGGYLEFFMNRDLASTYVSLKRELENLIHCKLQNPRMDIQTSEELLSAIRLLVTEDPCSGRFVYGRQEPRSKKAKTMLSPSSLSEAGGNGGDNAKNQLQTYLTRAGHSNPTYKTKQIKSYLFRSTVEFNGMQFVGQPCANKKLAEKDAASEALNWLTGDGGAITDSRGAQDADPMSLLMQPPRRRRHSHRRRN

SEQ ID NO: 173709 - protein, 1376 aa, Zea Mays
MALTMVTFVLRFTHPCACAGPRCSCRCVRRDTTPQTPLVSDLPSHYQGLLTPFLTAIRHPILSFETRVAAARRHSPDHAAQSPSRFYAGVSVFSRSADPQSLTLQRRTLRRAGFPRRAQSSGTGGGLHETCEPAVAATALVVMLLTSVLRGRVRLLHRHRSLTMPSPLFLSRNPNTSLGTTNPHLSSPPVSAAMSTTGVYVPPMRRLRSVIASTNGSLAPPPSAAAQAQQTRTPEWLVDGRSLSPQSPPQLRRRDIPPLPRPPLPEHYRQQSAGFARYAYDDFSEDDSDKDIDRTSVSSKGASTLDNVDEWKWKLHMLLRNDDEQEIISRERKDRRDFEQLAQLADRMRLHSRQYSRVVVFSKVPLPNYRSDLDDKRPQREVSIPAGLQREVDALLAGYVARKGTYIGNFPSSAFSRSSSTDSFATDEGFFEQQDNQTSTSAVMDRIQRRKSLQLRNQQAAWQESNDGQSMMEFRRSLPAYKEKQTLLEAISQNQVIVVSGETGCGKTTQLPQYILESEIDAARGATCSIICTQPRRISAIAVSERVAAERGEKIGESVGYKVRLEGMRGRDTRLLFCTTGVLLRRLLVDRNLKGVTHVIVDEIHERGMNEDFLLIVLKDLLPRRPELRLILMSATLNAELFSSYFGGAPMIHIPGFTYPVRSHFLEDILEITGHWLTPYNQIDDYGQEKSWKMQKQALQKRKSQIASVVEDAVEAADLRDYSSRTRDSLSCWNPDSIGFNLIENVLCHICQKERSGAILVFMTGWDDINALKEQLQANPLLGNPSAVLLLACHGSMASSEQKLIFDKPEPGVRKIVLATNLAETSITINDVVFVVDCGKAKETSYDALNNTPCLLPTWISKASARQRRGRAGRVQPGECYHLYPRCVYDAFADYQLPELLRTPLQSLCLQIKSLRLGSISEFLSRALQSPESLSVQNAIEYLKVIGAFDQNEELTVLGKHLSMLPVEPKLGKMLIFGAIFNCLDPILTIVSGLSVRDPFLTPFDKKDLAESAKLQFSCRDYSDHLALVRAYDGWREAERDRAGYDYCWKNFLSVQTLKAIDSLRRQFLFLLKDTGLVDENMTMCNKWSRDENLVRAVICAGLYPGVSSVLNKEKSISLKTMEDGQSSVNGKETKIPFPWLVFNEKVKVNSVFLRDSTAISDSILLLFGGCIKQGGLDGHLKMLGGYLEFFMNRDLASTYVSLKRELENLIHCKLQNPRMDIQTSEELLSAIRLLVTEDPCSGRFVYGRQEPRSKKAKTMLSPSSLSEAGGNGGDNAKNQLQTYLTRAGHSNPTYKTKQIKSYLFRSTVEFNGMQFVGQPCANKKLAEKDAASEALNWLTGDGGAITDSRGAQDADPMSLLMQPPRRRRHSHRRRN

SEQ ID NO: 173710 - protein, 71 aa, Zea Mays
MEKLSSRRYSRPAMSLLIIVAITISCSVVHSSEAPAQVPRLDGDHQGQAPPPPDAGKPRQPQPPCCLRHGA

SEQ ID NO: 173711 - protein, 352 aa, Zea Mays
MYFITEWLTTTQTHLFDLLVPAPIQVSTHVPNQTDPINFESEAEHSVQEVNSPTKPSDTPITFRRTKEQNFKPDEDLLLCKTWLEISSDPVISTGQRKEGLWTRIEKRYNELRGEFPMRLNRALSSRWDKIRAETGKFVGFYARVLRENQSGLTDNDKTSKAATLYATSQKKPFHFMHCWTRLKNEPKWDAMVHGSPWRGNAGTEPVRSLTPTGSINDVEYDEGGSKGKRPLGRDSTKASRKKAMSSSSQSTDYLSRLHDIQIARLKQSEEKSELKQQNIEFMKEVELKKLEVQSKEIEVQEKKLMMEDRKQKDEELKKLYAMDMDALPEELRAVYIARRKGLIEYFINNPV

SEQ ID NO: 173712 - protein, 433 aa, Zea Mays
MADNNTNTPFRPTGASPNSGNQSFPPPMWDPQMWQGQGLDPTHPSTFTSPTSHMSNPTWSQGANDPSTYTFRSPCNPFFGMMNPGGPPPQTSFCQPQFVPPIPCPQVSTHVPNQTDPINFESEAEHSVQEVNSPTKPSDTPITFRRTKEQNFKPDEDLLLCKTWLEISSDPVISTGQRKEGLWTRIEKRYNELRGEFPMRLNRALSSRWDKIRAETGKFVGFYARVLRENQSGLTDNDKTSKAATLYATSQKKPFHFMHCWTRLKNEPKWDAMVHGSPWRGNAGTEPVRSLTPTGSINDVEYDEGGSKGKRPLGRDSTKASRKKAMSSSSQSTDYLSRLHDIQIARLKQSEEKSELKQQNIEFMKEVELKKLEVQSKEIEVQEKKLMMEDRKQKDEELKKLYAMDMDALPEELRAVYIARRKGLIEYFINNPV

SEQ ID NO: 173713 - protein, 235 aa, Zea Mays
MRLNRALSSRWDKIRAETGKFVGFYARVLRENQSGLTDNDKTSKAATLYATSQKKPFHFMHCWTRLKNEPKWDAMVHGSPWRGNAGTEPVRSLTPTGSINDVEYDEGGSKGKRPLGRDSTKASRKKAMSSSSQSTDYLSRLHDIQIARLKQSEEKSELKQQNIEFMKEVELKKLEVQSKEIEVQEKKLMMEDRKQKDEELKKLYAMDMDALPEELRAVYIARRKGLIEYFINNPV

SEQ ID NO: 173714 - protein, 199 aa, Zea Mays
MHGEPEGGGGGGGRGRRAVGAAVGRRQLHPRQRLHHAAPRLPAGAVAQEAPPPPPRRLPARARLQGPLQRHRRVGRRPGPADDPEDALQAKVEIVVTEGELGETVVATVNQLGASTLVVGLHDKSFLYSRAPSQYSRVIRSLGCRVLAVRQHATARDGFLNAELTQIETVNLHIPPPKIPFPMFTLPLGVIWRRSKRRK

SEQ ID NO: 173715 - protein, 173 aa, Zea Mays
MHGEPEGGGGGGGRGRRAVGAAVGRRQLHPRQRLHHAAPRLPAGAVAQEAPPPPPRRLPARARLQGPLQRHRRGQGGDRGDGGGARGDGGGDGEPARRLHARRRPPRQELPLQQGAEPVQPSHQEPGLQGPRRPAARHGAGRLPERRAHPDRDREPAVSKHHLSVGLVRWLAS

SEQ ID NO: 173716 - protein, 183 aa, Zea Mays
MQKQSDVDRKHLKRKNRRRNKKHEHSDSDDARRRNRRSRRSTDSSDESNSEYETRSEEERPRKKRSHRRRHHRHSSKSDSENYSSDEEQRRPAKDHSQSRRRHHRSSDDDSDKDKVKSRHGKGLRSRDEDARADFNSNKHLRSQSLEESSDDRDADESEKMRNGKRSHKNGGHRHHHHRHHHE

SEQ ID NO: 173717 - protein, 1404 aa, Zea Mays
MSVPGSASAAAPPPQAGAAPPAQPQQPSGAAFTNQKLTTNDALVYLKAVKDKFQDKREKYEEFLEVMRDFKSERIDTNGVIVRVKTLFNGYPELILGFNAFLPKGYAIKLQEEKKPVDFVEAINFVNKIKNRFQHDEQVYKAFLDILNMYRKDNKSIQDVYHEVAMLFKDHKDLLEEFQHFLPDTSVAPQAVASKGGLVKREDRSSLVPPANKILHNDKRDRVYLSHADRDFSVDRPDVEHDRQRRRLDKDKERKVERDRRDYEREDKDGEHDSRDLELGQRKRKPFSRNIEDNVGAETHQGGPSENHGIHSVSASSYDDKDALKSVYTHEFHFCEKVKEKLEHEAYQEFLKCLHIYSQEIITRSELKNLVNDILQHYPDLMEGFNEFLEHCENIDGFLAGVFNKRPSTRAVKTEDKEKDRDRDREDKDRDREKEREKERERLDKGSTFNSKEGSSHKPSMFSGKEKYNLSKPISELDLSNCQRCTPSYRLLPKNYPMPPASNRTDLGASVLNDHWVSVTSGSEDYSFKHMRKNQYEESLFRCEDDRFELDMLLESVNAATKRVEELIEKMQDNSVKPESPIRIDEHLTPLNLRCIERLYGDHGLDVMDVLRKNASVALPVILTRLKQKQEEWSRCRSDFNKVWAEIYAKNYHKSLDHRSFYFKQQDTKNLSTKSLLTEIKEINEKKRKEDDVLLAIAAGNRRPIVPNMSFEYIDSEIHEDLHKIIKYSCAEVCNSSDQLDKVMRVWTTFLEPVLGVQQKHGSEDPDLVKTKSRTTKLGLANVRESNTIAGIVSKQSNGDESEQGPSSRARLANGVAAGTQNGFHDADRIARKGEEPSNAILNGRVHGAVSADETLSLITQNIASTERPAENAAAVRTEQHKANLVLTPGMNASRSSHDAVEVAGEGKTGNETLLSAEGGERLGPSLNGTSEGIKGRLNNDGSVPHTSKVEREEGELSPNGDFEEDHFVPFEDGTSKGKEDSTSRPFHGRPGEVVPSSAEAAGENDADADDEGEESAQRSTEDSENASEAGEDASGSESGDGEECSREDHDEEEEDMDHDDQDAKAESEGEAEGTTETHDVEGGISLPLSERFLYSVKPLAKHVPTALHDREFSRVFYGNDSFYVLFRLHQILYERLLSAKTNSFTAEKKWRNSKDTNPPDLYAKFMSALYNLLDGSSDNTKFEDDCRAIIGTQSYVLFTLDKLIYKVVKQLQAIATDEMDNKLLQLYLYEKSRSPGRFFDLVYHENARVLLHDESIYRFECCSSPTRLSIQLMEYGHEKPEVTAVSIEPNFSSYLFSEYLCSTPDKKLSEGVYLGRNKRKYSNNDEPSDSLKAMDGINVVNGLECKISCKTSKVSYVLDTEDFLFRLRKRRKILRGGNVPDRLQISSISAAKVQRFNRFLSKP

SEQ ID NO: 173718 - protein, 1320 aa, Zea Mays
MKRGTRDDALMGSQLKRSNVVRSDPSAQPQHMSVPGSASAAAPPPQAGAAPPAQPQQPSGAAFTNQKLTTNDALVYLKAVKDKFQDKREKYEEFLEVMRDFKSERIDTNGVIVRVKTLFNGYPELILGFNAFLPKGYAIKLQEEKKPVDFVEAINFVNKIKNRFQHDEQVYKAFLDILNMYRKDNKSIQDVYHEVAMLFKDHKDLLEEFQHFLPDTSVAPQAVASKGGLVKREDRSSLVPPANKILHNDKRDRVYLSHADRDFSVDRPDVEHDRQRRRLDKDKERKVERDRRDYEREDKDGEHDSRDLELGQRKRKPFSRNIEDNVGAETHQGGPSENHGIHSVSASSYDDKDALKSVYTHEFHFCEKVKEKLEHEAYQEFLKCLHIYSQEIITRSELKNLVNDILQHYPDLMEGFNEFLEHCENIDGFLAGVFNKRPSTRAVKTEDKEKDRDRDREDKDRDREKEREKERERLDKGSTFNSKEGSSHKPSMFSGKEKYNLSKPISELDLSNCQRCTPSYRLLPKNYPMPPASNRTDLGASVLNDHWVSVTSGSEDYSFKHMRKNQYEESLFRCEDDRFELDMLLESVNAATKRVEELIEKMQDNSVKPESPIRIDEHLTPLNLRCIERLYGDHGLDVMDVLRKNASVALPVILTRLKQKQEEWSRCRSDFNKVWAEIYAKNYHKSLDHRSFYFKQQDTKNLSTKSLLTEIKEINEKKRKEDDVLLAIAAGNRRPIVPNMSFEYIDSEIHEDLHKIIKYSCAEVCNSSDQLDKVMRVWTTFLEPVLGVQQKHGSEDPDLVKTKSRTTKLGLANVRESNTIAGIVSKQSNGDESEQGPSSRARLANGVAAGTQNGFHDADRIARKGEEPSNAILNGRVHGAVSADETLSLITQNIASTERPAENAAAVRTEQHKANLVLTPGMNASRSSHDAVEVAGEGKTGNETLLSAEGGERLGPSLNGTSEGIKGRLNNDGSVPHTSKVEREEGELSPNGDFEEDHFVPFEDGTSKGKEDSTSRPFHGRPGEVVPSSAEAAGENDADADDEGEESAQRSTEDSENASEAGEDASGSESGDGEECSREDHDEEEEDMDHDDQDAKAESEGEAEGTTETHDVEGGISLPLSERFLYSVKPLAKHVPTALHDREFSRVFYGNDSFYVLFRLHQILYERLLSAKTNSFTAEKKWRNSKDTNPPDLYAKFMSALYNLLDGSSDNTKFEDDCRAIIGTQSYVLFTLDKLIYKVVKQLQAIATDEMDNKLLQLYLYEKSRSPGRFFDLVYHENARVLLHDESIYRFECVMLESDKVVYSADGIWSRKARSDCSIN

SEQ ID NO: 173719 - protein, 1410 aa, Zea Mays
MKRGTRDDALMGSQLKRSNVVRSDPSAQPQHMSVPGSASAAAPPPQAGAAPPAQPQQPSGAAFTNQKLTTNDALVYLKAVKDKFQDKREKYEEFLEVMRDFKSERIDTNGVIVRVKTLFNGYPELILGFNAFLPKGYAIKLQEEKKPVDFVEAINFVNKIKNRFQHDEQVYKAFLDILNMYRKDNKSIQDVYHEVAMLFKDHKDLLEEFQHFLPDTSVAPQAVASKGGLVKREDRSSLVPPANKILHNDKRRRLDKDKERKVERDRRDYEREDKDGEHDSRDLELGQRKRKPFSRNIEDNVGAETHQGGPSENHGIHSVSASSYDDKDALKSVYTHEFHFCEKVKEKLEHEAYQEFLKCLHIYSQEIITRSELKNLVNDILQHYPDLMEGFNEFLEHCENIDGFLAGVFNKRPSTRAVKTEDKEKDRDRDREDKDRDREKEREKERERLDKGSTFNSKEGSSHKPSMFSGKEKYNLSKPISELDLSNCQRCTPSYRLLPKNYPMPPASNRTDLGASVLNDHWVSVTSGSEDYSFKHMRKNQYEESLFRCEDDRFELDMLLESVNAATKRVEELIEKMQDNSVKPESPIRIDEHLTPLNLRCIERLYGDHGLDVMDVLRKNASVALPVILTRLKQKQEEWSRCRSDFNKVWAEIYAKNYHKSLDHRSFYFKQQDTKNLSTKSLLTEIKEINEKKRKEDDVLLAIAAGNRRPIVPNMSFEYIDSEIHEDLHKIIKYSCAEVCNSSDQLDKVMRVWTTFLEPVLGVQQKHGSEDPDLVKTKSRTTKLGLANVRESNTIAGIVSKQSNGDESEQGPSSRARLANGVAAGTQNGFHDADRIARKGEEPSNAILNGRVHGAVSADETLSLITQNIASTERPAENAAAVRTEQHKANLVLTPGMNASRSSHDAVEVAGEGKTGNETLLSAEGGERLGPSLNGTSEGIKGRLNNDGSVPHTSKVEREEGELSPNGDFEEDHFVPFEDGTSKGKEDSTSRPFHGRPGEVVPSSAEAAGENDADADDEGEESAQRSTEDSENASEAGEDASGSESGDGEECSREDHDEEEEDMDHDDQDAKAESEGEAEGTTETHDVEGGISLPLSERFLYSVKPLAKHVPTALHDREFSRVFYGNDSFYVLFRLHQILYERLLSAKTNSFTAEKKWRNSKDTNPPDLYAKFMSALYNLLDGSSDNTKFEDDCRAIIGTQSYVLFTLDKLIYKVVKQLQAIATDEMDNKLLQLYLYEKSRSPGRFFDLVYHENARVLLHDESIYRFECCSSPTRLSIQLMEYGHEKPEVTAVSIEPNFSSYLFSEYLCSTPDKKLSEGVYLGRNKRKYSNNDEPSDSLKAMDGINVVNGLECKISCKTSKVSYVLDTEDFLFRLRKRRKILRGGNVPDRLQISSISAAKVQRFNRFLSKP

SEQ ID NO: 173720 - protein, 713 aa, Zea Mays
MKRGTRDDALMGSQLKRSNVVRSDPSAQPQHMSVPGSASAAAPPPQAGAAPPAQPQQPSGAAFTNQKLTTNDALVYLKAVKDKFQDKREKYEEFLEVMRDFKSERIDTNGVIVRVKTLFNGYPELILGFNAFLPKGYAIKLQEEKKPVDFVEAINFVNKIKNRFQHDEQVYKAFLDILNMYRKDNKSIQDVYHEVAMLFKDHKDLLEEFQHFLPDTSVAPQAVASKGGLVKREDRSSLVPPANKILHNDKRDRVYLSHADRDFSVDRPDVEHDRQRRRLDKDKERKVERDRRDYEREDKDGEHDSRDLELGQRKRKPFSRNIEDNVGAETHQGGPSENHGIHSVSASSYDDKDALKSVYTHEFHFCEKVKEKLEHEAYQEFLKCLHIYSQEIITRSELKNLVNDILQHYPDLMEGFNEFLEHCENIDGFLAGVFNKRPSTRAVKTEDKEKDRDRDREDKDRDREKEREKERERLDKGSTFNSKEGSSHKPSMFSGKEKYNLSKPISELDLSNCQRCTPSYRLLPKNYPMPPASNRTDLGASVLNDHWVSVTSGSEDYSFKHMRKNQYEESLFRCEDDRFELDMLLESVNAATKRVEELIEKMQDNSVKPESPIRIDEHLTPLNLRCIERLYGDHGLDVMDVLRKNASVALPVILTRLKQKQEEWSRCRSDFNKVWAEIYAKNYHKSLDHRSFYFKQQDTKNLSTNSPDRDKRN

SEQ ID NO: 173721 - protein, 514 aa, Zea Mays
MNASRSSHDAVEVAGEGKTGNETLLSAEGGERLGPSLNGTSEGIKGRLNNDGSVPHTSKVEREEGELSPNGDFEEDHFVPFEDGTSKGKEDSTSRPFHGRPGEVVPSSAEAAGENDADADDEGEESAQRSTEDSENASEAGEDASGSESGDGEECSREDHDEEEEDMDHDDQDAKAESEGEAEGTTETHDVEGGISLPLSERFLYSVKPLAKHVPTALHDREFSRVFYGNDSFYVLFRLHQILYERLLSAKTNSFTAEKKWRNSKDTNPPDLYAKFMSALYNLLDGSSDNTKFEDDCRAIIGTQSYVLFTLDKLIYKVVKQLQAIATDEMDNKLLQLYLYEKSRSPGRFFDLVYHENARVLLHDESIYRFECCSSPTRLSIQLMEYGHEKPEVTAVSIEPNFSSYLFSEYLCSTPDKKLSEGVYLGRNKRKYSNNDEPSDSLKAMDGINVVNGLECKISCKTSKVSYVLDTEDFLFRLRKRRKILRGGNVPDRLQISSISAAKVQRFNRFLSKP

SEQ ID NO: 173722 - protein, 177 aa, Zea Mays
MQRYIGKRDCTKRTFDRETQFKTSAGLSYSCSHDLCFTGPRLHAIPVIVRHSWQNGTIPARCLPRVTAAVWKPPGSVRRAREVQATGAYKAGSKQHLALGHCLRRPVGCGQPDPGARKPSAVVRSANCRRENGRLIEETTAVHMRAADERAGLLSFAPWQLAIESALSLYMCVYMLE

SEQ ID NO: 173723 - protein, 433 aa, Zea Mays
MGEYCPSPQGDSALAAPPLTLPSSSPATAVRPSYGSCDRSYVKQVFDNLHGSISVDPLALQFVDTEEFQRLRDLKQLGLTYLVYPGAVHTRFEHSLGVYSLAGKAINNLKTYQGVELGIDPVDMQTVKLAGLLHDIGHGPFSHLFEHEFLPRVDPGSSWSHEKMSVLLLDSIVDKHAIDIENDYLKMVKDMITASSDPASTTSAKEKHFLYDIVANGRNGIDVDKFDYIGRDCRACGLGCNFQYWRLMEGMRVMGDEICYPAKDYLSIHKLFSTRADLHRTVYTHAKVKAVELMLVDALVEANDYLGISLHAHDPEDFWKLDDTIIKTIETAPNNELKKAKEIIQRIRRRELYKFCNQYSVPKDKLEHFKNITAQDIVCSQKSSEVLLKEEDVAVCNVKIDLTRGKYNPLERFLILNATLSHLLICLKYQNSN

SEQ ID NO: 173724 - protein, 167 aa, Zea Mays
MSVLLLDSIVDKHAIDIENDYLKMVKDMITASSDPASTTSAKEKHFLYDIVANGRNGIDVDKFDYIGRDCRACGLGCNFQYWRLMEGMRVMGDEICYPAKDYLSIHKLFSTRADLHRTVYTHAKVKAVELMLVDALVEANDYLGISLHAHDPEDFWKVWCLLMSLYS

SEQ ID NO: 173725 - protein, 377 aa, Zea Mays
MGEYCPSPQGDSALAAPPLTLPSSSPATAVRPSYGSCDRSYVKQVFDNLHGSISVDPLALQFVDTEEFQRLRDLKQLGLTYLVYPGAVHTRFEHSLGVYSLAGKAINNLKTYQGVELGIDPVDMQTVKLAGLLHDIGHGPFSHLFEHEFLPRVDPGSSWSHEKMSVLLLDSIVDKHAIDIENDYLKMVKDMITASSDPASTTSAKEKHFLYDIVANGRNGIDVDKFDYIGRDCRACGLGCNFQYWRLMEGMRVMGDEICYPAKDYLSIHKLFSTRADLHRTVYTHAKVKAVELMLVDALVEANDYLGISLHAHDPEDFWKLDDTIIKTIETAPNNELKKAKEIIQRIRRRELYKYSVPKDKLEHFKNITAQDIVCSQ

SEQ ID NO: 173726 - protein, 193 aa, Zea Mays
MKSRRLHMKGLCLKLSSLIPPAAATTHASLLSDAASAAVSSNPGNKQDAVTQLDQLDSAAAYIKQLKERIEALKQRKAGCCNGGGAATEAATAAAGSTGGGGGVRMPVIEVRCQDGTLDVVLISEAARPFKLHEVITVLEQEGAEVVSASFSVIGDKIFYTVHSQALSPRIGVDAARVSQRLHALLLAPTILV

SEQ ID NO: 173727 - protein, 311 aa, Zea Mays
MDRLADGLAAASLSDPADQSAATAGLPSADYLLSVMRAVEGADATIRTQLEENSRLKEELMRKTQQLQRMREDATSQSSFSGLGQERNSVSNKMDGSSSSVNPQSTLIHPQNGCCESREHLIDESSKQKYLDSPQANGAFKRSLGEQTAVDSGGPSQFSTPSSRSHSPNRHRKDGDYDSRLLPVSEMNSNISWKQDLTVKVKEGEEEIAQLRKHLADYSVKEAQILDDKYKLEKRIAYMRMAFDQQQHDLIDAASKALSYRQDIIEENIRLTYALQPNKKDQFSYLLCFLFCPNMMISSLQFLMLSQLLVI

SEQ ID NO: 173728 - protein, 300 aa, Zea Mays
MVYPHVQSPMSSPVQARGDWGAFGNKNHQDISNEVPIRNAGHDDKGGTSLSSRSQYRTDVPPQVSQGDSSAVHFDFETQSQNPPFKGLSRNDVLDGSDSAEAQNTQEPSTRWGLGDSSNLASGLEDANPSYPYLPTVLEEPGSSFSEAAEDDPLPGIEGLRITGEPFPGQELQAGGYSINGTTTCNFEWVRHLEDGSVNFIEGAKQPSYVVTADDVDTLLAIEVQPLDDRKRKGDFIKVYANGQRKISCDPETKELIKRTLDIGHVTYEVQVQLPVCSVICNHTFTHQFLLLSSDVTTPI

SEQ ID NO: 173729 - protein, 752 aa, Zea Mays
MDRLADGLAAASLSDPADQSAATAGLPSADYLLSVMRAVEGADATIRTQLEENSRLKEELMRKTQQLQRMREDATSQSSFSGLGQERNSVSNKMDGSSSSVNPQSTLIHPQNGCCESREHLIDESSKQKYLDSPQANGAFKRSLGEQTAVDSGGPSQFSTPSSRSHSPNRHRKDGDYDSRLLPVSEMNSNISWKQDLTVKVKEGEEEIAQLRKHLADYSVKEAQILDDKYKLEKRIAYMRMAFDQQQHDLIDAASKALSYRQDIIEENIRLTYALQAAQQERSIFLSSLLPLLSEYDDLQPSVLDAQSIVSNLKVLFKHLQERLIVTEDRLRESRYQITPWHTELSNNTSNPVSTNPPAGKALSKSSLDIVSQMVYPHVQSPMSSPVQARGDWGAFGNKNHQDISNEVPIRNAGHDDKGGTSLSSRSQYRTDVPPQVSQGDSSAVHFDFETQSQNPPFKGLSRNDVLDGSDSAEAQNTQEPSTRWGLGDSSNLASGLEDANPSYPYLPTVLEEPGSSFSEAAEDDPLPGIEGLRITGEPFPGQELQAGGYSINGTTTCNFEWVRHLEDGSVNFIEGAKQPSYVVTADDVDTLLAIEVQPLDDRKRKGDFIKVYANGQRKISCDPETKELIKRTLDIGHVTYEVQVQLPQVRFLDIWEPAVLAIKREGYSIKCNGQRGVLITEKFQQGTAIHIPYGRPTEFSITSAASADGVSYNLKPVENTLLRDTIVLVLRLFKNMALERRGRRKKGLFFK

SEQ ID NO: 173730 - protein, 494 aa, Zea Mays
MISIEQPWFTISNHQAAQQERSIFLSSLLPLLSEYDDLQPSVLDAQSIVSNLKVLFKHLQERLIVTEDRLRESRYQITPWHTELSNNTSNPVSTNPPAGKALVTTSKSSLDIVSQMVYPHVQSPMSSPVQARGDWGAFGNKNHQDISNEVPIRNAGHDDKGGTSLSSRSQYRTDVPPQVSQGDSSAVHFDFETQSQNPPFKGLSRNDVLDGSDSAEAQNTQEPSTRWGLGDSSNLASGLEDANPSYPYLPTVLEEPGSSFSEAAEDDPLPGIEGLRITGEPFPGQELQAGGYSINGTTTCNFEWVRHLEDGSVNFIEGAKQPSYVVTADDVDTLLAIEVQPLDDRKRKGDFIKVYANGQRKISCDPETKELIKRTLDIGHVTYEVQVQLPQVRFLDIWEPAVLAIKREGYSIKCNGQRGVLITEKFQQGTAIHIPYGRPTEFSITSAASADGVSYNLKPVENTLLRDTIVLVLRLFKNMALERRGRRKKGLFFK

SEQ ID NO: 173731 - protein, 491 aa, Zea Mays
MISIEQPWFTISNHQAAQQERSIFLSSLLPLLSEYDDLQPSVLDAQSIVSNLKVLFKHLQERLIVTEDRLRESRYQITPWHTELSNNTSNPVSTNPPAGKALSKSSLDIVSQMVYPHVQSPMSSPVQARGDWGAFGNKNHQDISNEVPIRNAGHDDKGGTSLSSRSQYRTDVPPQVSQGDSSAVHFDFETQSQNPPFKGLSRNDVLDGSDSAEAQNTQEPSTRWGLGDSSNLASGLEDANPSYPYLPTVLEEPGSSFSEAAEDDPLPGIEGLRITGEPFPGQELQAGGYSINGTTTCNFEWVRHLEDGSVNFIEGAKQPSYVVTADDVDTLLAIEVQPLDDRKRKGDFIKVYANGQRKISCDPETKELIKRTLDIGHVTYEVQVQLPQVRFLDIWEPAVLAIKREGYSIKCNGQRGVLITEKFQQGTAIHIPYGRPTEFSITSAASADGVSYNLKPVENTLLRDTIVLVLRLFKNMALERRGRRKKGLFFK

SEQ ID NO: 173732 - protein, 58 aa, Zea Mays
MLDLQALLLMLIPGNGGTELERQKQKRSLEGLSLLSLRPGTGALWSSAHAKCLLVSLS

SEQ ID NO: 173733 - protein, 614 aa, Zea Mays
MIASQPRRVRPLAAVSLVLFLLLLYSRSDGGSPRAARLLGSGFYPVHRRFLSDADPAGPASSAANPSASGTVPLNGEQPEDPSVACAGIALHEGFGTQCEFLRAHPQCSSDGFVDYLGFFYCRCERFRVLGYAVLGVCLAALFYMLGNTAADYFCCSLEKMSALLRLPPTLAGVTLLPFGNGAPDVFASIAAFMGSGAGDVGLNSVLGGAVFVTCVVVGAVSLCVAEKNVQIDRRCFVRDVGFFLVTLLALSIVLTIGKVTVWGAMMFVSIYVVYAFVVAANEVLRKHARRLKFDVFTPLLPVRASIFEQGAEQDESAYSSLLEEDADGEVTQMNTSVPQWMWASHVAIYSNHGNRDGSPDSSRPLWGWSEGEVDNSTFNIYKLFSFMELPLTIPRKLTIPIVEEDRWSKEYAVASSCLAPVLLAFLWSSQDTVSTKVSIAAYVMAVMLGIALAALVFLFTSNERPPRRFLFPWVFGGFVMSIIWFYIIANELVALLVALGVILGINPSILGLTVLAWGNSMGDLMSNVALAMNGGDGVQIAMSGCYAGPMFNTLAGLGISMLLGAWSTAPNSYLREIRPPCIIIHKNFKSSNILLDSEFSPHLFGCWTCKLYC

SEQ ID NO: 173734 - protein, 578 aa, Zea Mays
MIASQPRRVRPLAAVSLVLFLLLLYSRSDGGSPRAARLLGSGFYPVHRRFLSDADPAGPASSAANPSASGTVPLNGEQPEDPSVACAGIALHEGFGTQCEFLRAHPQCSSDGFVDYLGFFYCRCERFRVLGYAVLGVCLAALFYMLGNTAADYFCCSLEKMSALLRLPPTLAGVTLLPFGNGAPDVFASIAAFMGSGAGDVGLNSVLGGAVFVTCVVVGAVSLCVAEKNVQIDRRCFVRDVGFFLVTLLALSIVLTIGKVTVWGAMMFVSIYVVYAFVVAANEVLRKHARRLKFDVFTPLLPVRASIFEQGAEQDESAYSSLLEEDADGEVTQMNTSVPQWMWASHVAIYSNHGNRDGSPDSSRPLWGWSEGEVDNSTFNIYKLFSFMELPLTIPRKLTIPIVEEDRWSKEYAVASSCLAPVLLAFLWSSQDTVSTKVSIAAYVMAVMLGIALAALVFLFTSNERPPRRFLFPWVFGGFVMSIIWFYIIANELVALLVALGVILGINPSILGLTVLAWGNSMGDLMSNVALAMNGGDGVQIAMSGCYAGPMFNTLAGLGISMLLGAWSTAPNSTINYS

SEQ ID NO: 173735 - protein, 483 aa, Zea Mays
MLGNTAADYFCCSLEKMSALLRLPPTLAGVTLLPFGNGAPDVFASIAAFMGSGAGDVGLNSVLGGAVFVTCVVVGAVSLCVAEKNVQIDRRCFVRDVGFFLVTLLALSIVLTIGKVTVWGAMMFVSIYVVYAFVVAANEVLRKHARRLKFDVFTPLLPVRASIFEQGAEQDESAYSSLLEEDADGEVTQMNTSVPQWMWASHVAIYSNHGNRDGSPDSSRPLWGWSEGEVDNSTFNIYKLFSFMELPLTIPRKLTIPIVEEDRWSKEYAVASSCLAPVLLAFLWSSQDTVSTKVSIAAYVMAVMLGIALAALVFLFTSNERPPRRFLFPWVFGGFVMSIIWFYIIANELVALLVALGVILGINPSILGLTVLAWGNSMGDGVQIAMSGCYAGPMFNTLAGLGISMLLGAWSTAPNSYVLPQDHSLIYTMSFLVAGLIWALVMLPRGDMRPNKILGVGLIALYSIFLFIRVGSAVGILPLPGSS

SEQ ID NO: 173736 - protein, 61 aa, Zea Mays
MPLRIAAAVKLIIWRRFVFSKHAYVMSQKFSCFDGWPAIGAVSIHHTIVQRTFSCFDGCIP

SEQ ID NO: 173737 - protein, 171 aa, Zea Mays
MNILIDQDTAEVVHIDLGVAFEQGLMLKTPERVPFRLTRDIIDGMGVTGVEGVFRRCCEKTLCVMRANKEALLTIIEVFVHDPLYKWALSPLKALQRQKETVDTDSCLDDSQEPYDGNKDAARAILRVKQKLDGYEDGEMRSVQGQVQQLIQDAVDVDRLCQMFPGWGPWL

SEQ ID NO: 173738 - protein, 800 aa, Zea Mays
MEGAAAVGGATVLGPAGARLSSRLELLDKEWNLIMFQAERNLDLFEPFLAFRRALLKILGCEEHLVKHLFQSASALRKGLRFSLAAAALYELKELCFHRDESTMTNTYLLARLEDAKLLRAQGQHDMAISLGKYILQKLSDKKNLSDVYRLVGKWLAETRSSNSRTIIEDYLRPSIDLSEFEKSTDKRYMSRQCRTHFHLAHYTYSLFRSYEERLSSNEWQAALRLRKYKTRELEILIKRLRSSSKGVKTDYSVKIQELQKQLALDREEAEKIQDDHDNFLNLALQGYQRSIVVGGKYDLQVVFRLVSLWFSLFSRDQVVKAMLKTTKEVQTYKFIPLVYQIASRLGSTKDAQGSFNFQIALASLLKKMAVDHPYHTIFQLLALANGDRVKDKQRSRSSFVVDMEKKLAAENLLKELSSCHGPLICQMKQMVEIYIKLAELETKKEDTNKKIPLPREARSIGQLELVPVVTATVPIDPSCRYEEGSFPHFTGLADSIMIMNGINAPKVIECFGSDGNKYRQLAKSGNDDLRQDAVMEQFFSLVNTFLQNHRDTSKRRLKIRTYKVVPFTPSAGVVEWVNGTVPLGDYLIGSTRSGGAHGRYGIGDWTYLQCREYLMSVGYIVGLGDRHSMNILIDQDTAEVVHIDLGVAFEQGLMLKTPERVPFRLTRDIIDGMGVTGVEGVFRRCCEKTLCVMRANKEALLTIIEVFVHDPLYKWALSPLKALQRQKETVDTDSCLDDSQEPYDGNKDAARAILRVKQKLDGYEDGEMRSVQGQVQQLIQDAVDVDRLCQMFPGWGPWL

SEQ ID NO: 173739 - protein, 603 aa, Zea Mays
MEGAAAVGGATVLGPAGARLSSRLELLDKEWNLIMFQAERNLDLFEPFLAFRRALLKILGCEEHLVKHLFQSASALRKGLRFSLAAAALYELKELCFHRDESTMTNTYLLARLEDAKLLRAQGQHDMAISLGKYILQKLSDKKNLSDVYRLVGKWLAETRSSNSRTIIEDYLRPSIDLSEFEKSTDKRYMSRQCRTHFHLAHYTYSLFRSYEERLSSNEWQAALRLRKYKTRELEILIKRLRSSSKGVKTDYSVKIQELQKQLALDREEAEKIQDDHDNFLNLALQGYQRSIVVGGKYDLQVVFRLVSLWFSLFSRDQVVKAMLKTTKEVQTYKFIPLVYQIASRLGSTKDAQGSFNFQIALASLLKKMAVDHPYHTIFQLLALANGDRVKDKQRSRSSFVVDMEKKLAAENLLKELSSCHGPLICQMKQMVEIYIKLAELETKKEDTNKKIPLPREARSIGQLELVPVVTATVPIDPSCRYEEGSFPHFTGLADSIMIMNGINAPKVIECFGSDGNKYRQLAKSGNDDLRQDAVMEQFFSLVNTFLQNHRDTSKRRLKIRTYKVVPFTPSAGVVEWVNVLEVVEHMDDMELGTGHIFNAEST

SEQ ID NO: 173740 - protein, 530 aa, Zea Mays
MLRGHLTFRLKEQYMSGRHCPPGEQCLRDRLTVQLWYHGQIALASLLKKMAVDHPYHTIFQLLALANGDRVKDKQRSRSSFVVDMEKKLAAENLLKELSSCHGPLICQMKQMVEIYIKLAELETKKEDTNKKIPLPREARSIGQLELVPVVTATVPIDPSCRYEEGSFPHFTGLADSIMIMNGINAPKVIECFGSDGNKYRQLAKSGNDDLRQDAVMEQFFSLVNTFLQNHRDTSKRRLKIRTYKVVPFTPSAGVVEWVNGTVPLGDYLIGSTRSGGAHGRYGIGDWTYLQCREYLMSEKDKRRAFLKICSNFRPVMHHFFLERFLLPADWFQSRLAYTRSVAASSMVGYIVGLGDRHSMNILIDQDTAEVVHIDLGVAFEQGLMLKTPERVPFRLTRDIIDGMGVTGVEGVFRRCCEKTLCVMRANKEALLTIIEVFVHDPLYKWALSPLKALQRQKETVDTDSCLDDSQEPYDGNKDAARAILRVKQKLDGYEDGEMRSVQGQVQQLIQDAVDVDRLCQMFPGWGPWL

SEQ ID NO: 173741 - protein, 976 aa, Zea Mays
MPKEHLGTLTGSVLTGPSTVSSRAEDTMLNWKMHKGLMRSLQKTGCSHVLDVYCEGLSHQKGCLQQDAEFIDIQYEAAWRAGNWDFSFFVPYSSWSSTRSRSSCLFNENLHSCLRALQNGDSEEFHAKLCQTKMDLVLALSNTSKESTKYIHSTILKLQILDHATMVWDLRWNLNPNQTSKSPVTKEFSHISTVPKGIQLELLDKEWNLIMFQAERNLDLFEPFLAFRRALLKILGCEEHLVKHLFQSASALRKGLRFSLAAAALYELKELCFHRDESTMTNTYLLARLEDAKLLRAQGQHDMAISLGKYILQKLSDKKNLSDVYRLVGKWLAETRSSNSRTIIEDYLRPSIDLSEFEKSTDKRYMSRQCRTHFHLAHYTYSLFRSYEERLSSNEWQAALRLRKYKTRELEILIKRLRSSSKGVKTDYSVKIQELQKQLALDREEAEKIQDDHDNFLNLALQGYQRSIVVGGKYDLQVVFRLVSLWFSLFSRDQVVKAMLKTTKEVQTYKFIPLVYQIASRLGSTKDAQGSFNFQIALASLLKKMAVDHPYHTIFQLLALANGDRVKDKQRSRSSFVVDMEKKLAAENLLKELSSCHGPLICQMKQMVEIYIKLAELETKKEDTNKKIPLPREARSIGQLELVPVVTATVPIDPSCRYEEGSFPHFTGLADSIMIMNGINAPKVIECFGSDGNKYRQLAKSGNDDLRQDAVMEQFFSLVNTFLQNHRDTSKRRLKIRTYKVVPFTPSAGVVEWVNGTVPLGDYLIGSTRSGGAHGRYGIGDWTYLQCREYLMSVGYIVGLGDRHSMNILIDQDTAEVVHIDLGVAFEQGLMLKTPERVPFRLTRDIIDGMGVTGVEGVFRRCCEKTLCVMRANKEALLTIIEVFVHDPLYKWALSPLKALQRQKETVDTDSCLDDSQEPYDGNKDAARAILRVKQKLDGYEDGEMRSVQGQVQQLIQDAVDVDRLCQMFPGWGPWL

SEQ ID NO: 173742 - protein, 940 aa, Zea Mays
MCLMSTVKVYLTKRGVFNKTRSLLISNCLRALQNGDSEEFHAKLCQTKMDLVLALSNTSKESTKYIHSTILKLQILDHATMVWDLRWNLNPNQTSKSPVTKEFSHISTVPKGIQLELLDKEWNLIMFQAERNLDLFEPFLAFRRALLKILGCEEHLVKHLFQSASALRKGLRFSLAAAALYELKELCFHRDESTMTNTYLLARLEDAKLLRAQGQHDMAISLGKYILQKLSDKKNLSDVYRLVGKWLAETRSSNSRTIIEDYLRPSIDLSEFEKSTDKRYMSRQCRTHFHLAHYTYSLFRSYEERLSSNEWQAALRLRKYKTRELEILIKRLRSSSKGVKTDYSVKIQELQKQLALDREEAEKIQDDHDNFLNLALQGYQRSIVVGGKYDLQVVFRLVSLWFSLFSRDQVVKAMLKTTKEVQTYKFIPLVYQIASRLGSTKDAQGSFNFQIALASLLKKMAVDHPYHTIFQLLALANGDRVKDKQRSRSSFVVDMEKKLAAENLLKELSSCHGPLICQMKQMVEIYIKLAELETKKEDTNKKIPLPREARSIGQLELVPVVTATVPIDPSCRYEEGSFPHFTGLADSIMIMNGINAPKVIECFGSDGNKYRQLAKSGNDDLRQDAVMEQFFSLVNTFLQNHRDTSKRRLKIRTYKVVPFTPSAGVVEWVNGTVPLGDYLIGSTRSGGAHGRYGIGDWTYLQCREYLMSEKDKRRAFLKICSNFRPVMHHFFLERFLLPADWFQSRLAYTRSVAASSMVGYIVGLGDRHSMNILIDQDTAEVVHIDLGVAFEQGLMLKTPERVPFRLTRDIIDGMGVTGVEGVFRRCCEKTLCVMRANKEALLTIIEVFVHDPLYKWALSPLKALQRQKETVDTDSCLDDSQEPYDGNKDAARAILRVKQKLDGYEDGEMRSVQGQVQQLIQDAVDVDRLCQMFPGWGPWL

SEQ ID NO: 173743 - protein, 1309 aa, Zea Mays
MFLAPAESHNLILSLNPSSKGILSTARGLNALQFLDSPDRSLLMVHSRGVNIQIVEQTISQMEQCAGVSLDDADVWDTDGRTCKQWLCTLVSSLICHCEDTILRLCRSIVFVKVKAAELLLSSTLVNIAGNVDSNTAICKLISTKVEKIIFSDSNHSLKSIHLFLDALNVIRSFYVAEKARTFPSNTLKDGRSARSKSRSPVTTPSSSWKKVYWLSVDYLVAARAASRCSCDFAILMYVELWCEEQFNRLVLGPPEFSNEELLPPHVDLLVAAFTRINEPDSIYGLTLSNEIASQLIRYEHEGDWSSALEYYDLLVRSMPKEHLGTLTGSVLTGPSTVSSRAEDTMLNWKMHKGLMRSLQKTGCSHVLDVYCEGLSHQKGCLQQDAEFIDIQYEAAWRAGNWDFSFFVPYSSWSSTRSRSSCLFNENLHSCLRALQNGDSEEFHAKLCQTKMDLVLALSNTSKESTKYIHSTILKLQILDHATMVWDLRWNLNPNQTSKSPVTKEFSHISTVPKGIQLELLDKEWNLIMFQAERNLDLFEPFLAFRRALLKILGCEEHLVKHLFQSASALRKGLRFSLAAAALYELKELCFHRDESTMTNTYLLARLEDAKLLRAQGQHDMAISLGKYILQKLSDKKNLSDVYRLVGKWLAETRSSNSRTIIEDYLRPSIDLSEFEKSTDKRYMSRQCRTHFHLAHYTYSLFRSYEERLSSNEWQAALRLRKYKTRELEILIKRLRSSSKGVKTDYSVKIQELQKQLALDREEAEKIQDDHDNFLNLALQGYQRSIVVGGKYDLQVVFRLVSLWFSLFSRDQVVKAMLKTTKEVQTYKFIPLVYQIASRLGSTKDAQGSFNFQIALASLLKKMAVDHPYHTIFQLLALANGDRVKDKQRSRSSFVVDMEKKLAAENLLKELSSCHGPLICQMKQMVEIYIKLAELETKKEDTNKKIPLPREARSIGQLELVPVVTATVPIDPSCRYEEGSFPHFTGLADSIMIMNGINAPKVIECFGSDGNKYRQLAKSGNDDLRQDAVMEQFFSLVNTFLQNHRDTSKRRLKIRTYKVVPFTPSAGVVEWVNGTVPLGDYLIGSTRSGGAHGRYGIGDWTYLQCREYLMSEKDKRRAFLKICSNFRPVMHHFFLERFLLPADWFQSRLAYTRSVAASSMVGYIVGLGDRHSMNILIDQDTAEVVHIDLGVAFEQGLMLKTPERVPFRLTRDIIDGMGVTGVEGVFRRCCEKTLCVMRANKEALLTIIEVFVHDPLYKWALSPLKALQRQKLILIHVWMTPKNLTMATRMQLELYFVLNRSWMDMKMAR

SEQ ID NO: 173744 - protein, 1058 aa, Zea Mays
MYVELWCEEQFNRLVLGPPEFSNEELLPPHVDLLVAAFTRINEPDSIYGLTLSNEIASQLIRYEHEGDWSSALEYYDLLVRSMPKEHLGTLTGSVLTGPSTVSSRAEDTMLNWKMHKGLMRSLQKTGCSHVLDVYCEGLSHQKGCLQQDAEFIDIQYEAAWRAGNWDFSFFVPYSSWSSTRSRSSCLFNENLHSCLRALQNGDSEEFHAKLCQTKMDLVLALSNTSKESTKYIHSTILKLQILDHATMVWDLRWNLNPNQTSKSPVTKEFSHISTVPKGIQLELLDKEWNLIMFQAERNLDLFEPFLAFRRALLKILGCEEHLVKHLFQSASALRKGLRFSLAAAALYELKELCFHRDESTMTNTYLLARLEDAKLLRAQGQHDMAISLGKYILQKLSDKKNLSDVYRLVGKWLAETRSSNSRTIIEDYLRPSIDLSEFEKSTDKRYMSRQCRTHFHLAHYTYSLFRSYEERLSSNEWQAALRLRKYKTRELEILIKRLRSSSKGVKTDYSVKIQELQKQLALDREEAEKIQDDHDNFLNLALQGYQRSIVVGGKYDLQVVFRLVSLWFSLFSRDQVVKAMLKTTKEVQTYKFIPLVYQIASRLGSTKDAQGSFNFQIALASLLKKMAVDHPYHTIFQLLALANGDRVKDKQRSRSSFVVDMEKKLAAENLLKELSSCHGPLICQMKQMVEIYIKLAELETKKEDTNKKIPLPREARSIGQLELVPVVTATVPIDPSCRYEEGSFPHFTGLADSIMIMNGINAPKVIECFGSDGNKYRQLAKSGNDDLRQDAVMEQFFSLVNTFLQNHRDTSKRRLKIRTYKVVPFTPSAGVVEWVNGTVPLGDYLIGSTRSGGAHGRYGIGDWTYLQCREYLMSVGYIVGLGDRHSMNILIDQDTAEVVHIDLGVAFEQGLMLKTPERVPFRLTRDIIDGMGVTGVEGVFRRCCEKTLCVMRANKEALLTIIEVFVHDPLYKWALSPLKALQRQKETVDTDSCLDDSQEPYDGNKDAARAILRVKQKLDGYEDGEMRSVQGQVQQLIQDAVDVDRLCQMFPGWGPWL

SEQ ID NO: 173745 - protein, 1343 aa, Zea Mays
MFLAPAESHNLILSLNPSSKGILSTARGLNALQFLDSPDRSLLMVHSRGVNIQIVEQTISQMEQCAGVSLDDADVWDTDGRTCKQWLCTLVSSLICHCEDTILRLCRSIVFVKVKAAELLLSSTLVNIAGNVDSNTAICKLISTKVEKIIFSDSNHSLKSIHLFLDALNVIRSFYVAEKARTFPSNTLKDGRSARSKSRSPVTTPSSSWKKVYWLSVDYLVAARAASRCSCDFAILMYVELWCEEQFNRLVLGPPEFSNEELLPPHVDLLVAAFTRINEPDSIYGLTLSNEIASQLIRYEHEGDWSSALEYYDLLVRSMPKEHLGTLTGSVLTGPSTVSSRAEDTMLNWKMHKGLMRSLQKTGCSHVLDVYCEGLSHQKGCLQQDAEFIDIQYEAAWRAGNWDFSFFVPYSSWSSTRSRSSCLFNENLHSCLRALQNGDSEEFHAKLCQTKMDLVLALSNTSKESTKYIHSTILKLQILDHATMVWDLRWNLNPNQTSKSPVTKEFSHISTVPKGIQLELLDKEWNLIMFQAERNLDLFEPFLAFRRALLKILGCEEHLVKHLFQSASALRKGLRFSLAAAALYELKELCFHRDESTMTNTYLLARLEDAKLLRAQGQHDMAISLGKYILQKLSDKKNLSDVYRLVGKWLAETRSSNSRTIIEDYLRPSIDLSEFEKSTDKRYMSRQCRTHFHLAHYTYSLFRSYEERLSSNEWQAALRLRKYKTRELEILIKRLRSSSKGVKTDYSVKIQELQKQLALDREEAEKIQDDHDNFLNLALQGYQRSIVVGGKYDLQVVFRLVSLWFSLFSRDQVVKAMLKTTKEVQTYKFIPLVYQIASRLGSTKDAQGSFNFQIALASLLKKMAVDHPYHTIFQLLALANGDRVKDKQRSRSSFVVDMEKKLAAENLLKELSSCHGPLICQMKQMVEIYIKLAELETKKEDTNKKIPLPREARSIGQLELVPVVTATVPIDPSCRYEEGSFPHFTGLADSIMIMNGINAPKVIECFGSDGNKYRQLAKSGNDDLRQDAVMEQFFSLVNTFLQNHRDTSKRRLKIRTYKVVPFTPSAGVVEWVNGTVPLGDYLIGSTRSGGAHGRYGIGDWTYLQCREYLMSEKDKRRAFLKICSNFRPVMHHFFLERFLLPADWFQSRLAYTRSVAASSMVGYIVGLGDRHSMNILIDQDTAEVVHIDLGVAFEQGLMLKTPERVPFRLTRDIIDGMGVTGVEGVFRRCCEKTLCVMRANKEALLTIIEVFVHDPLYKWALSPLKALQRQKETVDTDSCLDDSQEPYDGNKDAARAILRVKQKLDGYEDGEMRSVQGQVQQLIQDAVDVDRLCQMFPGWGPWL

SEQ ID NO: 173746 - protein, 2151 aa, Zea Mays
MWVNVVLKNVPLYVFSFLIIGIPGLEFSLLNEQNVVIIPEAIFSLCAGFSSPVINSSDILQLFGHCKIHSKMSLEDDNWVLKDELPYSVEALSEITLDTCTKVMSHKCHLIHLPGTIQQPMLLELMEFMKGFVASNEQFEKVDLNNLVLVCSLLCNLIHCALLSRTMEEKSSLLQETVDYVTNILKHIVSFVVKKNDELSHGLTNISSALDTMGSAFSSIKSLLSSPIFNLSRVDNGVCSVVIKSITELLDELLVAISQLFCQISSLVSNFDAESTGKMLPTSSINLEDLNPVLDCKSSVADMDLDVMDSSEVDSVTASASGSMGSFLRPLEWKLDLVCIISTFFSVSSLHTWEILYSLVDKEGDVKVRQAILLNLCRNISASSKTVSLVVHFIVDMRDRGASSLLGPAECLTHIHALLKALIAIHGGQNADGKQPGREVFFSENQDILFDLLNRATDISSVDWFSRIKFIDCVSSFVCLFPDVAQDLIGCLLDMLHDADYRVRLYLARQIVVLFQTWEGHNELFNDVWDDNLADTVVSDKVNIFRADRVFKFLLSIHQQVADASHSRHMGHRLCAIEVLIDVLGHRVVLESTCFYIISIVGNYIQQKPLQGQCCNILSKLLAAFDGNTSAETLQVLGRQLQVVVPKLIFSCLINEKEERSGTEDSSRVLSLLHQLTVEIDPLLYDYIRELEPLPDLDCLKDVQEFHASLSASHSSRNQFLKFVNKAPYLPPELFLLSLRAYHKKLFLGEIIRRSDLSAADTNMVSCWHSDPDVISAVWALVDICSSSSVANEASWVLADFISRAGISDAHQVIFRLPTTTENYSLQLHTGSASKEDKLSTNYGISDDVLVGLLKLLKTYLSDESVEIIDAASQTLRGILSTARGLNALQFLDSPDRSLLMVHSRGVNIQIVEQTISQMEQCAGVSLDDADVWDTDGRTCKQWLCTLVSSLICHCEDTILRLCRSIVFVKVKAAELLLSSTLVNIAGNVDSNTAICKLISTKVEKIIFSDSNHSLKSIHLFLDALNVIRSFYVAEKARTFPSNTLKDGRSARSKSRSPVTTPSSSWKKVYWLSVDYLVAARAASRCSCDFAILMYVELWCEEQFNRLVLGPPEFSNEELLPPHVDLLVAAFTRINEPDSIYGLTLSNEIASQLIRYEHEGDWSSALEYYDLLVRSMPKEHLGTLTGSVLTGPSTVSSRAEDTMLNWKMHKGLMRSLQKTGCSHVLDVYCEGLSHQKGCLQQDAEFIDIQYEAAWRAGNWDFSFFVPYSSWSSTRSRSSCLFNENLHSCLRALQNGDSEEFHAKLCQTKMDLVLALSNTSKESTKYIHSTILKLQILDHATMVWDLRWNLNPNQTSKSPVTKEFSHISTVPKGIQLELLDKEWNLIMFQAERNLDLFEPFLAFRRALLKILGCEEHLVKHLFQSASALRKGLRFSLAAAALYELKELCFHRDESTMTNTYLLARLEDAKLLRAQGQHDMAISLGKYILQKLSDKKNLSDVYRLVGKWLAETRSSNSRTIIEDYLRPSIDLSEFEKSTDKRYMSRQCRTHFHLAHYTYSLFRSYEERLSSNEWQAALRLRKYKTRELEILIKRLRSSSKGVKTDYSVKIQELQKQLALDREEAEKIQDDHDNFLNLALQGYQRSIVVGGKYDLQVVFRLVSLWFSLFSRDQVVKAMLKTTKEVQTYKFIPLVYQIASRLGSTKDAQGSFNFQIALASLLKKMAVDHPYHTIFQLLALANGDRVKDKQRSRSSFVVDMEKKLAAENLLKELSSCHGPLICQMKQMVEIYIKLAELETKKEDTNKKIPLPREARSIGQLELVPVVTATVPIDPSCRYEEGSFPHFTGLADSIMIMNGINAPKVIECFGSDGNKYRQLAKSGNDDLRQDAVMEQFFSLVNTFLQNHRDTSKRRLKIRTYKVVPFTPSAGVVEWVNGTVPLGDYLIGSTRSGGAHGRYGIGDWTYLQCREYLMSVGYIVGLGDRHSMNILIDQDTAEVVHIDLGVAFEQGLMLKTPERVPFRLTRDIIDGMGVTGVEGVFRRCCEKTLCVMRANKEALLTIIEVFVHDPLYKWALSPLKALQRQKETVDTDSCLDDSQEPYDGNKDAARAILRVKQKLDGYEDGEMRSVQGQVQQLIQDAVDVDRLCQMFPGWGPWL

SEQ ID NO: 173747 - protein, 2459 aa, Zea Mays
MWVNVVLKNVPLYVFSFLIIGIPGLEFSLLNEQNVVIIPEAIFSLCAGFSSPVINSSDILQLFGHCKIHSKMSLEDDNWVLKDELPYSVEALSEITLDTCTKVMSHKCHLIHLPGTIQQPMLLELMEFMKGFVASNEQFEKVDLNNLVLVCSLLCNLIHCALLSRTMEEKSSLLQETVDYVTNILKHIVSFVVKKNDELSHGLTNISSALDTMGSAFSSIKSLLSSPIFNLSRVDNGVCSVVIKSITELLDELLVAISQLFCQISSLVSNFDAESTGKMLPTSSINLEDLNPVLDCKSSVADMDLDVMDSSEVDSVTASASGSMGSFLRPLEWKLDLVCIISTFFSVSSLHTWEILYSLVDKEGDVKVRQAILLNLCRNISASSKTVSLVVHFIVDMRDRGASSLLGPAECLTHIHALLKALIAIHGGQNADGKQPGREVFFSENQDILFDLLNRATDISSVDWFSRIKFIDCVSSFVCLFPDVAQDLIGCLLDMLHDADYRVRLYLARQIVVLFQTWEGHNELFNDVCSSIGAKMVKFSNISPVTAREVLAVGPQSVLVIETALITLAHLAVHSEDVEVECLFMISAAAAIEPSQRELAFALFDSISRRLGYASRSKYLDQVMGPILFRWVACEMNLISLVEVQEMFGYGSAEPNNFVEHCSSWLLPFLILRGDGADMNWISKILSQPLSIIIKRYFVPIFGMCIAVRCGTGPEKDLAETVLCESVLQLGEISELERDDLIKKHMVAIVAFLLSVSSSAHGPQIPYFSKKNVALSVRMVVDGFVDTMDDNLADTVVSDKVNIFRADRVFKFLLSIHQQVADASHSRHMGHRLCAIEVLIDVLGHRVVLESTCFYIISIVGNYIQQKPLQGQCCNILSKLLAAFDGNTSAETLQVLGRQLQVVVPKLIFSCLINEKEERSGTEDSSRVLSLLHQLTVEIDPLLYDYIRELEPLPDLDCLKDVQEFHASLSASHSSRNQFLKFVNKAPYLPPELFLLSLRAYHKKLFLGEIIRRSDLSAADTNMVSCWHSDPDVISAVWALVDICSSSSVANEASWVLADFISRAGISDAHQVIFRLPTTTENYSLQLHTGSASKEDKLSTNYGISDDVLVGLLKLLKTYLSDESVEIIDAASQTLRGILSTARGLNALQFLDSPDRSLLMVHSRGVNIQIVEQTISQMEQCAGVSLDDADVWDTDGRTCKQWLCTLVSSLICHCEDTILRLCRSIVFVKVKAAELLLSSTLVNIAGNVDSNTAICKLISTKVEKIIFSDSNHSLKSIHLFLDALNVIRSFYVAEKARTFPSNTLKDGRSARSKSRSPVTTPSSSWKKVYWLSVDYLVAARAASRCSCDFAILMYVELWCEEQFNRLVLGPPEFSNEELLPPHVDLLVAAFTRINEPDSIYGLTLSNEIASQLIRYEHEGDWSSALEYYDLLVRSMPKEHLGTLTGSVLTGPSTVSSRAEDTMLNWKMHKGLMRSLQKTGCSHVLDVYCEGLSHQKGCLQQDAEFIDIQYEAAWRAGNWDFSFFVPYSSWSSTRSRSSCLFNENLHSCLRALQNGDSEEFHAKLCQTKMDLVLALSNTSKESTKYIHSTILKLQILDHATMVWDLRWNLNPNQTSKSPVTKEFSHISTVPKGIQLELLDKEWNLIMFQAERNLDLFEPFLAFRRALLKILGCEEHLVKHLFQSASALRKGLRFSLAAAALYELKELCFHRDESTMTNTYLLARLEDAKLLRAQGQHDMAISLGKYILQKLSDKKNLSDVYRLVGKWLAETRSSNSRTIIEDYLRPSIDLSEFEKSTDKRYMSRQCRTHFHLAHYTYSLFRSYEERLSSNEWQAALRLRKYKTRELEILIKRLRSSSKGVKTDYSVKIQELQKQLALDREEAEKIQDDHDNFLNLALQGYQRSIVVGGKYDLQVVFRLVSLWFSLFSRDQVVKAMLKTTKEVQTYKFIPLVYQIASRLGSTKDAQGSFNFQIALASLLKKMAVDHPYHTIFQLLALANGDRVKDKQRSRSSFVVDMEKKLAAENLLKELSSCHGPLICQMKQMVEIYIKLAELETKKEDTNKKIPLPREARSIGQLELVPVVTATVPIDPSCRYEEGSFPHFTGLADSIMIMNGINAPKVIECFGSDGNKYRQLAKSGNDDLRQDAVMEQFFSLVNTFLQNHRDTSKRRLKIRTYKVVPFTPSAGVVEWVNGTVPLGDYLIGSTRSGGAHGRYGIGDWTYLQCREYLMSEKDKRRAFLKICSNFRPVMHHFFLERFLLPADWFQSRLAYTRSVAASSMVGYIVGLGDRHSMNILIDQDTAEVVHIDLGVAFEQGLMLKTPERVPFRLTRDIIDGMGVTGVEGVFRRCCEKTLCVMRANKEALLTIIEVFVHDPLYKWALSPLKALQRQKETVDTDSCLDDSQEPYDGNKDAARAILRVKQKLDGYEDGEMRSVQGQVQQLIQDAVDVDRLCQMFPGWGPWL

SEQ ID NO: 173748 - protein, 1155 aa, Zea Mays
MGHRLCAIEVLIDVLGHRVVLESTCFYIISIVGNYIQQKPLQGQCCNILSKLLAAFDGNTSAETLQVLGRQLQVVVPKLIFSCLINEKEERSGTEDSSRVLSLLHQLTVEIDPLLYDYIRELEPLPDLDCLKDVQEFHASLSASHSSRNQFLKFVNKAPYLPPELFLLSLRAYHKKLFLGEIIRRSDLSAADTNMVSCWHSDPDVISAVWALVDICSSSSVANEASWVLADFISRAGISDAHQVIFRLPTTTENYSLQLHTGSASKEDKLSTNYGISDDVLVGLLKLLKTYLSDESVEIIDAASQTLRGILSTARGLNALQFLDSPDRSLLMVHSRGVNIQIVEQTISQMEQCAGVSLDDADVWDTDGRTCKQWLCTLVSSLICHCEDTILRLCRSIVFVKVKAAELLLSSTLVNIAGNVDSNTAICKLISTKVEKIIFSDSNHSLKSIHLFLDALNVIRSFYVAEKARTFPSNTLKDGRSARSKSRSPVTTPSSSWKKVYWLSVDYLVAARAASRCSCDFAILMYVELWCEEQFNRLVLGPPEFSNEELLPPHVDLLVAAFTRINEPDSIYGLTLSNEIASQLIRYEHEGDWSSALEYYDLLVRSMPKEHLGTLTGSVLTGPSTVSSRAEDTMLNWKMHKGLMRSLQKTGCSHVLDVYCEGLSHQKGCLQQDAEFIDIQYEAAWRAGNWDFSFFVPYSSWSSTRSRSSCLFNENLHSCLRALQNGDSEEFHAKLCQTKMDLVLALSNTSKESTKYIHSTILKLQILDHATMVWDLRWNLNPNQTSKSPVTKEFSHISTVPKGIQLELLDKEWNLIMFQAERNLDLFEPFLAFRRALLKILGCEEHLVKHLFQSASALRKGLRFSLAAAALYELKELCFHRDESTMTNTYLLARLEDAKLLRAQGQHDMAISLGKYILQKLSDKKNLSDVYRLVGKWLAETRSSNSRTIIEDYLRPSIDLSEFEKSTDKRYMSRQCRTHFHLAHYTYSLFRSYEERLSSNEWQAALRLRKYKTRELEILIKRLRSSSKGVKTDYSVKIQELQKQLALDREEAEKIQDDHDNFLNLALQGYQRSIVVGGKYDLQVVFRLVSLWFSLFSRDQVVKAMLKTTKEVQTYKFIPLVYQIASRLGSTKDAQGSFNFQIERTVHVREALSTR

SEQ ID NO: 173749 - protein, 1956 aa, Zea Mays
MLDTRDKVQFCLTKGEMSIVEDCWQAIWNSLVHAFPLLSSIDLVADSALILLGGMIMRDQVHTSFLSEDTWNLQIFKKFPSPSALYFVACYFSRIGFQGDLSNSIFVRKTLLRSTLELIHSKEFSLLNEQNVVIIPEAIFSLCAGFSSPVINSSDILQLFGHCKIHSKMSLEDDNWVLKDELPYSVEALSEITLDTCTKVMSHKCHLIHLPGTIQQPMLLELMEFMKGFVASNEQFEKVDLNNLVLVCSLLCNLIHCALLSRTMEEKSSLLQETVDYVTNILKHIVSFVVKKNDELSHGLTNISSALDTMGSAFSSIKSLLSSPIFNLSRVDNGVCSVVIKSITELLDELLVAISQLFCQISSLVSNFDAESTGKMLPTSSINLEDLNPVLDCKSSVADMDLDVMDSSEVDSVTASASGSMGSFLRPLEWKLDLVCIISTFFSVSSLHTWEILYSLVDKEGDVKVRQAILLNLCRNISASSKTVSLVVHFIVDMRDRGASSLLGPAECLTHIHALLKALIAIHGGQNADGKQPGREVFFSENQDILFDLLNRATDISSVDWFSRIKFIDCVSSFVCLFPDVAQDLIGCLLDMLHDADYRVRLYLARQIVVLFQTWEGHNELFNDVCSSIGAKMVKFSNISPVTAREVLAVGPQSVLVIETALITLAHLAVHSEDVEVECLFMISAAAAIEPSQRELAFALFDSISRRLGYASRSKYLDQVMGPILFRWVACEMNLISLVEVQEMFGYGSAEPNNFVEHCSSWLLPFLILRGDGADMNWISKILSQPLSIIIKRYFVPIFGMCIAVRCGTGPEKDLAETVLCESVLQLGEISELERDDLIKKHMVAIVAFLLSVSSSAHGPQIPYFSKKNVALSVRMVVDGFVDTMDDNLADTVVSDKVNIFRADRVFKFLLSIHQQVADASHSRHMGHRLCAIEVLIDVLGHRVVLESTCFYIISIVGNYIQQKPLQGQCCNILSKLLAAFDGNTSAETLQVLGRQLQVVVPKLIFSCLINEKEERSGTEDSSRVLSLLHQLTVEIDPLLYDYIRELEPLPDLDCLKDVQEFHASLSASHSSRNQFLKFVNKAPYLPPELFLLSLRAYHKKLFLGEIIRRSDLSAADTNMVSCWHSDPDVISAVWALVDICSSSSVANEASWVLADFISRAGISDAHQVIFRLPTTTENYSLQLHTGSASKEDKLSTNYGISDDVLVGLLKLLKTYLSDESVEIIDAASQTLRGILSTARGLNALQFLDSPDRSLLMVHSRGVNIQIVEQTISQMEQCAGVSLDDADVWDTDGRTCKQWLCTLVSSLICHCEDTILRLCRSIVFVKVKAAELLLSSTLVNIAGNVDSNTAICKLISTKVEKIIFSDSNHSLKSIHLFLDALNVIRSFYVAEKARTFPSNTLKDGRSARSKSRSPVTTPSSSWKKVYWLSVDYLVAARAASRCSCDFAILMYVELWCEEQFNRLVLGPPEFSNEELLPPHVDLLVAAFTRINEPDSIYGLTLSNEIASQLIRYEHEGDWSSALEYYDLLVRSMPKEHLGTLTGSVLTGPSTVSSRAEDTMLNWKMHKGLMRSLQKTGCSHVLDVYCEGLSHQKGCLQQDAEFIDIQYEAAWRAGNWDFSFFVPYSSWSSTRSRSSCLFNENLHSCLRALQNGDSEEFHAKLCQTKMDLVLALSNTSKESTKYIHSTILKLQILDHATMVWDLRWNLNPNQTSKSPVTKEFSHISTVPKGIQLELLDKEWNLIMFQAERNLDLFEPFLAFRRALLKILGCEEHLVKHLFQSASALRKGLRFSLAAAALYELKELCFHRDESTMTNTYLLARLEDAKLLRAQGQHDMAISLGKYILQKLSDKKNLSDVYRLVGKWLAETRSSNSRTIIEDYLRPSIDLSEFEKSTDKRYMSRQCRTHFHLAHYTYSLFRSYEERLSSNEWQAALRLRKYKTRELEILIKRLRSSSKASR

SEQ ID NO: 173750 - protein, 2961 aa, Zea Mays
MAAVATARDVEEVVQKLQSDRARVRDEGVKLLGTWLQGDRAASFCRLLGRNTVRFKPGHGNLTGGHSLHLLSVAKQLFVHIWEVIKDGPSLQLEYSIILRQLLNVKEYRYQMKPRTYSNFVSLYMKKVASAFDAKFSNQASSKDESFRCTLTLHVLLENPPSDYPDIMREEVLNGFSAIFLHIREEGKLTRKLMECINTFLLKDGPNLGYKSVKIHNAVQEFIFRCWMTTHDQALKSLFITYVKVQLKIARNIPEILEKLIDVIIKELDKNVNTGPGLLWCEAPRDEKAVSLRCFQEEWMDLSATVFYLACKCTTKTANREKRMKKEHIMNLIVDGLFRGSLFWSGSVCFLIHKYGYHLEKSLLISWFEASCKALRSILIHANAIRFQDSLLWLLRTFKEFSTVLMLDTRDKVQFCLTKGEMSIVEDCWQAIWNSLVHAFPLLSSIDLVADSALILLGGMIMRDQVHTSFLSEDTWNLQIFKKFPSPSALYFVACYFSRIGFQGDLSNSIFVRKTLLRSTLELIHSKEFSLLNEQNVVIIPEAIFSLCAGFSSPVINSSDILQLFGHCKIHSKMSLEDDNWVLKDELPYSVEALSEITLDTCTKVMSHKCHLIHLPGTIQQPMLLELMEFMKGFVASNEQFEKVDLNNLVLVCSLLCNLIHCALLSRTMEEKSSLLQETVDYVTNILKHIVSFVVKKNDELSHGLTNISSALDTMGSAFSSIKSLLSSPIFNLSRVDNGVCSVVIKSITELLDELLVAISQLFCQISSLVSNFDAESTGKMLPTSSINLEDLNPVLDCKSSVADMDLDVMDSSEVDSVTASASGSMGSFLRPLEWKLDLVCIISTFFSVSSLHTWEILYSLVDKEGDVKVRQAILLNLCRNISASSKTVSLVVHFIVDMRDRGASSLLGPAECLTHIHALLKALIAIHGGQNADGKQPGREVFFSENQDILFDLLNRATDISSVDWFSRIKFIDCVSSFVCLFPDVAQDLIGCLLDMLHDADYRVRLYLARQIVVLFQTWEGHNELFNDVCSSIGAKMVKFSNISPVTAREVLAVGPQSVLVIETALITLAHLAVHSEDVEVECLFMISAAAAIEPSQRELAFALFDSISRRLGYASRSKYLDQVMGPILFRWVACEMNLISLVEVQEMFGYGSAEPNNFVEHCSSWLLPFLILRGDGADMNWISKILSQPLSIIIKRYFVPIFGMCIAVRCGTGPEKDLAETVLCESVLQLGEISELERDDLIKKHMVAIVAFLLSVSSSAHGPQIPYFSKKNVALSVRMVVDGFVDTMDDNLADTVVSDKVNIFRADRVFKFLLSIHQQVADASHSRHMGHRLCAIEVLIDVLGHRVVLESTCFYIISIVGNYIQQKPLQGQCCNILSKLLAAFDGNTSAETLQVLGRQLQVVVPKLIFSCLINEKEERSGTEDSSRVLSLLHQLTVEIDPLLYDYIRELEPLPDLDCLKDVQEFHASLSASHSSRNQFLKFVNKAPYLPPELFLLSLRAYHKKLFLGEIIRRSDLSAADTNMVSCWHSDPDVISAVWALVDICSSSSVANEASWVLADFISRAGISDAHQVIFRLPTTTENYSLQLHTGSASKEDKLSTNYGISDDVLVGLLKLLKTYLSDESVEIIDAASQTLRGILSTARGLNALQFLDSPDRSLLMVHSRGVNIQIVEQTISQMEQCAGVSLDDADVWDTDGRTCKQWLCTLVSSLICHCEDTILRLCRSIVFVKVKAAELLLSSTLVNIAGNVDSNTAICKLISTKVEKIIFSDSNHSLKSIHLFLDALNVIRSFYVAEKARTFPSNTLKDGRSARSKSRSPVTTPSSSWKKVYWLSVDYLVAARAASRCSCDFAILMYVELWCEEQFNRLVLGPPEFSNEELLPPHVDLLVAAFTRINEPDSIYGLTLSNEIASQLIRYEHEGDWSSALEYYDLLVRSMPKEHLGTLTGSVLTGPSTVSSRAEDTMLNWKMHKGLMRSLQKTGCSHVLDVYCEGLSHQKGCLQQDAEFIDIQYEAAWRAGNWDFSFFVPYSSWSSTRSRSSCLFNENLHSCLRALQNGDSEEFHAKLCQTKMDLVLALSNTSKESTKYIHSTILKLQILDHATMVWDLRWNLNPNQTSKSPVTKEFSHISTVPKGIQLELLDKEWNLIMFQAERNLDLFEPFLAFRRALLKILGCEEHLVKHLFQSASALRKGLRFSLAAAALYELKELCFHRDESTMTNTYLLARLEDAKLLRAQGQHDMAISLGKYILQKLSDKKNLSDVYRLVGKWLAETRSSNSRTIIEDYLRPSIDLSEFEKSTDKRYMSRQCRTHFHLAHYTYSLFRSYEERLSSNEWQAALRLRKYKTRELEILIKRLRSSSKGVKTDYSVKIQELQKQLALDREEAEKIQDDHDNFLNLALQGYQRSIVVGGKYDLQVVFRLVSLWFSLFSRDQVVKAMLKTTKEVQTYKFIPLVYQIASRLGSTKDAQGSFNFQIALASLLKKMAVDHPYHTIFQLLALANGDRVKDKQRSRSSFVVDMEKKLAAENLLKELSSCHGPLICQMKQMVEIYIKLAELETKKEDTNKKIPLPREARSIGQLELVPVVTATVPIDPSCRYEEGSFPHFTGLADSIMIMNGINAPKVIECFGSDGNKYRQLAKSGNDDLRQDAVMEQFFSLVNTFLQNHRDTSKRRLKIRTYKVVPFTPSAGVVEWVNGTVPLGDYLIGSTRSGGAHGRYGIGDWTYLQCREYLMSEKDKRRAFLKICSNFRPVMHHFFLERFLLPADWFQSRLAYTRSVAASSMVGYIVGLGDRHSMNILIDQDTAEVVHIDLGVAFEQGLMLKTPERVPFRLTRDIIDGMGVTGVEGVFRRCCEKTLCVMRANKEALLTIIEVFVHDPLYKWALSPLKALQRQKETVDTDSCLDDSQEPYDGNKDAARAILRVKQKLDGYEDGEMRSVQGQVQQLIQDAVDVDRLCQMFPGWGPWL

SEQ ID NO: 173751 - protein, 2912 aa, Zea Mays
MAAVATARDVEEVVQKLQSDRARVRDEGVKLLGTWLQGDRAASFCRLLGRNTVRFKPGHGNLTGGHSLHLLSVAKQLFVHIWEVIKDGPSLQLEYSIILRQLLNVKEYRYQMKPRTYSNFVSLYMKKVASAFDAKFSNQASSKDESFRCTLTLHVLLENPPSDYPDIMREEVLNGFSAIFLHIREEGKLTRKLMECINTFLLKDGPNLGYKSVKIHNAVQEFIFRCWMTTHDQALKSLFITYVKVQLKIARNIPEILEKLIDVIIKELDKNVNTGPGLLWCEAPRDEKAVSLRCFQEEWMDLSATVFYLACKCTTKTANREKRMKKEHIMNLIVDGLFRGSLFWSGSVCFLIHKYGYHLEKSLLISWFEASCKALRSILIHANAIRFQDSLLWLLRTFKEFSTVLMLDTRDKVQFCLTKGEMSIVEDCWQAIWNSLVHAFPLLSSIDLVADSALILLGGMIMRDQVHTSFLSEDTWNLQIFKKFPSPSALYFVACYFSRIGFQGDLSNSIFVRKTLLRSTLELIHSKEFSLLNEQNVVIIPEAIFSLCAGFSSPVINSSDILQLFGHCKIHSKMSLEDDNWVLKDELPYSVEALSEITLDTCTKVMSHKCHLIHLPGTIQQPMLLELMEFMKGFVASNEQFEKVDLNNLVLVCSLLCNLIHCALLSRTMEEKSSLLQETVDYVTNILKHIVSFVVKKNDELSHGLTNISSALDTMGSAFSSIKSLLSSPIFNLSRVDNGVCSVVIKSITELLDELLVAISQLFCQISSLVSNFDAESTGKMLPTSSINLEDLNPVLDCKSSVADMDLDVMDSSEVDSVTASASGSMGSFLRPLEWKLDLVCIISTFFSVSSLHTWEILYSLVDKEGDVKVRQAILLNLCRNISASSKTVSLVVHFIVDMRDRGASSLLGPAECLTHIHALLKALIAIHGGQNADGKQPGREVFFSENQDILFDLLNRATDISSVDWFSRIKFIDCVSSFVCLFPDVAQDLIGCLLDMLHDADYRVRLYLARQIVVLFQTWEGHNELFNDVCSSIGAKMVKFSNISPVTAREVLAVGPQSVLVIETALITLAHLAVHSEDVEVECLFMISAAAAIEPSQRELAFALFDSISRRLGYASRSKYLDQVMGPILFRWVACEMNLISLVEVQEMFGYGSAEPNNFVEHCSSWLLPFLILRGDGADMNWISKILSQPLSIIIKRYFVPIFGMCIAVRCGTGPEKDLAETVLCESVLQLGEISELERDDLIKKHMVAIVAFLLSVSSSAHGPQIPYFSKKNVALSVRMVVDGFVDTMDDNLADTVVSDKVNIFRADRVFKFLLSIHQQVADASHSRHMGHRLCAIEVLIDVLGHRVVLESTCFYIISIVGNYIQQKPLQGQCCNILSKLLAAFDGNTSAETLQVLGRQLQVVVPKLIFSCLINEKEERSGTEDSSRVLSLLHQLTVEIDPLLYDYIRELEPLPDLDCLKDVQEFHASLSASHSSRNQFLKFVNKAPYLPPELFLLSLRAYHKKLFLGEIIRRSDLSAADTNMVSCWHSDPDVISAVWALVDICSSSSVANEASWVLADFISRAGISDAHQVIFRLPTTTENYSLQLHTGSASKEDKLSTNYGISDDVLVGLLKLLKTYLSDESVEIIDAASQTLRGILSTARGLNALQFLDSPDRSLLMVHSRGVNIQIVEQTISQMEQCAGVSLDDADVWDTDGRTCKQWLCTLVSSLICHCEDTILRLCRSIVFVKVKAAELLLSSTLVNIAGNVDSNTAICKLISTKVEKIIFSDSNHSLKSIHLFLDALNVIRSFYVAEKARTFPSNTLKDGRSARSKSRSPVTTPSSSWKKVYWLSVDYLVAARAASRCSCDFAILMYVELWCEEQFNRLVLGPPEFSNEELLPPHVDLLVAAFTRINEPDSIYGLTLSNEIASQLIRYEHEGDWSSALEYYDLLVRSMPKEHLGTLTGSVLTGPSTVSSRAEDTMLNWKMHKGLMRSLQKTGCSHVLDVYCEGLSHQKGCLQQDAEFIDIQYEAAWRAGNWDFSFFVPYSSWSSTRSRSSCLFNENLHSCLRALQNGDSEEFHAKLCQTKMDLVLALSNTSKESTKYIHSTILKLQILDHATMVWDLRWNLNPNQTSKSPVTKEFSHISTVPKGIQLELLDKEWNLIMFQAERNLDLFEPFLAFRRALLKILGCEEHLVKHLFQSASALRKGLRFSLAAAALYELKELCFHRDESTMTNTYLLARLEDAKLLRAQGQHDMAISLGKYILQKLSDKKNLSDVYRLVGKWLAETRSSNSRTIIEDYLRPSIDLSEFEKSTDKRYMSRQCRTHFHLAHYTYSLFRSYEERLSSNEWQAALRLRKYKTRELEILIKRLRSSSKGVKTDYSVKIQELQKQLALDREEAEKIQDDHDNFLNLALQGYQRSIVVGGKYDLQVVFRLVSLWFSLFSRDQVVKAMLKTTKEVQTYKFIPLVYQIASRLGSTKDAQGSFNFQIALASLLKKMAVDHPYHTIFQLLALANGDRVKDKQRSRSSFVVDMEKKLAAENLLKELSSCHGPLICQMKQMVEIYIKLAELETKKEDTNKKIPLPREARSIGQLELVPVVTATVPIDPSCRYEEGSFPHFTGLADSIMIMNGINAPKVIECFGSDGNKYRQLAKSGNDDLRQDAVMEQFFSLVNTFLQNHRDTSKRRLKIRTYKVVPFTPSAGVVEWVNGTVPLGDYLIGSTRSGGAHGRYGIGDWTYLQCREYLMSVGYIVGLGDRHSMNILIDQDTAEVVHIDLGVAFEQGLMLKTPERVPFRLTRDIIDGMGVTGVEGVFRRCCEKTLCVMRANKEALLTIIEVFVHDPLYKWALSPLKALQRQKETVDTDSCLDDSQEPYDGNKDAARAILRVKQKLDGYEDGEMRSVQGQVQQLIQDAVDVDRLCQMFPGWGPWL

SEQ ID NO: 173752 - protein, 2080 aa, Zea Mays
MLDTRDKVQFCLTKGEMSIVEDCWQAIWNSLVHAFPLLSSIDLVADSALILLGGMIMRDQVHTSFLSEDTWNLQIFKKFPSPSALYFVACYFSRIGFQGDLSNSIFVRKTLLRSTLELIHSKEFSLLNEQNVVIIPEAIFSLCAGFSSPVINSSDILQLFGHCKIHSKMSLEDDNWVLKDELPYSVEALSEITLDTCTKVMSHKCHLIHLPGTIQQPMLLELMEFMKGFVASNEQFEKVDLNNLVLVCSLLCNLIHCALLSRTMEEKSSLLQETVDYVTNILKHIVSFVVKKNDELSHGLTNISSALDTMGSAFSSIKSLLSSPIFNLSRVDNGVCSVVIKSITELLDELLVAISQLFCQISSLVSNFDAESTGKMLPTSSINLEDLNPVLDCKSSVADMDLDVMDSSEVDSVTASASGSMGSFLRPLEWKLDLVCIISTFFSVSSLHTWEILYSLVDKEGDVKVRQAILLNLCRNISASSKTVSLVVHFIVDMRDRGASSLLGPAECLTHIHALLKALIAIHGGQNADGKQPGREVFFSENQDILFDLLNRATDISSVDWFSRIKFIDCVSSFVCLFPDVAQDLIGCLLDMLHDADYRVRLYLARQIVVLFQTWEGHNELFNDVCSSIGAKMVKFSNISPVTAREVLAVGPQSVLVIETALITLAHLAVHSEDVEVECLFMISAAAAIEPSQRELAFALFDSISRRLGYASRSKYLDQVMGPILFRWVACEMNLISLVEVQEMFGYGSAEPNNFVEHCSSWLLPFLILRGDGADMNWISKILSQPLSIIIKRYFVPIFGMCIAVRCGTGPEKDLAETVLCESVLQLGEISELERDDLIKKHMVAIVAFLLSVSSSAHGPQIPYFSKKNVALSVRMVVDGFVDTMDDNLADTVVSDKVNIFRADRVFKFLLSIHQQVADASHSRHMGHRLCAIEVLIDVLGHRVVLESTCFYIISIVGNYIQQKPLQGQCCNILSKLLAAFDGNTSAETLQVLGRQLQVVVPKLIFSCLINEKEERSGTEDSSRVLSLLHQLTVEIDPLLYDYIRELEPLPDLDCLKDVQEFHASLSASHSSRNQFLKFVNKAPYLPPELFLLSLRAYHKKLFLGEIIRRSDLSAADTNMVSCWHSDPDVISAVWALVDICSSSSVANEASWVLADFISRAGISDAHQVIFRLPTTTENYSLQLHTGSASKEDKLSTNYGISDDVLVGLLKLLKTYLSDESVEIIDAASQTLRGILSTARGLNALQFLDSPDRSLLMVHSRGVNIQIVEQTISQMEQCAGVSLDDADVWDTDGRTCKQWLCTLVSSLICHCEDTILRLCRSIVFVKVKAAELLLSSTLVNIAGNVDSNTAICKLISTKVEKIIFSDSNHSLKSIHLFLDALNVIRSFYVAEKARTFPSNTLKDGRSARSKSRSPVTTPSSSWKKVYWLSVDYLVAARAASRCSCDFAILMYVELWCEEQFNRLVLGPPEFSNEELLPPHVDLLVAAFTRINEPDSIYGLTLSNEIASQLIRYEHEGDWSSALEYYDLLVRSMPKEHLGTLTGSVLTGPSTVSSRAEDTMLNWKMHKGLMRSLQKTGCSHVLDVYCEGLSHQKGCLQQDAEFIDIQYEAAWRAGNWDFSFFVPYSSWSSTRSRSSCLFNENLHSCLRALQNGDSEEFHAKLCQTKMDLVLALSNTSKESTKYIHSTILKLQILDHATMVWDLRWNLNPNQTSKSPVTKEFSHISTVPKGIQLELLDKEWNLIMFQAERNLDLFEPFLAFRRALLKILGCEEHLVKHLFQSASALRKGLRFSLAAAALYELKELCFHRDESTMTNTYLLARLEDAKLLRAQGQHDMAISLGKYILQKLSDKKNLSDVYRLVGKWLAETRSSNSRTIIEDYLRPSIDLSEFEKSTDKRYMSRQCRTHFHLAHYTYSLFRSYEERLSSNEWQAALRLRKYKTRELEILIKRLRSSSKGVKTDYSVKIQELQKQLALDREEAEKIQDDHDNFLNLALQGYQRSIVVGGKYDLQVVFRLVSLWFSLFSRDQVVKAMLKTTKEVQTYKFIPLVYQIASRLGSTKDAQGSFNFQIERTVHVREALSTR

SEQ ID NO: 173753 - protein, 390 aa, Zea Mays
MADQQQPQQQPQEMDVDRTGGLELPPGFRFHPSDFEIINDYLTKKVHDRDYSCIAIADADLNKTEPWDLPIAKMGEKEWYFFYQKDRKYPTGLRANRATEAGYWKATGKDKEVYNPFAAEGLLLVGMKKTLVFYKGRAPRGDKTNWVMHEYRLEGSGRLPASPASASGSATNIAAAMMKASASACKDEWVVCRVFNKTTGIKKTAAPAYQVAMAGPEMDQNQNNIPAIPIPMPLQLPLPVPMQMQFPILPDFAMDPVAPYYPNPNAGAGMMPPMALAGMGGAGGLQINGALFGNPVPAPLPMNFYHHQMGMGAAAGQVDMGAAAGQMDMGAAGAGAGGFDVAAPESRPSSMVSQKDEQANAAEISSMMSVTGPGSATTTIEMDGIWKYKY

SEQ ID NO: 173754 - protein, 931 aa, Zea Mays
MDHNSSSMKSVALKCMCFMFRRNICHFPVIRNVFGRLFPLIDDEDFPLDCKSDVLRILQKMLCSKTSSNHRANGSELSKLLLAAESSLDSSCLEVQGTALEILVEIFCILKEVGSDNISVLKGSSFAHAEWQGITNNVPLTEDNSMNGPLCKIIAMIVNHIISLANEVASRDICISSAVDKAYKTPFRLMLKLVSCYPSAAAVTLHILKSLVKELFLINGSDYSEVSVTSVEPFQTSVALKELSTSDDNVQLLATCIKASCIGTLIGNGKLDFLKIDCKNRKSIMHDLICCMLKFANACHEVLCETSGARYNLHDSIKGLIKYVRQDAPQHWSTYESFHLIMCACVTRNTCKINRGNQESGDSKEHHNTLFTPSVWITQELCALRMTKMLIKKQKYWEAYRSSMYCCCKGLWFTASFVFRKLADAFEAGSFSFWLKSLLLFSAGEIEMKLLFFSSATIKLVGELKMEGDLSEDLYCNETDADSTLSRSSELHGFQAKISDICGRTLLANNALASSASSDHDFVFQRWFISLRSSFLEVLTKVLDILNAHSSYEARGDHLSLSGEFVKDQVLALDHCSLRLSDLAKSYDLLAASHMDLERHGSSSIARLAFMCSLLAFCTAYSVYFSKACNYVEYCKLPKRFSHASILQDLYGRVDGSDWQVVSQLRQFMSTSFDELDSLQSSTWISGSCNLEKDLYSLCHFAVASLLGVCDSAEAEKIQNGEDCLSALQGGLQVLSSILQKYLELPFVVPKYFFRVKPCLGAELYIFDSNHLNEKGMSIEPGFLLSLTLCMKWKCVLERSTIRIVKLYCILAASLETCLDTAGTRSKQFDQHRTAEMVELNSKLLQYIKNDLRKARNEKKNSHSVMEMVTAFACFEPTDSGQGFSGCLLDVSSFPEGSYQIKWQACCVDENGSYFSLLPLNDGSIFSVQKS

SEQ ID NO: 173755 - protein, 786 aa, Zea Mays
MNGPLCKIIAMIVNHIISLANEVASRDICISSAVDKAYKTPFRLMLKLVSCYPSAAAVTLHILKSLVKELFLINGSDYSEVSVTSVEPFQTSVALKELSTSDDNVQLLATCIKASCIGTLIGNGKLDFLKIDCKNRKSIMHDLICCMLKFANACHEVLCETSGARYNLHDSIKGLIKYVRQDAPQHWSTYESFHLIMCACVTRNTCKINRGNQESGDSKEHHNTLFTPSVWITQELCALRMTKMLIKKQKYWEAYRSSMYCCCKGLWFTASFVFRKLADAFEAGSFSFWLKSLLLFSAGEIEMKLLFFSSATIKLVGELKMEGDLSEDLYCNETDADSTLSRSSELHGFQAKISDICGRTLLANNALASSASSDHDFVFQRWFISLRSSFLEVLTKVLDILNAHSSYEARGDHLSLSGEFVKDQVLALDHCSLRLSDLAKSYDLLAASHMDLERHGSSSIARLAFMCSLLAFCTAYSVYFSKACNYVEYCKLPKRFSHASILQDLYGRVDGSDWQVVSQLRQFMSTSFDELDSLQSSTWISGSCNLEKDLYSLCHFAVASLLGVCDSAEAEKIQNGEDCLSALQGGLQVLSSILQKYLELPFVVPKYFFRVKPCLGAELYIFDSNHLNEKGMSIEPGFLLSLTLCMKWKCVLERSTIRIVKLYCILAASLETCLDTAGTRSKQFDQHRTAEMVELNSKLLQYIKNDLRKARNEKKNSHSVMEMVTAFACFEPTDSGQGFSGCLLDVSSFPEGSYQIKWQACCVDENGSYFSLLPLNDGSIFSVQKS

SEQ ID NO: 173756 - protein, 996 aa, Zea Mays
MSAAKAFWKLGSTLAVIHKVHEVGKQMVLGTLEDVFKSEMLFSLSRLSSKSIILFSDQVDLLLLFMDHNSSSMKSVALKCMCFMFRRNICHFPVIRNVFGRLFPLIDDEDFPLDCKSDVLRILQKMLCSKTSSNHRANGSELSKLLLAAESSLDSSCLEVQGTALEILVEIFCILKEVGSDNISVLKGSSFAHAEWQGITNNVPLTEDNSMNGPLCKIIAMIVNHIISLANEVASRDICISSAVDKAYKTPFRLMLKLVSCYPSAAAVTLHILKSLVKELFLINGSDYSEVSVTSVEPFQTSVALKELSTSDDNVQLLATCIKASCIGTLIGNGKLDFLKIDCKNRKSIMHDLICCMLKFANACHEVLCETSGARYNLHDSIKGLIKYVRQDAPQHWSTYESFHLIMCACVTRNTCKINRGNQESGDSKEHHNTLFTPSVWITQELCALRMTKMLIKKQKYWEAYRSSMYCCCKGLWFTASFVFRKLADAFEAGSFSFWLKSLLLFSAGEIEMKLLFFSSATIKLVGELKMEGDLSEDLYCNETDADSTLSRSSELHGFQAKISDICGRTLLANNALASSASSDHDFVFQRWFISLRSSFLEVLTKVLDILNAHSSYEARGDHLSLSGEFVKDQVLALDHCSLRLSDLAKSYDLLAASHMDLERHGSSSIARLAFMCSLLAFCTAYSVYFSKACNYVEYCKLPKRFSHASILQDLYGRVDGSDWQVVSQLRQFMSTSFDELDSLQSSTWISGSCNLEKDLYSLCHFAVASLLGVCDSAEAEKIQNGEDCLSALQGGLQVLSSILQKYLELPFVVPKYFFRVKPCLGAELYIFDSNHLNEKGMSIEPGFLLSLTLCMKWKCVLERSTIRIVKLYCILAASLETCLDTAGTRSKQFDQHRTAEMVELNSKLLQYIKNDLRKARNEKKNSHSVMEMVTAFACFEPTDSGQGFSGCLLDVSSFPEGSYQIKWQACCVDENGSYFSLLPLNDGSIFSVQKS

SEQ ID NO: 173757 - protein, 1203 aa, Zea Mays
MELERIPAASAMDWSIDLDRGLRSRQPATRVRAVDAAGPRLRQLCTCATAPAPVASAYGVLPGEARVFAETMLLRLATEFRSADVAMRVRIIKTLLNSATGPGALAGARITEPDQLLRRVKVVYDTGNKRDRALALRMFGCFADIAKDSVHVRSLILSSLSASSALEVKAAIFAASCICHLSDDFSRIILEVFRRLICSQTSEPQVIMSAAKAFWKLGSTLAVIHKVHEVGKQMVLGTLEDVFKSEMLFSLSRLSSKSIILFSDQVDLLLLFMDHNSSSMKSVALKCMCFMFRRNICHFPVIRNVFGRLFPLIDDEDFPLDCKSDVLRILQKMLCSKTSSNHRANGSELSKLLLAAESSLDSSCLEVQGTALEILVEIFCILKEVGSDNISVLKGSSFAHAEWQGITNNVPLTEDNSMNGPLCKIIAMIVNHIISLANEVASRDICISSAVDKAYKTPFRLMLKLVSCYPSAAAVTLHILKSLVKELFLINGSDYSEVSVTSVEPFQTSVALKELSTSDDNVQLLATCIKASCIGTLIGNGKLDFLKIDCKNRKSIMHDLICCMLKFANACHEVLCETSGARYNLHDSIKGLIKYVRQDAPQHWSTYESFHLIMCACVTRNTCKINRGNQESGDSKEHHNTLFTPSVWITQELCALRMTKMLIKKQKYWEAYRSSMYCCCKGLWFTASFVFRKLADAFEAGSFSFWLKSLLLFSAGEIEMKLLFFSSATIKLVGELKMEGDLSEDLYCNETDADSTLSRSSELHGFQAKISDICGRTLLANNALASSASSDHDFVFQRWFISLRSSFLEVLTKVLDILNAHSSYEARGDHLSLSGEFVKDQVLALDHCSLRLSDLAKSYDLLAASHMDLERHGSSSIARLAFMCSLLAFCTAYSVYFSKACNYVEYCKLPKRFSHASILQDLYGRVDGSDWQVVSQLRQFMSTSFDELDSLQSSTWISGSCNLEKDLYSLCHFAVASLLGVCDSAEAEKIQNGEDCLSALQGGLQVLSSILQKYLELPFVVPKYFFRVKPCLGAELYIFDSNHLNEKGMSIEPGFLLSLTLCMKWKCVLERSTIRIVKLYCILAASLETCLDTAGTRSKQFDQHRTAEMVELNSKLLQYIKNDLRKARNEKKNSHSVMEMVTAFACFEPTDSGQGFSGCLLDVSSFPEGSYQIKWQACCVDENGSYFSLLPLNDGSIFSVQKS

SEQ ID NO: 173758 - protein, 108 aa, Zea Mays
MEHCYLRQPISRAEAVPERRSRLWQMDALPLPPRAEVLCPQPRRAARIPFAVSVNKAIPRSNWLVLGLPLSRFLSGNPDGAKIANNCCNLQRPGACASNYFVQNGCVQ

SEQ ID NO: 173759 - protein, 575 aa, Zea Mays
MTKNNSSIGKEVFLQDTAAHPTDELSRSDSRLADESIGVSHSEPDAMDPVEPAVVSTGGDTDGKATCGNVMEETKTAPHDLTNKPLLARCTRSRFVHHPSSFSYKRMLPFLMEDEIYAQESGRVKIRKVAEERQFAANKHDASANGQQCLAVSDDSSQEGNRAQFKIVEEEKPLKADVNHILDDRQLKPPVIEASPDCSATEVQNVMQQEALASSQVPLTSFDGELTSDGDNVQSIGQHQLVVSEESQEECKRDEVNRSIHDEAVQSDGGYALDSREFQPAASEVSCSENSMAGVQGAAQEEPLPLDGVQENSDMGDDVSTEQAQLCVTSESLSAQLQNNAEFAEVLPCQDLDSGCHDIGFGSPTKRVVPSLHRHCAQQPQDSVVSHDDQLLDDDIQMVGRLSDPCAADRSSSMEEMSGRILFTQSASSKAAISWPSGAHSMEKRARSPKELSPKKGILKRSTRGCKGICMCLDCCTFRLHADRAFEFSRKQMREADDIISNLLKEVDSLRSLLEKHAGQAARRQACRVQEVARNRCQQMFADLNSHCRIPGPRVRFAEYVEEKAASSPRRSSRR

SEQ ID NO: 173760 - protein, 494 aa, Zea Mays
MDPVEPAVVSTGGDTDGKATCGNVMEETKTAPHDLTNKPLLARCTRSRFVHHPSSFSYKRMLPFLMEDEIYAQESGRVKIRKVAEERQFAANKHDASANGQQCLAVSDDSSQEGNRAQFKIVEEEKPLKADVNHILDDRQLKPPVIEASPDCSATEVQNVMQQEALASSQVPLTSFDGELTSDGDNVQSIGQHQLVVSEESQEECKRDEVNRSIHDEAVQSDGGYALDSREFQPAASEVSCSENSMAGVQGAAQEEPLPLDGVQENSDMGDDVSTEQAQLCVTSESLSAQLQNNAEFAEVLPCQDLDSGCHDIGFGSPTKRVVPSLHRHCAQQPQDSVVSHDDQLLDDDIQMVGRLSDPCAADRSSSMEEMSGRILFTQSASSKAAISWPSGAHSMEKRARSPKELSPKKGILKRSTRGCKGICMCLDCCTFRLHADRAFEFSRKQMREADDIISNLLKEVDSLRSLLEKHAGQVSINPCISVFVSFFFFSSSS

SEQ ID NO: 173761 - protein, 650 aa, Zea Mays
MPAHPTPPAARLSGVTSRRHAELLLHSGVDGVSVKDLRLRRIVPPAAGSLDTSPKCVSPVKPGSVDSTPPEAVSSAAAAAAGDLDRKLIRLRLVRIAFPLCLRCLPARPCPGGSDSSIGKEVFLQDTAAHPTDELSRSDSRLADESIGVSHSEPDAMDPVEPAVVSTGGDTDGKATCGNVMEETKTAPHDLTNKPLLARCTRSRFVHHPSSFSYKRMLPFLMEDEIYAQESGRVKIRKVAEERQFAANKHDASANGQQCLAVSDDSSQEGNRAQFKIVEEEKPLKADVNHILDDRQLKPPVIEASPDCSATEVQNVMQQEALASSQVPLTSFDGELTSDGDNVQSIGQHQLVVSEESQEECKRDEVNRSIHDEAVQSDGGYALDSREFQPAASEVSCSENSMAGVQGAAQEEPLPLDGVQENSDMGDDVSTEQAQLCVTSESLSAQLQNNAEFAEVLPCQDLDSGCHDIGFGSPTKRVVPSLHRHCAQQPQDSVVSHDDQLLDDDIQMVGRLSDPCAADRSSSMEEMSGRILFTQSASSKAAISWPSGAHSMEKRARSPKELSPKKGILKRSTRGCKGICMCLDCCTFRLHADRAFEFSRKQMREADDIISNLLKEVDSLRSLLEKHAGQVSINPCISVFVSFFFFSSSS

SEQ ID NO: 173762 - protein, 375 aa, Zea Mays
MYSRSGRRESERSRDHHSSRSRRNRSKSRSPRHKKPSRVDSRSPKKQRLESLSPSKSRSARAGSRSPRHHKGSKSSPTSDRHSRHSRHSRSRSLDRKHHHSDKKDSRKSEIQDDRRSHRGSRRDKDESSVKDDGERSHRGSRRDKDESSVKDDGERSHRGSRRNKDESSVKDDGERSHRGSRRDKDESSVKDDGERSHRGSRRGKDESSVKDDGERSHRGSRLDKDESSVKDDGERSHRGSRRDKDESSVKDDGERSHRGSRRDKDENSVKDDGERSHRSSRGDNDGRSVKDPVEDKRVDSNAVAHKRSSEDEILNNNSSNHKKHRHEVGLEVDEGNDVCPAVADPNGKHETGGMKIFGELECCSERSSDILKCL

SEQ ID NO: 173763 - protein, 933 aa, Zea Mays
MAAPKPIWVRQAEEAKLKSEAETAAAAKAAFDATFKALAAASGDDYNDVDPAPPSPAELTSTDSDDDAPALPGPVDPSKCSAAGPGIAGGSAGTPSTFTVVAKDRHSRRLTAGGARVHVRVSPAAGVGGDDLEGTVKDNGDGSYTVTYVVPKRGNYMVHVELDGVSVMGSPFPVFFSGSTATPSAAFPTALPAVSSAYPNMVNQTMPNMPNYTGAPSSAFPSLLGAMPSSTAGSSGGVILPGVGASLGEICRDYMNGRCTKVETDCKFTHPPQQLLMSLLAATTSVSALGHAPLAPSAAAMAAAQAIMAAQALQAHAAQAKAAGGTSGSTNKADEADALKRTVQISNLSPLLTVDYIKQLFGFCGKVVDCVMTDTKQIVYVEYSKPEEATAALELNSKSVGGRPLNVEMAKALPPKANNNLPMMMQQAVQLQQIQFQQALMMQQSIAAQQAAARAATMKSATEAAAARAAEISRKLKAEGFGGDNMEEKDAKGKSGSPSSPTRRSKSRSRSPIKYRRSRRSRSYSPPVGRSREHRSRSPSRSRHSKHGSDRSHRDDKDMYSRSGRRESERSRDHHSSRSRRNRSKSRSPRHKKPSRVDSRSPKKQRLESLSPSKSRSARAGSRSPRHHKGSKSSPTSDRHSRHSRHSRSRSLDRKHHHSDKKDSRKSEIQDDRRSHRGSRRDKDESSVKDDGERSHRGSRRDKDESSVKDDGERSHRGSRRNKDESSVKDDGERSHRGSRRDKDESSVKDDGERSHRGSRRGKDESSVKDDGERSHRGSRLDKDESSVKDDGERSHRGSRRDKDESSVKDDGERSHRGSRRDKDENSVKDDGERSHRSSRGDNDGRSVKDPVEDKRVDSNAVAHKRSSEDEILNNNSSNHKKHRHEVGLEVDEGNDVCPAVADPNGKHETGGMKIFGELECCSERSSDILKCL

SEQ ID NO: 173764 - protein, 636 aa, Zea Mays
MTPIAGYIHELEVVAFRLGVHHALVTARPLGSTNKADEADALKRTVQISNLSPLLTVDYIKQLFGFCGKVVDCVMTDTKQIVYVEYSKPEEATAALELNSKSVGGRPLNVEMAKALPPKANNNLPMMMQQAVQLQQIQFQQALMMQQSIAAQQAAARAATMKSATEAAAARAAEISRKLKAEGFGGDNMEEKDAKGKSGSPSSPTRRSKSRSRSPIKYRRSRRSRSYSPPVGRSREHRSRSPSRSRHSKHGSDRSHRDDKDMYSRSGRRESERSRDHHSSRSRRNRSKSRSPRHKKPSRVDSRSPKKQRLESLSPSKSRSARAGSRSPRHHKGSKSSPTSDRHSRHSRHSRSRSLDRKHHHSDKKDSRKSEIQDDRRSHRGSRRDKDESSVKDDGERSHRGSRRDKDESSVKDDGERSHRGSRRNKDESSVKDDGERSHRGSRRDKDESSVKDDGERSHRGSRRGKDESSVKDDGERSHRGSRLDKDESSVKDDGERSHRGSRRDKDESSVKDDGERSHRGSRRDKDENSVKDDGERSHRSSRGDNDGRSVKDPVEDKRVDSNAVAHKRSSEDEILNNNSSNHKKHRHEVGLEVDEGNDVCPAVADPNGKHETGGMKIFGELECCSERSSDILKCL

SEQ ID NO: 173765 - protein, 925 aa, Zea Mays
MAAPKPIWVRQAEEAKLKSEAETAAAAKAAFDATFKALAAASGDDYNDVDPAPPSPAELTSTDSDDDAPALPGPVDPSKCSAAGPGIAGGSAGTPSTFTVVAKDRHSRRLTAGGARVHVRVSPAAGVGGDDLEGTVKDNGDGSYTVTYVVPKRGNYMVHVELDGVSVMGSPFPVFFSGSTATPSAAFPTALPAVSSAYPNMVNQTMPNMPNYTGAPSSAFPSLLGAMPSSTAGSSGGVILPGVGASLGEICRDYMNGRCTKVETDCKFTHPPQQLLMSLLAATTSVSALGHAPLAPSAAAMAAAQAIMAAQALQAHAAQAKAAGGTSGSTNKADEADALKRTVQISNLSPLLTVDYIKQLFGFCGKVVDCVMTDTKQIVYVEYSKPEEATAALELNSKSVGGRPLNVEMAKALPPKANNNLPMMMQQAVQLQQIQFQQALMMQQSIAAQQAAARAATMKSATEAAAARAAEISRKLKAEGFGGDNMEEKDAKGKSGSKSRSRSPIKYRRSRRSRSYSPPVGRSREHRSRSPSRSRHSKHGSDRSHRDDKDMYSRSGRRESERSRDHHSSRSRRNRSKSRSPRHKKPSRVDSRSPKKQRLESLSPSKSRSARAGSRSPRHHKGSKSSPTSDRHSRHSRHSRSRSLDRKHHHSDKKDSRKSEIQDDRRSHRGSRRDKDESSVKDDGERSHRGSRRDKDESSVKDDGERSHRGSRRNKDESSVKDDGERSHRGSRRDKDESSVKDDGERSHRGSRRGKDESSVKDDGERSHRGSRLDKDESSVKDDGERSHRGSRRDKDESSVKDDGERSHRGSRRDKDENSVKDDGERSHRSSRGDNDGRSVKDPVEDKRVDSNAVAHKRSSEDEILNNNSSNHKKHRHEVGLEVDEGNDVCPAVADPNGKHETGGMKIFGELECCSERSSDILKCL

SEQ ID NO: 173766 - protein, 309 aa, Zea Mays
MGMALPLPPASQGLLRSRRMSFLASPPLSLKAAGGISIPCPWRLDGRRPRAAPASVPRLASVRSVVLDIEGTTSPISFVTDVLFPYARDNVRTHLDATYSTRETKDDIALLRAQVEQDLAEGVPGAVPVPPDGAGKDRVVDALVANVEAMIAADRKITSLKQLQGHIWRTGFECQEIKGVVFDDVPPALERWHASGIKSQTYIYSSGSREAQRLIFGNTTYGDLRRHLCGFFDATIGTKRDARSYYEIWQTVGVDRPSQILFLTDVCQEATAAQAAGLEVLISIRPGNAPLPAENHGFGTVESFAEILT

SEQ ID NO: 173767 - protein, 199 aa, Zea Mays
MRSHLSSISLPSHSHHIYARSATQPGAQNKKKLRALIRIALAGTPQRSVVLDIEGTTSPISFVTDVLFPYARDNVRTHLDATYSTRETKDDIALLRAQVEQDLAEGVPGAVPVPPDGAGKDRVVDALVANVEAMIAADRKITSLKQLQSQTYIYSSGSREAQRLIFGNTTYGDLRRHLCGFFDATIGYAVHLVSHLSAH

SEQ ID NO: 173768 - protein, 57 aa, Zea Mays
MRDPSRMINRMYLTNSAVRVFGKDVGEPGTAEEVRAFTTFPLKIFQTLFGLLQSTEV

SEQ ID NO: 173769 - protein, 209 aa, Zea Mays
MMNEHREEDALRGQAVKNQKAIWDKTMEMRFLLQKAFSTSNKLPQESIRTRFCNHDKQIEQAYDDLLNSTKHTLSSMMELQEALLESNQATKDANEIPSASNGDNDEWSEVQRLQARITTFRNTEIDKWHRKIQVTTGAAALKGKLHAFNQNISDQVAGYMRDPSRMINRMYLTNSAVRVFGKDVGEPGTAEENATICTNRRYNADYTT

SEQ ID NO: 173770 - protein, 95 aa, Zea Mays
MMNEHREEDALRGQAVKNQKAIWDKTMEMRFLLQKAFSTSNKLPQESIRTRFCNHDKQIEQAYDDLLNSTKHTLSSMMELQEVQLVAHIVFLSLL

SEQ ID NO: 173771 - protein, 119 aa, Zea Mays
MMNEHREEDALRGQAVKNQKAIWDKTMEMRFLLQKAFSTSNKLPQESIRTRFCNHDKQIEQAYDDLLNSTKHTLSSMMELQEVQLCLRVIRLQRMPMKFLLPQMETMTSGQKYRDCRQG

SEQ ID NO: 173772 - protein, 261 aa, Zea Mays
MMNEHREEDALRGQAVKNQKAIWDKTMEMRFLLQKAFSTSNKLPQESIRTRFCNHDKQIEQAYDDLLNSTKHTLSSMMELQEALLESNQATKDANEIPSASNGDNDEWSEVQRLQARITTFRNTEIDKWHRKIQVTTGAAALKGKLHAFNQNISDQVAGYMRDPSRMINRMYLTNSAVRVFGKDVGEPGTAEEGHIMEESAFYSLKKQQVKKRKLVDRRASKSRKIRYHVHEKITNFMAPEPMVLPPMAPKLFENLFGNSS

SEQ ID NO: 173773 - protein, 199 aa, Zea Mays
MMNEHREEDALRGQAVKNQKAIWDKTMEMRFLLQKAFSTSNKLPQESIRTRFCNHDKQIEQAYDDLLNSTKHTLSSMMELQEALLESNQATKDANEIPSASNGDNDEWSEVQRLQARITTFRNTEIDKWHRKIQVTTGAAALKGKLHAFNQNISDQVAGYMRDPSRMINRMYLTNSAVRVFGKDVGEPGTAEESRHFTL

SEQ ID NO: 173774 - protein, 775 aa, Zea Mays
MPQVKSSYDGAGGDYIKWMCGAGGRPGGAMASLHRGVGSLVRDISDPCLNPSPVKVSILHAGDNANVSVAPLSVTLADTPNRCHYTALFFHDTIETSCLVYNSICAAYRITDHLQHLLRHKIPRRGNRMLKPERWHACFDSDGKAICFRKALKFIVLGGVDPSIRAEVWEFLIGCYTLSTTAEYRGKLRAARREKYRYLIKQCQSMHTSIGTGELAYAVGSKLMDVRTLPKETEGGEVSTSQQAEHEVPCSLAENSNLIYGSGCTTRPHKRKICSKSAETVGFNQHNDNSRGSGDCDVIGEPRYDSDAFIDFPSLTGTNLVANGDGDSNGVEENPCNFLVSEHRVRPHDEHMHSFQINNNIDLIIESNTFSNDIFRPSSSDSAIFHSDAYKHDRWLDDTGYSEEIIDSLRISDAPESDLVDGMKSNGSIADKDRVSEWLWTLHRIVVDVVRTDSHLDFYGESRNMARMSDILAVYAWVDPSTGYCQGMSDLLSPFVVIYEDDADAFWCFEMLLRRMRENFQMEGPTGVMKQLQALWKIMELTDAELFEHFSAIGAESLHFAFRMLLVLFRRELSFEESLIMWEMMWAADFDEEAVRHLEENCLEPLLVDLSNGLSSEVKEVHRINSSTRRKPRTRKCHSRNGEICGACHPGMKSSTRNHLCGLSGATIWARPQQMPHPSASVLAKGGDYELPIFCVAAILIINRQKIIRGTHSIDDAIKMFNDNVLKINVKRCVRLAIKLRKKYLYKVCWISIDLKYGTCPRSGIIQDCKMKLWN

SEQ ID NO: 173775 - protein, 682 aa, Zea Mays
MPQVKSSYDGAGGDYIKWMCGAGGRPGGAMASLHRGVGSLVRDISDPCLNPSPGNRMLKPERWHACFDSDGKAICFRKALKFIVLGGVDPSIRAEVWEFLIGCYTLSTTAEYRGKLRAARREKYRYLIKQCQSMHTSIGTGELAYAVGSKLMDVRTLPKETEGGEVSTSQQAEHEVPCSLAENSNLIYGSGCTTRPHKRKICSKSAETVGFNQHNDNSRGSGDCDVIGEPRYDSDAFIDFPSLTGTNLVANGDGDSNGVEENPCNFLVSEHRVRPHDEHMHSFQINNNIDLIIESNTFSNDIFRPSSSDSAIFHSDAYKHDRWLDDTGYSEEIIDSLRISDAPESDLVDGMKSNGSIADKDRVSEWLWTLHRIVVDVVRTDSHLDFYGESRNMARMSDILAVYAWVDPSTGYCQGMSDLLSPFVVIYEDDADAFWCFEMLLRRMMEGPTGVMKQLQALWKIMELTDAELFEHFSAIGAESLHFAFRMLLVLFRRELSFEESLIMWEMMWAADFDEEAVRHLEENCLEPLLVDLSNGLSSEVKEVHRINSSTRRKPRTRKCHSRNGEICGACHPGMKSSTRNHLCGLSGATIWARPQQMPHPSASVLAKGGDYELPIFCVAAILIINRQKIIRGTHSIDDAIKMFNDNVLKINVKRCVRLAIKLRKKYLYKSLKGGSSDDKES

SEQ ID NO: 173776 - protein, 608 aa, Zea Mays
MPQVKSSYDGAGGDYIKWMCGAGGRPGGAMASLHRGVGSLVRDISDPCLNPSPVKGNRMLKPERWHACFDSDGKAICFRKALKFIVLGGVDPSIRAEVWEFLIGCYTLSTTAEYRGKLRAARREKYRYLIKQCQSMHTSIGTGELAYAVGSKLMDVRTLPKETEGGEVSTSQQAEHEVPCSLAENSNLIYGSGCTTRPHKRKICSKSAETVGFNQHNDNSRGSGDCDVIGEPRYDSDAFIDFPSLTGTNLVANGDGDSNGVEENPCNFLVSEHRVRPHDEHMHSFQINNNIDLIIESNTFSNDIFRPSSSDSAIFHSDAYKHDRWLDDTGYSEEIIDSLRISDAPESDLVDGMKSNGSIADKDRVSEWLWTLHRIVVDVVRTDSHLDFYGESRNMARMSDILAVYAWVDPSTGYCQGMSDLLSPFVVIYEDDADAFWCFEMLLRRMRENFQMEGPTGVMKQLQALWKIMELTDAELFEHFSAIGAESLHFAFRMLLVLFRRELSFEESLIMWEMMWAADFDEEAVRHLEENCLEPLLVDLSNGLSSEVKEMFNDNVLKINVKRCVRLAIKLRKKYLYKVCWISIDLKYGTCPRSGIIQDCKAICTYYT

SEQ ID NO: 173777 - protein, 606 aa, Zea Mays
MPQVKSSYDGAGGDYIKWMCGAGGRPGGAMASLHRGVGSLVRDISDPCLNPSPVKGNRMLKPERWHACFDSDGKAICFRKALKFIVLGGVDPSIRAEVWEFLIGCYTLSTTAEYRGKLRAARREKYRYLIKQCQSMHTSIGTGELAYAVGSKLMDVRTLPKETEGGEVSTSQQAEHEVPCSLAENSNLIYGSGCTTRPHKRKICSKSAETVGFNQHNDNSRGSGDCDVIGEPRYDSDAFIDFPSLTGTNLVANGDGDSNGVEENPCNFLVSEHRVRPHDEHMHSFQINNNIDLIIESNTFSNDIFRPSSSDSAIFHSDAYKHDRWLDDTGYSEEIIDSLRISDAPESDLVDGMKSNGSIADKDRVSEWLWTLHRIVVDVVRTDSHLDFYGESRNMARMSDILAVYAWVDPSTGYCQGMSDLLSPFVVIYEDDADAFWCFEMLLRRMRENFQMEGPTGVMKQLQALWKIMELTDAELFEHFSAIGAESLHFAFRMLLVLFRRELSFEESLIMWEMMWAADFDEEAVRHLEENCLEPLLVDLSNGLSSEVKEMFNDNVLKINVKRCVRLAIKLRKKYLYKVCWISIDLKYGTCPRSGIIQDCKMKLWN

SEQ ID NO: 173778 - protein, 687 aa, Zea Mays
MPQVKSSYDGAGGDYIKWMCGAGGRPGGAMASLHRGVGSLVRDISDPCLNPSPGNRMLKPERWHACFDSDGKAICFRKALKFIVLGGVDPSIRAEVWEFLIGCYTLSTTAEYRGKLRAARREKYRYLIKQCQSMHTSIGTGELAYAVGSKLMDVRTLPKETEGGEVSTSQQAEHEVPCSLAENSNLIYGSGCTTRPHKRKICSKSAETVGFNQHNDNSRGSGDCDVIGEPRYDSDAFIDFPSLTGTNLVANGDGDSNGVEENPCNFLVSEHRVRPHDEHMHSFQINNNIDLIIESNTFSNDIFRPSSSDSAIFHSDAYKHDRWLDDTGYSEEIIDSLRISDAPESDLVDGMKSNGSIADKDRVSEWLWTLHRIVVDVVRTDSHLDFYGESRNMARMSDILAVYAWVDPSTGYCQGMSDLLSPFVVIYEDDADAFWCFEMLLRRMRENFQMEGPTGVMKQLQALWKIMELTDAELFEHFSAIGAESLHFAFRMLLVLFRRELSFEESLIMWEMMWAADFDEEAVRHLEENCLEPLLVDLSNGLSSEVKEVHRINSSTRRKPRTRKCHSRNGEICGACHPGMKSSTRNHLCGLSGATIWARPQQMPHPSASVLAKGGDYELPIFCVAAILIINRQKIIRGTHSIDDAIKMFNDNVLKINVKRCVRLAIKLRKKYLYKSLKGGSSDDKES

SEQ ID NO: 173779 - protein, 278 aa, Zea Mays
MVYLNNVVKGSVANVAAKLEIMEPCCSVKDRIGYSMINDAEQKGLITPGKSVLVEATSGNTGIGLAFIAASKGYKLILTMPSSMSMERRVLLRAFGAELVLTDAAKGMKGAVDKATEILNKTPNSYMLQQFDNPANPKVHYETTGPEIWEDSKGKVDILIGGIGTGGTISGAGRFLKEKNSGIKVIGIEPSESNILSGGKPGPHKIQGIGAGFVPRNLDSDILDEVIEISSDEAVETAKQLAVQEGLLVVFPSFGERYLSSVLYQSIREECENMQPEP

SEQ ID NO: 173780 - protein, 198 aa, Zea Mays
MVYLNNVVKGSVANVAAKLEIMEPCCSVKDRIGYSMINDAEQKGLITPGKSVLVEATSGNTGIGLAFIAASKGYKLILTMPSSMSMERRVLLRAFGAELVLTDAAKGMKGAVDKATEILNKTPNSYMLQQFDNPANPKVGQYLVLAVSSRRKILELRLLVLSLLKVTYSPVENLVHIRFRELVQDLFQGTWIAIFLMK

SEQ ID NO: 173781 - protein, 169 aa, Zea Mays
MVYLNNVVKGSVANVAAKLEIMEPCCSVKDRIGYSMINDAEQKGLITPGKSVLVEATSGNTGIGLAFIAASKGYKLILTMPSSMSMERRVLLRAFGAELVLTDAAKGMKGAVDKATEILNKTPNSYMLQQFDNPANPKVHYETTGPEIWEDSKGKVDILIGGIGTGYWY

SEQ ID NO: 173782 - protein, 320 aa, Zea Mays
MPHMYIKIAASSSARHQWYISTMSSRALSPMLLLSLRLWSPVVASRTGYSMINDAEQKGLITPGKSVLVEATSGNTGIGLAFIAASKGYKLILTMPSSMSMERRVLLRAFGAELVLTDAAKGMKGAVDKATEILNKTPNSYMLQQFDNPANPKVHYETTGPEIWEDSKGKVDILIGGIGTGGTISGAGRFLKEKNSGIKVIGIEPSESNILSGGKPGPHKIQGIGAGFVPRNLDSDILDEVIEISSDEAVETAKQLAVQEGLLVGISSGAAAAAAIKVAKRPENAGKLIVVVFPSFGERYLSSVLYQSIREECENMQPEP

SEQ ID NO: 173783 - protein, 253 aa, Zea Mays
MVYLNNVVKGSVANVAAKLEIMEPCCSVKDRIGYSMINDAEQKGLITPGKSVLVEATSGNTGIGLAFIAASKGYKLILTMPSSMSMERRVLLRAFGAELVLTDAAKGMKGAVDKATEILNKTPNSYMLQQFDNPANPKVHYETTGPEIWEDSKGKVDILIGGIGTGGTISGAGRFLKEKNSGIKVIGIEPSESNILSGGKPGPHKIQGIGAGFVPRNLDSDILDEVIEISSDEAVETAKQLAVQEGLLLLPLP

SEQ ID NO: 173784 - protein, 96 aa, Zea Mays
MAAPLGSLPPWLPSPPSPRSCRARPTLPHLLSTSLMISALTPWCHGCRPPLTACSQRLLPTLVLAWRSTMGCITPTSPAIPPAPPHHPQPQRHRRV

SEQ ID NO: 173785 - protein, 131 aa, Zea Mays
MAIPNPSRDPLLCRPLSPSPGALLHLQLAPSPPLPMAAPLGSLPPWLPSPPSPRSCRARPTLPHLLSTSLMISALTPWCHGCRPPLTACSQRLLPTLVLAWRSTMGCITPTSPAIPPAPPHHPQPQRHRRV

SEQ ID NO: 173786 - protein, 284 aa, Zea Mays
MADHDPRAAAASSSAGGDEDDEGTDTDVSDSNLGNPQGQDPLPFPDAAWVPPHPLAPAHEPAGALPPPLPQGPSAGASATTDDSRRLFQRLWTDEEELLILRGFLDFTARRGTTFASHQYDTGPFYEEIRRRLSFEFTKSQLIEKLRRLKKKYRVCAARVAAQGDAFAFRSVHEGAIYDVARHIWRPAFRRGEGGGAADASDEDDINPVAAAAMEDGGGGSASTPVPTARGRGGRCVRRRTAQELEAPALPATSALLLSDAAEDRHCALVAPPRRLSRVSCHRY

SEQ ID NO: 173787 - protein, 107 aa, Zea Mays
MARRGTSRPRRRRRRTTRWCSRRPSRPSTASAAARPRRSAASPAAAFLAAAFPGSACPAAAAAYPGSACPAAAACPSSAAAPRASAASAACPGRPPPAPSPSTPTSP

SEQ ID NO: 173788 - protein, 290 aa, Zea Mays
MHAQVAVLLAAGAPPPPWPPHPSWHHRQIPCRRPFKPPHSLRDGGGGQPPPPVVVPASKRRAWPAVSAALFGAGFLLGPLLDGIHSRVGLQVYGNGALEAGALRTHVLVPPLLGAFYLTVGLLHLFLDERAPPKSRATGTARRTATSLLVLALFIETSAEMYRAGVASNVEAYVLFAGAEFAWLFLDGSWLGFAVACLVGTVCPLAEIPLIKLLGCWSYPNADVHLLGEVARFTAGNKQGRRGRGGRRRGSSVLSHTGGNTSRRIPGLGPCGLEFSARSSSAVRLKAMRP

SEQ ID NO: 173789 - protein, 548 aa, Zea Mays
MGRYAEVLCVNCWQVKRYIDQYSATSVIGFPSEDLQHIMDLYSRAQENWSASLITSSSETCSQEKVEKGSVLLQQIDAYNDFLKSFAKLARSAWTEFDLWSMGIGLLLMMLSVIIQASMLVNMTISQSSDQKSSGSSIIHRLSLAFSLVVIRAASFLSNSYILAEGRVANFLLATSCITSVWHSVLKGNISIENFVFLLLNIFTRFGIEVGMSKQLPAPTITKDHPVSVIYKILGANSCNILLELFPIISLAFVAYIMLKCLSRAICQRFLKFFLLCGTMVSYLSIAFHWASETTLFAHAGTVQEFGRSLAPRIVYTIGGLSLAISAFSRIFGSTVHLKLNKRIIILSAVMLCSWSPTILILLGRQGPFVALICMTGAWCMIKLQQKHQRETELSVADPVSVIQWSLLAVCLFYMTGHWCTFDGLRYGAAFIGFDHFHIIRQGLLLSIDTFGISHVLPILSLPLIAIVWYNTISKDNELKDVILNNINKVLLMYGLITTITATLTIICVAIQRRHLMVWGLFAPKYVFDAIGLLLTDLLICLASIYYS

SEQ ID NO: 173790 - protein, 773 aa, Zea Mays
MDKLHVLQKLAADEKTSSRIFKALADPPTTSLQRLKALTTGGLPTFIDVGNSFGAPAIVEDNIMHQLAKNGKRVVMMGDDTWIQLYPEHFNKSFPYPSFNVKDLDTVDNGVIEHLLPSLHKNDWDVLIAHFLGVDHAGHIFGVDSTPMIQKLEQYNQILEGVIDTLRSLSKPGGTHENTLLLVMGDHGQTLNGDHGGGTAEEVETSLFAWSPRTPPDAVLSVLDDSSCTVNLHGEEVCVSTMQQLDFAVTISALLGIPFPFGSIGRVNPELYALSIGTWVNQRRGTNACTSQDDLEAWMGRYAEVLCVNCWQVKRYIDQYSATSVIGFPSEDLQHIMDLYSRAQENWSASLITSSSETCSQEKVEKGSVLLQQIDAYNDFLKSFAKLARSAWTEFDLWSMGIGLLLMMLSVIIQASMLNFVFLLLNIFTRFGIEVGMSKQLPAPTITKDHPVSVIYKILGANSCNILLELFPIISLAFVAYIMLKCLSRAICQRFLKFFLLCGTMVSYLSIAFHWASETTLFAHAGTVQEFGRSLAPRIVYTIGGLSLAISAFSRIFGSTVHLKLNKRIIILSAVMLCSWSPTILILLGRQGPFVALICMTGAWCMIKLQQKHQRETELSVADPVSVIQWSLLAVCLFYMTGHWCTFDGLRYGAAFIGFDHFHIIRQGLLLSIDTFGISHVLPILSLPLIAIVWYNTISKDNELKDVILNNINKVLLMYGLITTITATLTIICVAIQRRHLMVWGLFAPKYVFDAIGLLLTDLLICLASIYYS

SEQ ID NO: 173791 - protein, 654 aa, Zea Mays
MSPPASHRRRSRFLSWPLLFIAILAIHSLAVYLFTRGFLLTRTELDLHSSRDDFSPQGNVSPGCDSWPPAAVDRLVIVVLDALRFDFVAPSTFFAEKQPWMDKLHVLQKLAADEKTSSRIFKALADPPTTSLQRLKALTTGGLPTFIDVGNSFGAPAIVEDNIMHQLAKNGKRVVMMGDDTWIQLYPEHFNKSFPYPSFNVKDLDTVDNGVIEHLLPSLHKNDWDVLIAHFLGVDHAGHIFGVDSTPMIQKLEQYNQILEGVIDTLRSLSKPGGTHENTLLLVMGDHGQTLNGDHGGGTAEEVETSLFAWSPRTPPDAVLSVLDDSSCTVNLHGEEVCVSTMQQLDFAVTISALLGIPFPFGSIGRVNPELYALSIGTWVNQRRGTNACTSQDDLEAWMGRYAEVLCVNCWQVKRYIDQYSATSVIGFPSEDLQHIMDLYSRAQENWSASLITSSSETCSQEKVEKGSVLLQQIDAYNDFLKSFAKLARSAWTEFDLWSMGIGLLLMMLSVIIQASMLVNMTISQSSDQKSSGSSIIHRLSLAFSLVVIRAASFLSNSYILAEGRVANFLLATSCITSVWHSVLKGNISIENFVFLLLNIFTRFGIEVGMSKQLPAPTITKDHPRLLCLLMLGLFKNLEEVWLLALFTLLEVYH

SEQ ID NO: 173792 - protein, 626 aa, Zea Mays
MIQKLEQYNQILEGVIDTLRSLSKPGGTHENTLLLVMGDHGQTLNGDHGGGTAEEVETSLFAWSPRTPPDAVLSVLDDSSCTVNLHGEEVCVSTMQQLDFAVTISALLGIPFPFGSIGRVNPELYALSIGTWVNQRRGTNACTSQDDLEAWMGRYAEVLCVNCWQVKRYIDQYSATSVIGFPSEDLQHIMDLYSRAQENWSASLITSSSETCSQEKVEKGSVLLQQIDAYNDFLKSFAKLARSAWTEFDLWSMGIGLLLMMLSVIIQASMLNFVFLLLNIFTRFGIEVGMSKQLPAPTITKDHPVSVIYKILGANSCNILLELFPIISLAFVAYIMLKCLSRAICQRFLKFFLLCGTMVSYLSIAFHWASETTLFAHAGTVQEFGRSLAPRIVYTIGGLSLAISAFSRIFGSTVHLKLNKRIIILSAVMLCSWSPTILILLGRQGPFVALICMTGAWCMIKLQQKHQRETELSVADPVSVIQWSLLAVCLFYMTGHWCTFDGLRYGAAFIGFDHFHIIRQGLLLSIDTFGISHVLPILSLPLIAIVWYNTISKDNELKDVILNNINKVLLMYGLITTITATLTIICVAIQRRHLMVWGLFAPKYVFDAIGLLLTDLLICLASIYYS

SEQ ID NO: 173793 - protein, 434 aa, Zea Mays
MIQKLEQYNQILEGVIDTLRSLSKPGGTHENTLLLVMGDHGQTLNGDHGGGTAEEVETSLFAWSPRTPPDAVLSVLDDSSCTVNLHGEEVCVSTMQQLDFAVTISALLGIPFPFGSIGRVNPELYALSIGTWVNQRRGTNACTSQDDLEAWMGRYAEVLCVNCWQVKRYIDQYSATSVIGFPSEDLQHIMDLYSRAQENWSASLITSSSETCSQEKVEKGSVLLQQIDAYNDFLKSFAKLARSAWTEFDLWSMGIGLLLMMLSVIIQASMLVNMTISQSSDQKSSGSSIIHRLSLAFSLVVIRAASFLSNSYILAEGRVANFLLATSCITSVWHSVLKGNISIENFVFLLLNIFTRFGIEVGMSKQLPAPTITKDHPVSVIYKILGANSCNILLELFPIISLAFVAYIMLKCLSRAICQRFLKFFLLCGTMLGV

SEQ ID NO: 173794 - protein, 681 aa, Zea Mays
MSPPASHRRRSRFLSWPLLFIAILAIHSLAVYLFTRGFLLTRTELDLHSSRDDFSPQGNVSPGCDSWPPAAVDRLVIVVLDALRFDFVAPSTFFAEKQPWMDKLHVLQKLAADEKTSSRIFKALADPPTTSLQRLKALTTGGLPTFIDVGNSFGAPAIVEDNIMHQLAKNGKRVVMMGDDTWIQLYPEHFNKSFPYPSFNVKDLDTVDNGVIEHLLPSLHKNDWDVLIAHFLGVDHAGHIFGVDSTPMIQKLEQYNQILEGVIDTLRSLSKPGGTHENTLLLVMGDHGQTLNGDHGGGTAEEVETSLFAWSPRTPPDAVLSVLDDSSCTVNLHGEEVCVSTMQQLDFAVTISALLGIPFPFGSIGRVNPELYALSIGTWVNQRRGTNACTSQDDLEAWMGRYAEVLCVNCWQVKRYIDQYSATSVIGFPSEDLQHIMDLYSRAQENWSASLITSSSETCSQEKVEKGSVLLQQIDAYNDFLKSFAKLARSAWTEFDLWSMGIGLLLMMLSVIIQASMLVNMTISQSSDQKSSGSSIIHRLSLAFSLVVIRAASFLSNSYILAEGRVANFLLATSCITSVWHSVLKGNISIENFVFLLLNIFTRFGIEVGMSKQLPAPTITKDHPVSVIYKILGANSCNILLELFPIISLAFVAYIMLKCLSRAICQRFLKFFLLCGTMLGV

SEQ ID NO: 173795 - protein, 615 aa, Zea Mays
MIQKLEQYNQILEGVIDTLRSLSKPGGTHENTLLLVMGDHGQTLNGDHGGGTAEEVETSLFAWSPRTPPDAVLSVLDDSSCTVNLHGEEVCVSTMQQLDFAVTISALLGIPFPFGSIGRVNPELYALSIGTWVNQRRGTNACTSQDDLEAWMGRYAEVLCVNCWQVKRYIDQYSATSVIGFPSEDLQHIMDLYSRAQENWSASLITSSSETCSQEKVEKGSVLLQQIDAYNDFLKSFAKLARSAWTEFDLWSMGIGLLLMMLSVIIQASMLNFVFLLLNIFTRFGIEVGMSKQLPAPTITKDHPVSVIYKILGANSCNILLELFPIISLAFVAYIMLKCLSRAICQRFLKFFLLCGTMVSYLSIAFHWASETTLFAHAGTVQEFGRSLAPRIVYTIGGLSLAISAFSRIFGSTVHLKLNKRIIILSAVMLCSWSPTILILLGRQAWCMIKLQQKHQRETELSVADPVSVIQWSLLAVCLFYMTGHWCTFDGLRYGAAFIGFDHFHIIRQGLLLSIDTFGISHVLPILSLPLIAIVWYNTISKDNELKDVILNNINKVLLMYGLITTITATLTIICVAIQRRHLMVWGLFAPKYVFDAIGLLLTDLLICLASIYYS

SEQ ID NO: 173796 - protein, 579 aa, Zea Mays
MGDHGQTLNGDHGGGTAEEVETSLFAWSPRTPPDAVLSVLDDSSCTVNLHGEEVCVSTMQQLDFAVTISALLGIPFPFGSIGRVNPELYALSIGTWVNQRRGTNACTSQDDLEAWMGRYAEVLCVNCWQVKRYIDQYSATSVIGFPSEDLQHIMDLYSRAQENWSASLITSSSETCSQEKVEKGSVLLQQIDAYNDFLKSFAKLARSAWTEFDLWSMGIGLLLMMLSVIIQASMLNFVFLLLNIFTRFGIEVGMSKQLPAPTITKDHPVSVIYKILGANSCNILLELFPIISLAFVAYIMLKCLSRAICQRFLKFFLLCGTMVSYLSIAFHWASETTLFAHAGTVQEFGRSLAPRIVYTIGGLSLAISAFSRIFGSTVHLKLNKRIIILSAVMLCSWSPTILILLGRQAWCMIKLQQKHQRETELSVADPVSVIQWSLLAVCLFYMTGHWCTFDGLRYGAAFIGFDHFHIIRQGLLLSIDTFGISHVLPILSLPLIAIVWYNTISKDNELKDVILNNINKVLLMYGLITTITATLTIICVAIQRRHLMVWGLFAPKYVFDAIGLLLTDLLICLASIYYS

SEQ ID NO: 173797 - protein, 368 aa, Zea Mays
MSPPASHRRRSRFLSWPLLFIAILAIHSLAVYLFTRGFLLTRTELDLHSSRDDFSPQGNVSPGCDSWPPAAVDRLVIVVLDALRFDFVAPSTFFAEKQPWMDKLHVLQKLAADEKTSSRIFKALADPPTTSLQRLKALTTGGLPTFIDVGNSFGAPAIVEDNIMHQLAKNGKRVVMMGDDTWIQLYPEHFNKSFPYPSFNVKDLDTVDNGVIEHLLPSLHKNDWDVLIAHFLGVDHAGHIFGVDSTPMIQKLEQYNQILEGVIDTLRSLSKPGGTHENTLLLVMGDHGQTLNGDHGGGTAEEVETSLFAWSPRTPPDAVLSVLDDSSCTVNLHGEEVCVSTMQQLDFAVTISALLGIPFPFGRSASLT

SEQ ID NO: 173798 - protein, 696 aa, Zea Mays
MSNVLPAVLILEFLSGTNLIVQTFALEVVAPAMPPFQGWGPFHSLASQTKVLVSVSAQPDDGLQRQKKLYSSAVAMSSTHPPISAPSYRYMPGALDLAIYSSDLSRPPVQHTRHLATAAPAHVDADPPDAASNSSAAPLGLVQPPVSPHSGCCAPNMVQKRGTRDCHCVYPVRIELFLRNVSLTSNWSNKFLQELASQLNLRVNQFEIVNFYVVGASGLNITMDIAPYTGISFAADQVKAMNYSLTLHTVRIDPVLVGDYNLLNLTWFRSLAPAPAPAFTMAPRASPSTASTFPRQSEGPSKNRHASLITVVIICVGSLIGVLLIVLTICFCTFRKGKKRVPHVETPKQRTADAVSTVESLPRPTSTRFLSYEELKVATNNFEPSSVLGEGGFGRVFKGVLGDGTAVAIKKLTNGGHQGDKEFLVEVEMLSRLHHRNLVKLIGYYSSRESSQNLLCYELVPNGSLEAWLHGTQGASRPLDWDARMRIALDAARGLAYLHEDSQPCAPEGRTNYLSTRVMGTFGYVAPEYAMTGHLLVKSDVYSYGVVLLELLTGRRPVDMSQPSGQENLVTWARPILRDQDRLGELADPRLGGQYPKDDFVRVCTIAAACVSPEANQRPTMGEVVQSLKMVQRSVEFQESVPTPPARPNVRQSSTTYESDGTSSMFSSGPFSGLSPFETETIPRTAVFSEDLHEGR

SEQ ID NO: 173799 - protein, 625 aa, Zea Mays
MSNVLPAVLILEFLSGTNLIVQTFALEVVAPAMPPFQVQHTRHLATAAPAHVDADPPDAASNSSAAPLGLVQPPVSPHSGCCAPNMVQKRGTRDCHCVYPVRIELFLRNVSLTSNWSNKFLQELASQLNLRVNQFEIVNFYVVGASGLNITMDIAPYTGISFAADQVKAMNYSLTLHTVRIDPVLVGDYNLLNLTWFRSLAPAPAPAFTMAPRASPSTASTFPRQSEGPSKNRHASLITVVIICVGSLIGVLLIVLTICFCTFRKGKKRVPHVETPKQRTADAVSTVESLPRPTSTRFLSYEELKVATNNFEPSSVLGEGGFGRVFKGVLGDGTAVAIKKLTNGGHQGDKEFLVEVEMLSRLHHRNLVKLIGYYSSRESSQNLLCYELVPNGSLEAWLHGTQGASRPLDWDARMRIALDAARGLAYLHEDSQPCAPEGRTNYLSTRVMGTFGYVAPEYAMTGHLLVKSDVYSYGVVLLELLTGRRPVDMSQPSGQENLVTWARPILRDQDRLGELADPRLGGQYPKDDFVRVCTIAAACVSPEANQRPTMGEVVQSLKMVQRSVEFQESVPTPPARPNVRQSSTTYESDGTSSMFSSGPFSGLSPFETETIPRTAVFSEDLHEGR

SEQ ID NO: 173800 - protein, 656 aa, Zea Mays
MARLGRAGCRSGPARGIPEDTLRNFMSNVLPAVLILEFLSGTNLIVQTFALEVVAPAMPPFQDLSRPPVQHTRHLATAAPAHVDADPPDAASNSSAAPLGLVQPPVSPHSGCCAPNMVQKRGTRDCHCVYPVRIELFLRNVSLTSNWSNKFLQELASQLNLRVNQFEIVNFYVVGASGLNITMDIAPYTGISFAADQVKAMNYSLTLHTVRIDPVLVGDYNLLNLTWFRSLAPAPAPAFTMAPRASPSTASTFPRQSEGPSKNRHASLITVVIICVGSLIGVLLIVLTICFCTFRKGKKRVPHVETPKQRTADAVSTVESLPRPTSTRFLSYEELKVATNNFEPSSVLGEGGFGRVFKGVLGDGTAVAIKKLTNGGHQGDKEFLVEVEMLSRLHHRNLVKLIGYYSSRESSQNLLCYELVPNGSLEAWLHGTQGASRPLDWDARMRIALDAARGLAYLHEDSQPCAPEGRTNYLSTRVMGTFGYVAPEYAMTGHLLVKSDVYSYGVVLLELLTGRRPVDMSQPSGQENLVTWARPILRDQDRLGELADPRLGGQYPKDDFVRVCTIAAACVSPEANQRPTMGEVVQSLKMVQRSVEFQESVPTPPARPNVRQSSTTYESDGTSSMFSSGPFSGLSPFETETIPRTAVFSEDLHEGR

SEQ ID NO: 173801 - protein, 660 aa, Zea Mays
MARLGRAGCRSGPARAFFSGIPEDTLRNFMSNVLPAVLILEFLSGTNLIVQTFALEVVAPAMPPFQDLSRPPVQHTRHLATAAPAHVDADPPDAASNSSAAPLGLVQPPVSPHSGCCAPNMVQKRGTRDCHCVYPVRIELFLRNVSLTSNWSNKFLQELASQLNLRVNQFEIVNFYVVGASGLNITMDIAPYTGISFAADQVKAMNYSLTLHTVRIDPVLVGDYNLLNLTWFRSLAPAPAPAFTMAPRASPSTASTFPRQSEGPSKNRHASLITVVIICVGSLIGVLLIVLTICFCTFRKGKKRVPHVETPKQRTADAVSTVESLPRPTSTRFLSYEELKVATNNFEPSSVLGEGGFGRVFKGVLGDGTAVAIKKLTNGGHQGDKEFLVEVEMLSRLHHRNLVKLIGYYSSRESSQNLLCYELVPNGSLEAWLHGTQGASRPLDWDARMRIALDAARGLAYLHEDSQPCAPEGRTNYLSTRVMGTFGYVAPEYAMTGHLLVKSDVYSYGVVLLELLTGRRPVDMSQPSGQENLVTWARPILRDQDRLGELADPRLGGQYPKDDFVRVCTIAAACVSPEANQRPTMGEVVQSLKMVQRSVEFQESVPTPPARPNVRQSSTTYESDGTSSMFSSGPFSGLSPFETETIPRTAVFSEDLHEGR

SEQ ID NO: 173802 - protein, 66 aa, Zea Mays
MFEPYGFSFCTRLMLLCTWWMLLTRNVLPSRRRSLMRFLQMTPLQTFLSSYWATRLTSHTRLQRRS

SEQ ID NO: 173803 - protein, 189 aa, Zea Mays
MFLVDWFYGVLASLGLWQKEAKILFLGLDNAGKTTLLHMLKDEHQPTQYPTSEELSIGRIKFKAFDLGGHQIARRVWKDYYAKVDAVVYLVDAVDKERFAESKKELDALLADDSLANVPFLILGNKIDIPYAASEEELRYYLGLSNFTTGKGNVNLADSNVRPLEIFMCSVVRKMGYGEGFKWMSQYIK

SEQ ID NO: 173804 - protein, 928 aa, Zea Mays
MLVELKKLIEANPLFREKLVFPTLKASRLRTLINQSLNWQHQLCKNPRPNPDIKTLFTDHTCSPPNGARASPVSVPLAAVPKAGAAYPPLTAHTPFQPPPGPSLAGWMANAAASSSVQSAVVAAASIPVPPNQESEQLMKRLRPGGHGIDEATYPAPTPQPAWSVDDLPRTVACSLSHGSNVTSMDFHPTRHTLLLVGSANGEFTLYEIGLRETLLSKPFKIRDINACSPQFQNAVVKDSSISINQVTWSPDGEMIGVAFTKHLIHLHGYQPPNETRHLLEIEAHSGGVNDIAFSRPNKQLCVVTCGDDKLIKVWDMHGHKLFTFEGHEAPVYSICPHHKESIQFIFSTSLDGKIKAWLYDNMGSRVDYDAPGKWCTTMLYSADGTRLFSCGTSKEGDSYLVEWNESEGSIKRTYSGFRKRSAGVAGVVQFDTAQNHILAAGEDNHIKFWDVDNNNMLICTDAEGGLPALPRLRFNKEGNLLAVTTADNGFKILANADGLRTLRALGSRPPFEAFRPQYEASSMKVSGAPVVASISPNIGRMDHLDRNSPAKPSPILNGGDTASRSIDIKPRISEEKPDKAKPWELMEVLNPQQCHVATMPETPDQARKVVRLLYTNSGVGLLALGSNAIQRLWKWSRNEQNPSGKATASVVPHHWQPNSGLVMTNDTADTNPEEAVPCIALSKNDSYVMSACGGKVSLFNMMTFKVMTTFMPPPPASTFLAFHPQDNNIIAIGMEDSTIHIYNVRVDEVKTRLKGHQRRITGLAFSTNLGILVSSGADAQWIPQDTLSASISHASYSCNSQLVFAAFTDGNLGVFDAENLRLRCRIAPSVINRSIRSVIELTQGFRQLGCLFCLCNPPVHPLVVAAHPHEPNQFAVGLSDGSVKVLEPLESEGKWGAPAPADNGIIPNGKTPASSATSNPAADQIQR

SEQ ID NO: 173805 - protein, 1088 aa, Zea Mays
MKYFEEKVHAGEWDEVERYLSGFTKVDDNRYSMKIFFEIRKQKYLEALDRHDRAKAVDILVKDLKVFSTFNEELYKEITQLLTLENFRENEQLSKYGDTKSARSIMLVELKKLIEANPLFREKLVFPTLKASRLRTLINQSLNWQHQLCKNPRPNPDIKTLFTDHTCSPPNGARASPVSVPLAAVPKAGAAYPPLTAHTPFQPPPGPSLAGWMANAAASSSVQSAVVAAASIPVPPNQAVSMLKRPALTDYQSAESEQLMKRLRPGGHGIDEATYPAPTPQPAWSVDDLPRTVACSLSHGSNVTSMDFHPTRHTLLLVGSANGEFTLYEIGLRETLLSKPFKIRDINACSPQFQNAVVKDSSISINQVTWSPDGEMIGVAFTKHLIHLHGYQPPNETRHLLEIEAHSGGVNDIAFSRPNKQLCVVTCGDDKLIKVWDMHGHKLFTFEGHEAPVYSICPHHKESIQFIFSTSLDGKIKAWLYDNMGSRVDYDAPGKWCTTMLYSADGTRLFSCGTSKEGDSYLVEWNESEGSIKRTYSGFRKRSAGVAGVVQFDTAQNHILAAGEDNHIKFWDVDNNNMLICTDAEGGLPALPRLRFNKEGNLLAVTTADNGFKILANADGLRTLRALGSRPPFEAFRPQYEASSMKVSGAPVVASISPNIGRMDHLDRNSPAKPSPILNGGDTASRSIDIKPRISEEKPDKAKPWELMEVLNPQQCHVATMPETPDQARKVVRLLYTNSGVGLLALGSNAIQRLWKWSRNEQNPSGKATASVVPHHWQPNSGLVMTNDTADTNPEEAVPCIALSKNDSYVMSACGGKVSLFNMMTFKVMTTFMPPPPASTFLAFHPQDNNIIAIGMEDSTIHIYNVRVDEVKTRLKGHQRRITGLAFSTNLGILVSSGADAQLCVWTNDTWEKKRTVSIQMPAGKTPSGDTRVQFSSDQSHLLVVHETQLAIYDASKMERIYQWIPQDTLSASISHASYSCNSQLVFAAFTDGNLGVFDAENLRLRCRIAPSVINSNPPVHPLVVAAHPHEPNQFAVGLSDGSVKVLEPLESEGKWGAPAPADNGIIPNGKTPASSATSNPAADQIQR

SEQ ID NO: 173806 - protein, 1110 aa, Zea Mays
MKYFEEKVHAGEWDEVERYLSGFTKVDDNRYSMKIFFEIRKQKYLEALDRHDRAKAVDILVKDLKVFSTFNEELYKEITQLLTLENFRENEQLSKYGDTKSARSIMLVELKKLIEANPLFREKLVFPTLKASRLRTLINQSLNWQHQLCKNPRPNPDIKTLFTDHTCSPPNGARASPVSVPLAAVPKAGAAYPPLTAHTPFQPPPGPSLAGWMANAAASSSVQSAVVAAASIPVPPNQAVSMLKRPALTDYQSAESEQLMKRLRPGGHGIDEATYPAPTPQPAWSVDDLPRTVACSLSHGSNVTSMDFHPTRHTLLLVGSANGEFTLYEIGLRETLLSKPFKIRDINACSPQFQNAVVKDSSISINQVTWSPDGEMIGVAFTKHLIHLHGYQPPNETRHLLEIEAHSGGVNDIAFSRPNKQLCVVTCGDDKLIKVWDMHGHKLFTFEGHEAPVYSICPHHKESIQFIFSTSLDGKIKAWLYDNMGSRVDYDAPGKWCTTMLYSADGTRLFSCGTSKEGDSYLVEWNESEGSIKRTYSGFRKRSAGVAGVVQFDTAQNHILAAGEDNHIKFWDVDNNNMLICTDAEGGLPALPRLRFNKEGNLLAVTTADNGFKILANADGLRTLRALGSRPPFEAFRPQYEASSMKVSGAPVVASISPNIGRMDHLDRNSPAKPSPILNGGDTASRSIDIKPRISEEKPDKAKPWELMEVLNPQQCHVATMPETPDQARKVVRLLYTNSGVGLLALGSNAIQRLWKWSRNEQNPSGKATASVVPHHWQPNSGLVMTNDTADTNPEEAVPCIALSKNDSYVMSACGGKVSLFNMMTFKVMTTFMPPPPASTFLAFHPQDNNIIAIGMEDSTIHIYNVRVDEVKTRLKGHQRRITGLAFSTNLGILVSSGADAQLCVWTNDTWEKKRTVSIQMPAGKTPSGDTRVQFSSDQSHLLVVHETQLAIYDASKMERIYQWIPQDTLSASISHASYSCNSQLVFAAFTDGNLGVFDAENLRLRCRIAPSVINRSIRSVIELTQGFRQLGCLFCLCNPPVHPLVVAAHPHEPNQFAVGLSDGSVKVLEPLESEGKWGAPAPADNGIIPNGKTPASSATSNPAADQIQR

SEQ ID NO: 173807 - protein, 1131 aa, Zea Mays
MSSLSRELVFLILQFLDEEKFKETVHKLEQESGFFFNMKYFEEKVHAGEWDEVERYLSGFTKVDDNRYSMKIFFEIRKQKYLEALDRHDRAKAVDILVKDLKVFSTFNEELYKEITQLLTLENFRENEQLSKYGDTKSARSIMLVELKKLIEANPLFREKLVFPTLKASRLRTLINQSLNWQHQLCKNPRPNPDIKTLFTDHTCSPPNGARASPVSVPLAAVPKAGAAYPPLTAHTPFQPPPGPSLAGWMANAAASSSVQSAVVAAASIPVPPNQESEQLMKRLRPGGHGIDEATYPAPTPQPAWSVDDLPRTVACSLSHGSNVTSMDFHPTRHTLLLVGSANGEFTLYEIGLRETLLSKPFKIRDINACSPQFQNAVVKDSSISINQVTWSPDGEMIGVAFTKHLIHLHGYQPPNETRHLLEIEAHSGGVNDIAFSRPNKQLCVVTCGDDKLIKVWDMHGHKLFTFEGHEAPVYSICPHHKESIQFIFSTSLDGKIKAWLYDNMGSRVDYDAPGKWCTTMLYSADGTRLFSCGTSKEGDSYLVEWNESEGSIKRTYSGFRKRSAGVAGVVQFDTAQNHILAAGEDNHIKFWDVDNNNMLICTDAEGGLPALPRLRFNKEGNLLAVTTADNGFKILANADGLRTLRALGSRPPFEAFRPQYEASSMKVSGAPVVASISPNIGRMDHLDRNSPAKPSPILNGGDTASRSIDIKPRISEEKPDKAKPWELMEVLNPQQCHVATMPETPDQARKVVRLLYTNSGVGLLALGSNAIQRLWKWSRNEQNPSGKATASVVPHHWQPNSGLVMTNDTADTNPEEAVPCIALSKNDSYVMSACGGKVSLFNMMTFKVMTTFMPPPPASTFLAFHPQDNNIIAIGMEDSTIHIYNVRVDEVKTRLKGHQRRITGLAFSTNLGILVSSGADAQLCVWTNDTWEKKRTVSIQMPAGKTPSGDTRVQFSSDQSHLLVVHETQLAIYDASKMERIYQWIPQDTLSASISHASYSCNSQLVFAAFTDGNLGVFDAENLRLRCRIAPSVINRSIRSVIELTQGFRQLGCLFCLCNPPVHPLVVAAHPHEPNQFAVGLSDGSVKVLEPLESEGKWGAPAPADNGIIPNGKTPASSATSNPAADQIQR

SEQ ID NO: 173808 - protein, 1048 aa, Zea Mays
MSSLSRELVFLILQFLDEEKFKETVHKLEQESGFFFNMKYFEEKVHAGEWDEVERYLSGFTKVDDNRYSMKIFFEIRKQKYLEALDRHDRAKAVDILVKDLKVFSTFNEELYKEITQLLTLENFRENEQLSKYGDTKSARSIMLVELKKLIEANPLFREKLVFPTLKASRLRTLINQSLNWQHQLCKNPRPNPDIKTLFTDHTCSPPNGARASPVSVPLAAVPKAGAAYPPLTAHTPFQPPPGPSLAGWMANAAASSSVQSAVVAAASIPVPPNQESEQLMKRLRPGGHGIDEATYPAPTPQPAWSVDDLPRTVACSLSHGSNVTSMDFHPTRHTLLLVGSANGEFTLYEIGLRETLLSKPFKIRDINACSPQFQNAVVKDSSISINQVTWSPDGEMIGVAFTKHLIHLHGYQPPNETRHLLEIEAHSGGVNDIAFSRPNKQLCVVTCGDDKLIKVWDMHGHKLFTFEGHEAPVYSICPHHKESIQFIFSTSLDGKIKAWLYDNMGSRVDYDAPGKWCTTMLYSADGTRLFSCGTSKEGDSYLVEWNESEGSIKRTYSGFRKRSAGVAGVVQFDTAQNHILAAGEDNHIKFWDVDNNNMLICTDAEGGLPALPRLRFNKEGNLLAVTTADNGFKILANADGLRTLRALGSRPPFEAFRPQYEASSMKVSGAPVVASISPNIGRMDHLDRNSPAKPSPILNGGDTASRSIDIKPRISEEKPDKAKPWELMEVLNPQQCHVATMPETPDQARKVVRLLYTNSGVGLLALGSNAIQRLWKWSRNEQNPSGKATASVVPHHWQPNSGLVMTNDTADTNPEEAVPCIALSKNDSYVMSACGGKVSLFNMMTFKVMTTFMPPPPASTFLAFHPQDNNIIAIGMEDSTIHIYNVRVDEVKTRLKGHQRRITGLAFSTNLGILVSSGADAQWIPQDTLSASISHASYSCNSQLVFAAFTDGNLGVFDAENLRLRCRIAPSVINSNPPVHPLVVAAHPHEPNQFAVGLSDGSVKVLEPLESEGKWGAPAPADNGIIPNGKTPASSATSNPAADQIQR

SEQ ID NO: 173809 - protein, 1109 aa, Zea Mays
MSSLSRELVFLILQFLDEEKFKETVHKLEQESGFFFNMKYFEEKVHAGEWDEVERYLSGFTKVDDNRYSMKIFFEIRKQKYLEALDRHDRAKAVDILVKDLKVFSTFNEELYKEITQLLTLENFRENEQLSKYGDTKSARSIMLVELKKLIEANPLFREKLVFPTLKASRLRTLINQSLNWQHQLCKNPRPNPDIKTLFTDHTCSPPNGARASPVSVPLAAVPKAGAAYPPLTAHTPFQPPPGPSLAGWMANAAASSSVQSAVVAAASIPVPPNQESEQLMKRLRPGGHGIDEATYPAPTPQPAWSVDDLPRTVACSLSHGSNVTSMDFHPTRHTLLLVGSANGEFTLYEIGLRETLLSKPFKIRDINACSPQFQNAVVKDSSISINQVTWSPDGEMIGVAFTKHLIHLHGYQPPNETRHLLEIEAHSGGVNDIAFSRPNKQLCVVTCGDDKLIKVWDMHGHKLFTFEGHEAPVYSICPHHKESIQFIFSTSLDGKIKAWLYDNMGSRVDYDAPGKWCTTMLYSADGTRLFSCGTSKEGDSYLVEWNESEGSIKRTYSGFRKRSAGVAGVVQFDTAQNHILAAGEDNHIKFWDVDNNNMLICTDAEGGLPALPRLRFNKEGNLLAVTTADNGFKILANADGLRTLRALGSRPPFEAFRPQYEASSMKVSGAPVVASISPNIGRMDHLDRNSPAKPSPILNGGDTASRSIDIKPRISEEKPDKAKPWELMEVLNPQQCHVATMPETPDQARKVVRLLYTNSGVGLLALGSNAIQRLWKWSRNEQNPSGKATASVVPHHWQPNSGLVMTNDTADTNPEEAVPCIALSKNDSYVMSACGGKVSLFNMMTFKVMTTFMPPPPASTFLAFHPQDNNIIAIGMEDSTIHIYNVRVDEVKTRLKGHQRRITGLAFSTNLGILVSSGADAQLCVWTNDTWEKKRTVSIQMPAGKTPSGDTRVQFSSDQSHLLVVHETQLAIYDASKMERIYQWIPQDTLSASISHASYSCNSQLVFAAFTDGNLGVFDAENLRLRCRIAPSVINSNPPVHPLVVAAHPHEPNQFAVGLSDGSVKVLEPLESEGKWGAPAPADNGIIPNGKTPASSATSNPAADQIQR

SEQ ID NO: 173810 - protein, 83 aa, Zea Mays
MSFQDLEAGHVRGAPLGGGRRNGRGPAGAGGAGAGASQAVASGVFQINTAVATFQRLVNTLGTPKDTPDLRDRMLPKRLLMQS

SEQ ID NO: 173811 - protein, 62 aa, Zea Mays
MSACCRTRLDYLWYEFPRFHEKRFSICELRFLFSSWAMGTMLLGGDGGPSLFSSCLLLCGPS

SEQ ID NO: 173812 - protein, 83 aa, Zea Mays
MVKYLCVSLKWVQVLSSSPCCSLSFFVFFLLFENNRQEQFVLSTTVTFSTETLLGAFTVGVRFANNVHGGIQFIDGARMSSCQ

SEQ ID NO: 173813 - protein, 88 aa, Zea Mays
MHIYRWVRASAGSGRGSAVGVFLCIFFIASAEGSSCSSEEGQRRSRSTRVPDRWTSWTWPRAPCLLARRRWWVKATARSGEGLGETRK

SEQ ID NO: 173814 - protein, 127 aa, Zea Mays
MLPLSLLKTAQGHPMLVELKNGETYNGHLVNCDTWMNIHLREVICTSKDGDKFWRMPECYIRGNTIKYLRVPDEVIDKVQEETSKSRSDRKPPGVGRGRGRGDVGAKPGGRGIGRGQDDGGGGRGRG

SEQ ID NO: 173815 - protein, 130 aa, Zea Mays
MLPLSLLKTAQGHPMLVELKNGETYNGHLVNCDTWMNIHLREVICTSKDGDKFWRMPECYIRGNTIKYLRVPDEVIDKVQEETSKSRSDRKPPGVGRGRGRGDVGAKPGGRGIGRGQDDGGRGSGGRGRG

SEQ ID NO: 173816 - protein, 307 aa, Zea Mays
MKTGHCKFGATCKFHHPELGFLTETPGMYPPVQPPPISSSHPYPHLANWQMGRPPVVPGSFLPGSYPPMVLPHTVIPMQGWNPYVPPMNQVTPAGGQQAVPVGASYGLSHQGPTSAMTYGSHYAQLYSSSGTSSSNIQEYAFPERPGQPECEHYMKTGTCKYGAACKYHHPQYFSGPKSNCILSPLGLPLRPGSQPCAYYAHHGYCKFGPTCKFDHPMGTPNYSISTSSLTDVPIAPYPQSFPVTPMPSYLPSSDLRPQYTQVKDSSANPPPSPGTTYGPVGSISKVYAPHTLIRSPASAAAGMQAS

SEQ ID NO: 173817 - protein, 432 aa, Zea Mays
MEPPHTEEAAAAAAGGAEGGSASPGTGLEGPMLRLGLDGGGEGEDGELGAGEEADTWLPERPGEADCGYYLRTGACGFGERCRYNHPRDRGGTEFGGGAKNGAAQYFPERQGQPVCEGEKECSYYMKTGQCKFGSTCKFHHPEFGGIPVTPGIYPALQSASVPSPLTYASNWQMGRSPAVPGSYIAGSYTPMVLPSGMVPLQGWSPYPAPVNHVASGGAQQTIQAGPLYGIGHHGSSTAIAYGGTYLPYSSSTGQSSNNHQEHGFPERPGQPECQYYMRTGDCKFGTTCKYNHPQDWSTSKSNYMFSHLCLPLRPGAQPCTYYAQNGYCRYGIACKYDHPMGTLGYSSSALPLSDMPIAPYPMGFSVATLAPSPSSPEYISTKDPSINQVASPVAAPEPVGAILPKGVFPPDTIMRTQTSTSVGSSSPGGGR

SEQ ID NO: 173818 - protein, 241 aa, Zea Mays
MVLPSGMVPLQGWSPYPAPVNHVASGGAQQTIQAGPLYGIGHHGSSTAIAYGGTYLPYSSSTGQSSNNHQEHGFPERPGQPECQYYMRTGDCKFGTTCKYNHPQDWSTSKSNYMFSHLCLPLRPGAQPCTYYAQNGYCRYGIACKYDHPMGTLGYSSSALPLSDMPIAPYPMGFSVATLAPSPSSPEYISTKDPSINQVASPVAAPEPVGAILPKGVFPPDTIMRTQTSTSVGSSSPGGGR

SEQ ID NO: 173819 - protein, 468 aa, Zea Mays
MEPPHTEEAAAAAAGGAEGGSASPGTGLEGPMLRLGLDGGGEGEDGELGAGEEADTWLPERPGEADCGYYLRTGACGFGERCRYNHPRDRGGTEFGGGAKNGAAQYFPERQGQPYYLKTGTCKFGSNCKYHHPKQDGSVQSVILNNNGFPLRPGEKECSYYMKTGQCKFGSTCKFHHPEFGGIPVTPGIYPALQSASVPSPLTYASNWQMGRSPAVPGSYIAGSYTPMVLPSGMVPLQGWSPYPAPVNHVASGGAQQTIQAGPLYGIGHHGSSTAIAYGGTYLPYSSSTGQSSNNHQEHGFPERPGQPECQYYMRTGDCKFGTTCKYNHPQDWSTSKSNYMFSHLCLPLRPGAQPCTYYAQNGYCRYGIACKYDHPMGTLGYSSSALPLSDMPIAPYPMGFSVATLAPSPSSPEYISTKDPSINQVASPVAAPEPVGAILPKGVFPPDTIMRTQTSTSVGSSSPGGGR

SEQ ID NO: 173820 - protein, 102 aa, Zea Mays
MNKNRSSQPVCRHPSRTRTCARERIRGRTARARQKKERRRLTAVDQHKGRSSAATARAAAAVQVQLLLLLRSGAVGPGVKSVADPSVIGGRFPLDVWLASPN

SEQ ID NO: 173821 - protein, 574 aa, Zea Mays
MLKDALREKSDIFNSDNPEEDKVKLGEPGWRERYYEEKFGARTPEQIEEIRRDVVLKYTEGLCWVMHYYYEGVCSWQWFYPYHYAPFASDLSGLGQLNIKFELGTPFKPFDQLMGVFPAASAHALPLQYRRLMTDPNSPIIDFYPTDFEVDMNGKRYSWQGIAKLPFIDEDRLLAEIKKVEHTLTPEEARRNSIMCDMLFVNGSHPLSPYIYSLNSKFGHLPDKRRNEIKEKLDPSARLTKLNIVVVRQSLTPAIILYSGGMNGYITLCSGDPCPPIFRSPVDGLEDIMDNQVICSIYNLPDHHKHIAQPPVGVIMPKKIVEAGDLKPPPVLWHEDSGRRPHDNSNRQNPSGAISGRQLGEAAHRLVINSLNAQGRGQHSGTSMPYRTIMNGLHHLDVASPVSNQGMRPQVGQSAGPPGWYVPRGSVSNGQPPAYASSGSGHYQYESSGHSQYEQGNHGRQQSHPYARDGFHDTRGRVPPAYGYQQSNMYPSGPGLYGQPPSAYPGVHGGGYQPPPYGGGQQWQQQSYSSYAVRGPYGGRPPPTRADSGSQQPQNRYGALDRSNNRRPSSGYRR

SEQ ID NO: 173822 - protein, 492 aa, Zea Mays
MSYIRGQRNLSGFNPNTRHCLYGLDADLIMLALATHEVHFSILREVVYTPGQQDKCFLCGQVGHLAANCEGKVKRKAGEFDEKGGAIVPKKPYQFLNIWTLREYLEYEFRMPNPPFKIDFERIVDDFIFMCFFVGNDFLPHMPTLEIREGAINLLMAVYKKEFPSMGGYLTDSCTPDLSRVEHFIQAVGSYEDKIFQKRARLHQRQAERIKREKAQAKRGDDLDPHVRDDLIVPIQRFQGSRLASGAVPVPYEQNGSHKDNKERNSRARKAARVSTSGSSIASALVEAENDLEAQECENKEELKSMLKDALREKSDIFNSDNPEEDKVKLGEPGWRERYYEEKFGARTPEQIEEIRRDVVLKYTEGLCWVMHYYYEGVCSWQWFYPYHYAPFASDLSGLGQLNIKFELGTPFKPFDQLMGVFPAASAHALPLQYRRLMTDPNSPIIDFYPTDFEVDMNGKRYSWQGIAKLPFIDEDRLLAEIKKVEHTLTVW

SEQ ID NO: 173823 - protein, 509 aa, Zea Mays
MSYIRGQRNLSGFNPNTRHCLYGLDADLIMLALATHEVHFSILREVVYTPGQQDKCFLCGQVGHLAANCEGKVKRKAGEFDEKGGAIVPKKPYQFLNIWTLREYLEYEFRMPNPPFKIDFERIVDDFIFMCFFVGNDFLPHMPTLEIREGAINLLMAVYKKEFPSMGGYLTDSCTPDLSRVEHFIQAVGSYEDKIFQKRARLHQRQAERIKREKAQAKRGDDLDPHVRDDLIVPIQRFQGSRLASGAVPVPYEQNGSHKDNKERNSRARKAARVSTSGSSIASALVEAENDLEAQECENKEELKSMLKDALREKSDIFNSDNPEEDKVKLGEPGWRERYYEEKFGARTPEQIEEIRRDVVLKYTEGLCWVMHYYYEGVCSWQWFYPYHYAPFASDLSGLGQLNIKFELGTPFKPFDQLMGVFPAASAHALPLQYRRLMTDPNSPIIDFYPTDFEVDMNGKRYSWQGIAKLPFIDEDRLLAEIKKVEHTLTWRNEWIHNTLQWGSMPSYL

SEQ ID NO: 173824 - protein, 369 aa, Zea Mays
MGVPAFYRWLAEKYPMVVVDVVEEEPVEIEGVKVPVDTSKPNPNSLEFDNLYLDMNGIIHPCFHPEDRPSPTTFGEVFQCMFDYIDRLFVMVRPRRLLYMAIDGVAPRAKMNQQRSRRFRAAKDAADAAAEEERLREEFEREGRKLPPKQQSQTCDSNVITPGTEFMAVLSVALQYYIHRRLNYDPGWKQIKVILSDANVPGEGEHKIMSYIRGQRNLSGFNPNTRHCLYGLDADLIMLALATHEVHFSILREVVYTPGQQDKCFLCGQVGHLAANCEGKVKRKAGEFDEKGGAIVPKKPYQFLNIWTLREYLEYEFRMPNPPFKIDFERIVDDFIFMCFFVGNDFLPHMPTLEIRECTRRNFPQWVDI

SEQ ID NO: 173825 - protein, 384 aa, Zea Mays
MGVPAFYRWLAEKYPMVVVDVVEEEPVEIEGVKVPVDTSKPNPNSLEFDNLYLDMNGIIHPCFHPEDRPSPTTFGEVFQCMFDYIDRLFVMVRPRRLLYMAIDGVAPRAKMNQQRSRRFRAAKDAADAAAEEERLREEFEREGRKLPPKQQSQTCDSNVITPGTEFMAVLSVALQYYIHRRLNYDPGWKQIKVILSDANVPGEGEHKIMSYIRGQRNLSGFNPNTRHCLYGLDADLIMLALATHEVHFSILREVVYTPGQQDKCFLCGQVGHLAANCEGKVKRKAGEFDEKGGAIVPKKPYQFLNIWTLREYLEYEFRMPNPPFKIDFERIVDDFIFMCFFVGNDFLPHMPTLEIREGAINLLMAVYKKEFPSMGGYLTDSCTS

SEQ ID NO: 173826 - protein, 676 aa, Zea Mays
MGVPAFYRWLAEKYPMVVVDVVEEEPVEIEGVKVPVDTSKPNPNSLEFDNLYLDMNGIIHPCFHPEDRPSPTTFGEVFQCMFDYIDRLFVMVRPRRLLYMAIDGVAPRAKMNQQRSRRFRAAKDAADAAAEEERLREEFEREGRKLPPKQQSQTCDSNVITPGTEFMAVLSVALQYYIHRRLNYDPGWKQIKVILSDANVPGEGEHKIMSYIRGQRNLSGFNPNTRHCLYGLDADLIMLALATHEVGHLAANCEGKVKRKAGEFDEKGGAIVPKKPYQFLNIWTLREYLEYEFRMPNPPFKIDFERIVDDFIFMCFFVGNDFLPHMPTLEIREGAINLLMAVYKKEFPSMGGYLTDSCTPDLSRVEHFIQAVGSYEDKIFQKRARLHQRQAERIKREKAQAKRGDDLDPHVRDDLIVPIQRFQGSRLASGAVPVPYEQNGSHKDNKERNSRARKAARVSTSGSSIASALVEAENDLEAQECENKEELKSMLKDALREKSDIFNSDNPEEDKVKLGEPGWRERYYEEKFGARTPEQIEEIRRDVVLKYTEGLCWVMHYYYEGVCSWQWFYPYHYAPFASDLSGLGQLNIKFELGTPFKPFDQLMGVFPAASAHALPLQYRRLMTDPNSPIIDFYPTDFEVDMNGKRYSWQGIAKLPFIDEDRLLAEIKKVEHTLTVW

SEQ ID NO: 173827 - protein, 313 aa, Zea Mays
MNGYITLCSGDPCPPIFRSPVDGLEDIMDNQVICSIYNLPDHHKHIAQPPVGVIMPKKIVEAGDLKPPPVLWHEDSGRRPHDNSNRQNPSGAISGRQLGEAAHRLVINSLNAQGRGQHSGTSMPYRTIMNGLHHLDVASPVSNQGMRPQVGQSAGPPGWYVPRGSVSNGQPPAYASSGSGHYQYESSGHSQYEQGNHGRQQSHPYARDGFHDTRGRVPPAYGYQQSNMYPSGPGLYGQPPSAYPGVHGGGYQPPPYGGGQQWQQQSYSSYAVRGPYGGRPPPTRADSGSQQPQNRYGALDRSNNRRPSSGYRR

SEQ ID NO: 173828 - protein, 478 aa, Zea Mays
MKGFYPYHYAPFASDLSGLGQLNIKFELGTPFKPFDQLMGVFPAASAHALPLQYRRLMTDPNSPIIDFYPTDFEVDMNGKRYSWQGIAKLPFIDEDRLLAEIKKVEHTLTPEEARRNSIMCDMLFVNGSHPLSPYIYSLNSKFGHLPDKRRNEIKEKLDPSASGGMNGYITLCSGDPCPPIFRSPVDGLEDIMDNQVICSIYNLPDHHKHIAQPPVGVIMPKKIVEAGDLKPPPVLWHEDSGRRPHDNSNRQNPSGAISGRQLGEAAHRLVINSLNAQGRGQHSGTSMPYRTIMNGLHHLDVASPVSNQGMRPQVGQSAGPPGWYVPRGSVSNGQPPAYASSGSGHYQYESSGHSQYEQGNHGRQQSHPYARDGFHDTRGRVPPAYGYQQSNMYPSGPGLYGQPPSAYPGVHGGGYQPPPYGGGQQWQQQSYSSYAVRGPYGGRPPPTRADSGSQQPQNRYGALDRSNNRRPSSGYRR

SEQ ID NO: 173829 - protein, 700 aa, Zea Mays
MGVPAFYRWLAEKYPMVVVDVVEEEPVEIEGVKVPVDTSKPNPNSLEFDNLYLDMNGIIHPCFHPEDRPSPTTFGEVFQCMFDYIDRLFVMVRPRRLLYMAIDGVAPRAKMNQQRSRRFRAAKDAADAAAEEERLREEFEREGRKLPPKQQSQTCDSNVITPGTEFMAVLSVALQYYIHRRLNYDPGWKQIKVILSDANVPGEGEHKIMSYIRGQRNLSGFNPNTRHCLYGLDADLIMLALATHEVHFSILREVVYTPGQQDKCFLCGQVGHLAANCEGKVKRKAGEFDEKGGAIVPKKPYQFLNIWTLREYLEYEFRMPNPPFKIDFERIVDDFIFMCFFVGNDFLPHMPTLEIREGAINLLMAVYKKEFPSMGGYLTDSCTPDLSRVEHFIQAVGSYEDKIFQKRARLHQRQAERIKREKAQAKRGDDLDPHVRDDLIVPIQRFQGSRLASGAVPVPYEQNGSHKDNKERNSRARKAARVSTSGSSIASALVEAENDLEAQECENKEELKSMLKDALREKSDIFNSDNPEEDKVKLGEPGWRERYYEEKFGARTPEQIEEIRRDVVLKYTEGLCWVMHYYYEGVCSWQWFYPYHYAPFASDLSGLGQLNIKFELGTPFKPFDQLMGVFPAASAHALPLQYRRLMTDPNSPIIDFYPTDFEVDMNGKRYSWQGIAKLPFIDEDRLLAEIKKVEHTLTVW

SEQ ID NO: 173830 - protein, 858 aa, Zea Mays
MSYIRGQRNLSGFNPNTRHCLYGLDADLIMLALATHEVHFSILREVVYTPGQQDKCFLCGQVGHLAANCEGKVKRKAGEFDEKGGAIVPKKPYQFLNIWTLREYLEYEFRMPNPPFKIDFERIVDDFIFMCFFVGNDFLPHMPTLEIREGAINLLMAVYKKEFPSMGGYLTDSCTPDLSRVEHFIQAVGSYEDKIFQKRARLHQRQAERIKREKAQAKRGDDLDPHVRDDLIVPIQRFQGSRLASGAVPVPYEQNGSHKDNKERNSRARKAARVSTSGSSIASALVEAENDLEAQECENKEELKSMLKDALREKSDIFNSDNPEEDKVKLGEPGWRERYYEEKFGARTPEQIEEIRRDVVLKYTEGLCWVMHYYYEGVCSWQWFYPYHYAPFASDLSGLGQLNIKFELGTPFKPFDQLMGVFPAASAHALPLQYRRLMTDPNSPIIDFYPTDFEVDMNGKRYSWQGIAKLPFIDEDRLLAEIKKVEHTLTPEEARRNSIMCDMLFVNGSHPLSPYIYSLNSKFGHLPDKRRNEIKEKLDPSASGGMNGYITLCSGDPCPPIFRSPVDGLEDIMDNQVICSIYNLPDHHKHIAQPPVGVIMPKKIVEAGDLKPPPVLWHEDSGRRPHDNSNRQNPSGAISGRQLGEAAHRLVINSLNAQGRGQHSGTSMPYRTIMNGLHHLDVASPVSNQGMRPQVGQSAGPPGWYVPRGSVSNGQPPAYASSGSGHYQYESSGHSQYEQGNHGRQQSHPYARDGFHDTRGRVPPAYGYQQSNMYPSGPGLYGQPPSAYPGVHGGGYQPPPYGGGQQWQQQSYSSYAVRGPYGGRPPPTRADSGSQQPQNRYGALDRSNNRRPSSGYRR

SEQ ID NO: 173831 - protein, 760 aa, Zea Mays
MGVPAFYRWLAEKYPMVVVDVVEEEPVEIEGVKVPVDTSKPNPNSLEFDNLYLDMNGIIHPCFHPEDRPSPTTFGEVFQCMFDYIDRLFVMVRPRRLLYMAIDGVAPRAKMNQQRSRRFRAAKDAADAAAEEERLREEFEREGRKLPPKQQSQTCDSNVITPGTEFMAVLSVALQYYIHRRLNYDPGWKQIKVILSDANVPGEGEHKIMSYIRGQRNLSGFNPNTRHCLYGLDADLIMLALATHEVHFSILREVVYTPGQQDKCFLCGQVGHLAANCEGKVKRKAGEFDEKGGAIVPKKPYQFLNIWTLREYLEYEFRMPNPPFKIDFERIVDDFIFMCFFVGNDFLPHMPTLEIREGAINLLMAVYKKEFPSMGGYLTDSCTPDLSRVEHFIQAVGSYEDKIFQKRARLHQRQAERIKREKAQAKRGDDLDPHVRDDLIVPIQRFQGSRLASGAVPVPYEQNGSHKDNKERNSRARKAARVSTSGSSIASALVEAENDLEAQECENKEELKSMLKDALREKSDIFNSDNPEEDKVKLGEPGWRERYYEEKFGARTPEQIEEIRRDVVLKYTEGLCWVMHYYYEGVCSWQWFYPYHYAPFASDLSGLGQLNIKFELGTPFKPFDQLMGVFPAASAHALPLQYRRLMTDPNSPIIDFYPTDFEVDMNGKRYSWQGIAKLPFIDEDRLLAEIKKVEHTLTPEEARRNSIMCDMLFVNGSHPLSPYIYSLNSKFGHLPDKRRNEIKEKLDPSASKRALNQFVC

SEQ ID NO: 173832 - protein, 688 aa, Zea Mays
MGVPAFYRWLAEKYPMVVVDVVEEEPVEIEGVKVPVDTSKPNPNSLEFDNLYLDMNGIIHPCFHPEDRPSPTTFGEVFQCMFDYIDRLFVMVRPRRLLYMAIDGVAPRAKMNQQRSRRFRAAKDAADAAAEEERLREEFEREGRKLPPKQQSQTCDSNVITPGTEFMAVLSVALQYYIHRRLNYDPGWKQIKVILSDANVPGEGEHKIMSYIRGQRNLSGFNPNTRHCLYGLDADLIMLALATHEVHFSILREVVYTPGQQDKCFLCGQVGHLAANCEGKVKRKAGEFDEKGGAIVPKKPYQFLNIWTLREYLEYEFRMPNPPFKIDFERIVDDFIFMCFFVGNDFLPHMPTLEIREGAINLLMAVYKKEFPSMGGYLTDSCTPDLSRVEHFIQAVGSYEDKIFQKRARLHQRQAERIKREKAQAKRGDDLDPHVRDDLIVPIQRFQGSRLASGAVPVPYEQNGSHKDNKERNSRARKAARVSTSGSSIASALVEAENDLEAQECENKEELKSMLKDALREKSDIFNSDNPEEDKVKLGEPGWRERYYEEKFGARTPEQIEEIRRDVVLKYTEGLCWVMHYYYEGVCSWQWFYPYHYAPFASDLSGLGQLNIKFELGTPFKPFDQLMGVFPAASAHALPLQYRRLMTDPNSPIIDFYPTDFEVDMNGKRYSWGLQNYRLLMKIVCWLR

SEQ ID NO: 173833 - protein, 359 aa, Zea Mays
MCDMLFVNGSHPLSPYIYSLNSKFGHLPDKRRNEIKEKLDPSASGGMNGYITLCSGDPCPPIFRSPVDGLEDIMDNQVICSIYNLPDHHKHIAQPPVGVIMPKKIVEAGDLKPPPVLWHEDSGRRPHDNSNRQNPSGAISGRQLGEAAHRLVINSLNAQGRGQHSGTSMPYRTIMNGLHHLDVASPVSNQGMRPQVGQSAGPPGWYVPRGSVSNGQPPAYASSGSGHYQYESSGHSQYEQGNHGRQQSHPYARDGFHDTRGRVPPAYGYQQSNMYPSGPGLYGQPPSAYPGVHGGGYQPPPYGGGQQWQQQSYSSYAVRGPYGGRPPPTRADSGSQQPQNRYGALDRSNNRRPSSGYRR

SEQ ID NO: 173834 - protein, 1087 aa, Zea Mays
MGVPAFYRWLAEKYPMVVVDVVEEEPVEIEGVKVPVDTSKPNPNSLEFDNLYLDMNGIIHPCFHPEDRPSPTTFGEVFQCMFDYIDRLFVMVRPRRLLYMAIDGVAPRAKMNQQRSRRFRAAKDAADAAAEEERLREEFEREGRKLPPKQQSQTCDSNVITPGTEFMAVLSVALQYYIHRRLNYDPGWKQIKVILSDANVPGEGEHKIMSYIRGQRNLSGFNPNTRHCLYGLDADLIMLALATHEVHFSILREVVYTPGQQDKCFLCGQVGHLAANCEGKVKRKAGEFDEKGGAIVPKKPYQFLNIWTLREYLEYEFRMPNPPFKIDFERIVDDFIFMCFFVGNDFLPHMPTLEIREGAINLLMAVYKKEFPSMGGYLTDSCTPDLSRVEHFIQAVGSYEDKIFQKRARLHQRQAERIKREKAQAKRGDDLDPHVRDDLIVPIQRFQGSRLASGAVPVPYEQNGSHKDNKERNSRARKAARVSTSGSSIASALVEAENDLEAQECENKEELKSMLKDALREKSDIFNSDNPEEDKVKLGEPGWRERYYEEKFGARTPEQIEEIRRDVVLKYTEGLCWVMHYYYEGVCSWQWFYPYHYAPFASDLSGLGQLNIKFELGTPFKPFDQLMGVFPAASAHALPLQYRRLMTDPNSPIIDFYPTDFEVDMNGKRYSWQGIAKLPFIDEDRLLAEIKKVEHTLTPEEARRNSIMCDMLFVNGSHPLSPYIYSLNSKFGHLPDKRRNEIKEKLDPSARLTKLNIVVVRQSLTPAIILYSGGMNGYITLCSGDPCPPIFRSPVDGLEDIMDNQVICSIYNLPDHHKHIAQPPVGVIMPKKIVEAGDLKPPPVLWHEDSGRRPHDNSNRQNPSGAISGRQLGEAAHRLVINSLNAQGRGQHSGTSMPYRTIMNGLHHLDVASPVSNQGMRPQVGQSAGPPGWYVPRGSVSNGQPPAYASSGSGHYQYESSGHSQYEQGNHGRQQSHPYARDGFHDTRGRVPPAYGYQQSNMYPSGPGLYGQPPSAYPGVHGGGYQPPPYGGGQQWQQQSYSSYAVRGPYGGRPPPTRADSGSQQPQNRYGALDRSNNRRPSSGYRR

SEQ ID NO: 173835 - protein, 306 aa, Zea Mays
MCGDPCPPIFRSPVDGLEDIMDNQVICSIYNLPDHHKHIAQPPVGVIMPKKIVEAGDLKPPPVLWHEDSGRRPHDNSNRQNPSGAISGRQLGEAAHRLVINSLNAQGRGQHSGTSMPYRTIMNGLHHLDVASPVSNQGMRPQVGQSAGPPGWYVPRGSVSNGQPPAYASSGSGHYQYESSGHSQYEQGNHGRQQSHPYARDGFHDTRGRVPPAYGYQQSNMYPSGPGLYGQPPSAYPGVHGGGYQPPPYGGGQQWQQQSYSSYAVRGPYGGRPPPTRADSGSQQPQNRYGALDRSNNRRPSSGYRR

SEQ ID NO: 173836 - protein, 843 aa, Zea Mays
MLCEHLTEHGSAGNIVQSLPDTLSSLMGLNKYLAPRTSYIESVSHIIEELSPTKPKMKVMVHTAQNICSDDTDSDAEAAKVQEELVLLDGKLKQITLQRRQSLNNYLDLKGNIRVFCRVRPFHHEENYQSRTLYTLDESNIFLKVAETKIKQYKFDKVFNQCSTQGDVFAEVEPVIKSALDGYNVCIFAYGQTGSGKTYTMEGKPTDLGVIPRGIQALFDRTSESNRRFLFTFSMLEIYMGNLRDLLVPRGKAQGFKKVPSLSIKTDPDGGIEIENLVAVTVSSFHEVKRLYEVGTHFRSTASTMANSTSSRSHCLIRISLTSFDAPERKRARNKLWMIDLGGSERLVKTKATGKRLKEGKAINLSLSALADVIDALQTKKSHIPYRNSKLTQILKDSIGCESKTLMLVHIRPNEDDLCESICTLGFATRVRSIRLENEEPQEVKARKEHLLMELEKEISDLEQECEGIVRKIKKLKETMEHFKGHQPSAEANFDISHPSSEELKTVMPKNTKDSKNRRDVSSRLPRFMKPTASSQHRIDLNKQIPVSNKTKPPVPPKRRPSSVYAESVRLPVNAATWQSECSSECSISMTSDMNWIPSIQDGTECSQDTSEYETKQVIFSEHEKPPQSQVISFEESGEMQDKTKEMGIIDIDSWIHQQIIENTGICQCHTERTLDVIEVNEYETYNSNTASPVQKEFTNGSKPSLDEDSNLNLCPPTQNTEDSKETRAVNQFTKTELYTPPLKELCGSAKIKEHKNEKLGRHGSCRRSLQEELGNCKPEQPDKEPKADPNMQPEIEFHDNKHHIGKLTKFIQALRTAWIGALLGLGTMNLGLEQDFFKSLTL

SEQ ID NO: 173837 - protein, 116 aa, Zea Mays
MTMPVERSESIRNNLNRANLRFSSLERDARKGASLNMYLILGIESSSSAVDIKKAYRKAALRHHPDKASNFLVRSENISDAVWRDITNEIRRDADYLFKIIGKAYAMLSDPTTRRE

SEQ ID NO: 173838 - protein, 1001 aa, Zea Mays
MDPAPDQLSISASAPFPTIPAASSPRPRAARTRRHAAPFRSDHPTAGSWRSGIDLPRRPSASAFSQQERYPSVASWSASRDANFVFGSGVAGAPEMRRSFSSGSGEASLAELSYAVHRFALDGSGRPSDIDAPGGEGTLPVTDSGGRFGARGCSSTLYEGFSLDSIHHQTEHLDEERGVPSQTIQCESVGMRSLASPTRTDENAPIEFAKRGDSLPIQDSVDQSRNSGHDANAHHDFFVFGGHAGSNSFATNATQTNTSKVHSADKETVTCNSEQLNTSVSKDGNCIKFILQDAKHVFGSSDNDLPGSEPCEISTTVETPDTITSSFGSEDGIVTVSSIKVPCNIEVVPASELVECQPFDEKSFTFDDQNVPYRNKGGVKGMGMNRGAFMPNKSSANQASFESVSRSGHCSKKVSPEEKLNLKEASSSLQTTESGHAEAEFTSAANTEHSGQSDFIFSASTFHQSMLHPQRRHNKKKSGGMGNHASSIQSLPSSAIGLACSEVSGSQQCVDLAAKWTEYNKIEPNRVAISRGARCSTSENFGDHDNCETWRLRGNQAYAEGLLTKAEECYTHGIDSFSPNEVSRKALMLCYSNRAATRMSLGKMRDALSDCQEAIDIDSSFLKAHARAANCLLALGDVEEAQKAFEMCLKSNHLSSLDHKIVEEASDGLQKAKKISGLISHSEEYLIKKAFDKIPSALQMISDALSISIYSDKLMEMKAEALLLLQRYEEVIRFCEETLYVAERNSVCLCLDKQSESNNMVNNTCFVKLWRYHLIAKSYFFLGKLEEANQFLKKNDQIKVMGCRCGNQSQDSILSFSMAISELLRLKAAGNEAFQSGKYLEAVEHYTAALMSNSESLRFLAVCFCNRAAAYQAMGQILDAIADCSLAIALDADYAKAISRRSSLYELIRDYGQAANDLRRLIALLEKQLQEDMTMPVERSESIRNNLNRANLRFSSLERDARKGASLNMYLILGIESSSSAVDIKKAYRKAALRHHPDKGC

SEQ ID NO: 173839 - protein, 898 aa, Zea Mays
MDPAPDQLSISASAPFPTIPAASSPRPRAARTRRHAAPFRSDHPTAGSWRSGIDLPRRPSASAFSQQERYPSVASWSASRDANFVFGSGVAGAPEMRRSFSSGSGEASLAELSYAVHRFALDGSGRPSDIDAPGGEGTLPVTDSGGRFGARGCSSTLYEGFSLDSIHHQTEHLDEERGVPSQTIQCESVGMRSLASPTRTDENAPIEFAKRGDSLPIQDSVDQSRNSGHDANAHHDFFVFGGHAGSNSFATNATQTNTSKVHSADKETVTCNSEQLNTSVSKDGNCIKFILQDAKHVFGSSDNDLPGSEPCEISTTVETPDTITSSFGSEDGIVTVSSIKVPCNIEVVPASELVECQPFDEKSFTFDDQNVPYRNKGGVKGMGMNRGAFMPNKSSANQASFESVSRSGHCSKKVSPEEKLNLKEASSSLQTTESGHAEAEFTSAANTEHSGQSDFIFSASTFHQSMLHPQRRHNKKKSGGMGNHASSIQSLPSSAIGLACSEVSGSQQCVDLAAKWTEYNKIEPNRVAISRGARCSTSENFGDHDNCETWRLRGNQAYAEGLLTKAEECYTHGIDSFSPNEVSRKALMLCYSNRAATRMSLGKMRDALSDCQEAIDIDSSFLKAHARAANCLLALGDVEEAQKAFEMCLKSNHLSSLDHKIVEEASDGLQKAKKISGLISHSEEYLIKKAFDKIPSALQMISDALSISIYSDKLMEMKAEALLLLQRYEEVIRFCEETLYVAERNSVCLCLDKQSESNNMVNNTCFVKLWRYHLIAKSYFFLGKLEEANQFLKKNDQIKVMGCRCGNQSQDSILSFSMAISELLRLKAAGNEAFQSGKYLEAVEHYTAALMSNSESLRFLAVCFCNRAAAYQAMGQILDAIADCSLAIALDADYAKKV

SEQ ID NO: 173840 - protein, 675 aa, Zea Mays
MDPAPDQLSISASAPFPTIPAASSPRPRAARTRRHAAPFRSDHPTAGSWRSGIDLPRRPSASAFSQQERYPSVASWSASRDANFVFGSGVAGAPEMRRSFSSGSGEASLAELSYAVHRFALDGSGRPSDIDAPGGEGTLPVTDSGGRFGARGCSSTLYEGFSLDSIHHQTEHLDEERGVPSQTIQCESVGMRSLASPTRTDENAPIEFAKRGDSLPIQDSVDQSRNSGHDANAHHDFFVFGGHAGSNSFATNATQTNTSKVHSADKETVTCNSEQLNTSVSKDGNCIKFILQDAKHVFGSSDNDLPGSEPCEISTTVETPDTITSSFGSEDGIVTVSSIKVPCNIEVVPASELVECQPFDEKSFTFDDQNVPYRNKGGVKGMGMNRGAFMPNKSSANQASFESVSRSGHCSKKVSPEEKLNLKEASSSLQTTESGHAEAEFTSAANTEHSGQSDFIFSASTFHQSMLHPQRRHNKKKSGGMGNHASSIQSLPSSAIGLACSEVSGSQQCVDLAAKWTEYNKIEPNRVAISRGARCSTSENFGDHDNCETWRLRGNQAYAEGLLTKAEECYTHGIDSFSPNEVSRKALMLCYSNRAATRMSLGKMRDALSDCQEAIDIDSSFLKAHARAANCLLALGDVEEAQKAFEMCLKSNHLSSLDHKIVEEASDGLQKAKIS

SEQ ID NO: 173841 - protein, 986 aa, Zea Mays
MDPAPDQLSISASAPFPTIPAASSPRPRAARTRRHAAPFRSDHPTAGSWRSGIDLPRRPSASAFSQQERYPSVASWSASRDANFVFGSGVAGAPEMRRSFSSGSGEASLAELSYAVHRFALDGSGRPSDIDAPGGEGTLPVTDSGGRFGARGCSSTLYEGFSLDSIHHQTEHLDEERGVPSQTIQCESVGMRSLASPTRTDENAPIEFAKRGDSLPIQDSVDQSRNSGHDANAHHDFFVFGGHAGSNSFATNATQTNTSKVHSADKETVTCNSEQLNTSVSKDGNCIKFILQDAKHVFGSSDNDLPGSEPCEISTTVETPDTITSSFGSEDGIVTVSSIKVPCNIEVVPASELVECQPFDEKSFTFDDQNVPYRNKGGVKGMGMNRGAFMPNKSSANQASFESVSRSGHCSKKVSPEEKLNLKEASSSLQTTESGHAEAEFTSAANTEHSGQSDFIFSASTFHQSMLHPQRRHNKKKSGGMGNHASSIQSLPSSAIGLACSEVSGSQQCVDLAAKWTEYNKIEPNRVAISRGARCSTSENFGDHDNCETWRLRGNQAYAEGLLTKAEECYTHGIDSFSPNEVSRKALMLCYSNRAATRMSLGKMRDALSDCQEAIDIDSSFLKAHARAANCLLALGDVEEAQKAFEMCLKSNHLSSLDHKIVEEASDGLQKAKKISGLISHSEEYLIKKAFDKIPSALQMISDALSISIYSDKLMEMKAEALLLLQRYEEVIRFCEETLYVAERNSVCLCLDKQSESNNMVNNTCFVKLWRYHLIAKSYFFLGKLEEANQFLKKNDQIKVMGCRTLARCGNQSQDSILSFSMAISELLRLKAAGNEAFQSGKYLEAVEHYTAALMSNSESLRFLAVCFCNRAAAYQAMGQILDAIADCSLAIALDADYAKAISRRSSLYELIRDYGQAANDLRRLIALLEKQLQEDMTMPVERSESIRNNLNRANLRFSSLERDARKGASLNMYLILEGNDNLEVE

SEQ ID NO: 173842 - protein, 979 aa, Zea Mays
MDPAPDQLSISASAPFPTIPAASSPRPRAARTRRHAAPFRSDHPTAGSWRSGIDLPRRPSASAFSQQERYPSVASWSASRDANFVFGSGVAGAPEMRRSFSSGSGEASLAELSYAVHRFALDGSGRPSDIDAPGGEGTLPVTDSGGRFGARGCSSTLYEGFSLDSIHHQTEHLDEERGVPSQTIQCESVGMRSLASPTRTDENAPIEFAKRGDSLPIQDSVDQSRNSGHDANAHHDFFVFGGHAGSNSFATNATQTNTSKVHSADKETVTCNSEQLNTSVSKDGNCIKFILQDAKHVFGSSDNDLPGSEPCEISTTVETPDTITSSFGSEDGIVTVSSIKVPCNIEVVPASELVECQPFDEKSFTFDDQNVPYRNKGGVKGMGMNRGAFMPNKSSANQASFESVSRSGHCSKKVSPEEKLNLKEASSSLQTTESGHAEAEFTSAANTEHSGQSDFIFSASTFHQSMLHPQRRHNKKKSGGMGNHASSIQSLPSSAIGLACSEVSGSQQCVDLAAKWTEYNKIEPNRVAISRGARCSTSENFGDHDNCETWRLRGNQAYAEGLLTKAEECYTHGIDSFSPNEVSRKALMLCYSNRAATRMSLGKMRDALSDCQEAIDIDSSFLKAHARAANCLLALGDVEEAQKAFEMCLKSNHLSSLDHKIVEEASDGLQKAKKISGLISHSEEYLIKKAFDKIPSALQMISDALSISIYSDKLMEMKAEALLLLQRYEEVIRFCEETLYVAERNSVCLCLDKQSESNNMVNNTCFVKLWRYHLIAKSYFFLGKLEEANQFLKKNDQIKVMGCRCGNQSQDSILSFSMAISELLRLKAAGNEAFQSGKYLEAVEHYTAALMSNSESLRFLAVCFCNRAAAYQAMGQILDAIADCSLAIALDADYAKAISRRSSLYELIRDYGQAANDLRRLIALLEKQLQEDMTMPVERSESIRNNLNRANLRFSSLERDARKGASLNMYLIFSYATGQ

SEQ ID NO: 173843 - protein, 1020 aa, Zea Mays
MDPAPDQLSISASAPFPTIPAASSPRPRAARTRRHAAPFRSDHPTAGSWRSGIDLPRRPSASAFSQQERYPSVASWSASRDANFVFGSGVAGAPEMRRSFSSGSGEASLAELSYAVHRFALDGSGRPSDIDAPGGEGTLPVTDSGGRFGARGCSSTLYEGFSLDSIHHQTEHLDEERGVPSQTIQCESVGMRSLASPTRTDENAPIEFAKRGDSLPIQDSVDQSRNSGHDANAHHDFFVFGGHAGSNSFATNATQTNTSKFILQDAKHVFGSSDNDLPGSEPCEISTTVETPDTITSSFGSEDGIVTVSSIKVPCNIEVVPASELVECQPFDEKSFTFDDQNVPYRNKGGVKGMGMNRGAFMPNKSSANQASFESVSRSGHCSKKVSPEEKLNLKEASSSLQTTESGHAEAEFTSAANTEHSGQSDFIFSASTFHQSMLHPQRRHNKKKSGGMGNHASSIQSLPSSAIGLACSEVSGSQQCVDLAAKWTEYNKIEPNRVAISRGARCSTSENFGDHDNCETWRLRGNQAYAEGLLTKAEECYTHGIDSFSPNEVSRKALMLCYSNRAATRMSLGKMRDALSDCQEAIDIDSSFLKAHARAANCLLALGDVEEAQKAFEMCLKSNHLSSLDHKIVEEASDGLQKAKKISGLISHSEEYLIKKAFDKIPSALQMISDALSISIYSDKLMEMKAEALLLLQRYEEVIRFCEETLYVAERNSVCLCLDKQSESNNMVNNTCFVKLWRYHLIAKSYFFLGKLEEANQFLKKNDQIKVMGCRCGNQSQDSILSFSMAISELLRLKAAGNEAFQSGKYLEAVEHYTAALMSNSESLRFLAVCFCNRAAAYQAMGQILDAIADCSLAIALDADYAKAISRRSSLYELIRDYGQAANDLRRLIALLEKQLQEDMTMPVERSESIRNNLNRANLRFSSLERDARKGASLNMYLILGIESSSSAVDIKKAYRKAALRHHPDKASNFLVRSENISDAVWRDITNEIRRDADYLFKIIGKAYAMLSDPTTRRE

SEQ ID NO: 173844 - protein, 1016 aa, Zea Mays
MDPAPDQLSISASAPFPTIPAASSPRPRAARTRRHAAPFRSDHPTAGSWRSGIDLPRRPSASAFSQQERYPSVASWSASRDANFVFGSGVAGAPEMRRSFSSGSGEASLAELSYAVHRFALDGSGRPSDIDAPGGEGTLPVTDSGGRFGARGCSSTLYEGFSLDSIHHQTEHLDEERGVPSQTIQCESVGMRSLASPTRTDENAPIEFAKRGDSLPIQDSVDQSRNSGHDANAHHDFFVFGGHAGSNSFATNATQTNTSKDAKHVFGSSDNDLPGSEPCEISTTVETPDTITSSFGSEDGIVTVSSIKVPCNIEVVPASELVECQPFDEKSFTFDDQNVPYRNKGGVKGMGMNRGAFMPNKSSANQASFESVSRSGHCSKKVSPEEKLNLKEASSSLQTTESGHAEAEFTSAANTEHSGQSDFIFSASTFHQSMLHPQRRHNKKKSGGMGNHASSIQSLPSSAIGLACSEVSGSQQCVDLAAKWTEYNKIEPNRVAISRGARCSTSENFGDHDNCETWRLRGNQAYAEGLLTKAEECYTHGIDSFSPNEVSRKALMLCYSNRAATRMSLGKMRDALSDCQEAIDIDSSFLKAHARAANCLLALGDVEEAQKAFEMCLKSNHLSSLDHKIVEEASDGLQKAKKISGLISHSEEYLIKKAFDKIPSALQMISDALSISIYSDKLMEMKAEALLLLQRYEEVIRFCEETLYVAERNSVCLCLDKQSESNNMVNNTCFVKLWRYHLIAKSYFFLGKLEEANQFLKKNDQIKVMGCRCGNQSQDSILSFSMAISELLRLKAAGNEAFQSGKYLEAVEHYTAALMSNSESLRFLAVCFCNRAAAYQAMGQILDAIADCSLAIALDADYAKAISRRSSLYELIRDYGQAANDLRRLIALLEKQLQEDMTMPVERSESIRNNLNRANLRFSSLERDARKGASLNMYLILGIESSSSAVDIKKAYRKAALRHHPDKASNFLVRSENISDAVWRDITNEIRRDADYLFKIIGKAYAMLSDPTTRRE

SEQ ID NO: 173845 - protein, 502 aa, Zea Mays
MRMLPLNLQREGTACPFKILWIKVEILDMMLMPTMISLFLVDMLGPIASLPMQLKLIPFILQDAKHVFGSSDNDLPGSEPCEISTTVETPDTITSSFGSEDGIVTVSSIKVPCNIEVVPASELVECQPFDEKSFTFDDQNVPYRNKGGVKGMGMNRGAFMPNKSSANQASFESVSRSGHCSKKVSPEEKLNLKEASSSLQTTESGHAEAEFTSAANTEHSGQSDFIFSASTFHQSMLHPQRRHNKKKSGGMGNHASSIQSLPSSAIGLACSEVSGSQQCVDLAAKWTEYNKIEPNRVAISRGARCSTSENFGDHDNCETWRLRGNQAYAEGLLTKAEECYTHGIDSFSPNEVSRKALMLCYSNRAATRMSLGKMRDALSDCQEAIDIDSSFLKAHARAANCLLALGDVEEAQKAFEMCLKSNHLSSLDHKIVEEASDGLQKAKKISGLISHSEEYLIKKAFDKIPSALQMISDALSISIYSDKLMEMKAEALLLVCIYVAAI

SEQ ID NO: 173846 - protein, 160 aa, Zea Mays
MEAAAAAFLSPPRVALDVRTLFSPPRCLPVSPSSQLRLAARPRALAGAKPRFLSPHREPAVDGGRGARDVVAMVVPFLRGAAWEQPPPDLASFLYKNRIVYLGMCLVPSVTELMLAEFLYLQYDDAEKPIYMYINSTGTTKNGEKLGYETEALAVYDAMR

SEQ ID NO: 173847 - protein, 157 aa, Zea Mays
MYSSFPSCCKEVRTVWGFHYPIKILSSKLSTITLSPMQVNNTIYYNSTSTIAPKRLTQMATNRAQGRAQLLFFLYIRAGSKAVIPWSHVTLIIFGHSILSQRPGGKHTEFFTLHQILLDSSSCREGHWGTPIATRQWLRQSPGFFRRCPLGPRHAVL

SEQ ID NO: 173848 - protein, 290 aa, Zea Mays
MERLQRIFGASGMGQPPTDSPLLDSSEQVYISSLALLKMLKHGRAGVPMEVMGLMLGEFVDDYTVRAVDHVFQTNMLDMLKQTGRPEMVVGWYHSHPGFGCWLSGVDINTQQSFEALNPRAVAVVIDPIQSVKGKVVIDAFRLINPQTMMLGQEPRQTTSNVGHLNKPSIQALIHGLNRHYYSIAINYRKNELEEKMLLNLHKKKWTDGLILKRFDTHSKTNEQTVQEMLNLAIKYNKAVQEEDELPPEKLAIANVGRQDAKKHLEEHVSNLMSSNIVQTLGTMLDTVVF

SEQ ID NO: 173849 - protein, 173 aa, Zea Mays
MGNNSTMSTEMEWLETLAADLTKHMDKVQEHLAKVDVCLGNMKQGGSKNEIATAAKEKLECEAVTKQLEVETKHAIDQARRAFLKEETARSLTVLELVEEVANCTTHNIIDINFAKPANLAEQRIQTIKLVNSGNEIARQEACLNTWLHINTKTFQIDVIFDMPWLVDHGNII

SEQ ID NO: 173850 - protein, 151 aa, Zea Mays
MLDMSRYGLEPPPMNKRNDVGAWRQALRNAQSQLQHQIIRIENLELMLKYGVDVWKLQNRQMESVLSRMQKMAVEYNERIENVNRERKFHQQNTGGQLHALKMEWQELCQKNIAIQAACVDLQNHIDQLKLEAKELGMPMDDNSGTDPQAS

SEQ ID NO: 173851 - protein, 214 aa, Zea Mays
MFHTSTIDNPFQPQGTDMIFVGGPYWDVPLGRRDSLGASIQGSNNDIPAPNNTLPTIITKFKRQGLNVVDVVALSGGHTIGMSRCTSFRQRLYNQTGNGMADSTLDVSYAAKLRQGCPRSGGDNNLFPLDFITPAKFDNFYYKNLLAGKGLLSSDEILLTKSAETAALVKAYAADVNLFFQHFAQSMVNMGNISPLTGSQGEIRKNCRRLNNDH

SEQ ID NO: 173852 - protein, 230 aa, Zea Mays
MCRVIVELAIRCVKSGPRVFKGFTVGFHPRSSEIVYNGFTQPGFEQPHHGFSFQTEQIHVSLYLSAKSSLSGLVGKPTFKVNPVKGLGVTLAGSGFNDAMPSTLSPTVLNVDWRCEIVRTSPYEVHIFIPVEGYDPIEFTLTKKCGYRQEKESDPMKGWAKFGIVSCVFIVLSCILCCGGFIYKTRTLHLYGLDALPGIAVLSALLDAVGRPRGYLPAVNPNENHASHAS

SEQ ID NO: 173853 - protein, 183 aa, Zea Mays
MHNGDLVHCETTFHKMGRTAQVNIICGHCSNKVCKDEQGCICNISYHERMCRVIVELAIRCVKSGPRVFKGFTVGFHPRSSEIVYNGFTQPGFEQPHHGFSFQTEQIHVSLYLSAKSSLSGLVGKPTFKVNPVKGLGVTLAGSGFNDAMPSTLSPTVLNVDWRCEIVRTSPYEVTDKKKRVIP

SEQ ID NO: 173854 - protein, 269 aa, Zea Mays
MHNGDLVHCETTFHKMGRTAQVNIICGHCSNKVCKDEQGCICNISYHERMCRVIVELAIRCVKSGPRVFKGFTVYNGFTQPGFEQPHHGFSFQTEQIHVSLYLSAKSSLSGLVGKPTFKVNPVKGLGVTLAGSGFNDAMPSTLSPTVLNVDWRCEIVRTSPYEVHIFIPVEGYDPIEFTLTKKCGYRQEKESDPMKGWAKFGIVSCVFIVLSCILCCGGFIYKTRTLHLYGLDALPGIAVLSALLDAVGRPRGYLPAVNPNENHASHAS

SEQ ID NO: 173855 - protein, 292 aa, Zea Mays
MAFCTMYTIHLSVIVLLAVTYMHVPVTAIIVVPTSNCYTFDNESRLVDFTHLIGNVFEYKEQGSPRSDLVVEFCKDVQKRSQEGYLEFGRFVSPHSFLTGSGPIDYIQKMHNGDLVHCETTFHKMGRTAQVNIICGHCSNKVCKDEQGCICNISYHERMCRVIVELAIRCVKSGPRVFKGFTVGFHPRSSEIVYNGFTQPGFEQPHHGFSFQTEQIHVSLYLSAKSSLSGLVGKPTFKVNPVKGLGVTLAGSGFNDAMPSTLSPTVLNVDWRCEIVRTSPYEVTDKKKRVIP

SEQ ID NO: 173856 - protein, 103 aa, Zea Mays
MKFFHVALLSSFQTHLIGNVFEYKEQGSPRSDLVVEFCKDVQKRSQERTHFPGWSRPLRARRSAVQHLLREASQMKNLHLGGAQLFHILSPGSNSTEPAKKRW

SEQ ID NO: 173857 - protein, 139 aa, Zea Mays
MAFCTMYTIHLSVIVLLAVTYMHVPVTAIIVVPTSNCYTFDNESRLVDFTHLIGNVFEYKEQGSPRSDLVVEFCKDVQKRSQERTHFPGWSRPLRARRSAVQHLLREASQMKNLHLGGAQLFHILSPGSNSTEPAKKRW

SEQ ID NO: 173858 - protein, 71 aa, Zea Mays
MTGSRNRVREPAVAVVNNKAGRWPASVTGEGASDAQAAHVALLLTEPPSPSPSPSSYKGSPPYKLKPAAAL

SEQ ID NO: 173859 - protein, 161 aa, Zea Mays
MVLNCWSLWQIFLCTFLVRTGNPQPSTLLAPTKVPSTVGQSMDLLLVLKFDRGIHDISCSLIPFVSCSLVHCYDIFAPFAGNDRPTMEWPTRLKIALCAAKGLAHLHEDCHPKIIHRDIKASNILLDFKFEYKVADFGLAKFTTNNNTHVSTRVMGTFGFL

SEQ ID NO: 173860 - protein, 133 aa, Zea Mays
MVLNCWSLWQIFLCTFLVRTGNPQPSTLLAPTKVPSTVGQSMDLLLVLKFDRGIHDISCSLIPFVSCSLVHCYDIFAPFAGNDRPTMEWPTRLKIALCAAKGLAHLHEDCHPKIIHRDIKASNILLDFKFEGC

SEQ ID NO: 173861 - protein, 70 aa, Zea Mays
MRMAMKRHRKYWQILSGLKHSRLILSTVLYHLGLQLIHSSLQALLLLLVNVLIKISTLKNLIQRQFLTVC

SEQ ID NO: 173862 - protein, 103 aa, Zea Mays
MSIRCARKIFNVVDDDPAPRAEVFAFATSLIQRRYPDMITETIDAKPAGLDYQEMIVPAEKRVSNARMKQELGVNLLHPTYRSGLQSILDAWQIQPPLPNTSQ

SEQ ID NO: 173863 - protein, 1011 aa, Zea Mays
MAQEEEALMLLRAAPLRRSPPVGSAPPPPPAGSAPPPPPGRIQLQEGKVFVQLGAKEQRDPRSWICDTGATNHMTGSRAAFADLDTAVSGSVRFGDDSMAEIEGRGTVLFKCKNGEHRSFTGVYYIPRLTANIVSLGQLEEADYDVHLWRGGMEIREPEGRLLARIPRAGNRLYVLNVDVARPVCLAARGEESAWRWHARLGHINMPALRKMAREELVRGLPSIEQVDQLCEACLAGKQRRTAFPDQTQWRADRALELVHGDLCGPVTPATPSGNTYFLLLVDDRSRYMWLTLLRSKDRAAAAIKEFQARAEAESSCKLLALRTDRGGEFTSKEFMEYCAADGVHRQLTAPYSPQQNGVVERRNAMVAGTARCLLKAKGLPAWFWGEAVNTAVYLLNRVPTKAVEGKTPFEAWYGKKPAVHHLKTFGCIVYVKNTTPHLKKMEDRGRKMIFVGYERGSKAYRAYDPATKRVHVTRDVVFDESAQWDWSEGAKTGTGADHGGDDTFTIQFQVVAGPGGAQAGAPVAALQHMTPPGTPGEAGVASPGVQFATPPAALDEDLDTDHDDNAPLRFRTVEDVTGAASPPGYAVRVLYSEQLFAVSAEEPGSLAHAGQDPCWRRAMEEELRAIEDNHTWTLTELPSGQRAIGLKWVFKVKKDEHGAVVRHKARLVAKGYAQRQGIDYDEVFAPVARLEAVRLLLALAAQEGWQVHHMDVKTAFLNGDLQEEVYVQQAPGFAQPGQEHKKLNPTVPLKKPSLATSARSVSSSIRGSADKPASIKPAPPVARHGSATQRHNNVPPPKVPTIADVPSRAPALVSCTGLVSPGRSGDSVSSDETMSTCDSMKSPDFEYVDNQDTSMLASLQRRTSEHLRISEDRDVEENKRKKNAVAPMEIDRICDVDSEYEDPQLCATLASDIYMHLREAETKKRPSTDFMETIQKDVNPSMRAILIDWLVEVAEEYRLVPDTLYLTVNYIDRYLSGNEISRQRLQLLGVACMLIAAKYEEICAPQVEEF

SEQ ID NO: 173864 - protein, 313 aa, Zea Mays
MARPSMAFLFSKESSLVFAPWQISCLCLLCSLLLSSTYTSLVHLKLNPTVPLKKPSLATSARSVSSSIRGSADKPASIKPAPPVARHGSATQRHNNVPPPKVPTIADVPSRAPALVSCTGLVSPGRSGDSVSSDETMSTCDSMKSPDFEYVDNQDTSMLASLQRRTSEHLRISEDRDVEENKRKKNAVAPMEIDRICDVDSEYEDPQLCATLASDIYMHLREAETKKRPSTDFMETIQKDVNPSMRAILIDWLVEVAEEYRLVPDTLYLTVNYIDRYLSGNEISRQRLQLLGVACMLIAAKYEEICAPQVEEF

SEQ ID NO: 173865 - protein, 260 aa, Zea Mays
MSTIAASRRSSSSSSSATAKRPAIADGPGGPKATAAQAKKRVALGNITNVAARGGRASVGGSLGNVMAPTSSAKLNPTVPLKKPSLATSARSVSSSIRGSADKPASIKPAPPVARHGSATQRHNNVPPPKVPTIADVPSRAPALVSCTGLVSPGRSGDSVSSDETMSTCDSMKSPDFEYVDNQDTSMLASLQRRTSEHLRISEDRDVEENKRKKNAVAPMEIDRICDVDSEYEDPQLCATLASDIYMHLREAEDEEKTVN

SEQ ID NO: 173866 - protein, 162 aa, Zea Mays
MSTIAASRRSSSSSSSATAKRPAIADGPGGPKATAAQAKKRVALGNITNVAARGGRASVGGSLGNVMAPTSSATKKRPSTDFMETIQKDVNPSMRAILIDWLVEVAEEYRLVPDTLYLTVNYIDRYLSGNEISRQRLQLLGVACMLIAAKYEEICAPQVEEF

SEQ ID NO: 173867 - protein, 342 aa, Zea Mays
MSTIAASRRSSSSSSSATAKRPAIADGPGGPKATAAQAKKRVALGNITNVAARGGRASVGGSLGNVMAPTSSAKLNPTVPLKKPSLATSARSVSSSIRGSADKPASIKPAPPVARHGSATQRHNNVPPPKVPTIADVPSRAPALVSCTGLVSPGRSGDSVSSDETMSTCDSMKSPDFEYVDNQDTSMLASLQRRTSEHLRISEDRDVEENKRKKNAVAPMEIDRICDVDSEYEDPQLCATLASDIYMHLREAETKKRPSTDFMETIQKDVNPSMRAILIDWLVEVAEEYRLVPDTLYLTVNYIDRYLSGNEISRQRLQLLGVACMLIAAKYEEICAPQVEEF

SEQ ID NO: 173868 - protein, 180 aa, Zea Mays
MTSKSLLVETLRTLKCAFWPFQSDQSSSLFLNAVAANQRGPGTLGDNQARSYGNTSAIEMAAAKAAQHRLMRGVWTNARFGDMRRALAACERLILLHHDPHELRDYAALLYHCGYYEDCLHYLSLYQTAKSGKSPTNRLEILEDEAVNTLKARLMLILAEDGWSRCRPVARYWTKNSEPW

SEQ ID NO: 173869 - protein, 81 aa, Zea Mays
MVVGPGSEICESSLGVSDFVPLDLDPAAVGVYWFVWYNNLITAVKGRSIGRNRLIPCRHGMFANKPLRFSENNLQSWHQSP

SEQ ID NO: 173870 - protein, 81 aa, Zea Mays
MWGQLRRISIYLPSTDSRACDRFFPIGAIAGQVPLLAIRSTRAQPPSARGIRPTSPSFVHPFVVRHCREESEREKEIEVRE

SEQ ID NO: 173871 - protein, 92 aa, Zea Mays
MAEMIKEIERIHGVVTMLKNLLGGRGRGRDNGWRNGDGPKWDGGDNWNATNPPSNQPWSSSGGTKSYGQNQPSTWNNSEDNKPSVGERLFLQ

SEQ ID NO: 173872 - protein, 82 aa, Zea Mays
MKLEILVDIGDGEEEEGGNMEDEEEAETMVGEMVMDQNGMVEIIGTLQIHQVISLGVAVEAPSHMVKISLPLGIIQRITNHL

SEQ ID NO: 173873 - protein, 83 aa, Zea Mays
MLIRGRVSYTSPIPPFNVVSVESSTSYSEQGHTDERRDDMDFSHSSIRFCALIMVWSLGSGTSLDVVAAAIQILEIYFVHING

SEQ ID NO: 173874 - protein, 226 aa, Zea Mays
MFGLYLLYYFRVFERQIGSNKYSVFCLFTITASSLLEILSLVILKDTNYISTLASGPYGLIFASFVPFFLDIPITSRFRIFGLNFSDKSFIYLAGFQLLLSSWKRSLIPGIFGLVAGSLYRLNVLGIRKMKLPQVISSFFARYFAPSPGSTSRPSRSLVGNTPSHRGRAVQNQPSTGFAPIVEPPESSVAMLVSMGFDGNNARQALVRARNDINVATNILLEAQSH

SEQ ID NO: 173875 - protein, 665 aa, Zea Mays
MALLLRPIPPPPRLRALLGRLLSTGASLFPSRMLPAPRSTAAVPRLLFGPSAVAAAATRRNGVRVRAFMASTTASEAMHEKQVSAEYTAANVQVLEALDGVRTRPGMYIGSTGPRGLHHLVYEILDNAVDEAQAGHASKIDVVLHDDNSVSVTDNGRGIPTDMHPQTKKSCVETVLTLMHAGGKFGGSKSGYSVSGGLHGVGLSVVNALSETLEVTVWRDGKEHRQSYSRGKPTTRLTSSTLTGETSSRQGTRIRFWPDKDIFTTTIDFDFNTISSRIRELAFLNPELTIILTKEEGHTVQRNEYCYAGGLVEYVKWLNTDKKPLHDPIAFRKELDGITVDVSLQWSSDSYSDTVLGYANSIRTIDGGTHIDGLKASLTRTINNLAKKSKTIKDKDITLSGEHVREGMTCIISVKVPSPEFEGQTKTRLGNPEVRRIVEQSVQENLTEYLELHPDVLDSILSKSLNALKAALAAKRARELVRTKSVLKSSSLPGKLADCASANPEESEIFIVEGDSAGGSAKQGRDRRFQAILPLRGKILNIERRDEAAMYKNEEIQNLILALGLGVKGEDFKKEALRYHKIVILTDADVDGAHIRTLLLTFFFRYQRALFDEGCIYVGVPPLYKVERGKLAHYCYDDADLKEIVNTFPANASYHIQRFKGTFNY

SEQ ID NO: 173876 - protein, 691 aa, Zea Mays
MALLLRPIPPPPRLRALLGRLLSTGASLFPSRMLPAPRSTAAVPRLLFGPSAVAAAATRRNGVRVRAFMASTTASEAMHEKQVSAEYTAANVQVLEALDGVRTRPGMYIGSTGPRGLHHLVYEILDNAVDEAQAGHASKIDVVLHDDNSVSVTDNGRGIPTDMHPQTKKSCVETVLTLMHAGGKFGGSKSGYSVSGGLHGVGLSVVNALSETLEVTVWRDGKEHRQSYSRGKPTTRLTSSTLTGETSSRQGTRIRFWPDKDIFTTTIDFDFNTISSRIRELAFLNPEKPLHDPIAFRKELDGITVDVSLQWSSDSYSDTVLGYANSIRTIDGGTHIDGLKASLTRTINNLAKKSKTIKDKDITLSGEHVREGMTCIISVKVPSPEFEGQTKTRLGNPEVRRIVEQSVQENLTEYLELHPDVLDSILSKSLNALKAALAAKRARELVRTKSVLKSSSLPGKLADCASANPEESEIFIVEGDSAGGSAKQGRDRRFQAILPLRGKILNIERRDEAAMYKNEEIQNLILALGLGVKGEDFKKEALRYHKIVILTDADVDGAHIRTLLLTFFFRYQRALFDEGCIYVGVPPLYKVERGKLAHYCYDDADLKEIVNTFPANASYHIQRFKGLGEMMPAQLWETTMDPERRLLKQLRVEDAAEANVVFSSLMGTRVEYRKELIQKAASMINIDQLDI

SEQ ID NO: 173877 - protein, 59 aa, Zea Mays
MEYLMWRNKRKNSTNLRLVSALKAGGRVCFIAVRKEQWQSGRTAADQWQFQILNVFRFC

SEQ ID NO: 173878 - protein, 490 aa, Zea Mays
MSVLSDVLQRSNYDAEPMLKACGITIARNFTEVDGRVLQPPKLTAGNGEDIFTRNGRWNFNNKRLIRACSVEKWAVVNFSARCNVRDLVRDLIKCGGMKGIMVDAPFAVFDENPSMRRSPAIRRVEDMFEQVKTKLPGAPKFLLCVLAERKNSDIYGPWKKKCLAEFGIVTQCVAPTRVNDQYLTNVLLKINAKLGGMNSLLQIETSPAIPLVSKVPTIILGMDVSHGSPGHSDVPSIAAVVSSREWPLISKYRASVRTQSPKMEMIDSLFKPREAEDDGLIRECLIDFYTSSGKRKPDQVIIFRDGVSESQFNQVLNIELQQIIEACKFLDEKWNPKFTLIIAQKNHHTKFFIPGKPDNVPPGTVVDNKVCHPKNFDFYMCAHAGMIGTTRPTHYHILHDEIGFSPDDLQELVHSLSYVYQRSTTAISVVAPICYAHLAAAQVGQFIKFDEMSETSSSHGGHTSAGSVPVQELPRLHEKEGSSWYDVKC

SEQ ID NO: 173879 - protein, 62 aa, Zea Mays
MGLGKRENQVYVIDFGLAKKYRDTSTHQHIPYRENKNLTGTARYAIVNTHLGIGRFNSIGGS

SEQ ID NO: 173880 - protein, 122 aa, Zea Mays
MGSSVSQASAPPPPPPTYASTPPSFVHAAADVAAPPPKPHEEEATEEKVDYLNLPCPVPYEEIQREAFMTLKPDLFEGMRFDFTKMITPYFALTHRRCSWGGSHMMGGRTSVSSTILRTTFL

SEQ ID NO: 173881 - protein, 250 aa, Zea Mays
MVARGDLGMEIPIEKIFFAQKVMIFKCNIQGKPVVTATQMLESMIKSPRPTRAEATDVANAVLDGTDCVMLSGETAAGAYPELAVQTMAKICLQAESCVDHAAIFKSIMASAPIPMSPLESLASSAVRTANSARAALILVLTRGGTTARLVAKYRPSMPILSVVVPELKTDSFDWACSDEGPARHSLIVRGVIPMLSAATAKAFDNEATDEAIGFAIENAKTMGLCNTDQSVVALHRIGISSVIKLLTVK

SEQ ID NO: 173882 - protein, 507 aa, Zea Mays
MRRLLGGSLVLCIAAVVESKPPLDSLGIPPQDEAYYIGGVIKCRDGSGRFSRDQLNDDFCDCPDGTDEPGTSACPEAKFYCKNAGHTPVTIFSSRVNDGICDCCDGSDEYDSNVTCKNTCWEAGKVAREKLKKKIATYENGVVIRKQEVERAKEAFAKDEADLAKLKGEEKMLQGLVDKLKEQKKLIENAEEEERLRKEKEEKRTKEEDEKQAAVEKGALDASRDVDSKEIHDHLQEGENKHDGHATGHDNHVTESRASIEQHGSVSKDGISVEGGTVDELPQESAAPTIEKDSSPDNPEGLSREELGRMVASRWTGESVTEVSKDDKKGHEDQQEIPEPAEEALEDELEIPEPAEENYGGYHSEVEDDRRKYEDEEFYHESEDEYVDDHDEHVESYKSDDDQKDLTEPGHASWLDKVQQTVQNVFQKFNSFKTPVDLSEASHVRKEYDDASSKLSKIQSKISSLAEKLKHDFGILTRSVHIRKHHRLKGTVLPTWGGGTNLKIRTE

SEQ ID NO: 173883 - protein, 309 aa, Zea Mays
MRRLLGGSLVLCIAAVVESKPPLDSLGIPPQDEAYYIGGVIKCRDGSGRFSRDQLNDDFCDCPDGTDEPGTSACPEAKFYCKNAGHTPVTIFSSRVNDGICDCCDGSDEYDSNVTCKNTCWEAGKVAREKLKKKIATYENGVVIRKQEVERAKEAFAKDEADLAKLKGEEKMLQGLVDKLKEQKKLIENAEEEERLRKEKEEKRTKEEDEKQAAVEKGALDASRDVDSKEIHDHLQEGENKHDGHATGHDNHVTESRASIEQHGSVSKDGISVEGGTVDELPQESAAPTIEKGRVRSYGGFSLDWGKCN

SEQ ID NO: 173884 - protein, 293 aa, Zea Mays
MRRLLGGSLVLCIAAVVESKPPLDSLGIPPQDEAYYIGGVIKCRDGSGRFSRDQLNDDFCDCPDGTDEPGTSACPEAKFYCKNAGHTPVTIFSSRVNDGICDCCDGSDEYDSNVTCKNTCWEAGKVAREKLKKKIATYENGVVIRKQEVERAKEAFAKDEADLAKLKGEEKMLQGLVDKLKEQKKLIENAEEEERLRKEKEEKRTKEEDEKQAAVEKGALDASRDVDSKEIHDHLQEGENKHDGHATGHDNHVTESRASIEQHGSVSKDGISVEGGTVDELPQESAAPTIEKS

SEQ ID NO: 173885 - protein, 504 aa, Zea Mays
MRRLLGGSLVLCIAAVVESKPPLDSLGIPPQDEAYYIGGVIKCRDGSGRFSRDQLNDDFCDCPDGTDEPGTSACPEAKFYCKNAGHTPVTIFSSRVNDGICDCCDGSDEYDSNVTCKNTCWEAGKVAREKLKKKIATYENGVVIRKQEVERAKEAFAKDEADLAKLKGEEKMLQGLVDKLKEQKKLIENAEEEERLRKEKEEKRTKEEDEKQAAVEKGALDASRDVDSKEIHDHLQEGENKHDGHATGHDNHVTESRASIEQHGSVSKDGISVEGGTVDELPQESAAPTIEKDSSPDNPEGLSREELGRMVASRWTGESVTEVSKDDKKGHEDQQEIPEPAEEALEDELEIPEPAEENYGGYHSEVEDDRRKYEDEEFYHESEDEYVDDHDEHVESYKSDDDQKDLTEPGHASWLDKVQQTVQNVFQKFNSFKTPVDLSEASHVRKEYDDASSKLSKIQSKISSLAEKLKHDFGNDKEFYSFYDQCFETKEGKYVYVYLQGLCI

SEQ ID NO: 173886 - protein, 1111 aa, Zea Mays
MASERPLLIATTPGASTPDDAPSPHPPAASLLPPAQSEPPLRADRLAFSVEIPDPFRSYRRGDGPAADPSASLERERDVGDDESREVIVGESSPEFSGNAIRTAKYSFLTFLPRNLFEQFRRLSYVYFLAITVLNQLPQVAVFGRGASVLPLAFVLFVTAVKDAYEDFRRHRSDRQENNRLATVLALGTAGEFQPKRWKHIRVGDVVRIESNETLPADMVLLATSDPTGVAHVQTVNLDGETNLKTRYAKQETHVMFSQNGGVGGVLHCERPNRNIYGFQANLEIDGKRVSLGPSNIVLRGCELKNTTWAIGVVVYAGKETKVMLNSSGAPSKRSRLETQLNRETVILSIMLIGMCTTASVLAGIWLLNHRRELEFTQFFREKDYTTGKNYNYYGVGMQIFITFLMAVIVYQVIIPISLYISMELVRLGQAYFMGADKDLYDESSRSKFQCRALNINEDLGQIRYVFSDKTGTLTENKMVFQCASIRGVDYNSGKDTGGYSVVVGDHLWTPKMSVKIDPELVKLLRDGGSNEEPKLVLEFLLALASCNTIVPLVLDTRDSKQKLIDYQGESPDEQALAYAAASYGIVLVERTSGYIVIDVLGDRQRFDILGLHEFDSDRKRMSVIVGCPDKTVKLYVKGADSSVFGITNNSSELDIVRATEAHLHKYSSLGLRTLVVGMRKLSQSEFEEWQLAYENASTAVLGRGNLLRSVAANIEINVNILGATGIEDKLQDGVPEAIESIRQADIKVWILTGDKQETAISIGYSCKLLTNDMTQIVINNNSKESCQRSLVEALATTKKLRAASSIGTQGPLLASETSNVTLALIVDGNSLVYILETDLQDELFKLATECSVVLCCRVAPLQKAGIVALIKNRTNDMTLAIGDGANDVSMIQMADVGIGISGQEGRQAVMASDFSMGQFRFLVPLLLVHGHWNYQRMAYMILYNFYKNAMFVLVLFWYVLYTAFTLTTAITEWSSLLYTVLYTSLPTIVVGILDKDLNKATLIAYPKLYGSGQRDDKYNVNLFVLNMLEALWQSLVVFYLPYFAYRRSTIDMSSLGDLWALAPVIVVNMQLAMDIIRWNWIIHAFVWGTIAATTVCLFVIDSIWVLPGYG

SEQ ID NO: 173887 - protein, 957 aa, Zea Mays
MASERPLLIATTPGASTPDDAPSPHPPAASLLPPAQSEPPLRADRLAFSVEIPDPFRSYRRGDGPAADPSASLERERDVGDDESREVIVGESSPEFSGNAIRTAKYSFLTFLPRNLFEQFRRLSYVYFLAITVLNQLPQVAVFGRGASVLPLAFVLFVTAVKDAYEDFRRHRSDRQENNRLATVLALGTAGEFQPKRWKHIRVGDVVRIESNETLPADMVLLATSDPTGVAHVQTVNLDGETNLKTRYAKQETHVMFSQNGGVGGVLHCERPNRNIYGFQANLEIDGKRVSLGPSNIVLRGCELKNTTWAIGVVVYAGKETKVMLNSSGAPSKRSRLETQLNRETVILSIMLIGMCTTASVLAGIWLLNHRRELEFTQFFREKDYTTGKNYNYYGVGMQIFITFLMAVIVYQVIIPISLYISMELVRLGQAYFMGADKDLYDESSRSKFQCRALNINEDLGQIRYVFSDKTGTLTENKMVFQCASIRGVDYNSGKDTGGYSVVVGDHLWTPKMSVKIDPELVKLLRDGGSNEEPKLVLEFLLALASCNTIVPLVLDTRDSKQKLIDYQGESPDEQALAYAAASYGIVLVERTSGYIVIDVLGDRQRFDILGLHEFDSDRKRMSVIVGCPDKTVKLYVKGADSSVFGITNNSSELDIVRATEAHLHKYSSLGLRTLVVGMRKLSQSEFEEWQLAYENASTAVLGRGNLLRSVAANIEINVNILGATGIEDKLQDGVPEAIESIRQADIKVWILTGDKQETAISIGYSCKLLTNDMTQIVINNNSKESCQRSLVEALATTKKLRAASSIGTQGPLLASETSNVTLALIVDGNSLVYILETDLQDELFKLATECSVVLCCRVAPLQKAGIVALIKNRTNDMTLAIGDGANDVSMIQMADVGIGISGQEGRQAVMASDFSMGQFRFLVPLLLVHGHWNYQRMAYMILYNFYKNAMFVLVLF

SEQ ID NO: 173888 - protein, 55 aa, Zea Mays
MNVCELTAHPRCTHIPSGQEQVPQDEAYEGCCDEFVGGLGRRLSVNFGCWIVVIV

SEQ ID NO: 173889 - protein, 357 aa, Zea Mays
MMDAYREMLTYIKSAVTRNYSEKCINNIMDFVSGSASQNFTLLQEFYQTTLKALEEAKNERLWFKTNLKLCKIWFDIGEYGRMSKILKELHKSCQREDGSDDQKKGTQLLEVYAIEIQMYTETKNNKKLKELYQRALSIKSAIPHPRIMGIIRECGGKMHMAERQWAEAATDFFEAFKNYDEAGNPRRIQCLKYLVLANMLMESEVNPFDGQEAKPYKNDPEILAMTNLIAAYQKNDIMEFEKILKSNRRTIMDDPFIRNYIEDLLKNIRTQVLLKLIKPYTRIRIPFISQELNFPEKDVEQLLVSLILDNRIQGHIDQVNKLLERGERSKGMRKYNAIDKWNTQLKSIYQTLSNRV

SEQ ID NO: 173890 - protein, 385 aa, Zea Mays
MEPEKAEWGFKALKQTVKLYYKLGKYKEMMDAYREMLTYIKSAVTRNYSEKCINNIMDFVSGSASQNFTLLQEFYQTTLKALEEAKNERLWFKTNLKLCKIWFDIGEYGRMSKILKELHKSCQREDGSDDQKKGTQLLEVYAIEIQMYTETKNNKKLKELYQRALSIKSAIPHPRIMGIIRECGGKMHMAERQWAEAATDFFEAFKNYDEAGNPRRIQCLKYLVLANMLMESEVNPFDGQEAKPYKNDPEILAMTNLIAAYQKNDIMEFEKILKSNRRTIMDDPFIRNYIEDLLKNIRTQVLLKLIKPYTRIRIPFISQELNFPEKDVEQLLVSLILDNRIQGHIDQVNKLLERGERSKGMRKYNAIDKWNTQLKSIYQTLSNRV

SEQ ID NO: 173891 - protein, 239 aa, Zea Mays
MYTETKNNKKLKELYQRALSIKSAIPHPRIMGIIRECGGKMHMAERQWAEAATDFFEAFKNYDEAGNPRRIQCLKYLVLANMLMESEVNPFDGQEAKPYKNDPEILAMTNLIAAYQKNDIMEFEKILKSNRRTIMDDPFIRNYIEDLLKNIRTQVLLKLIKPYTRIRIPFISQELNFPEKDVEQLLVSLILDNRIQGHIDQVNKLLERGERSKGMRKYNAIDKWNTQLKSIYQTLSNRV

SEQ ID NO: 173892 - protein, 272 aa, Zea Mays
MGSDADMEDYGFEYSDEEPEEQDVDIENQYYNSKGLVETDPEGALAGFDQVVSMEPEKAEWGFKALKQTVKLYYKLGKYKEMMDAYREMLTYIKSAVTRNYSEKCINNIMDFVSGSASQNFTLLQEFYQTTLKALEEAKNERLWFKTNLKLCKIWFDIGEYGRMSKILKELHKSCQREDGSDDQKKGTQLLEVYAIEIQMYTETKNNKKLKELYQRALSIKSAIPHPRIMGIIRECGGKMHMAERQWAEAATDFFEAFKNYDEADILSLPIC

SEQ ID NO: 173893 - protein, 337 aa, Zea Mays
MGSDADMEDYGFEYSDEEPEEQDVDIENQYYNSKGLVETDPEGALAGFDQVVSMEPEKAEWGFKALKQTVKLYYKLGKYKEMMDAYREMLTYIKSAVTRNYSEKCINNIMDFVSGSASQNFTLLQEFYQTTLKALEEAKNERLWFKTNLKLCKIWFDIGEYGRMSKILKELHKSCQREDGSDDQKKGTQLLEVYAIEIQMYTETKNNKKLKELYQRALSIKSAIPHPRIMGIIRECGGKMHMAERQWAEAATDFFEAFKNYDEAGNPRRIQCLKYLVLANMLMESEVNPFDGQEAKPYKNDPEILAMTNLIAAYQKNDIMEFEKILKKNNNGRSFYP

SEQ ID NO: 173894 - protein, 444 aa, Zea Mays
MSGGESGPAAAAAAVPLLQAPEGRTTKYYEGCPGCRLDEANKTRTGVPYLNFFYIWVVCLAAALPVQSLFPYLYFMIRDLKVAKEEQDIGFYAGFVGATYFLGRAISAVPWGMFADKYGRKPCIVISILSVIVFNTLFGLSTTYWMAIVTRGLLGLLCGILGPIKAYASEVCRKEHQALGISLVTSSRAIALVIGPAIGGFLAQPAQKYPNLFSEESIFGRFPYFLPCFVISLLAAGSCIACIWLPETLHFHGDDKVEAIEELEAQVRGSESTKDLHKNWQLMSAIILYCVFSMHDTAYLEVFSLWAVSSRKFRGLSLTSQDVGTVLAISGFGVLVYQLAIYPFLAKYFGPIKTFRPAAILSIILLTTYPFMANLHGLELKILINIASVLKNMFAATITIACNILQNTAVRGVANGISVTLMSVFNSVPPAAAGILKYLPYSLH

SEQ ID NO: 173895 - protein, 227 aa, Zea Mays
MRMLVLVLFLLLVDQLEGTVPGSVRGRPLQPEGGSPAGRAHMGGARSLRARRRPQHRSPPGTSDAPGLQVLHHQLTGVATCRRSAVNRRHLPLLPGPLSGPSRRPAPAPAAAAQAEGGAGVSRVAGEPIVRHPRGREGQSHVLLLRGAEPVERRAQAGTHAGALLLRVRELDRHPARHLPVLRMGLVNSKASRDLGWCFNRGRRAMLLRLAAAPPSSVYIIIVIIMV

SEQ ID NO: 173896 - protein, 409 aa, Zea Mays
MQVNNEAPLGCLKPNISQYNSPEQIGGVEGFPENNEKRNDIVAAEKIWEATPNQGLSRPIYRQEFYAWPYIYSDYQIVRQPLPYGFDNQFYQINRDHGFPIENRVQYLPFKMLPQGHPHDAQLQEFQYFVVIDFEATCDKVNNPFPQEIIEFPSVLVNSATGKLEECFQTYVRPTYHQFLTDFCKELTGIQQIQVDQLEGTVPGSVRGRPLQPEGGSPAGRAHMGGARSLRARRRPQHRSPPGTSDAPGLQVLHHQLTGVATCRRSAVNRRHLPLLPGPLSGPSRRPAPAPAAAAQAEGGAGVSRVAGEPIVRHPRGREGQSHVLLLRGAEPVERRAQAGTHAGALLLRVRELDRHPARHLPVLRMGLVNSKASRDLGWCFNRGRRAMLLRLAAAPPSSVYIIIVIIMV

SEQ ID NO: 173897 - protein, 299 aa, Zea Mays
MQVNNEAPLGCLKPNISQYNSPEQIGGVEGFPENNEKRNDIVAAEKIWEATPNQGLSRPIYRQEFYAWPYIYSDYQIVRQPLPYGFDNQFYQINRDHGFPIENRVQYLPFKMLPQGHPHDAQLQEFQYFVVIDFEATCDKVNNPFPQEIIEFPSVLVNSATGKLEECFQTYVRPTYHQFLTDFCKELTGIQQIQVDRGVPLGEALLMHDKWLEDKGIKNTNFAIVTWSNWDCRIMLESECRFKRIRKPPYFNRTDARVTWLVLALAVMILNIFGSLTGLIFLPPRLSVLLDPLLLLLPR

SEQ ID NO: 173898 - protein, 283 aa, Zea Mays
MQVNNEAPLGCLKPNISQYNSPEQIGGVEGFPENNEKRNDIVAAEKIWEATPNQGLSRPIYRQEFYAWPYIYSDYQIVRQPLPYGFDNQFYQINRDHGFPIENRVQYLPFKMLPQGHPHDAQLQEFQYFVVIDFEATCDKVNNPFPQEIIEFPSVLVNSATGKLEECFQTYVRPTYHQFLTDFCKELTGIQQIQVDRGVPLGEALLMHDKWLEDKGIKNTNFAIVTWSNWDCRIMLESECRFKRIRKPPYFNSFCAREMLQLSSLPRCLLFGVSSTLLVLSYH

SEQ ID NO: 173899 - protein, 292 aa, Zea Mays
MIDRERAEEMQVNNEAPLGCLKPNISQYNSPEQIGGVEGFPENNEKRNDIVAAEKIWEATPNQGLSRPIYRQEFYAWPYIYSDYQIVRQPLPYGFDNQFYQINRDHGFPIENRVQYLPFKMLPQGHPHDAQLQEFQYFVVIDFEATCDKVNNPFPQEIIEFPSVLVNSATGKLEECFQTYVRPTYHQFLTDFCKELTGIQQIQVDRGVPLGEALLMHDKWLEDKGIKNTNFAIVTWSNWDCRIMLESECRFKRIRKPPYFNSFCAREMLQLSSLPRCLLFGVSSTLLVLSYH

SEQ ID NO: 173900 - protein, 253 aa, Zea Mays
MQVNNEAPLGCLKPNISQYNSPEQIGGVEGFPENNEKRNDIVAAEKIWEATPNQGLSRPIYRQEFYAWPYIYSDYQIVRQPLPYGFDNQFYQINRDHGFPIENRVQYLPFKMLPQGHPHDAQLQEFQYFVVIDFEATCDKVNNPFPQEIIEFPSVLVNSATGKLEECFQTYVRPTYHQFLTDFCKELTGIQQIQVDRGVPLGEALLMHDKWLEDKGIKNTNFAIVTWSNWDCRIMLESECRFKRIRKPPYFNR

SEQ ID NO: 173901 - protein, 268 aa, Zea Mays
MVTDEEMQVNNEAPLGCLKPNISQYNSPEQIGGVEGFPENNEKRNDIVAAEKIWEATPNQGLSRPIYRQEFYAWPYIYSDYQIVRQPLPYGFDNQFYQINRDHGFPIENRVQYLPFKMLPQGHPHDAQLQEFQYFVVIDFEATCDKVNNPFPQEIIEFPSVLVNSATGKLEECFQTYVRPTYHQFLTDFCKELTGIQQIQVDRGVPLGEALLMHDKWLEDKGIKNTNFAIVTWSNWDCRIMLESECRFKRIRKPPYFNRFILDAQKQN

SEQ ID NO: 173902 - protein, 79 aa, Zea Mays
MSTQTLLATAVFQQAFDHSHDHITASDSNIAINIILMTTMHMLSTRETTQLLCLTKFIRPIAEVTNRLLLSKSDSKPRD

SEQ ID NO: 173903 - protein, 205 aa, Zea Mays
MGHNAGRTPFIDISNTSITGDQNGSNSLRPIVDANERKRQRDKERYAMMSIEQKNEKNRKRREARQRNKGLPIKSESSRDINTNQTREAVNVEISRDVHLGSGPIKNTPSTGNSIERKRQRDRERRATMSAEQRNEYNNKRRQMRQRNKGQNVMPAISGDGDKKVNVDPDDDSDWLHRNETFQSNDYVATIDLLPPEYSATMVVY

SEQ ID NO: 173904 - protein, 384 aa, Zea Mays
MGHNAGRTPFIDISNTSITGDQNGSNSLRPIVDANERKRQRDKERYAMMSIEQKNEKNRKRREARQRNKGLPIKSESSRDINTNQTREAVNVEISRDVHLGSGPIKNTPSTGNSIERKRQRDRERRATMSAEQRNEYNNKRRQMRQRNKGQNVMPAISGDGDKKVNVDPDDDSDWLHRNETFQSNDYVATIDLLPPGSVHESVGTIGESGIGVREYRLERLRLYNQTPKRKEAKIEYMRKRRVLQADTLNVVSIAMEDPTYTPEVVHPATEPSTVTACDWVIPEFVRTPFLPAQTQTEDVGSFDMSTEAIKRKHHVPRGERQAILARRNQQFQASIARNVTTLNGDTIGDANNNAQCSVPCQAATLPTNGSEGITEQASGVEHT

SEQ ID NO: 173905 - protein, 182 aa, Zea Mays
MPPPRKIRHASVSASPPCSRLTRRPTRRKTAMPPPRLALRADPQPPDPPGPASPSPRRSNNQAEEMHPQMWKLRAATRTAMQPPRTICHAPASHDPPCLRLGFSSVQPPDPSGPRLSFPSALKQPIRENAPTNLEAAAMAPDLAMAFMIWKPHNLRCRFGKHDLGTAITTTIPQMSRPPTTS

SEQ ID NO: 173906 - protein, 871 aa, Zea Mays
MEKPCSLLVHFDKGSAAMANEIKADLEGSDGPAKADAMRRAISLLLNGETLPQLFITIVRYVLPSEDHTVQKLLLLYLEIIDRRDPAGRALPEMILICQNLRNNLQSPNEYIRGVTLRFLCRLSEPEVLEPLVPSVLANLEHRHHFIRRHAVSSVSAIYRLPHGDQLIPDAPELVERFLASEQDASARRNAFLMLCACAQDRAVAYLLSNADRVAEWPDLLQMAVVDLIRKVCRSQNRANKGRYITIITSLLSTPSTAVVYECAGALVSLSSAPTAVRAAANTYCQLLSSQSDNNVKLILLDRLNELHTLHRDVMVGVVMDVLRALASPNLDVKRKVLDLVLDLLTPRNVEEVVLYLKKEVVKTQAGDLEKGGEYRQMLVQAIHACAVEYSEVAGSVVHLLMDFLGDTNVAAAVDVVLFVREIIETNPKLRVSMIQRLIDTFYQIRASRVCSCALWILGEYSLSLSEVESAIATIKQCLGDLPFYTVSDEGEATDSAKPAKAVVNSVTVSSRRPVVLADGTYATQSAATETILTPSVAPGSLASTLNLRSLILSGDFFLAAVVACTLAKLVLRLEEVQPSKVESNKACTGALLIMTSILQLGQSSYLPHPIDNDSYDRIVLCVRLLCNTGDDVRKIWLQSCRQSFAKMLAEKQFRETEEMKAKAQISHAQPDDLIDFYHLKSRKGMSQLELEDEVHDDLKAATGGFTKDADDANKLNRILQLTGFSDPVYAEAFVTVHHYDIVLDVTVINRTKETLQNLCLELATMGDLKLVDRPQNYTLAPESSKQIRANIKVSSTETGVIFGNIVYETSNVMERSVVVLNDIHIDIMDYISPATCADVTFRNMWAEFEWENKVSDLGYFSVDSVVYSWS

SEQ ID NO: 173907 - protein, 83 aa, Zea Mays
MINYSQVLNCKRSYLKWYIHFVLCPIKSSNVKASLNFVLCGHRWTRCSTSIYLYLRVKYTSTLKTWTRCCHLGSSFHFLFLGR

SEQ ID NO: 173908 - protein, 486 aa, Zea Mays
MGSQNGQIQELPPPLHPTNIGDQPPPVEKTKRQCPGCQLDEVNKASNKVPYLNFCFIWIICLTATLPIQSLFPYLYFMIRDLKVAKEEQDIGFYAGFVGATYFLGRTISAVPWGIFADKYGRKPCIVISILSVIVFNTLFGLSTTYWMAIVTRGLLGLLCGILGPIKAYASEVSRKEHQALGISFVTSSRAIALVIGPSIGGFLAQPAQKYPKLFSEESIFGRFPYFLPCFVISVLAVGSCIACIWLPETLHFHDDEKAECIQELESQVGGSKSTENLLKNWPLMSAIILFSIFSLHDTAYLEIFSLWAVSSRKFQGLSFTSQDVGTVFAFSGLSVLVYQLTIYPLLSKYFGPVKIFRPAVILSIILLITYPFMSNLHGLELKILVNIASILKNVFAATITIACNILQNTAVTQKQRGTANGISVTMMSMFKAAAPAAAGIIFSWAQKHIYGLFLPGNQILFLTLNMVSIIGLVLTFKPFLSQPIQ

SEQ ID NO: 173909 - protein, 468 aa, Zea Mays
MGSQNGQIQELPPPLHPTNIGDQPPPVEKTKRQCPGCQLDEVNKASNKVPYLNFCFIWIICLTATLPIQSLFPYLYFMIRDLKVAKEEQDIGFYAGFVGATYFLGRTISAVPWGIFADKYGRKPCIVISILSVIVFNTLFGLSTTYWMAIVTRGLLGLLCGILGPIKVTSSRAIALVIGPSIGGFLAQPAQKYPKLFSEESIFGRFPYFLPCFVISVLAVGSCIACIWLPETLHFHDDEKAECIQELESQVGGSKSTENLLKNWPLMSAIILFSIFSLHDTAYLEIFSLWAVSSRKFQGLSFTSQDVGTVFAFSGLSVLVYQLTIYPLLSKYFGPVKIFRPAVILSIILLITYPFMSNLHGLELKILVNIASILKNVFAATITIACNILQNTAVTQKQRGTANGISVTMMSMFKAAAPAAAGIIFSWAQKHIYGLFLPGNQILFLTLNMVSIIGLVLTFKPFLSQPIQ

SEQ ID NO: 173910 - protein, 286 aa, Zea Mays
MGTLLISKIREEYPDRMMLTFSVFPSPKVSDTVVEPYNATLSVHQLVENADECMVLDNEALYDICFRTLKLTTPSFGDLNHLISATMSGVTCCLRFPGQLNSDLRKLAVNLIPFPRLHFFMVGFAPLTSRGSQQYRALTVPELTQQMWDAKNMMCAADPRHGRYLTASAMFRGKMSTKEVDEQMINVQNKNSSYFVEWIPNNVKSSVCDIPPRGLSMASTFIGNSTSIQEMRKAFLHWYTGEGMDEMEFTEAESNMNDLVSEYQQYQDATADEEAEYEDEEAIQDE

SEQ ID NO: 173911 - protein, 373 aa, Zea Mays
MMTTKPKDSNLFSKKTTGWYKKMGERIWTPWFVKFVHSRGYFNIYTNFLKERALSVSHRDAGVNYEKSVGPDSTLLDGKNLDFNLWELQPLKKLKWYDFCFNEALPGRIVRKNSELGSMLKSLQLKSTVVLVTLYSIEERFARNLICHLDKAGMKNTIFLGDNSEFLDDLAHRGYPVIDGVNFLQSIRLSSLQGSDGFVQETLVISYVIKACLDLGYNLWLLNGNMISLGNKLIEPSDQSVDFFTADEGLMFIRSSLDMKNKWNELAMSRVKAMCTSSDLSVSIKQKSFVHMLTEVMASSAGVRLGKLDEAMRVIELGPNTSNRSILEDKSNVLFWSRSRASDSVQKQLENMDLWLVDSDSSCSSVVCHQKQK

SEQ ID NO: 173912 - protein, 585 aa, Zea Mays
MASPRRRSLPLRFLIFIPAPLFLVLLFHRSSHSTAPLLHTAGSGSGPSSDPRRFSLLIKLLAYDRPAAFRRCLRSLAAADYDGDRVALHVLLDHRPPNSSLPPLATSHEILDFVDAFPWPHGEKRVHYRASNAGLQAQWIEAWWPGSDDEFAFVVEDDLQVSPLYYKFLKRLVLRYYYDRENYSPYLFGASLQRPRFVAGKHGNKIQLDSETRLFLYQMVGTWGQLLFPKPWKEFRLWYDDHKAKGLKPILQGMKTTGWYKKMGERIWTPWDAGVNYEKSVGPDSTLLDGKNLDFNLWELQPLKKLKWYDFCFNEALPGRIVRKNSELGSMLKSLQLKSTVVLVTLYSIEERFARNLICHLDKAGMKNTIFLGDNSEFLDDLAHRGYPVIDGVNFLQSIRLSSLQGSDGFVQETLVISYVIKACLDLGYNLWLLNGNMISLGNKLIEPSDQSVDFFTADEGLMFIRSSLDMKNKWNELAMSRVKAMCTSSDLSVSIKQKSFVHMLTEVMASSAGVRLGKLDEAMRVIELGPNTSNRSILEDKSNVLFWSRSRASDSVQKQLENMDLWLVDSDSSCSSVVCHQKQK

SEQ ID NO: 173913 - protein, 582 aa, Zea Mays
MSDSNDFVELLWENGQAVVHGRRKQHPQAAFPPFTCGAASSSRAQENQPGTTDPVSLFKTGGLFADFSSGLDAARGNGDLDDTVPWIHCPIVEEDSAAPAPALAEGYSPDFFSELHAAALAAAAAETNLSPLPPPVQHNRSTPVATTSRGPEPSKEAPRIPVPGPGSRPEPQSEFAATRKPRPESGGEGLMNFSLFSRPAALVRASLQRPPPPQTGTDKVSNVTTSTRVESTVLQSASGPRIAPVFTDQRTAWSQSKEVRFSCAPALAAGNLHQDMPLGRPGNNMTPQGKMETKKACEVAVATPSLCSGNGESWREQKRKSQAECSASQDDDLDDESGGMRGSGGRGTKRSRTAEVHNLSERRRRDRINEKMRALQELIPNCNKAFGKSVATDASPFLQIDKASMLDEAIEYLKTLQLQVQMMAMGSGLCIPPMLLPRAMQLQIPSIAHFHHLGMGLGYGMGVLDMNSTAAVPFQPIPGAHYTCPMIPGTPPQGLGIGMPGTNTMPVFGLPGQAIHPSASSVQPFPSLAGLPVRPNLAPQVPAVMANMVQEQQQGVATQQQQSLNNEAQQKANTGDPQILQK

SEQ ID NO: 173914 - protein, 679 aa, Zea Mays
MDLQVPQGNNCAPLAAFSTVTERVRAPSPSSCSQDIYLKVEQAAAEAKPLANLLLRVAPINVGSQRLLVKRVLLLFSAPACRESSSRSSTQGPLGAEMSDSNDFVELLWENGQAVVHGRRKQHPQAAFPPFTCGAASSSRAQENQPGTTDPVSLFKTGGLFADFSSGLDAARGNGDLDDTVPWIHCPIVEEDSAAPAPALAEGYSPDFFSELHAAALAAAAAETNLSPLPPPVQHNRSTPVATTSRGPEPSKEAPRIPVPGPGSRPEPQSEFAATRKPRPESGGEGLMNFSLFSRPAALVRASLQRPPPPQTGTDKVSNVTTSTRVESTVLQSASGPRIAPVFTDQRTAWSQSKEVRFSCAPALAAGNLHQDMPLGRPGNNMTPQGKMETKKACEVAVATPSLCSGNGESWREQKRKSQAECSASQDDDLDDESGGMRGSGGRGTKRSRTAEVHNLSERRRRDRINEKMRALQELIPNCNKAFGKSVATDASPFLQIDKASMLDEAIEYLKTLQLQVQMMAMGSGLCIPPMLLPRAMQLQIPSIAHFHHLGMGLGYGMGVLDMNSTAAVPFQPIPGAHYTCPMIPGTPPQGLGIGMPGTNTMPVFGLPGQAIHPSASSVQPFPSLAGLPVRPNLAPQVPAVMANMVQEQQQGVATQQQQSLNNEAQQKANTGDPQILQK

SEQ ID NO: 173915 - protein, 203 aa, Zea Mays
MNFSLFSRPAALVRASLQRPPPPQTGTDKVSNVTTSTRVESTVLQSASGPRIAPVFTDQRTAWSQSKEVRFSCAPALAAGNLHQDMPLGRPGNNMTPQGKMETKKACEVAVATPSLCSGNGESWREQKRKSQAECSASQDDDLDDESGGMRGSGGRGTKRSRTAEVHNLSERRRRDRINEKMRALQELIPNCNKVRRSISTIF

SEQ ID NO: 173916 - protein, 664 aa, Zea Mays
MDLQVPQGNNCAPLAAFSTVTERVRAPSPSSCSQDIYLKVEQAAAEAKPLANLLLRVAPINVGSQRLLVKRVLLLFSAPACRESSSRSSTQGPLGAEMSDSNDFVELLWENGQAVVHGRRKQHPQAAFPPFTCGAASSSRAQENQPGTTDPVSLFKTGGLFADFSSGLDAARGNGDLDDTVPWIHCPIVEEDSAAPAPALAEGYSPDFFSELHAAALAAAAAETNLSPLPPPVQHNRSTPVATTSRGPEPSKEAPRIPVPGPGSRPEPQSEFAATRKPRPESGGEGLMNFSLFSRPAALVRASLQRPPPPQTGTDKVSNVTTSTRVESTVLQSASGPRIAPVFTDQRTAWSQSKEVRFSCAPALAAGNLHQDMPLGRPGNNMTPQGKMETKKACEVAVATPSLCSGNGESWREQKRKSQAECSASQDDDLDDESGGMRGSGGRGTKRSRTAEVHNLSERRRRDRINEKMRALQELIPNCNKIDKASMLDEAIEYLKTLQLQVQMMAMGSGLCIPPMLLPRAMQLQIPSIAHFHHLGMGLGYGMGVLDMNSTAAVPFQPIPGAHYTCPMIPGTPPQGLGIGMPGTNTMPVFGLPGQAIHPSASSVQPFPSLAGLPVRPNLAPQVPAVMANMVQEQQQGVATQQQQSLNNEAQQKANTGDPQILQK

SEQ ID NO: 173917 - protein, 558 aa, Zea Mays
MLIALFNHNIIKLKCAKSIKLTVSIFGSISCNVPNEDQFDTLHQQVQQIVTKFEMKRILNSRALITCKKVRRLTERMSNASPLSFYLKKEQWGKAAARPGGRFVSKGNGGKAAMDGRARRERGCHEGGAGRDSHGWKLCGRFAADLGELSCHGWKRDLGGRVPWHCWGSGARLLDWKRELATSRDLWAIHGGSIAATMDGSVIWEIEFPGARMCDLGDRIPWHEGYLGRTFPGTAGGAGHGCHGLEAKQLTLSNPIQPTDDGIGPPDTPSDVLGSRLTNGPVTNLQATALRFAAHHTAAPSPSRMSTGGGTTLRELTALLSTLRRARLQHPAHAAQLHARLLISAGARPHPHPVLLTQLVSLYAAAGRLADALRAFRAHLPSANLHTYAVLVSAFARPYPDLAFSLFSGSRRQLRPSPHVISAVLAACAGLQPLCGRQVHTCAAKVVPPGDVFVYTGMVDVYAKGGDMESSRKVFDEMLNRGAASWNALLVGYARNKMCLEALSVFRELAAQGREVSLDQVSVSSVLSACAVAGALNYGRQVHACATKGCCHLEHHHS

SEQ ID NO: 173918 - protein, 530 aa, Zea Mays
MLIALFNHNIIKLKCAKSIKLTVSIFGSISCNVPNEDQFDTLHQQVQQIVTKFEMKRILNSRALITCKKVRRLTERMSNASPLSFYLKKEQWGKAAARPGGRFVSKGNGGKAAMDGRARRERGCHEGGAGRDSHGWKLCGRFAADLGELSCHGWKRDLGGRVPWHCWGSGARLLDWKRELATSRDLWAIHGGSIAATMDGSVIWEIEFPGARMCDLGDRIPWHEGYLGRTFPGTAGGAGHGCHGLEAKQLTLSNPIQPTDDGIGPPDTPSDVLGSRLTNGPVTNLQATALRFAAHHTAAPSPSRMSTGGGTTLRELTALLSTLRRARLQHPAHAAQLHARLLISAGARPHPHPVLLTQLVSLYAAAGRLADALRAFRAHLPSANLHTYAVLVSAFARPYPDLAFSLFSGSRRQLRPSPHVISAVLAACAGLQPLCGRQVHTCAAKVVPPGDVFVYTGMVDVYAKGGDMESSRKVFDEMLNRGAASWNALLVGYARNKMCLEALSVFRELAAQGREVSLDQGCCHLEHHHS

SEQ ID NO: 173919 - protein, 102 aa, Zea Mays
MVCLAIFMFRFTLLLNNEYFFARCDGIFARLLPVAYGPWIVPFLHLACNPFFVLIPSNFKSPPLAAITLLCLFSSELALLASNSFYLCSTIFIQSVDMNSAL

SEQ ID NO: 173920 - protein, 540 aa, Zea Mays
MGRGTLAAPVHAADDAGERLTNLGGPNPARRGPPRVATLIHPQQARALSLSYHSPFYLSLPQSRPANPSAPAMASDPAPDDAAAAVNGHGNDNGHGNGPSPSKRPRAVISEAEIRVEFAHHDAAVARVNNGSFGCCPASVLAAQAHWQRLFLAQPDAFYFHVLQQGLLRSRAAVAEVVGAGDVSEVSLVDNATTAAAIVLQHAAWSFAEGHFARGDAVLMLHYAYGAVKKSIHAYVARAGATVVEVPLPFPVASADAIIAEFRAALAVAKEGGRRVRLAVIDHITSMPSVVIPVKELVAICREEGVDKVFVDAAHSIGQVPVDVRDIGADFYTSNLHKWFFCPPAVAFLHTRKDDPIASQLHHPVVSHEYGNGLPMESGWIGTRDYSAQLVVSEAIDFVNRFEGGIEAIRNRNHEKVIEMGRMLAEAWGTFLGSPPELCGSMVMVGMPGCLGVESDDDAMRVRTMLRKDFQVEVPVYYNSRRVEGQEMTKDKNGDPVTGYVRISHQVYNVTEDYERLRDVVNKLVSEGFTSSKLRPSEKT

SEQ ID NO: 173921 - protein, 198 aa, Zea Mays
MQKSGVRSGPTGAEATHTGTRNKMREENPGPKTSTPVRSPPPARNNHLFIIAWPRLFQAAYLIDLLIIIEIDPIIISAETSSIEVEQDCRPRDPAASIYRRLRSAPNRTTTTSRFLQIWIQKQNMRCSTTKTKQQEPCRQGLTDTGSNAGLPNPAIRYEPAQHEANGFPDKSKQSSSPRALGEARSQGGRPSWIWRTR

SEQ ID NO: 173922 - protein, 72 aa, Zea Mays
MSMFLLSFSYYPMLEKKQNSNLYAPSSFLLLSNIVQRKFHMSSNVVSGPCAIHVKIVHNKSCKIRDLYYRLY

SEQ ID NO: 173923 - protein, 283 aa, Zea Mays
MEGPPPPPWPAAKMAWEPDLLSHYRARMIWKVPDILSPLPRAASGSASATWRSTADLGAHYEANNNVLASFASQLLANAPALPWDDRAGGRTPSDEMDDELYGVAGCDSHVVASLRCPSQSRAMAVWSSSKKSYDICTSAGGSVTVPAHDTYHLAGAGLSNEGGLHYPLAACSGANASAVATRELSLTLCSNSIASSNSTLNTTELRLEEAKSLAEKLCDGPLSSAANLWILRASMEINSLATASGSSPLNKENLSSLFDLFGTWSCLFSRLSPESHPIAECI

SEQ ID NO: 173924 - protein, 1145 aa, Zea Mays
MITGERQAARIRNLYLKTILRQEIAFFDKYTSTGEVVGRMSGDTVLIQDAMGEKVGKFIQLVVTFFGGFIVAFAQGWLLTLVMMATIPPLVVAGAVMSNVVTKMASLGQAAYAESSVVVEQTIGSIRTVASFTGEKRAVEKYNKSLKSAYKSSVREGLATGLGMGTVMLLLFCGYSLGIWSGAKLILEKGYTGAKVMNVIFAVLTGSLALGQASPSMKAFAGGQAAAYKMFETINRAPEIDAYSTTGRKLEDIRGEIEFRDVHFSYPTRPDEPIFRGFSLAIPSGTTIALVGQSGSGKSTVISLIERFYDPQLGDVLIDGVNLKEFQLRWIRSKIGLVSQEPVLFAASIKENIAYGKASATDQEVRAAAELANAAKFIDKMPQGFDTSVGEHGTQLSGGQKQRIAIARAILKDPRILLLDEATSALDAESERIVQEALDRVMSNRTTVIVAHRLSTVRNADTIAVIHQGTLVEKGPHNELLRDPEGAYSQLIKLQEANQQNNRKGDGNARLGKQMSMNKSASRRLSRDNSSHHSFSVPFGMPLGIEIQDGSSNKLCDEMPQEVPLSRLASLNKPEIPVLVLGSIASVISGVIFPIFAILLSNVIKAFYEPPHLLRRDSQFWASMFLVFGAVYFLSLPVSSYLFSIAGCRLIRRIRLMTFEKVVNMEVEWFDHPENSSGAIGARLSADAAKVRGLVGDALQLVVQNSSTLVAGLVIAFVSNWELSLIILALIPLIGLNGWIQMKFIQGFSADSKMMYEEASQVANDAVSSIRTVASFSAEEKVMDLYKKKCEGPLRTGIRTGIISGIGFGVSFFLLFGVYAASFYAGARLVEDRKTTFPKVFRVFLALAMAAIGVSQSSTLTSDSSKAKSAASSIFAIVDRKSRIDPSEDAGVTAETLRGNIEFQHVSFRYPTRPDVQIFRDLCLTIHAGKTVALVGESGSGKSTAISLLQRFYDPDVGHILLDGVDIRKFQLRWLRQQMGLVSQEPALFNDTIRANIAYGKDGQATESEIVSAAQLANAHKFISSALQGYDTMVGERGAQLSGGQKQRVAIARAIVKDPRILLLDEATSALDAESERIVQDALDRVMVNRTTVVVAHRLSTIQNADLIAVVRNGVIIEKGKHDALVNVKDGAYASLVALHSAASS

SEQ ID NO: 173925 - protein, 1106 aa, Zea Mays
MSGDTVLIQDAMGEKVGKFIQLVVTFFGGFIVAFAQGWLLTLVMMATIPPLVVAGAVMSNVVTKMASLGQAAYAESSVVVEQTIGSIRTVASFTGEKRAVEKYNKSLKSAYKSSVREGLATGLGMGTVMLLLFCGYSLGIWSGAKLILEKGYTGAKVMNVIFAVLTGSLALGQASPSMKAFAGGQAAAYKMFETINRAPEIDAYSTTGRKLEDIRGEIEFRDVHFSYPTRPDEPIFRGFSLAIPSGTTIALVGQSGSGKSTVISLIERFYDPQLGDVLIDGVNLKEFQLRWIRSKIGLVSQEPVLFAASIKENIAYGKASATDQEVRAAAELANAAKFIDKMPQGFDTSVGEHGTQLSGGQKQRIAIARAILKDPRILLLDEATSALDAESERIVQEALDRVMSNRTTVIVAHRLSTVRNADTIAVIHQGTLVEKGPHNELLRDPEGAYSQLIKLQEANQQNNRKGDGNARLGKQMSMNKSASRRLSRDNSSHHSFSVPFGMPLGIEIQDGSSNKLCDEMPQEVPLSRLASLNKPEIPVLVLGSIASVISGVIFPIFAILLSNVIKAFYEPPHLLRRDSQFWASMFLVFGAVYFLSLPVSSYLFSIAGCRLIRRIRLMTFEKVVNMEVEWFDHPENSSGAIGARLSADAAKVRGLVGDALQLVVQNSSTLVAGLVIAFVSNWELSLIILALIPLIGLNGWIQMKFIQGFSADSKMMYEEASQVANDAVSSIRTVASFSAEEKVMDLYKKKCEGPLRTGIRTGIISGIGFGVSFFLLFGVYAASFYAGARLVEDRKTTFPKVFRVFLALAMAAIGVSQSSTLTSDSSKAKSAASSIFAIVDRKSRIDPSEDAGVTAETLRGNIEFQHVSFRYPTRPDVQIFRDLCLTIHAGKTVALVGESGSGKSTAISLLQRFYDPDVGHILLDGVDIRKFQLRWLRQQMGLVSQEPALFNDTIRANIAYGKDGQATESEIVSAAQLANAHKFISSALQGYDTMVGERGAQLSGGQKQRVAIARAIVKDPRILLLDEATSALDAESERIVQDALDRVMVNRTTVVVAHRLSTIQNADLIAVVRNGVIIEKGKHDALVNVKDGAYASLVALHSAASS

SEQ ID NO: 173926 - protein, 765 aa, Zea Mays
MPQGFDTSVGEHGTQLSGGQKQRIAIARAILKDPRILLLDEATSALDAESERIVQEALDRVMSNRTTVIVAHRLSTVRNADTIAVIHQGTLVEKGPHNELLRDPEGAYSQLIKLQEANQQNNRKGDGNARLGKQMSMNKSASRRLSRDNSSHHSFSVPFGMPLGIEIQDGSSNKLCDEMPQEVPLSRLASLNKPEIPVLVLGSIASVISGVIFPIFAILLSNVIKAFYEPPHLLRRDSQFWASMFLVFGAVYFLSLPVSSYLFSIAGCRLIRRIRLMTFEKVVNMEVEWFDHPENSSGAIGARLSADAAKVRGLVGDALQLVVQNSSTLVAGLVIAFVSNWELSLIILALIPLIGLNGWIQMKFIQGFSADSKMMYEEASQVANDAVSSIRTVASFSAEEKVMDLYKKKCEGPLRTGIRTGIISGIGFGVSFFLLFGVYAASFYAGARLVEDRKTTFPKVFRVFLALAMAAIGVSQSSTLTSDSSKAKSAASSIFAIVDRKSRIDPSEDAGVTAETLRGNIEFQHVSFRYPTRPDVQIFRDLCLTIHAGKTVALVGESGSGKSTAISLLQRFYDPDVGHILLDGVDIRKFQLRWLRQQMGLVSQEPALFNDTIRANIAYGKDGQATESEIVSAAQLANAHKFISSALQGYDTMVGERGAQLSGGQKQRVAIARAIVKDPRILLLDEATSALDAESERIVQDALDRVMVNRTTVVVAHRLSTIQNADLIAVVRNGVIIEKGKHDALVNVKDGAYASLVALHSAASS

SEQ ID NO: 173927 - protein, 158 aa, Zea Mays
MLVSESTAIPSSLSCSLELDPLLRDLVEKKLSLKRNVTAMATELRDARNRLASQELLLAQEIEARKVAELKTRNLEDEVSKLQKCLGDKDEQLRASLCSADQDDGVAKPGEDIRALSAHWVNRSKELESQHRRTAQELKRRVMRLELCILEPYGNSIG

SEQ ID NO: 173928 - protein, 263 aa, Zea Mays
MLVSESTAIPSSLSCSLELDPLLRDLVEKKLSLKRNVTAMATELRDARNRLASQELLLAQEIEARKVAELKTRNLEDEVSKLQKCLGDKDEQLRASLCSADQFRNELDGFRSQLPVMTTLLHCSYLLGKLNDRNNSMSEGEFPVNNLAEQLNHLEKCLESRDPTLRQFKDCYSLRTESDITDAFARVAFDNDDGVAKPGEDIRALSAHWVNRSKELESQLRNQMAVQQPTCSGSGEKRNLWESSAFKLIASVSMLVLFTLANR

SEQ ID NO: 173929 - protein, 65 aa, Zea Mays
MNSSPKVELHRRSVARRGQGICATRITVKDRYHRMRRMKDVVMVFVTGLGRHLLVNYGCWIVVFV

SEQ ID NO: 173930 - protein, 74 aa, Zea Mays
MTFTDLSLSIDITNGRVRKVGFFTVGSPTTSLASLLRAGSRPGPTGGHLPQRKLHCSPPPEKQKIRESRQKRQA

SEQ ID NO: 173931 - protein, 57 aa, Zea Mays
MFHVVFLMSVTHYRIIRAKTLEVCHRKKYFHLLNVPNKYSFMIHVLQIFRKILLLCA

SEQ ID NO: 173932 - protein, 210 aa, Zea Mays
MPPGSPSSPTDPTSSKVVPPPSYCSHGSPAIILSFLYCLLPPDREAALVQVLPGEVEPNRIPWRTTLQWIQDVRHQINGGKWRRIWQFPCRPPISWLAAVDPPNFPGSFLRLATTATTPLTSFSPSSVVFVSLLCCWEREVAQPRRWYQRGGARSHPMEDNLPIDPGREAPIQWRGKRRRIWQLSGCPPSPSAQTHSPASIVELNFQDVM

SEQ ID NO: 173933 - protein, 163 aa, Zea Mays
MPPGSPSSPTDPTSSKVVPPPSYCSHGSPAIILSFLYCLLPPDREAALVQVLPGEVEPNRIPWRTTLQWIQDVRHQINGGSFLRLATTATTPLTSFSPSSVVFVSLLCCWEREVAQPRRWYQRGGARSHPMEDNLPIDPGREAPIQWRERVYFLIGLFPLLRV

SEQ ID NO: 173934 - protein, 60 aa, Zea Mays
MRLHCVARRQVGPPAQPHTAQVPCHPCTYAWACLSVSLAAMGVFMSSNAVTRNPHVRRAM

SEQ ID NO: 173935 - protein, 56 aa, Zea Mays
MEGAPDMGTPQANVGIMRMTRWAHMSASRQAWSCWQAEQGRVGRGHRRFSPGKGFT

SEQ ID NO: 173936 - protein, 200 aa, Zea Mays
MIGNKCKIFTDHKSLKYIFTQKELNLKHQRWLELIKDYDLDQYHPGKVNIMVDALSRKGQVNSVSAYLLQQELCWETEQLNVGMVNNIEATIMEVESTLEQEIHKGQESDEKIKEIKTQISLGKAPDFTEDEQDTVWFKKRICVPEVEHLRQLILGEGHDSAHSIHPRSTKMYQDLKEKYWWYGLKRDVATHVALRDVCQ

SEQ ID NO: 173937 - protein, 89 aa, Zea Mays
MNGCFYFNNHDLYDVCFICGMVHAYLLVYVFFLYVRCATLLEANCVVKEPNSFEEYPHDTFEQGKWIIPLYFLLYPNNTINKIYFWIYA

SEQ ID NO: 173938 - protein, 65 aa, Zea Mays
MPKTKSKSHFSCINELVAKPRCKKHGIMYVQLIQILKPHVFVVLHKVALLAFHLAHLDLISSLRL

SEQ ID NO: 173939 - protein, 182 aa, Zea Mays
MATGQLFSKTTQALFYNYKQLPIQRMLDFDFLCGRETPSVAGIINPGSDGFQKLFFGQEEIAIPVHPTVEAACSAHPTADVFINFASFRSAAASSMSALKQPTIRVVAIIAEGVPESDAKQLISYARANNKVIIGPATVGGIQAGAFKIGDTAGTIDNIIQCKLYRPGSVGFVSKSNYPGYG

SEQ ID NO: 173940 - protein, 79 aa, Zea Mays
MSTLDTRTLKDELTSMDRKCLVDLGHPLLNRVADSFIRAAGVGAARAVSREAYVVTVEGRLVRARRRRRQAEPFLQHQR

SEQ ID NO: 173941 - protein, 146 aa, Zea Mays
MMHRAPPARSRTGGMLTGEPRLPRRTGTNYELPRPFLVQVQGRERERGWCEGGKGAKAKQPTTRETRRLRERERGRRREEEDGARGSVLLLAAAVQDLPRRGGRAALRHGVALRLLRLPQVRSQGMRAEVVRREGKRRLRDLPPEL

SEQ ID NO: 173942 - protein, 99 aa, Zea Mays
MQCVGTLSSYLWGYKTTSSANLTSMNAYECNAYVLCLHTSKGMKPHRTPSRATYDAKLYRYGRTIGHDKTSYANESCNVYGMLHLSINFTSFRYNTNLK

SEQ ID NO: 173943 - protein, 261 aa, Zea Mays
MSVPGVASPIADRFYCPPPHRHLLDKQHRQHPPLTASAAEEPAKPTPELGRDPSPSPSPATNLESFIASTAVRVPARCSPRTPGCRAGAPYYELADLWEAFGEWSAYGAGVPLLLNGTDGVVQYYVPFLSAIQLYGSRLPSKSKTKSCRYLNEGSDGDNAPETSSDVSNESDNDNDNERSIGRTTQCLVENICTDQERLSSDDCDSSNQEPPPVFQYMEHDAPYGRQPLADMISVFACKFPDLNTYKSCDLLPSSWISVAC

SEQ ID NO: 173944 - protein, 105 aa, Zea Mays
MQIQQIQYIVFFNTQLQQKCPYFISLAYLSTTTTSKTMANNRNSVTFTHPHTRQMQLPIPSLLLPTLSFTSFRFFSKLTILLTILGTSIVEAAATIEEVIGRYPL

SEQ ID NO: 173945 - protein, 67 aa, Zea Mays
MEVVRLPVYYPSQLEKEDPKLYANNVRKLIAMEGNLVLSNIGLAEKRVYHAALTGSSLPGARHEKDD

SEQ ID NO: 173946 - protein, 100 aa, Zea Mays
MMLLFPEGTTTNGDYLLPFKTGAFLAGAPVQPVILKYPYRRFSPAWDSMDGARHVLLLLCQFINHMEVVRLPVYYPSQLEKEDPKLYANNVRKLIAMEVG

SEQ ID NO: 173947 - protein, 107 aa, Zea Mays
MAASPPSPSLPVWCPADALSHGRPPPLAASQQPHLLCPPSPARPSTMDTASPGTRPLHAIALLPAASPISTGALIFSHPAWPASSPFSTGTLINHVMWRIRDGLITR

SEQ ID NO: 173948 - protein, 255 aa, Zea Mays
MLRDRGGGNPVLLKNISTLTFCYRTNTVSIQAKATSFVQLCIKEGRKLWTAPTTRAASRRTGSAGATTASTPPLRSAGRRSPPRSSEVAWVSPRPSRRRRRWRVPRGGADAAGGACAAASCGGGCSARCRRAGGSCGSATRTCPPCCGWRPPPPSGTAPASPTAARRPSRGRRSSRSTKIRCWWRSTGPYSRAAGLAPSPSLPAATAPVRLPPPHYGYRRLLLELERQMKHSIQENIMIIIMAQGPSYHNRRDIK

SEQ ID NO: 173949 - protein, 245 aa, Zea Mays
MLRDRGGGNPVLLKNISTLTFCYRTNTVSIQAKATSFVQLCIKEGRKLWTAPTTRAASRRTGSAGATTASTPPLRSAGRRSPPRSSEVAWVSPRPSRRRRRWRVPRGGADAAGGACAAASCGGGCSARCRRAGGSCGSATRTCPPCCGWRPPPPSGTAPASPTAARRPSRGRRSSRSTKIRCWWRSTGPYSRAAGLAPSPSLPAATAPVRLPPPHYGYRRLLLELERQMKHVFILLAFTLYVATL

SEQ ID NO: 173950 - protein, 218 aa, Zea Mays
MRFRAKATSFVQLCIKEGRKLWTAPTTRAASRRTGSAGATTASTPPLRSAGRRSPPRSSEVAWVSPRPSRRRRRWRVPRGGADAAGGACAAASCGGGCSARCRRAGGSCGSATRTCPPCCGWRPPPPSGTAPASPTAARRPSRGRRSSRSTKIRCWWRSTGPYSRAAGLAPSPSLPAATAPVRLPPPHYGYRRLLLELERQMKHVFILLAFTLYVATL

SEQ ID NO: 173951 - protein, 68 aa, Zea Mays
MSREQAQHGRNTSRRSLATVRWKDGCFGHQIMEWHLMNWRELTWWLGRRALACNTDHRDTRGTTRAGS

SEQ ID NO: 173952 - protein, 115 aa, Zea Mays
MGLAPATQARKKPRRRILALDAIRDMTFRFLCRACLFLASLPPLHRIPVMRLESYTVSLASPSTYHPRPPIGRAWSFWNLRCIWLPRRPHPVRPRFVRLQPRKQAKKPNTLHFWK

SEQ ID NO: 173953 - protein, 94 aa, Zea Mays
MMLDHEAEAVATRTLEAPATAGAGVQNLFLSHPHLWMKGLLLFFLDLAMRRSGGCIDIILDVLRIGVDGLGLRIVEMDCDACMTSGLQSVLGAR

SEQ ID NO: 173954 - protein, 63 aa, Zea Mays
MTRGTTTTQEGDVYRATHTTRRRMTLTGEINDTMRIKAKQAKGTRWRAGNCASTTRNDAPPGQ

SEQ ID NO: 173955 - protein, 118 aa, Zea Mays
MFELFVAHLVNSTLLASSSPDAWDFLMTRRTTTAQEGDVYRATHATRRRMTLTGKIDDAMRIKAKRGEGTRWQAGNCASTTRNDAPPGRAEGSADRGQNGHQGRVHSNRHLTTTDAAG

SEQ ID NO: 173956 - protein, 115 aa, Zea Mays
MGQWKIQILDQATRESAEHSYARRICNHNKKTQKNPQEPDKPCQSRRIKPAGGEGLPRIVRWRIGHQSGRIAMAEICGNQDRGPGHDRSGLWLKSGGEGEERICQNGSPRCRSKK

SEQ ID NO: 173957 - protein, 68 aa, Zea Mays
MSTDRHKRNAYWSTTIKNHQCWLGLAIKSKQGEESGTKHLALYVTSGYNRSLGASFIGRRLNLLCCMM

SEQ ID NO: 173958 - protein, 241 aa, Zea Mays
MASSASTLEIEARDVVKIVLQFCKENSLQQTFQTLQNECQVSLNTVDSIDTFIADINAGRWDAVLPQVAQLKLPRKKLEDLYEQIVLEMAELRELDTARAILRQTQVMGVMKQEQPERYLRLEHLLVRTYFDPNEAYQESTKEKRRALIAQAVASEVSVVPPSRLMALIGQALKWQQHQGLLPPGTQFDLFRGTAAMKQDEEETYPTSLSHQIKGTWPQVWKDAERISRSFFICKLCHLHY

SEQ ID NO: 173959 - protein, 490 aa, Zea Mays
MASSASTLEIEARDVVKIVLQFCKENSLQQTFQTLQNECQVAQLKLPRKKLEDLYEQIVLEMAELRELDTARAILRQTQVMGVMKQEQPERYLRLEHLLVRTYFDPNEAYQESTKEKRRALIAQAVASEVSVVPPSRLMALIGQALKWQQHQGLLPPGTQFDLFRGTAAMKQDEEETYPTSLSHQIKFGKKTHPECARFSPDGQYLVSCSVDGIIEVWDYLSGKLKKDLQYQADESFMMHEEPVLCVDFSRDSEMLASGSQDGKIKVWRIRTGQCLRRLERAHSKGVTSVTFSRDGTQILSTSFDTTARVHGLKSGKMLKEFRGHSSYVNYAIFTTDGSRVITASSDCTVKVWDTKTTDCLHTFKPPPPLRGGDASVNSVHLFPKNTDHIVVCNKTSSIFIMTLQGQVVKSFSSGKREGGDFVAASVSPKGEWIYCVGEDMNMYCFSYQSGKLEHLMKVHEKDVIGITHHPHRNLVATIAEDCMMKIWKP

SEQ ID NO: 173960 - protein, 322 aa, Zea Mays
MASSASTLEIEARDVVKIVLQFCKENSLQQTFQTLQNECQVSLNTVDSIDTFIADINAGRWDAVLPQVAQLKLPRKKLEDLYEQIVLEMAELRELDTARAILRQTQVMGVMKQEQPERYLRLEHLLVRTYFDPNEAYQESTKEKRRALIAQAVASEVSVVPPSRLMALIGQALKWQQHQGLLPPGTQFDLFRGTAAMKQDEEETYPTSLSHQIKFGKKTHPECARFSPDGQYLVSCSVDGIIEVWDYLSGKLKKDLQYQADESFMMHEEPVLCVDFSRDSEMLASGSQDGKIKVWRIRTGQCLRRLERAHSKGYMASSLERC

SEQ ID NO: 173961 - protein, 337 aa, Zea Mays
MASSASTLEIEARDVVKIVLQFCKENSLQQTFQTLQNECQVSLNTVDSIDTFIADINAGRWDAVLPQVAQLKLPRKKLEDLYEQIVLEMAELRELDTARAILRQTQVMGVMKQEQPERYLRLEHLLVRTYFDPNEAYQESTKEKRRALIAQAVASEVSVVPPSRLMALIGQALKWQQHQGLLPPGTQFDLFRGTAAMKQDEEETYPTSLSHQIKFGKKTHPECARFSPDGQYLVSCSVDGIIEVWDYLSGKLKKDLQYQADESFMMHEEPVLCVDFSRDSEMLASGSQDGKIKVWRIRTGQCLRRLERAHSKGVTSVTFSRDGTQILRYMASSLERC

SEQ ID NO: 173962 - protein, 353 aa, Zea Mays
MVISFFFLYAVYNFGPSRFPAPTPVISTGRAQPIAVPAIHLEELKEITKNFSSDALIGEGSYARVYFGVLKDGTKSAVKKLDSSKQPDQEFLVQVSAVSRLKHENVVQLVGYCAEGSTRVLAYEYATRGSLHDILHGKKGVKGAQPGPVLSWMQRARIAVCAARGLEFLHEKADPRVVHRDIKSSNILLFDHDVAKIGDFDISNQAPDMAARLHSTRVLGTFGYHAPEYAMTGQLSTKSDVYSFGVVLLELLTGRKPVDHTLPRGQQSLVTWATPRLSEDKVRQCVDPRLGDEYPPKAVAKMAAVAALCVQYEGEFRPNMSIVVKALNPLLHSRSGNRPTASSASHAAERSGL

SEQ ID NO: 173963 - protein, 1520 aa, Zea Mays
MGCSPEGGSAACPDCLRRLVLRDLAGSGLSFVYGLSDSPLPFAASAVVQIASDGDEGSIGRQHISSFVLVGLCGGKVPFNSQQCDNSSLENCIHKDPQAEQTLYNGDNEYTEQSDSSSCIECIEGCKSSSGPCKQPLAISTITKLAPACYLSIGHTSEVRELITGYLTSSSEEYVINSLNLLFENKISGSAGLDFLSFVGFSAFDDLHSSGCVRHPNILPVLGILETSDCCYMLQPKAPYTLENIMHYSPEAFCSDWHIRFLVYQIISAVAYLHDLGVHHGNLRPSKILMSDSLWPYLSISDTCPVKHSWGVANHKCSPNSCCFMEDCSSKAIYSGFKLQSSLDWHSHFKQWWKGELSNYEYLLVLNKLAGRRWGDPGFHTVMPWVIDFTGIPDESSDNGWRDLTKSKWRLAKGDEQLDFTYSSSEVPHHVSDECLSELAVCSYKARRLPKTILRSAVRSVYEPNEYPSSMQRLYQWTPDECIPEFYSDPQIFTSLHSEMSDLALPSWATSAADFIYLHRDALESDRVSQQLHHWIDITFGYKLSGEASVEAKNVMLPSNDPSRPKSIGRHQLFTRPHPKRLVSTPHAVYHNNLDSCARCCGKRSGATTDAVLNGCGSPNMVSEIGRLEEFEKATLFAELEYQLNPVYDYADGDPSTCFSSNKYPKKQNADQILQHDNALPAAPNFDLGSFLECFESDDNSHMGYQELLLWNKKSNSQNECHANDVFSIGCILAEIYVQKPLFDNALLSAYKEIGIMPGALQGLPSHVTLLVESCIQREWKRRPSAKHLLESSYFPPSVRSAYMFLAPLQVLSTSRERIKYAAKLASEGALKAMGEFAAEISPNKIIASAASTVLIVSRGLLGENFVVKQILPLLLNVIFSCIDSSKMSKPEPQHSWNSFALIDSLSALEGLVLVLPVKTVIKELLQDQACLYVKVLMQIPLDLRVIQVAATALIDLCQRIGPENTSIYVLPQLKELFAELAFSHDSSGLNHPIKGFKSSDENKNKPIKVESRIDLLLLLYPFLASLVGIEKLRESCSTWFLLEQALQRLYNWKWEPSGDCSKNAENMKGQRLQPGNYMSSEFVPTKLLFNGVGWSMPQSETTKKNGRNTAASNLENETSSDNLSTSSSGNQPWFWFPTPDSSWGVPEFLGRGGGLRDELPWKIKASILYSARAHPGALRSLAVHDDECTVFTGGVGPGFKGSIQRWELPNMNCTSGYYGHEEVVNSICILSITGRVASCDGTIHIWNGQSGKLIAAHAESSTTFPLQTPSIEQANMLNQDALSGGILSNAFRGSLYTTMHYMESEGILVAGMGNGSIRFIDISQDQKLHLWKSDTAEISFSSLVSAICSCGSNKLRKGSLMASSWIAAGLSSGYCRLLDKRSGNIIAVWRAHDGHITKLAAPDDHLILSSSLDKTLRVWDLRRNLATQSNIFRSHSDGISNFSVWGQDVVSISRNKIALTSLSRPESEIGHQQLALQNLYSADRGVKHKNLSVLSTIAVLPLSRLFVVGTEDGFLKMCH

SEQ ID NO: 173964 - protein, 847 aa, Zea Mays
MGCSPEGGSAACPDCLRRLVLRDLAGSGLSFVYGLSDSPLPFAASAVVQIASDGDEGSIGRQHISSFVLVGLCGGKVPFNSQQCDNSSLENCIHKDPQAEQTLYNGDNEYTEQSDSSSCIECIEGCKSSSGPCKQPLAISTITKLAPACYLSIGHTSEVRELITGYLTSSSEEYVINSLNLLFENKISGSAGLDFLSFVGFSAFDDLHSSGCVRHPNILPVLGILETSDCCYMLQPKAPYTLENIMHYSPEAFCSDWHIRFLVYQIISAVAYLHDLGVHHGNLRPSKILMSDSLWPYLSISDTCPVKHSWGVANHKCSPNSCCFMEDCSSKAIYSGFKLQSSLDWHSHFKQWWKGELSNYEYLLVLNKLAGRRWGDPGFHTVMPWVIDFTGIPDESSDNGWRDLTKSKWRLAKGDEQLDFTYSSSEVPHHVSDECLSELAVCSYKARRLPKTILRSAVRSVYEPNEYPSSMQRLYQWTPDECIPEFYSDPQIFTSLHSEMSDLALPSWATSAADFIYLHRDALESDRVSQQLHHWIDITFGYKLSGEASVEAKNVMLPSNDPSRPKSIGRHQLFTRPHPKRLVSTPHAVYHNNLDSCARCCGKRSGATTDAVLNGCGSPNMVSEIGRLEEFEKATLFAELEYQLNPVYDYADGDPSTCFSSNKYPKKQNADQILQHDNALPAAPNFDLGSFLECFESDDNSHMGYQELLLWNKKSNSQNECHANDVFSIGCILAEIYVQKPLFDNALLSAYKEIGIMPGALQGLPSHVTLLVESCIQREWKRRPSAKHLLESSYFPPSVRSAYMFLAPLQVLSTSRERIKYAAKLASEGALKAMGEFAAEMHQNIHI

SEQ ID NO: 173965 - protein, 850 aa, Zea Mays
MYGFLHIFVPYSDNSSLENCIHKDPQAEQTLYNGDNEYTEQSDSSSCIECIEGCKSSSGPCKQPLAISTITKLAPACYLSIGHTSEVRELITGYLTSSSEEYVINSLNLLFENKISGSAGLDFLSFVGFSAFDDLHSSGCVRHPNILPVLGILETSDCCYMLQPKAPYTLENIMHYSPEAFCSDWHIRFLVYQIISAVAYLHDLGVHHGNLRPSKILMSDSLWPYLSISDTCPVKHSWGVANHKCSPNSCCFMEDCSSKAIYSGFKLQSSLDWHSHFKQWWKGELSNYEYLLVLNKLAGRRWGDPGFHTVMPWVIDFTGIPDESSDNGWRDLTKSKWRLAKGDEQLDFTYSSSEVPHHVSDECLSELAVCSYKARRLPKTILRSAVRSVYEPNEYPSSMQRLYQWTPDECIPEFYSDPQIFTSLHSEMSDLALPSWATSAADFIYLHRDALESDRVSQQLHHWIDITFGYKLSGEASVEAKNVMLPSNDPSRPKSIGRHQLFTRPHPKRLVSTPHAVYHNNLDSCARCCGKRSGATTDAVLNGCGSPNMVSEIGRLEEFEKATLFAELEYQLNPVYDYADGDPSTCFSSNKYPKKQNADQILQHDNALPAAPNFDLGSFLECFESDDNSHMGYQELLLWNKKSNSQNECHANDVFSIGCILAEIYVQKPLFDNALLSAYKEIGIMPGALQGLPSHVTLLVESCIQREWKRRPSAKHLLESSYFPPSVRSAYMFLAPLQVLSTSRERIKYAAKLASEGALKAMGEFAAEMCAPYCLSLLSSSLSDVDTESALSLLKEFLGSLTIQATKDLVLHIIQKILQASTRIFTSEGCLPSRLFYSGFVEEIGEKNLY

SEQ ID NO: 173966 - protein, 1356 aa, Zea Mays
MGCSPEGGSAACPDCLRRLVLRDLAGSGLSFVYGLSDSPLPFAASAVVQIASDGDEGSIGRQHISSFVLVGLCGGKVPFNSQQCDNSSLENCIHKDPQAEQTLYNGDNEYTEQSDSSSCIECIEGCKSSSGPCKQPLAISTITKLAPACYLSIGHTSEVRELITGYLTSSSEEYVINSLNLLFENKISGSAGLDFLSFVGFSAFDDLHSSGCVRHPNILPVLGILETSDCCYMLQPKAPYTLENIMHYSPEAFCSDWHIRFLVYQIISAVAYLHDLGVHHGNLRPSKILMSDSLWPYLSISDTCPVKHSWGVANHKCSPNSCCFMEDCSSKAIYSGFKLQSSLDWHSHFKQWWKGELSNYEYLLVLNKLAGRRWGDPGFHTVMPWVIDFTGIPDESSDNGWRDLTKSKWRLAKGDEQLDFTYSSSEVPHHVSDECLSELAVCSYKARRLPKTILRSAVRSVYEPNEYPSSMQRLYQWTPDECIPEFYSDPQIFTSLHSEMSDLALPSWATSAADFIYLHRDALESDRVSQQLHHWIDITFGYKLSGEASVEAKNVMLPSNDPSRPKSIGRHQLFTRPHPKRLVSTPHAVYHNNLDSCARCCGKRSGATTDAVLNGCGSPNMVSEIGRLEEFEKATLFAELEYQLNPVYDYADGDPSTCFSSNKYPKKQNADQILQHDNALPAAPNFDLGSFLECFESDDNSHMGYQELLLWNKKSNSQNECHANDVFSIGCILAEIYVQKPLFDNALLSAYKEIGIMPGALQGLPSHVTLLVESCIQREWKRRPSAKHLLESSYFPPSVRSAYMFLAPLQVLSTSRERIKYAAKLASEGALKAMGEFAAEMCAPYCLSLLSSSLSDVDTESALSLLKEFLGSLTIQATKDLVLHIIQKILQAPEYSHLKVAFLQDSFIRDLWKKLGKKTYIEKIHPLVISNLYSSPNKIIASAASTVLIVSSEELGIPITIHQTILPLIHCFGKGLCADGINTLVRIGGLLGENFVVKQILPLLLNVIFSCIDSSKMSKPEPQHSWNSFALIDSLSALEGLVLVLPVKTVIKELLQDQACLYVKVLMQIPLDLRVIQVAATALIDLCQRIGPENTSIYVLPQLKELFAELAFSHDSSGLNHPIKGFKSSDENKNKPIKVESRIDLLLLLYPFLASLVGIEKLRESCSTWFLLEQALQRLYNWKWEPSGDCSKNAENMKGQRLQPGNYMSSEFVPTKLLFNGVGWSMPQSETTKKNGRNTAASNLENETSSDNLSTSSSGNQPWFWFPTPDSSWGVPEFLGRGGGLRDELPWKIKASILYSARAHPGALRSLAVHDDECTVFTGGVGPGFKGSIQRWELPNMNCTSGYYGHEESGFL

SEQ ID NO: 173967 - protein, 993 aa, Zea Mays
MGCSPEGGSAACPDCLRRLVLRDLAGSGLSFVYGLSDSPLPFAASAVVQIASDGDEGSIGRQHISSFVLVGLCGGKVPFNSQQCDNSSLENCIHKDPQAEQTLYNGDNEYTEQSDSSSCIECIEGCKSSSGPCKQPLAISTITKLAPACYLSIGHTSEVRELITGYLTSSSEEYVINSLNLLFENKISGSAGLDFLSFVGFSAFDDLHSSGCVRHPNILPVLGILETSDCCYMLQPKAPYTLENIMHYSPEAFCSDWHIRFLVYQIISAVAYLHDLGVHHGNLRPSKILMSDSLWPYLSISDTCPVKHSWGVANHKCSPNSCCFMEDCSSKAIYSGFKLQSSLDWHSHFKQWWKGELSNYEYLLVLNKLAGRRWGDPGFHTVMPWVIDFTGIPDESSDNGWRDLTKSKWRLAKGDEQLDFTYSSSEVPHHVSDECLSELAVCSYKARRLPKTILRSAVRSVYEPNEYPSSMQRLYQWTPDECIPEFYSDPQIFTSLHSEMSDLALPSWATSAADFIYLHRDALESDRVSQQLHHWIDITFGYKLSGEASVEAKNVMLPSNDPSRPKSIGRHQLFTRPHPKRLVSTPHAVYHNNLDSCARCCGKRSGATTDAVLNGCGSPNMVSEIGRLEEFEKATLFAELEYQLNPVYDYADGDPSTCFSSNKYPKKQNADQILQHDNALPAAPNFDLGSFLECFESDDNSHMGYQELLLWNKKSNSQNECHANDVFSIGCILAEIYVQKPLFDNALLSAYKEIGIMPGALQGLPSHVTLLVESCIQREWKRRPSAKHLLESSYFPPSVRSAYMFLAPLQVLSTSRERIKYAAKLASEGALKAMGEFAAEMCAPYCLSLLSSSLSDVDTESALSLLKEFLGSLTIQATKDLVLHIIQKILQAPEYSHLKVAFLQDSFIRDLWKKLGKKTYIEKIHPLVISNLYSSPNKIIASAASTVLIVSSEELGIPITIHQTILPLIHCFGKGLCADGINTLGDFLEKILL

SEQ ID NO: 173968 - protein, 319 aa, Zea Mays
MAGSEAFDLLEDSRQLTSASSLHPLLKNIEGGSMRVASQDEAAQRAPIPNWRSLGWFEDGVMCVGSQEQSGRPLRPITEALSPQMSDILEIRLSPKVAEVPMMEPCDGDEVVQTAMSYEFGNVSDRRIEGKDHVGSFQLTFSQSEIHGSLISPSDLSLRAPSEAFSPTDDTALHVYTRRVCNNRENADMPADTDDDPSAISPTLIKRFKKNNSDNRADELNGPRSPGTTVMVGTDLNDLVSSLLVTPDGLSFMLQSAQASAGAPHHSRHLAGVGIEYDKQELCSRSTKQAMKALLLMLKRRQLFLDGKCQMNLSCCQKC

SEQ ID NO: 173969 - protein, 154 aa, Zea Mays
MKTDDDAFVRIDEVISSLKKSNSNGLLYGLISFQSSPHRDKGSKWFISRKEWPFDMYPPWAHGPGYVISRDIAKFVVQGHQELTLQLFKLEDVAMGIWIQQYKNSGQQVNIVTDDRFYNEGCEADYVLAHYQTPRLMMCLWEKLKTEYHAICCE

SEQ ID NO: 173970 - protein, 199 aa, Zea Mays
MELWREAQLYGDIQLMPFVDYYTLITLKTISICIFGTKIVPAKYIMKTDDDAFVRIDEVISSLKKSNSNGLLYGLISFQSSPHRDKGSKWFISRKEWPFDMYPPWAHGPGYVISRDIAKFVVQGHQELTLQLFKLEDVAMGIWIQQYKNSGQQVNIVTDDRFYNEGCEADYVLAHYQTPRLMMCLWEKLKTEYHAICCE

SEQ ID NO: 173971 - protein, 220 aa, Zea Mays
MKKCSGVLFILTLAVVLFLLSPSPSPTPPPNTAPNGPITDLLPTLPGLSDLYPPAPNSTAHLSWGLLRPLLCRSDALPGTSAGVLEAAEAWRNLTLAVTAAASEEEARLQGLRCSSSVGGDLRTGRATLPCGLSEGAALTVVGILREGAAKFWVEMLGANGEVVLHVNVSLGAAGVLVEQNSWTPEEGWGEWERCPPVGDVGSSNSSLQLRQKLFLQSTS

SEQ ID NO: 173972 - protein, 595 aa, Zea Mays
MKKCSGVLFILTLAVVLFLLSPSPSPTPPPNTAPNGPITDLLPTLPGLSDLYPPAPNSTAHLSWGLLRPLLCRSDALPGTSAGVLEAAEAWRNLTLAVTAAASEEEARLQGLRCSSSVGGDLRTGRATLPCGLSEGAALTVVGILREGAAKFWVEMLGANGEVVLHVNVSLGAAGVLVEQNSWTPEEGWGEWERCPPVGDVGSSNSSLQLSLTSPVDGLVHCNEKVGARIVQESNNTVVNITGNQPEDWQSQTGHGQLSGRFSIVEGEPFTVTLWAGVEGFHMTVNGRHETSFAYRERSEPWLVAEVMFSGDLELLSFLANELPVSEDIDMENVAVLKAPPLPKKQTFLLVGVFSTGNNFKRRMALRRTWMQYEAVRSGDVVVRFFTGLHKNEQVNMELWREAQLYGDIQLMPFVDYYTLITLKTISICIFGTKIVPAKYIMKTDDDAFVRIDEVISSLKKSNSNGLLYGLISFQSSPHRDKGSKWFISRKEWPFDMYPPWAHGPGYVISRDIAKFVVQGHQELTLQLFKLEDVAMGIWIQQYKNSGQQVNIVTDDRFYNEGCEADYVLAHYQTPRLMMCLWEKLKTEYHAICCE

SEQ ID NO: 173973 - protein, 89 aa, Zea Mays
MDNYGKGRPSVMKTTRLLLDEDGWRGFYRGFGPRFLNMSVWGTSMIVTYELISRSFFSKSIIYIFQSGRSTNFFLSYSEPAERLSVKSE

SEQ ID NO: 173974 - protein, 136 aa, Zea Mays
MTFKYCEHFDLSEASQIAIANGIAGLMSSICSCSYFVPLDVICQRLMVQGLPGMATYRGPFDVINKVVRTEGIRGLYRGFGITMLTQSPASALWWSAYGGAQHAIWSRNNCWCLLVDYHHSSRYHQDSASGYGQLW

SEQ ID NO: 173975 - protein, 215 aa, Zea Mays
MTFKYCEHFDLSEASQIAIANGIAGLMSSICSCSYFVPLDVICQRLMVQGLPGMATYRGPFDVINKVVRTEGIRGLYRGFGITMLTQSPASALWWSAYGGAQHAIWRSLGYGNDSQTKPSQSELVVVQATAGTIAGACSSIITTPVDTIKTRLQVMDNYGKGRPSVMKTTRLLLDEDGWRGFYRGFGPRFLNMSVWGTSMIVTYELIKRLSVKSE

SEQ ID NO: 173976 - protein, 489 aa, Zea Mays
MRNARRNINDAPVNAYEQQRIAIIAENKRKLASLNIPTLKTAGPSEKRTKRTHDTSVVATEGHNLRARPQRNYNGNENIQIDEDLVINQSDGDFLCDNEADFEDIPKKRAGKGRGITRLDDIFARKSDMPKIKITLNEHGQPVGKDCRKFSSAIGCLVRKKLSVACADWRLVPAEKKYEVWTSIKEIYDIDDAAFNWFLASAGRKWKEFKATLKEQYFNEKLTNEELKTKVGDRVDDDAWNFLTEYWMSPNFDNKLKAIVEARPELKERSIQQGDAFAAVCGEKEPRGRVRVLGLGPTPQEVGTPGLKCYTPTRLQMEVFARKKLESEKAALEKRIADMQEEMMEREKQNVEMGSHNDSNSRLHSQSPREEHIHQAHDAQFQEDDASLDNHCEEDEYVFLPRGGNIRPTSVTTTRPRIVSATRFSHDALVGEDGAQTSVPPNECNPIQPKRATTSVWPRNDAATRFSHDVRPRNDAATRFSHDVQLGKM

SEQ ID NO: 173977 - protein, 596 aa, Zea Mays
MRNARRNINDAPVNAYEQQRIAIIAENKRKLASLNIPTLKTAGPSEKRTKRTHDTSVVATEGHNLRARPQRNYNGNENIQIDEDLVINQSDGDFLCDNEDFEDIPKKRAGKGRGITRLDDIFARKSDMPKIKITLNEHGQPVGKDCRKFSSAIGCLVRKKLSVACADWRLVPAEKKYEVWTSIKEIYDIDDAAFNWFLASAGRKWKEFKATLKEQYFNEKLTNEELKTKVGDRVDDDAWNFLTEYWMSPNFDNKLKAIVEARPELKERSIQQGDAFAAVCGEKEPRGRVRVLGLGPTPQEVGTPGLKCYTPTRLQMEVFARKKLESEKAALEKRIADMQEEMMEREKQNVEMGSHNDSNSRLHSQSPREEHIHQAHDAQFQEDDASLDNHCEEDEYVFLPRGGNIRPTSVTTTRPRIVSATRFSHDALVGEDGAQTSVPPNECNPIQPKRATTSVWPRNDAATRFSHDVRPRNDAATRFSHDVQLRNDTATHFSHDALVGEDVILYAMLRSDPVAKGTITSTNPNTVLGGENLGTQFCEVVVNVVLKRDADLPRPYDHMETMGDAYMMPVAWPYKRMKVSKASKSSHVATGNSGIC

SEQ ID NO: 173978 - protein, 621 aa, Zea Mays
MRNARRNINDAPVNAYEQQRIAIIAENKRKLASLNIPTLKTAGPSEKRTKRTHDTSVVATEGHNLRARPQRNYNGNENIQIDEDLVINQSDGDFLCDNEDFEDIPKKRAGKGRGITRLDDIFARKSDMPKIKITLNEHGQPVGKDCRKFSSAIGCLVRKKLSVACADWRLVPAEKKYEVWTSIKEIYDIDDAAFNWFLASAGRKWKEFKATLKEQYFNEKLTNEELKTKVGDRVDDDAWNFLTEYWMSPNFDNKLKAIVEARPELKERSIQQGDAFAAVCGEKEPRGRVRVLGLGPTPQEVGTPGLKCYTPTRLQMEVFARKKLESEKAALEKRIADMQEEMMEREKQNVEMGSHNDSNSRLHSQSPREEHIHQAHDAQFQEDDASLDNHCEEDEYVFLPRGGNIRPTSVTTTRPRIVSATRFSHDALVGEDGAQTSVPPNECNPIQPKRATTSVWPRNDAATRFSHDVRPRNDAATRFSHDVQLRNDTATHFSHDALVGEDVILYAMLRSDPVAKGTITSTNPNTVLGGENLGTQFCEVVVNVVLKRDADLPRPYDHMETMGDAYMMPVAWPYKRMKVSKASKSSHVATEFIAPSIEMLCICSEEIEVGEMRDLVRLGKD

SEQ ID NO: 173979 - protein, 543 aa, Zea Mays
MRNARRNINDAPVNAYEQQRIAIIAENKRKLASLNIPTLKTAGPSEKRTKRTHDTSVVATEGHNLRARPQRNYNGNENIQIDEDLVINQSDGDFLCDNEDFEDIPKKRAGKGRGITRLDDIFARKSDMPKIKITLNEHGQPVGKDCRKFSSAIGCLVRKKLSVACADWRLVPAEKKYEVWTSIKEIYDIDDAAFNWFLASAGRKWKEFKATLKEQYFNEKLTNEELKTKVGDRVDDDAWNFLTEYWMSPNFDNKLKAIVEARPELKERSIQQGDAFAAVCGEKEPRGRVRVLGLGPTPQEVGTPGLKCYTPTRLQMEVFARKKLESEKAALEKRIADMQEEMMEREKQNVEMGSHNDSNSRLHSQSPREEHIHQAHDAQFQEDDASLDNHCEEDEYVFLPRGGNIRPTSVTTTRPRIVSATRFSHDALVGEDGAQTSVPPNECNPIQPKRATTSVWPRNDAATRFSHDVRPRNDAATRFSHDVQLRNDTATHFSHDALMKVSKASKSSHVATEFIAPSIEMLCICSEEIEVGEMRDLVRLGKD

SEQ ID NO: 173980 - protein, 308 aa, Zea Mays
MSMQDNFATVTDAQHVPINNKTVRRLSLNLKSNSKQDQPAARNETTDLSHARSVTVFGHASATPHLTDLKVVRVLDLEGCKGPVCLDGLCKLVLLRYLSLRGTDVSELPAAIGDLRCLETLDVRSTKVEELPPSIVRLQKLMHLLAGSAKLPDGMDKMKALRSLSCAATTKSSANVVEELSKHHNLRQLELYYYATETPGNEKQIKFPADGLQTVKQLCIRCTSPSVTFEPRVLPKVQALVLRFEKGRADDTIGVSGLEHLSSLKHLVLEFEQHDAGAMATVTAVRMAAEGLHLDHQYITLKVDGKKY

SEQ ID NO: 173981 - protein, 79 aa, Zea Mays
MRGVTGGGATNRSPVRRPRRIRTRARTVETGTRTAGTARRPSPSAVKPPRSVGRLATEPIREDACHLKSKLVPGISSAR

SEQ ID NO: 173982 - protein, 317 aa, Zea Mays
MDDHLIRHVVKFNLLKPIIDVFVDNGERYNMLHSGVLELLEYIRKENIKTLIIYAIESFWDELAIFEHFGSIQAFKLKYQQYLESAEPRLNASVPDMRKKAEQRGLEKEEEDYFNEDSDEEDSGSGRRAKHAQNQNNKPKSKVPNGSEADDTDGASRPKSAGLVDYDDDDDEDFNPPPKEPSRPAEDDVPLNISPLKRKPVNAVDGKHSDGEGRRRQKIETRISCAKIAAVTSTAIKHTDLQNKYASHLLTSATPSTEANGIFSEHGTNYEEQQHPMENTETSRQTGGDCIKDVGSMSPEKAVNTTNTSDSEPYSVR

SEQ ID NO: 173983 - protein, 221 aa, Zea Mays
MRKKAEQRGLEKEEEDYFNEDSDEEDSGSGRRAKHAQNQNNKPKSKVPNGSEADDTDGASRPKSAGLVDYDDDDDEDFNPPPKEPSRPAEDDVPLNISPLKRKPVNAVDGKHSDGEGRRRQKIETRISCAKIAAVTSTAIKHTDLQNKYASHLLTSATPSTEANGIFSEHGTNYEEQQHPMENTETSRQTGGDCIKDVGSMSPEKAVNTTNTSDSEPYSVR

SEQ ID NO: 173984 - protein, 567 aa, Zea Mays
MAEERWALVGGQGLDGEKQTEAGEKMSAGWKKARVKVYRLADGGKWDDQGTGYVSIDYIEGSKELGLTVLDEDDNDTLLMHNITSDDIYRKQEETIISWRDREAATDLALSFQEAAGCSYIWEHICDIQRNLQFSNLGALEVGPRQSSESLEASRIMHSNDDSFRSANGGEFRELPPVELSNLPFILKTVLEAGITDQMHVAELITQDNDFFPKIVDIFRMCEDLENIDDLHMIFKLVKGIILLNSPSIFDKIFSDEFILDIIGALEYDPEVPRVQNHRAFLKDHVVFKEAIRIENVSVVSKIHQTYRIGYLKDVILPRILDDATLASLNTMIHSNNASVISLLKDDTLFIRRLFARMRSSDISMESKRELVLFLHEFCTLSKSLPLVQQLRLFRDLSGEGVFEIISDVLQSQDRKIISAGTDILILFLNQDPNLLRSYIVQQEGNSLLGLLVKGMVTDFSEEMHCQFLEILRILMDSFTTSGAHRDVVIEIFYERHLDYLVDVIASSCPPRSLSRSSSNSVHVGGNAEGHCIKPEILLNVCELLCFCVVHHPYRIKYCSVQTSIIP

SEQ ID NO: 173985 - protein, 796 aa, Zea Mays
MQELWCSYQVFVQLLPFDLFLCSLLVLCREHICDIQRNLQFSNLGDDSFRSANGGEFRELPPVELSNLPFILKTVLEAGITDQMHVAELITQDNDFFPKIVDIFRMCEDLENIDDLHMIFKLVKGIILLNSPSIFDKIFSDEFILDIIGALEYDPEVPRVQNHRAFLKDHVVFKEAIRIENVSVVSKIHQTYRIGYLKDVILPRILDDATLASLNTMIHSNNASVISLLKDDTLFIRRLFARMRSSDISMESKRELVLFLHEFCTLSKSLPLVQQLRLFRDLSGEGVFEIISDVLQSQDRKIISAGTDILILFLNQDPNLLRSYIVQQEGNSLLGLLVKGMVTDFSEEMHCQFLEILRILMDSFTTSGAHRDVVIEIFYERHLDYLVDVIASSCPPRSLSRSSSNSVHVGGNAEGHCIKPEILLNVCELLCFCVVHHPYRIKCNFLMNNAIEKILTLTQRREKFLVVAAVRFMRTIISRNDDHLIRHVVKFNLLKPIIDVFVDNGERYNMLHSGVLELLEYIRKENIKTLIIYAIESFWDELAIFEHFGSIQAFKLKYQQYLESAEPRLNASVPDMRKKAEQRGLEKEEEDYFNEDSDEEDSGSGRRAKHAQNQNNKPKSKVPNGSEADDTDGASRPKSAGLVDYDDDDDEDFNPPPKEPSRPAEDDVPLNISPLKRKPVNAVDGKHSDGEGRRRQKIETRISCAKIAAVTSTAIKHTDLQNKYASHLLTSATPSTEANGIFSEHGTNYEEQQHPMENTETSRQTGGDCIKDVGSMSPEKAVNTTNTSDSEPYSVR

SEQ ID NO: 173986 - protein, 889 aa, Zea Mays
MAEERWALVGGQGLDGEKQTEAGEKMSAGWKKARVKVYRLADGGKWDDQGTGYVSIDYIEGSKELGLTVLDEDDNDTLLMHNITSDDIYRKQEETIISWRDREAATDLALSFQEAAGCSYIWEHICDIQRNLQFSNLGDDSFRSANGGEFRELPPVELSNLPFILKTVLEAGITDQMHVAELITQDNDFFPKIVDIFRMCEDLENIDDLHMIFKLVKGIILLNSPSIFDKIFSDEFILDIIGALEYDPEVPRVQNHRAFLKDHVVFKEAIRIENVSVVSKIHQTYRIGYLKDVILPRILDDATLASLNTMIHSNNASVISLLKDDTLFIRRLFARMRSSDISMESKRELVLFLHEFCTLSKSLPLVQQLRLFRDLSGEGVFEIISDVLQSQDRKIISAGTDILILFLNQDPNLLRSYIVQQEGNSLLGLLVKGMVTDFSEEMHCQFLEILRILMDSFTTSGAHRDVVIEIFYERHLDYLVDVIASSCPPRSLSRSSSNSVHVGGNAEGHCIKPEILLNVCELLCFCVVHHPYRIKCNFLMNNAIEKILTLTQRREKFLVVAAVRFMRTIISRNDDHLIRHVVKFNLLKPIIDVFVDNGERYNMLHSGVLELLEYIRKENIKTLIIYAIESFWDELAIFEHFGSIQAFKLKYQQYLESAEPRLNASVPDMRKKAEQRGLEKEEEDYFNEDSDEEDSGSGRRAKHAQNQNNKPKSKVPNGSEADDTDGASRPKSAGLVDYDDDDDEDFNPPPKEPSRPAEDDVPLNISPLKRKPVNAVDGKHSDGEGRRRQKIETRISCAKIAAVTSTAIKHTDLQNKYASHLLTSATPSTEANGIFSEHGTNYEEQQHPMENTETSRQTGGDCIKDVGSMSPEKAVNTTNTSDSEPYSVR

SEQ ID NO: 173987 - protein, 837 aa, Zea Mays
MAEERWALVGGQGLDGEKQTEAGEKMSAGWKKARVKVYRLADGGKWDDQGTGYVSIDYIEGSKELGLTVLDEDDNDTLLMHNITSDDIYRKQEETIISWRDREAATDLALSFQEAAGCSYIWEHICDIQRNLQFSNLGALEVGPRQSSESLEASRIMHSNDDSFRSANGGEFRELPPVELSNLPFILKTVLEAGITDQMHVAELITQDNDFFPKIVDIFRMCEDLENIDDLHMIFKLVKGIILLNSPSIFDKIFSDEFILDIIGALEYDPEVPRVQNHRAFLKDHVVFKEAIRIENVSVVSKIHQTYRIGYLKDVILPRILDDATLASLNTMIHSNNASVISLLKDDTLFIRRLFARMRSSDISMESKRELVLFLHEFCTLSKSLPLVQQLRLFRDLSGEGVFEIISDVLQSQDRKIISAGTDILILFLNQDPNLLRSYIVQQEGNSLLGLLVKGMVTDFSEEMHCQFLEILRILMDSFTTSGAHRDVVIEIFYERHLDYLVDVIASSCPPRSLSRSSSNSDDHLIRHVVKFNLLKPIIDVFVDNGERYNMLHSGVLELLEYIRKENIKTLIIYAIESFWDELAIFEHFGSIQAFKLKYQQYLESAEPRLNASVPDMRKKAEQRGLEKEEEDYFNEDSDEEDSGSGRRAKHAQNQNNKPKSKVPNGSEADDTDGASRPKSAGLVDYDDDDDEDFNPPPKEPSRPAEDDVPLNISPLKRKPVNAVDGKHSDGEGRRRQKIETRISCAKIAAVTSTAIKHTDLQNKYASHLLTSATPSTEANGIFSEHGTNYEEQQHPMENTETSRQTGGDCIKDVGSMSPEKAVNTTNTSDSEPYSVR

SEQ ID NO: 173988 - protein, 502 aa, Zea Mays
MCCRVKIEKSFQLDILILFLNQDPNLLRSYIVQQEGNSLLGLLVKGMVTDFSEEMHCQFLEILRILMDSFTTSGAHRDVVIEIFYERHLDYLVDVIASSCPPRSLSRSSSNSVHVGGNAEGHCIKPEILLNVCELLCFCVVHHPYRIKCNFLMNNAIEKILTLTQRREKFLVVAAVRFMRTIISRNDDHLIRHVVKFNLLKPIIDVFVDNGERYNMLHSGVLELLEYIRKENIKTLIIYAIESFWDELAIFEHFGSIQAFKLKYQQYLESAEPRLNASVPDMRKKAEQRGLEKEEEDYFNEDSDEEDSGSGRRAKHAQNQNNKPKSKVPNGSEADDTDGASRPKSAGLVDYDDDDDEDFNPPPKEPSRPAEDDVPLNISPLKRKPVNAVDGKHSDGEGRRRQKIETRISCAKIAAVTSTAIKHTDLQNKYASHLLTSATPSTEANGIFSEHGTNYEEQQHPMENTETSRQTGGDCIKDVGSMSPEKAVNTTNTSDSEPYSVR

SEQ ID NO: 173989 - protein, 894 aa, Zea Mays
MAEQEGRDAEAGGDAAAAAVASHTSSMQRVKVYRLADGGKWDDQGTGYVSIDYIEGSKELGLTVLDEDDNDTLLMHNITSDDIYRKQEETIISWRDREAATDLALSFQEAAGCSYIWEHICDIQRNLQFSNLGALEVGPRQSSESLEASRIMHSNDDSFRSANGGEFRELPPVELSNLPFILKTVLEAGITDQMHVAELITQDNDFFPKIVDIFRMCEDLENIDDLHMIFKLVKGIILLNSPSIFDKIFSDEFILDIIGALEYDPEVPRVQNHRAFLKDHVVFKEIHQTYRIGYLKDVILPRILDDATLASLNTMIHSNNASVISLLKDDTLFIRRLFARMRSSDISMESKRELVLFLHEFCTLSKSLPLVQQLRLFRDLSGEGVFEIISDVLQSQDRKIISAGTDILILFLNQDPNLLRSYIVQQEGNSLLGLLVKGMVTDFSEEMHCQFLEILRILMDSFTTSGAHRDVVIEIFYERHLDYLVDVIASSCPPRSLSRSSSNSVHVGGNAEGHCIKPEILLNVCELLCFCVVHHPYRIKCNFLMNNAIEKILTLTQRREKFLVVAAVRFMRTIISRNDDHLIRHVVKFNLLKPIIDVFVDNGERYNMLHSGVLELLEYIRKENIKTLIIYAIESFWDELAIFEHFGSIQAFKLKYQQYLESAEPRLNASVPDMRKKAEQRGLEKEEEDYFNEDSDEEDSGSGRRAKHAQNQNNKPKSKVPNGSEADDTDGASRPKSAGLVDYDDDDDEDFNPPPKEPSRPAEDDVPLNISPLKRKPVNAVDGKHSDGEGRRRQKIETRISCAKIAAVTSTAIKHTDLQNKYASHLLTSATPSTEANGIFSEHGTNYEEQQHPMENTETSRQTGGDCIKDVGSMSPEKAVNTTNTSDSEPYSVR

SEQ ID NO: 173990 - protein, 422 aa, Zea Mays
MAEQEGRDAEAGGDAAAAAVASHTSSMQRVKVYRLADGGKWDDQGTGYVSIDYIEGSKELGLTVLDEDDNDTLLMHNITSDDIYRKQEETIISWRDREAATDLALSFQEAAGCSYIWEHICDIQRNLQFSNLGALEVGPRQSSESLEASRIMHSNDDSFRSANGGEFRELPPVELSNLPFILKTVLEAGITDQMHVAELITQDNDFFPKIVDIFRMCEDLENIDDLHMIFKLVKGIILLNSPSIFDKIFSDEFILDIIGALEYDPEVPRVQNHRAFLKDHVVFKEAIRIENVSVVSKIHQTYRIGYLKDVILPRILDDATLASLNTMIHSNNASVISLLKDDTLFIRRLFARMRSSDISMESKRELVLFLHEFCTLSKSLPLVQQLRLFRDLSGEGVFEIISDVLQSQDRKIISAGYPYTFS

SEQ ID NO: 173991 - protein, 902 aa, Zea Mays
MAEQEGRDAEAGGDAAAAAVASHTSSMQRVKVYRLADGGKWDDQGTGYVSIDYIEGSKELGLTVLDEDDNDTLLMHNITSDDIYRKQEETIISWRDREAATDLALSFQEAAGCSYIWEHICDIQRNLQFSNLGALEVGPRQSSESLEASRIMHSNDDSFRSANGGEFRELPPVELSNLPFILKTVLEAGITDQMHVAELITQDNDFFPKIVDIFRMCEDLENIDDLHMIFKLVKGIILLNSPSIFDKIFSDEFILDIIDDPEVPRVQNHRAFLKDHVVFKEAIRIENVSVVSKIHQTYRIGYLKDVILPRILDDATLASLNTMIHSNNASVISLLKDDTLFIRRLFARMRSSDISMESKRELVLFLHEFCTLSKSLPLVQQLRLFRDLSGEGVFEIISDVLQSQDRKIISAGTDILILFLNQDPNLLRSYIVQQEGNSLLGLLVKGMVTDFSEEMHCQFLEILRILMDSFTTSGAHRDVVIEIFYERHLDYLVDVIASSCPPRSLSRSSSNSVHVGGNAEGHCIKPEILLNVCELLCFCVVHHPYRIKCNFLMNNAIEKILTLTQRREKFLVVAAVRFMRTIISRNDDHLIRHVVKFNLLKPIIDVFVDNGERYNMLHSGVLELLEYIRKENIKTLIIYAIESFWDELAIFEHFGSIQAFKLKYQQYLESAEPRLNASVPDMRKKAEQRGLEKEEEDYFNEDSDEEDSGSGRRAKHAQNQNNKPKSKVPNGSEADDTDGASRPKSAGLVDYDDDDDEDFNPPPKEPSRPAEDDVPLNISPLKRKPVNAVDGKHSDGEGRRRQKIETRISCAKIAAVTSTAIKHTDLQNKYASHLLTSATPSTEANGIFSEHGTNYEEQQHPMENTETSRQTGGDCIKDVGSMSPEKAVNTTNTSDSEPYSVR

SEQ ID NO: 173992 - protein, 354 aa, Zea Mays
MHNITSDDIYRKQEETIISWRDREAATDLALSFQEAAGCSYIWEHICDIQRNLQFSNLGDDSFRSANGGEFRELPPVELSNLPFILKTVLEAGITDQMHVAELITQDNDFFPKIVDIFRMCEDLENIDDLHMIFKLVKGIILLNSPSIFDKIFSDEFILDIIGALEYDPEVPRVQNHRAFLKDHVVFKEAIRIENVSVVSKIHQTYRIGYLKDVILPRILDDATLASLNTMIHSNNASVISLLKDDTLFIRRLFARMRSSDISMESKRELVLFLHEFCTLSKSLPLVQQLRLFRDLSGEGVFEIISDVLQSQDRKIISAGTDILILFLNQDPNLLRSYIVQQEGNSLLGLLATT

SEQ ID NO: 173993 - protein, 362 aa, Zea Mays
MQELWCSYQVFVQLLPFDLFLCSLLVLCREHICDIQRNLQFSNLGALEVGPRQSSESLEASRIMHSNDDSFRSANGGEFRELPPVELSNLPFILKTVLEAGITDQMHVAELITQDNDFFPKIVDIFRMCEDLENIDDLHMIFKLVKGIILLNSPSIFDKIFSDEFILDIIGALEYDPEVPRVQNHRAFLKDHVVFKEAIRIENVSVVSKIHQTYRIGYLKDVILPRILDDATLASLNTMIHSNNASVISLLKDDTLFIRRLFARMRSSDISMESKRELVLFLHEFCTLSKSLPLVQQLRLFRDLSGEGVFEIISDVLQSQDRKIISAGTDILILFLNQDPNLLRSYIVQQEGNSLLGLLATT

SEQ ID NO: 173994 - protein, 88 aa, Zea Mays
MRFMLQSNFIIILIGLTNSILRADEELLSDFGIDVKDECTKFGLVDNVKVHLTPHICFLFLFIFCKFCVSFKLINDRLSYLFFHQINE

SEQ ID NO: 173995 - protein, 84 aa, Zea Mays
MYTIVDCESKCNEYMKQLMQLPPKVTYISKSLRTDNERNIQQHAPLGPGNFCVYMLLILNLHHKLVNFLYSISRRLYRVVKKPN

SEQ ID NO: 173996 - protein, 70 aa, Zea Mays
MGDPWDDEFQLANSIALLSYSVHVHNHLRSLRQELVHVGLITWEGCHIRDRIMHSRCWGPSPSKGPQKHN

SEQ ID NO: 173997 - protein, 91 aa, Zea Mays
MARVACILLTKDRLKGVVCSRVAQTCSCDGGSVGMVDMCKRVKGSICRVVGDPKLGINRFGSPNFSDMKTRSSTGSVVNKYNNVLIKSKLV

SEQ ID NO: 173998 - protein, 430 aa, Zea Mays
MVQPPGRRSLPDWRSGLPEDLLESIGKRLASGHDAAAFRSACSPWRAAVPFAIFGPLLLLPFDADSDRVGFYCVSEKKVFSKTLPDVRGKVPCGSSCGWLALMDEAAAVTLLNPFAGAGAGAGAGARRIELPPAGEHVAAASSSEPVYKVHGRWVLRSTDDYGGDIDAGRVIKLQDMRDVFFREIVLSAPPDAGSECVAMAMLGCSTEVAFCRVGVDNAWTLLDTKLDFSVASIVHCQDKFLAIDYTGEISVFSSNAGAWTLLPSLSPPAGLCHRSYLESNGELHIVGAMVSTSHETQTFTYSSAIYACNLHDRTPEWSRVKDIGDQTLFVSKHFNGSFSGTSVSEYKENTIYFSEPLYGDPYDMVHRLEIVDVVTGRSEVKPVHEKMQGSEILGWIRPNLWKGGGYSEHKEKSQIEGTSNVTGSPKHEM

SEQ ID NO: 173999 - protein, 417 aa, Zea Mays
MVQPPGRRSLPDWRSGLPEDLLESIGKRLASGHDAAAFRSACSPWRAAVPFAIFGPLLLLPFDADSDRVGFYCVSEKKVFSKTLPDVRGKVPCGSSCGWLALMDEAAAVTLLNPFAGAGAGAGAGARRIELPPAGEHVAAASSSEPVYKVHGRWVLRSTDDYGGDIDAGRVIKLQDMRDVFFREIVLSAPPDAGSECVAMAMLGCSTEVAFCRVGVDNAWTLLDTKLDFSVASIVHCQDKFLAIDYTGEISVFSSNAGAWTLLPSLSPPAGLCHRSYLESNGELHIVGAMVSTSHETQTFTYSSAIYACNLHDRTPEWSRVKDIGDQTLFVSKHFNGSFSGTSVSEYKENTIYFSEPLYGDPYDMVHRLEIVDVVTGRSEVKPVHEKMQGSEILGWIRPNLWKGEGNSGIHGNFLMG

SEQ ID NO: 174000 - protein, 419 aa, Zea Mays
MVQPPGRRSLPDWRSGLPEDLLESIGKRLASGHDAAAFRSACSPWRAAVPFAIFGPLLLLPFDADSDRVGFYCVSEKKVFSKTLPDVRGKVPCGSSCGWLALMDEAAAVTLLNPFAGAGAGAGAGARRIELPPAGEHVAAASSSEPVYKVHGRWVLRSTDDYGGDIDAGRVIKLQDMRDVFFREIVLSAPPDAGSECVAMAMLGCSTEVAFCRVGVDNAWTLLDTKLDFSVASIVHCQDKFLAIDYTGEISVFSSNAGAWTLLPSLSPPAGLCHRSYLESNGELHIVGAMVSTSHETQTFTYSSAIYACNLHDRTPEWSRVKDIGDQTLFVSKHFNGSFSGTSVSEYKENTIYFSEPLYGDPYDMVHRLEIVDVVTGRSEVKPVHEKMQGSEILGWIRPNLWKGDQDQVCIWETLKLWG

SEQ ID NO: 174001 - protein, 142 aa, Zea Mays
MCGEVRSTGPLVMEPTTTHIADTSRSTGRTETEKKTINGVIRLALIIHPYQKITQSRDRPPPSLSQTGVRNMYDLDWNRWMVTVQGVEEISLDRSSKGMLVSRVAALRDGTVDLLRKEFKNWKTLGAQVRFGGMWFGSIVLS

SEQ ID NO: 174002 - protein, 112 aa, Zea Mays
MVKNLETGTTVACTKSIEENVKDLRNVKRKEQKKKTNTSTKSLNHASIQGNIQGNDQATLHTKKNKKCSECFEEGHLIRSCPYIKENSSVINKDDKKIDALRRDIRSSHVPM

SEQ ID NO: 174003 - protein, 377 aa, Zea Mays
MAARDPMDAWMNRYRAFAEGVVVMVCPVLLAIALKKVDLKSEEHGGAVPTTMLVVAAVTLVAGSPHAATMLLAPLSSTCLVALACWIVHLILDSWAFPAVGALVGLCSAIRTVMHFTTRAGQGDAEMEYCDRLESSLDFLVGITALLFLGLEGLALEGQINSSSGRLTTPIGTSFVVCVFAASLMLVETMPPRRLVRYLTETIDILTGFAVSLAMFFIMYPLMGLRALLLLAAPFLILMAYVFYVAIGKDDGNNNHQVASANGDEESSGVSSSRRSGAAADGDNKPASLELTKVTFAGFLAVSIPSISKGSVTIYSECFLHLAAAAVVSGLVWRLLTHYKKSQTTVATVADIASFCTHLCVAVAVIPFTIMAGNALS

SEQ ID NO: 174004 - protein, 701 aa, Zea Mays
MPPFSFTSENQSDRTERRYTENIISTSHSDRLPQEKTVQQASTEAPANTLTEMNFPEASVVHEVPVTTSFQTLNPFVEEDDLLEVNQSSQTTNDVWLTVLDIALVTLPTSAPPPSRPPPPLAAKKPPTESVTSEAYAHHCNQRYHHSICSSNTSKTSQIDELEDFFLTKPANSAIGHPQVLKHEGNGHYPSAATASFMDWTEMGHCKRGNQGAFDSMFTSSQYRQPEIDEKAEVCAHETESTDEEKRLENEQIQREHKEEQIRAEREMEEELERERENVRQREQEEQRRREKERVARQAVDKAIREARERSAAEARMQAEKEARQRAERAAVWKAATEARERAAVEAKERAAKAAAEAKEREAAEARERAATESRERDAKVAADARERAARAAAEAREKETAEFQEKATAEARAKAERAAVEKAAAEARWRAERAAFERVATEVKQRAFNDARERAAAAAAAEALARENQQRRATTEPDLESFFGMPSRSSSLPRSYNNTTTNPFDVQPGNAGSGGVRRTPSGSGFPFTQPSSSNLMDGLSSIFGAPLPSAVFQEVDGESEERRKARLERHQRTMERAAKALAEKNERDLQAQQEQEERHRIGESLDFEIKRWAAGKEGNLRALLTTLQYILWPECGWRPVSLTDLITAASVKKEYRKATLCIHPDKVQQKGANLQQKYIAEKVFDLLKEAWKKFNSEELF

SEQ ID NO: 174005 - protein, 699 aa, Zea Mays
MSMPEDPFVTLGGTHKSGYSSLGLFSNLLNNIGMPRKEADTTPDNTSGIFQGSDIFTEFPKAMPPFSFTSENQSDRTERRYTENIISTSHSDRLPQEKTVQQASTEAPANTLTEMNFPEASVVHEVPVTTSFQTLNPFVEEDDLLEVNQSSQTTNDVWLTVLDIALVTLPTSAPPPSRPPPPLAAKKPPTESVTSEAYAHHCNQRYHHSICSSNTSKTSQIDELEDFFLTKPANSAIGHPQVLKHEGNGHYPSAATASFMDWTEMGHCKRGNQGAFDSMFTSSQYRQPEIDEKAEVCAHETESTDEEKRLENEQIQREHKEEQIRAEREMEEELERERENVRQREQEEQRRREKERVARQAVDKAIREARERSAAEARMQAEKEARQRAERAAVWKAATEARERAAVEAKERAAKAAAEAKEREAAEARERAATESRERDAKVAADARERAARAAAEAREKETAEFQEKATAEARAKAERAAVEKAAAEARWRAERAAFERVATEVKQRAFNDARERAAAAAAAEALARENQQRRATTEPDLESFFGMPSRSSSLPRSYNNTTTNPFDVQPGNAGSGGVRRTPSGSGFPFTQPSSSNLMDGLSSIFGAPLPSAVFQEVDGESEERRKARLERHQRTMERAAKALAEKNERDLQAQQEQEERHRIGESLDFEIKRWAAGKEGNLRALLTTLQYISNNCEF

SEQ ID NO: 174006 - protein, 332 aa, Zea Mays
MGALTDSRKRLSADHCLSADHRLPYPSLSPPSLIPPFKRAKLSPIPEHDPSTSDFPPIRPSPQIIHSAAAASTSSTPGPSPSSITASTPLPHRRRLPPPPFQRSIHGPQRILRVFQLGGAARAYATGHSWFSPQSPPPRPLGLQQYVELVNSVTHPSPPTPAAITNATRQAEVAPFEVVAIEEDEDERKQQNEEEVMGSVVVRRVPPYKELYEASRQKRDAKLKTLEFEVRLTEQGRLSLERLAEALPRITPKKEEVPEPFVPLTDEDEEMVRQALHGKNRHERLAVHEPSNIVITREIMQCLNNQEWLNDEVLKMSFLQHLFLQEADFQWV

SEQ ID NO: 174007 - protein, 460 aa, Zea Mays
MGALTDSRKRLSADHCLSADHRLPYPSLSPPSLIPPFKRAKLSPIPEHDPSTSDFPPIRPSPQIIHSAAAASTSSTPGPSPSSITASTPLPHRRRLPPPPFQRSIHGPQRILRVFQLGGAARAYATGHSWFSPQSPPPRPLGLQQYVELVNSVTHPSPPTPAAITNATRQAEVAPFEVVAIEEDEDERKQQNEEEVMGSVVVRRVPPYKELYEASRQKRDAKLKTLEFEVRLTEQGRLSLERLAEALPRITPKKEEVPEPFVPLTDEDEEMVRQALHGKNRHERLAVHEPSNIVITREIMQCLNNQEWLNDELISSGYDYKAVRRWTTKRKLGYSLIDCDKIFVPIHKEVHWCLAVINIRDKKFQYLDSLGGMDMKVLNVLAKYIVDEVKDKSGQQMDVLSWKQEGVKNLPLQENGWDCGMFMLKYIDFYSRDMDLIFGQKQMHYFRRRTAKEILSLRAE

SEQ ID NO: 174008 - protein, 486 aa, Zea Mays
MGALTDSRKRLSADHCLSADHRLPYPSLSPPSLIPPFKRAKLSPIPEHDPSTSDFPPIRPSPQIIHSAAAASTSSTPGPSPSSITASTPLPHRRRLPPPPFQRSIHGPQRILRVFQLGGAARAYATGHSWFSPQSPPPRPLGLQQYVELVNSVTHPSPPTPAAITNATRQAEVAPFEVVAIEEDEDERKQQNEEEVMGSVVVRRVPPYKELYEASRQKRDAKLKTLEFEVRLTEQGRLSLERLAEALPRITPKKEEVPEPFVPLTDEDEEMVRQALHGKNRHERLAVHEPSNIVITREIMQCLNNQEWLNDEAINLYLDLLKERELREPCRFLKCHFFNTFFYKKLISSGYDYKAVRRWTTKRKLGYSLIDCDKEVHWCLAVINIRDKKFQYLDSLGGMDMKVLNVLAKYIVDEVKDKSGQQMDVLSWKQEGVKNLPLQENGWDCGMFMLKYIDFYSRDMDLIFGQKQMHYFRRRTAKEILSLRAE

SEQ ID NO: 174009 - protein, 212 aa, Zea Mays
MYQITNDEDKKSTRNKYVPEIIEGDMDSIRPEVKLFYSSQVLLFALWFLHCLPSQGSKISDKSHNQETTDLHKCISRIHHCTPDDEKPNLCVLVTGALGGRFDHEAANINVLYLFSDMRIVLLSDDCLIRLLPRTHRHELYIESSVEGPHCGLFPVGAPSTSTTTTGLKWNLSESKMRFGSMISTSNIVQSEKVTVESDADLLWTISLRNLT

SEQ ID NO: 174010 - protein, 197 aa, Zea Mays
MYQITNDEDKKSTRNKYVPEIIEGDMDSIRPEVKLFYSSQGSKISDKSHNQETTDLHKCISRIHHCTPDDEKPNLCVLVTGALGGRFDHEAANINVLYLFSDMRIVLLSDDCLIRLLPRTHRHELYIESSVEGPHCGLFPVGAPSTSTTTTGLKWNLSESKMRFGSMISTSNIVQSEKVTVESDADLLWTISLRNLT

SEQ ID NO: 174011 - protein, 102 aa, Zea Mays
MSSLLAAQPRLALAYSPSSSSSSAPHARPRQGRAAPSTTPKFFAPCRRRASSVVSRQKAKPTCMHAQLHSGFGQVVRFRKIVILFYLRFSRWREYVHESIIV

SEQ ID NO: 174012 - protein, 216 aa, Zea Mays
MRIESKKAAECLREALRDYNLKFGTILNDPDLAPFRASPEFKELQEEALRGGEDIGSGFRRDLKLISEVQAPFRGVRRFFYVALTAAAGISTFFTIPRLVLAVRGGDGAPDLLETAGNAAINIGGIVVLVALYFWENKKEEKQITQISRNETLSRLPVRLSTNRIIELVQLRDITRPVSITFSIFNVHCMFAEINCFSHLFLKPLFSHLSFEVYFR

SEQ ID NO: 174013 - protein, 59 aa, Zea Mays
MARTIHDGAEGRFLRSRPRFLLSGRTLSGRRDLRVCLGVGRPPKTSLIDVEPTRGEDSS

SEQ ID NO: 174014 - protein, 185 aa, Zea Mays
MAPLIFWKLLEMLPSILEYAAGIVVLVALYFWENKKEEKQITQISRNETLSRLPVRLSTNRIIELVQLRDITRPVILAGSKASVTRALQRAERYRTELLKRGVLLIPVIFGASQKDQTKPRGFGARRAAASVPSVGGDFEKRTESIAAKSRLKTEVRFKADIVSPEQWERCISFDVYAFCPILYI

SEQ ID NO: 174015 - protein, 97 aa, Zea Mays
MWVLKCYSPCFAKLLGLLPWMSLHRRGVSGFAHRAMGSGSCCCIGCNGGGGDEGGVDAGGGLDPKGFLLAMMIALVLLMLCHVRPPRRNSYVVYRSY

SEQ ID NO: 174016 - protein, 157 aa, Zea Mays
MCNEDCLSVPIGRSPRTDILLKVENVVLEAGGCVLRLAGLYKIDRGAHVFWLRKGTLDTRPDHIINQIHYEDAASLAVAIMKKGLRSRIFLGCDNKPLSRQEIMDAVNNSGKFDTKFGGFTGTDGPLGKRMENSKTRAEIGWEPKYPSFTEFLGISS

SEQ ID NO: 174017 - protein, 77 aa, Zea Mays
MLSRGPRTVDPRSEDSYSILIFSPLQSNLNRLCSFWWPICDGTPSAIQLYKIAPSAFTYQPTLQVIDKTITHESWIL

SEQ ID NO: 174018 - protein, 62 aa, Zea Mays
MIRKLKIVARSAHTSKIVLFAESGLSFCSIFHFQVLAEEEKGGSTCTSTKAICKSLEALAYL

SEQ ID NO: 174019 - protein, 100 aa, Zea Mays
MVLIFCFTVNAYGPKCPRSISCCTTICAIFVDWLCSPHWLCSLLWLCSLLWFSNMLWFCILFLLCSLIWLCRLCSLLWCNFGSSPPFDIICISFGSIRQC

SEQ ID NO: 174020 - protein, 97 aa, Zea Mays
MAASLQSPPSPARCPALDVHGAGAPHLLCHNFRPPSRCPNHGALDTIHLPGGRAWPLCPAHAQGYGAAIAMKPLRVASSACSTKYRSVLHPICAALL

SEQ ID NO: 174021 - protein, 236 aa, Zea Mays
MPRSLLRIAYEFCTSREIECWSEHNSAPIFWGIRHAFHATSDHDIVDSQLNTLSRNMTAFIPEEKTLLTVVHGTELGKPAPRAACPAGAWPRLTLRMLSTKTSCTSAGSTKIVGDGAGEVVVAELEMKRAEKKPRNRARRLDAGRAMEMGAELHGCREEGGARWLAGDGGGEIHARHRRASTGRREREEQRLGEHDAGHLKSRRWGGRHRRGGRRKKIRLERRQKKSEYGWALWRR

SEQ ID NO: 174022 - protein, 313 aa, Zea Mays
MLIYSSGNPTNIANPIVDVSVKIDIKALGGRLNLFKTTACEKIPWKYLKAYDDVDPLDYLGAYNVDDIQLICCQPDASTMWLIPPPVQNRFIQSLEEREMLFGKMELILNWDFLRARPKGKELVRYESPIEHCPSVDDVKRVLNGTANSFSIIDAYPRYFRVTGSGEVRRLEAAIDSVSGELLLNNGTPWWSFYDTNPSDLAGCQGLNGPMAIVVSEETPQGIIGETLSKFSIWSLYITFVLAVARFIRLQCSDLRMRIPYENLPSCDRLLDICEGIYAARAEGELEVEEVLYWTLVNIYRSPHMLLEYTKPD

SEQ ID NO: 174023 - protein, 774 aa, Zea Mays
MPIGVIFQYIWYQMRSNYDYVCYCCFILVFMWNFSLLSMAYLGALFLYALCVNYGPSYLFWVIILIYTESSITAKDGEWVPVTEFSFLSARNNIEEKHCVAYSWREKLKSLPLPVFDLIRMIVRGLSRYWMSLTHGAESPPYFVQVTMEVSHWPEDGIQPERIESAINRVLAIAHEERCQANLPSSCHCCSKVRIQSIEKSKENCNMALAVLEVVYAAPVECQSKGWHKSLTPAADVEREIHESQKAGFFEEINFPYPIVSVIGGGKREIDLYAYYFGADLAVFFLVAMFYQSILKNKSEFLEVYQLEDQFPKEFVFILMVLFFLIVVDRIIYLWSFATGKVVFYLFNLVLFTYSVTEYAWGTELAHRDIGGLVLRAIYLTKSISLALQALQIRYGIPNKSNLYRQFLTSKVTQVNYLGFRLYRALPFLYELRCVLDWSCTTTSLTMYDWLKLEDIYASLFLVKCDTLLNRANHRQGEKQTKTTKFCSGICLFFVLICVIWAPMLIYSSGNPTNIANPIVDVSVKIDIKALGGRLNLFKTTACEKIPWKYLKAYDDVDPLDYLGAYNVDDIQLICCQPDASTMWLIPPPVQNRFIQSLEEREMLFGKMELILNWDFLRARPKGKELVRYESPIEHCPSVDDVKRVLNGTANSFSIIDAYPRYFRVTGSGEVRRLEAAIDSVSGELLLNNGTPWWSFYDTNPSDLAGCQGLNGPMAIVVSEETPQGIIGETLSKFSIWSLYITFVLAVARFIRLQCSDLRMRIPYENLPSCDSKS

SEQ ID NO: 174024 - protein, 378 aa, Zea Mays
MPIGVIFQYIWYQMRSNYDYVCYCCFILVFMWNFSLLSMAYLGALFLYALCVNYGPSYLFWVIILIYTEVNILSQYIYQIIIQHCGLNIHLPLLQRLGFPDNKIKASFVVSILPLFLVYISTLLQSSITAKDGEWVPVTEFSFLSARNNIEEKHCVAYSWREKLKSLPLPVFDLIRMIVRGLSRYWMSLTHGAESPPYFVQVTMEVSHWPEDGIQPERIESAINRVLAIAHEERCQANLPSSCHCCSKVRIQSIEKSKENCNMALAVLEVVYAAPVECQSKGWHKSLTPAADVEREIHESQKAGFFEEINFPYPIVSVIGGGKREIDLYAYYFGADLAVFFLVAMFYQSILKNKSEFLEVYQLEDQFPKEFVFILMVS

SEQ ID NO: 174025 - protein, 236 aa, Zea Mays
MLISYYVVFIFSSFKLRSDHFSSFSDSDTYRQMMSQRKNAVVWRDLSLETKSFWTFLDYVRLYAYCHLLDIVLALIAITGTLEYDVLHLGYLGFALVFFRMRLEILKKKNRIFKFLRMYNFGLIVLSLAYQSPYVGQFSSGKCDQIDYLYEIIGLYKYDYGFKITSRSAFVEIVIFLLVSVQSYIFSSSEFDYVSRYLEAEQIGAMVREQEKKALKKTEQLHHLRRSEEHKRQRNM

SEQ ID NO: 174026 - protein, 489 aa, Zea Mays
MEIGSIVCFCAVHSHGFKMLFSLSAVLRHTPCPPVGFTILKAGLNKSVLLSVYSSQNSRDGEDHRNLHEKKIASYLSKIGQKFLLVYRSYGTYVAFLTILLTLYLVTPNYISFGYLFFLLFWIIGRQLVEKTKRRLWFPLKVYATVVFIFTYSLSVSPIFAESVSKFLKLYPDLGFDPEASLLENVWQSLAILVVMQLYSYERRQNSDKNFGVSDASESGLLGFLRRFLIWHSDKILSVCVFYACLSSISLSGLIYLLGLIVFSTLPKVSRIPSKVYLVYTGLLAASEYLFQMVCKPAQMCPHQHFYGLSVFLGLKYYDSGFWGIEYRLRGKVLVIVACTIQYNVFHWLDLMPTSLVHKGKWEEPCQLFISSNPPYSPVRSNEESHSSNRFTSLFSKVQGLIGSSSSSSSSVGPGSIHQKLEYVDNAIEGSDEDKRHSFAKIWGLSKESHKWDKKRVIFLRRERFETQKTTFKCYMKFWIENLFKLREI

SEQ ID NO: 174027 - protein, 1431 aa, Zea Mays
MPDGKKREHGRKWLVCLKVTGSEALKNVMPDASLLDWSLVSLINMVIFFAIRFAVPRRGLYTWRLHIVLWCTIIYSVLAILAQVAFHIIWYIEGKGWSVAHSWWAKLVGLARDQPWESPSVIYFLALQLSAAGLALVEVLGGRLQDSCWLNFSFEVEQIGYHLRVACCLLLPAAQLVVGISHPSWISLPFFVFSCIGLVDWSLTSNFLGLFRWWRLLEIYSVFSILLLYLYQLPMKFPYIALAFADFIGLFKISSKSEWPELSSGISLLVYYFMLSSAKRDIQEMGSLISLENDSLTEDLLPSRNAFLVRQSRSGRRHGNILLRGSVFRTFSINFFTYGFPVLLLALSFWSFNFTSICAFGLLAYVGYILYAFPSLFQMHRLNWSLLVFILLWAASTYVFNVAFTFFNKRFQKDMMIWETVGLWHYSIPGLFLLAQFCLGVFVALCNLVNNSVFLYLTSEGGPSTSDDHLIDEKEDTMVLIVATIAWGLRKLSRAITLTLLFLLVMKRGFIHAVYMCFFLVFLVNHSIDKRLRQILVLFCEVHFSILYILQLDLVSSALERSGSLTMEVLSQLGLSNNATAKDFMEIGSIVCFCAVHSHGFKMLFSLSAVLRHTPCPPVGFTILKAGLNKSVLLSVYSSQNSRDGEDHRNLHEKKIASYLSKIGQKFLLVYRSYGTYVAFLTILLTLYLVTPNYISFGYLFFLLFWIIGRQLVEKTKRRLWFPLKVYATVVFIFTYSLSVSPIFAESVSKFLKLYPDLGFDPEASLLENVWQSLAILVVMQLYSYERRQNSDKNFGVSDASESGLLGFLRRFLIWHSDKILSVCVFYACLSSISLSGLIYLLGLIVFSTLPKVSRIPSKVYLVYTGLLAASEYLFQMVCKPAQMCPHQHFYGLSVFLGLKYYDSGFWGIEYRLRGKVLVIVACTIQYNVFHWLDLMPTSLVHKGKWEEPCQLFISSNPPYSPVRSNEESHSSNRFTSLFSKVQGLIGSSSSSSSSVGPGSIHQKLEYVDNAIEGSDEDKRHSFAKIWGLSKESHKWDKKRVIFLRRERFETQKTTFKCYMKFWIENLFKLRGLEINMIVLLLASFTLLNVVSIFYIMCLVLCILMNRDLIQKLWPLFVFLFASVLILEYVALWNDEITWYHGTNDIEVHCRECWKNSRIFFDYCSKCWLVRYIRIFIYQLFLHEHDPGIIADDPRMLISYYVVFIFSSFKLRSDHFSSFSDSDTYRQMMSQRKNAVVWRDLSLETKSFWTFLDYVRLYAYCHLLDIVLALIAITGTLEYDVLHLGYLGFALVFFRMRLEILKKKNRIFKFLRMYNFGLIVLSLAYQSPYVGQFSSGKCDQIDYLYEIIGLYKYDYGFKITSRSAFVEIVIFLLVSVQSYIFSSSEFDYVSRYLEAEQIGAMVREQEKKALKKTEQLHHLRRSEEHKRQRNM

SEQ ID NO: 174028 - protein, 1420 aa, Zea Mays
MTRRTGGCAGGFLLPLLLLAASLLDWSLVSLINMVIFFAIRFAVPRRGLYTWRLHIVLWCTIIYSVLAILAQVAFHIIWYIEGKGWSVAHSWWAKLVGLARDQPWESPSVIYFLALQLSAAGLALVEVLGGRLQDSCWLNFSFEVEQIGYHLRVACCLLLPAAQLVVGISHPSWISLPFFVFSCIGLVDWSLTSNFLGLFRWWRLLEIYSVFSILLLYLYQLPMKFPYIALAFADFIGLFKISSKSEWPELSSGISLLVYYFMLSSAKRDIQEMGSLISLENDSLTEDLLPSRNAFLVRQSRSGRRHGNILLRGSVFRTFSINFFTYGFPVLLLALSFWSFNFTSICAFGLLAYVGYILYAFPSLFQMHRLNWSLLVFILLWAASTYVFNVAFTFFNKRFQKDMMIWETVGLWHYSIPGLFLLAQFCLGVFVALCNLVNNSVFLYLTSEGGPSTSDDHLIDEKEDTMVLIVATIAWGLRKLSRAITLTLLFLLVMKRGFIHAVYMCFFLVFLVNHSIDKRLRQILVLFCEVHFSILYILQLDLVSSALERSGSLTMEVLSQLGLSNNATAKDFMEIGSIVCFCAVHSHGFKMLFSLSAVLRHTPCPPVGFTILKAGLNKSVLLSVYSSQNSRDGEDHRNLHEKKIASYLSKIGQKFLLVYRSYGTYVAFLTILLTLYLVTPNYISFGYLFFLLFWIIGRQLVEKTKRRLWFPLKVYATVVFIFTYSLSVSPIFAESVSKFLKLYPDLGFDPEASLLENVWQSLAILVVMQLYSYERRQNSDKNFGVSDASESGLLGFLRRFLIWHSDKILSVCVFYACLSSISLSGLIYLLGLIVFSTLPKVSRIPSKVYLVYTGLLAASEYLFQMVCKPAQMCPHQHFYGLSVFLGLKYYDSGFWGIEYRLRGKVLVIVACTIQYNVFHWLDLMPTSLVHKGKWEEPCQLFISSNPPYSPVRSNEESHSSNRFTSLFSKVQGLIGSSSSSSSSVGPGSIHQKLEYVDNAIEGSDEDKRHSFAKIWGLSKESHKWDKKRVIFLRRERFETQKTTFKCYMKFWIENLFKLRGLEINMIVLLLASFTLLNVVSIFYIMCLVLCILMNRDLIQKLWPLFVFLFASVLILEYVALWNDEITWYHGTNDIEVHCRECWKNSRIFFDYCSKCWLVRYIRIFIYQLFLHEHDPGIIADDPRMLISYYVVFIFSSFKLRSDHFSSFSDSDTYRQMMSQRKNAVVWRDLSLETKSFWTFLDYVRLYAYCHLLDIVLALIAITGTLEYDVLHLGYLGFALVFFRMRLEILKKKNRIFKFLRMYNFGLIVLSLAYQSPYVGQFSSGKCDQIDYLYEIIGLYKYDYGFKITSRSAFVEIVIFLLVSVQSYIFSSSEFDYVSRYLEAEQIGAMVREQEKKALKKTEQLHHLRRSEEHKRQRNM

SEQ ID NO: 174029 - protein, 1022 aa, Zea Mays
MMIWETVGLWHYSIPGLFLLAQFCLGVFVALCNLVNNSVFLYLTSEGGPSTSDDHLIDGLFFTEKEDTMVLIVATIAWGLRKLSRAITLTLLFLLVMKRGFIHAVYMCFFLVFLVNHSIDKRLRQILVLFCEVHFSILYILQLDLVSSALERSGSLTMEVLSQLGLSNNATAKDFMEIGSIVCFCAVHSHGFKMLFSLSAVLRHTPCPPVGFTILKAGLNKSVLLSVYSSQNSRDGEDHRNLHEKKIASYLSKIGQKFLLVYRSYGTYVAFLTILLTLYLVTPNYISFGYLFFLLFWIIGRQLVEKTKRRLWFPLKVYATVVFIFTYSLSVSPIFAESVSKFLKLYPDLGFDPEASLLENVWQSLAILVVMQLYSYERRQNSDKNFGVSDASESGLLGFLRRFLIWHSDKILSVCVFYACLSSISLSGLIYLLGLIVFSTLPKVSRIPSKVYLVYTGLLAASEYLFQMVCKPAQMCPHQHFYGLSVFLGLKYYDSGFWGIEYRLRGKVLVIVACTIQYNVFHWLDLMPTSLVHKGKWEEPCQLFISSNPPYSPVRSNEESHSSNRFTSLFSKVQGLIGSSSSSSSSVGPGSIHQKLEYVDNAIEGSDEDKRHSFAKIWGLSKESHKWDKKRVIFLRRERFETQKTTFKCYMKFWIENLFKLRGLEINMIVLLLASFTLLNVVSIFYIMCLVLCILMNRDLIQKLWPLFVFLFASVLILEYVALWNDEITWYHGTNDIEVHCRECWKNSRIFFDYCSKCWLVRYIRIFIYQLFLHEHDPGIIADDPRMLISYYVVFIFSSFKLRSDHFSSFSDSDTYRQMMSQRKNAVVWRDLSLETKSFWTFLDYVRLYAYCHLLDIVLALIAITGTLEYDVLHLGYLGFALVFFRMRLEILKKKNRIFKFLRMYNFGLIVLSLAYQSPYVGQFSSGKCDQIDYLYEIIGLYKYDYGFKITSRSAFVEIVIFLLVSVQSYIFSSSEFDYVSRYLEAEQIGAMVREQEKKALKKTEQLHHLRRSEEHKRQRNM

SEQ ID NO: 174030 - protein, 570 aa, Zea Mays
MTRRTGGCAGGFLLPLLLLAASLLDWSLVSLINMVIFFAIRFAVPRRGLYTWRLHIVLWCTIIYSVLAILAQVAFHIIWYIEGKGWSVAHSWWAKLVGLARDQPWESPSVIYFLALQLSAAGLALVEVLGGRLQDSCWLNFSFEVEQIGYHLRVACCLLLPAAQLVVGISHPSWISLPFFVFSCIGLVDWSLTSNFLGLFRWWRLLEIYSVFSILLLYLYQLPMKFPYIALAFADFIGLFKISSKSEWPELSSGISLLVYYFMLSSAKRDIQEMGSLISLENDSLTEDLLPSRNAFLVRQSRSGRRHGNILLRGSVFRTFSINFFTYGFPVLLLALSFWSFNFTSICAFGLLAYVGYILYAFPSLFQMHRLNWSLLVFILLWAASTYVFNVAFTFFNKRFQKDMMIWETVGLWHYSIPGLFLLAQFCLGVFVALCNLVNNSVFLYLTSEGGPSTSDDHLIDEKEDTMVLIVATIAWGLRKLSRAITLTLLFLLVMKRGFIHAVYMCFFLVFLVNHSIDKRLRQILVLFCEVHFSILYILQLDLVSSALERSGSLTMEVSQIMLQQRISWR

SEQ ID NO: 174031 - protein, 805 aa, Zea Mays
MLSSAKRDIQEMGSLISLENDSLTEDLLPSRNAFLVRQSRSGRRHGNILLRGSVFRTFSINFFTYGFPVLLLALSFWSFNFTSICAFGLLAYVGYILYAFPSLFQMHRLNWSLLVFILLWAASTYVFNVAFTFFNKRFQKDMMIWETVGLWHYSIPGLFLLAQFCLGVFVALCNLVNNSVFLYLTSEGGPSTSDDHLIDGLFFTEKEDTMVLIVATIAWGLRKLSRAITLTLLFLLVMKRGFIHAVYMCFFLVFLVNHSIDKRLRQILVLFCEVHFSILYILQLDLVSSALERSGSLTMEVLSQLGLSNNATAKDFMEIGSIVCFCAVHSHGFKMLFSLSAVLRHTPCPPVGFTILKAGLNKSVLLSVYSSQNSRDGEDHRNLHEKKIASYLSKIGQKFLLVYRSYGTYVAFLTILLTLYLVTPNYISFGYLFFLLFWIIGRQLVEKTKRRLWFPLKVYATVVFIFTYSLSVSPIFAESVSKFLKLYPDLGFDPEASLLENVWQSLAILVVMQLYSYERRQNSDKNFGVSDASESGLLGFLRRFLIWHSDKILSVCVFYACLSSISLSGLIYLLGLIVFSTLPKVSRIPSKVYLVYTGLLAASEYLFQMVCKPAQMCPHQHFYGLSVFLGLKYYDSGFWGIEYRLRGKVLVIVACTIQYNVFHWLDLMPTSLVHKGKWEEPCQLFISSNPPYSPVRSNEESHSSNRFTSLFSKVQGLIGSSSSSSSSVGPGSIHQKLEYVDNAIEGSDEDKRHSFAKIWGLSKESHKWDKKRVIFLRRERFETQKTTFKCYMKFWIENLFKLREI

SEQ ID NO: 174032 - protein, 1062 aa, Zea Mays
MTRRTGGCAGGFLLPLLLLAASLLDWSLVSLINMVIFFAIRFAVPRRGLYTWRLHIVLWCTIIYSVLAILAQVAFHIIWYIEGKGWSVAHSWWAKLVGLARDQPWESPSVIYFLALQLSAAGLALVEVLGGRLQDSCWLNFSFEVEQIGYHLRVACCLLLPAAQLVVGISHPSWISLPFFVFSCIGLVDWSLTSNFLGLFRWWRLLEIYSVFSILLLYLYQLPMKFPYIALAFADFIGLFKISSKSEWPELSSGISLLVYYFMLSSAKRDIQEMGSLISLENDSLTEDLLPSRNAFLVRQSRSGRRHGNILLRGSVFRTFSINFFTYGFPVLLLALSFWSFNFTSICAFGLLAYVGYILYAFPSLFQMHRLNWSLLVFILLWAASTYVFNVAFTFFNKRFQKDMMIWETVGLWHYSIPGLFLLAQFCLGVFVALCNLVNNSVFLYLTSEGGPSTSDDHLIDEKEDTMVLIVATIAWGLRKLSRAITLTLLFLLVMKRGFIHAVYMCFFLVFLVNHSIDKRLRQILVLFCEVHFSILYILQLDLVSSALERSGSLTMEVLSQLGLSNNATAKDFMEIGSIVCFCAVHSHGFKMLFSLSAVLRHTPCPPVGFTILKAGLNKSVLLSVYSSQNSRDGEDHRNLHEKKIASYLSKIGQKFLLVYRSYGTYVAFLTILLTLYLVTPNYISFGYLFFLLFWIIGRQLVEKTKRRLWFPLKVYATVVFIFTYSLSVSPIFAESVSKFLKLYPDLGFDPEASLLENVWQSLAILVVMQLYSYERRQNSDKNFGVSDASESGLLGFLRRFLIWHSDKILSVCVFYACLSSISLSGLIYLLGLIVFSTLPKVSRIPSKVYLVYTGLLAASEYLFQMVCKPAQMCPHQHFYGLSVFLGLKYYDSGFWGIEYRLRGKVLVIVACTIQYNVFHWLDLMPTSLVHKGKWEEPCQLFISSNPPYSPVRSNEESHSSNRFTSLFSKVQGLIGSSSSSSSSVGPGSIHQKLEYVDNAIEGSDEDKRHSFAKIWGLSKESHKWDKKRVIFLRRERFETQKTTFKCYMKFWIENLFKLREI

SEQ ID NO: 174033 - protein, 341 aa, Zea Mays
MTRRTGGCAGGFLLPLLLLAASLLDWSLVSLINMVIFFAIRFAVPRRGLYTWRLHIVLWCTIIYSVLAILAQVAFHIIWYIEGKGWSVAHSWWAKLVGLARDQPWESPSVIYFLALQLSAAGLALVEVLGGRLQDSCWLNFSFEVEQIGYHLRVACCLLLPAAQLVVGISHPSWISLPFFVFSCIGLVDWSLTSNFLGLFRWWRLLEIYSVFSILLLYLYQLPMKFPYIALAFADFIGLFKISSKSEWPELSSGISLLVYYFMLSSAKRDIQEMGSLISLENDSLTEDLLPSRNAFLVRQSRSGRRHGNILLRGSVFRTFSINFFTYGFPSLMMGEHGQGQ

SEQ ID NO: 174034 - protein, 240 aa, Zea Mays
MLVLTLLRGLNPRVLPSLENEFASLKEEMTEMALQPAELKPSDRRKYNTRKTEVRRRIKKHEKLMNGISTLLCSLQHALDEVSSIEGVVLILGGSLVRPLFVYDITISHGIFGPGSAKEHALTKLAQSVSRKAIRALVSRGAGSLSYTGPSKLFLLVRCSSTLKLPLDFLPKLDFRYSKKVVPLQMHIKCSKSGCSGHNQHHMPLVDSPCSTSESSLSDVIWFQCKHTIRGLPGKASLEG

SEQ ID NO: 174035 - protein, 209 aa, Zea Mays
MALQPAELKPSDRRKYNTRKTEVRRRIKKHEKLMNGISTLLCSLQHALDEVSSIEGVVLILGGSLVRPLFVYDITISHGIFGPGSAKEHALTKLAQSVSRKAIRALVSRGAGSLSYTGPSKLFLLVRCSSTLKLPLDFLPKLDFRYSKKVVPLQMHIKCSKSGCSGHNQHHMPLVDSPCSTSESSLSDVIWFQCKHTIRGLPGKASLEG

SEQ ID NO: 174036 - protein, 132 aa, Zea Mays
MRRRRRPTAGYRTCGGASGDGSTAAVRGVPRLEGARRLRPLHAPPDPLAIRALVSRGAGSLSYTGPSKLFLLVRCSSTLKLPLDFLPKLDFRYSKKVVPLQMHIKCSKSGCSGHNQHHMPLVDSPCSSASIQ

SEQ ID NO: 174037 - protein, 54 aa, Zea Mays
MDFKVANASKGFQATPINLMLISLDFKCVKFLFKNTRKGLHAPGLAWNKYYVNV

SEQ ID NO: 174038 - protein, 473 aa, Zea Mays
MSSSSASSSAAAHHQQHYRRQTGGSGLVPLAALIKEEARTERQSIAGGESRISARDDDAAGVGSSGVGGEAAEAAVESRLERPLLRYGCAAQCKKGEDFFLLRTDCLRPAISVSSSASPHPIFAVFAILDGHNGNAAAIYTRDNLLNHVLSAMPRGLSREEWLHMLPRALVAGFVKTDKEFQSKGQTSGTTATFVIIDGWTITVASVGDSRCILDAQGGAVSLLTVDHRLEENVEERERVTASGGEVGRLSVVGGAEIGPLRCWPGGLCLSRSIGDIDVGEFIVPVPYVKQVKLSNAGGRLIIASDGIWDALSSEAAAKSCRGLPAELAAKQVVKEALRTRGLKDDTTCIVVDIIPPGQTIRPLSPPKKTSKLKSFIFRKKAKDPSQKLTKQHSAVGIVEEIFEEGSAMLSESSNITCLKKGQLCSFIRSEWKILCFGTVNVQKGESYSTNSINYVKIYRLLKLGMGVFFSLF

SEQ ID NO: 174039 - protein, 417 aa, Zea Mays
MSSSSASSSAAAHHQQHYRRQTGGSGLVPLAALIKEEARTERQSIAGGESRISARDDDAAGVGSSGVGGEAAEAAVESRLERPLLRYGCAAQCKKGEDFFLLRTDCLRPAISVSSSASPHPIFAVFAILDGHNGNAAAIYTRDNLLNHVLSAMPRGLSREEWLHMLPRALVAGFVKTDKEFQSKGQTSGTTATFVIIDGWTITVASVGDSRCILDAQGGAVSLLTVDHRLEENVEERERVTASGGEVGRLSVVGGAEIGPLRCWPGGLCLSRSIGDIDVGEFIVPVPYVKQVKLSNAGGRLIIASDGIWDALSSEAAAKSCRGLPAELAAKQVVKEALRTRGLKDDTTCIVVDIIPPGQTIRPLSPPKKTSKLKSFIFRKKAKDPSQKLTKQHSAVGIVEEIFEEGSAMLSESLLET

SEQ ID NO: 174040 - protein, 105 aa, Zea Mays
MICPRMSRMQGLASSKTHEFICFQISQVVKMINEFSPFCLSFGTSLATFLHHLGSVDSAIVGTKSSNLSAKKMCDQSYLEKTQGDGWFLLPDHKEDRSQDEIALF

SEQ ID NO: 174041 - protein, 54 aa, Zea Mays
MMQLVYNFFLSIGYPEEVTTSRYCPLFDKEAENIQHICDLSFVTMVCQFSHHPR

SEQ ID NO: 174042 - protein, 397 aa, Zea Mays
MLNTLGKRCLTYKISMVVSPVDSHYATSGPTDPQPDGSLPGNEDGNGDQDTQDPRARRPSGSHDRRRPVHLCLGPQQIVGSARVAHASVAGALTPPCILIKVPELAGAAPGTEATIDEVGDLPSCEPCDLNTGTLTLAQMTPSLPSAGAAPGTEATIDEAGDLLSSEPCNLNTGALTLAQMTPSLPSAGTAPGNEAAIDEDVGEFDGPLDPPRLFSPQPLLTGLLGTAGQGSPHLFCTEEPLTQFLDESPELAQLTHVSPQHTPGSPETTPLVPVSPHLEVGWLERTLHVYSRRKAMTGQMPDNQRNSTTWMVDALVSNLVPGAEPPMLALPEPGLGPMVLASDDMSLSDQAQDEARRVDFFNKISKRPSEILPIPKPSRRKVTSLGLAAPRRSRMF

SEQ ID NO: 174043 - protein, 94 aa, Zea Mays
MLPSRVGGSSIRGCLLLTAPVSLFSTVADRVSSASTALPFLSTRAAFVASSMEELALVVTFLEPSWVLVFGAQTVGAKFWICQHVDGRTQKLGS

SEQ ID NO: 174044 - protein, 265 aa, Zea Mays
MAAASQLLSLFFLLLLPACDAIYCDEDDCYDLLGVKQDANASDIKKAYYKLSLKHHPDKNPDPESRKLFVKIANAYEILKDESTRAQYDFAIEHPEEVFYNTAQYYRAYYGHKTDPRAVLIGLLLIVSAFQYINQLTRYNQAMKSVKQTPAYKNRLKALEYERTGGIASKKKGIKQVDKKVEEELSNEVELQIHGVEKPSVWRLFGVQFILWPYSVGKALTWKICWFWRYRVKKLPYTWEDACYLTWISLQIPANAWKNMGRRTL

SEQ ID NO: 174045 - protein, 142 aa, Zea Mays
MAAASQLLSLFFLLLLPACDAIYCDEDDCYDLLGVKQDANASDIKKAYYKLSLKHHPDKNPDPESRKLFVKIANAYEILKDESTRAQYDFAIEHPEEVFYNTAQYYRAYYGHKTDPRAVLIGLLLIVSAFQYINQLTRYNQV

SEQ ID NO: 174046 - protein, 57 aa, Zea Mays
MPRFHASPREVDPHCAINGSWCMLDSRGPPSCRACTAGLCPWDEEQDAWVVDPCIYG

SEQ ID NO: 174047 - protein, 214 aa, Zea Mays
MDGASKEPLRKSTCSVPQFDSEKKQIFTFIAIKQDIRDLKVAKEEQDIGFYAGFVGATYFLGRAISAVPWGMFADKYGRKPCIVISILSVIVFNTLFGLSTTYWMAIVTRGLLGLLCGILGPIKAYASEVCRKEHQALGISLVTSSRAIALVIGPAIGGFLAQWSTKIFLASGRFPYFLPCFVISLLAAGSCIACIWLPVCHIIFPIIFYLESK

SEQ ID NO: 174048 - protein, 95 aa, Zea Mays
MAFPYVSTSVNEKLEDSLLSSFAENYNNGFGRNRITYTDTCTGQDLKKYHNMDAINDLVVSGVASRRVNHPSGQTDIIVFCSGGFENPGTAKSKG

SEQ ID NO: 174049 - protein, 277 aa, Zea Mays
MAHNLRSCYTGSPASSWKYLKGFLSICAHPDDIQRRQLNESTGLSVHQVKFWFENKRTHVKHLSGREENYRLKAENEMLKEENNRLIRQEQSNAPAPAPCPRCINDAGHLLLEKEVERLKALNQMLQQELQLQGTDGETHRHSSLSDLVYWSIKVSTAYNPLCFYQLSFTRSEFSMAFPYVSTSVNEKLEDSLLSSFAENYNNGFGRNRITYTDTCTGQDLKKYHNMDAINDLVVSGVASRRVNHPSGQTDIIVFCSGGFENPGTAKSKDPFGPAAE

SEQ ID NO: 174050 - protein, 141 aa, Zea Mays
MAAAWAGLAVLLVAAQLASAAQVTAPAFLWAPKNYGVTYLKMGRAISLWKHMQTMVKEKAPVMVPLESLSFLSICAHPDDIQRRQLNESTGLSVHQVKFWFENKRTHVKLQGTDGETHSSPSHAQSFPWHSPTFPHQSTRN

SEQ ID NO: 174051 - protein, 168 aa, Zea Mays
MAFPYVSTSVNEKLEDSLLSSFAENYNNGFGRNRITYTDTCTGQDLKKYHNMDAINDLVVSGVASRRVNHPSGQTDIIVFCSGGFENPGTAKSKGRKMRWRVPRQIESPRRNFLWDSASHHLDIRTHHLVRYCSICMVLELFYATTDILNWSLGVWRKKRGWLYSQGT

SEQ ID NO: 174052 - protein, 635 aa, Zea Mays
MGFDGLVVVSDPYLQRRFTQAELRALQAQYAALRDASPNGRLRMRDLPAAISGVRGAAKSRDAEKENSAPEPGPCHGLTDEEWASVLKAVARADEKPHQDASFELFLRVYAEMQLRLKAVSVCSGRAGGIVRSSSSSAVAFLTAATTTLLHTISESEKASYVGHINAYLADDPSLKSALPIDPATDHIFHITKDGVLLCKLINLAVPGTIDERAINTKRVLNLWEKNENHTLCLNSAKAIGCTVVNIGTQDLAEGRPHLVLGLISQIIKIQLLANVNLKSTPQLVELVEDSKEMEELMSLSPEKILLRWMNFQLKKAGFQKRVTNFSSDIKDSEAYACLLNVLAPECSAKPSAMSVKDLLHRARLILEHADRMGCKRYLTPKDIVDGLPNLNLAFVAHIFQKRNGLSKQMKQVSFVDGLSDDAQVSREERSFRLWINSLGISTYINNVFEDLRNGWVLLEVIDKIAPGSVNWKMANRPPIKLPFRKVENCNQVLKIGKELKFSLVNIAGNDIVQGNKKLILAFLWQLMRYNILQLLKNLRFHSNGKEITDNDILAWANKKVKDSGKHHSYMQSFKDKSLSSGTFFLDLLSAVEPRVVNWSLVTKGEKGEPEDDANSDSKHYVLVFEKANITIIGL

SEQ ID NO: 174053 - protein, 523 aa, Zea Mays
MGFDGLVVVSDPYLQRRFTQAELRALQAQYAALRDASPNGRLRMRDLPAAISGVRGAAKSRDAEKENSAPEPGPCHGLTDEEWASVLKAVARADEKPHQDASFELFLRVYAEMQLRLKAVSVCSGRAGGIVRSSSSSAVAFLTAATTTLLHTISESEKASYVGHINAYLADDPSLKSALPIDPATDHIFHITKDGVLLCKLINLAVPGTIDERAINTKRVLNLWEKNENHTLCLNSAKAIGCTVVNIGTQDLAEGRPHLVLGLISQIIKIQLLANVNLKSTPQLVELVEDSKEMEELMSLSPEKILLRWMNFQLKKAGFQKRVTNFSSDIKDSEAYACLLNVLAPECSAKPSAMSVKDLLHRARLILEHADRMGCKRYLTPKDIVDGLPNLNLAFVAHIFQKRNGLSKQMKQVSFVDGLSDDAQVSREERSFRLWINSLGISTYINNVFEDLRNGWVLLEVIDKIAPGSVNWKMANRPPIKLPFRKVENCNQVLKIGKELKFSLVNIAGNDIVQGNKKLILES

SEQ ID NO: 174054 - protein, 102 aa, Zea Mays
MPGVVLVASHLCRGGLARHLPPACSRVLPLPRPFAPRHPAVGPAPAILRTRLRVQPAPLHTSIADIQPCSDRHDPVQRRVEKMGCGLDLQRSAMFPSFSQEG

SEQ ID NO: 174055 - protein, 55 aa, Zea Mays
MLSSTLPRTPFPARARPLPAIRFVLGRKSCGLMQQVSPRGLVPPPTGAPCLSCMQ

SEQ ID NO: 174056 - protein, 150 aa, Zea Mays
MEQGDEASSVTKESPEQQLTRDREQQHDAGVAWLNLTLRAGESPSPDAAASCSAESGSGSGSGSGSGPEPTAKPSAAPHKVFSCNFCLRKFFSSQALGGHQNAHKRERSAAKRSYHAHRMIVGLPLHAHHSEHERAFETEQSKIDLDLRL

SEQ ID NO: 174057 - protein, 767 aa, Zea Mays
MSRLHHHHLLQLMCSLLISAELVSGTTGGDDMAVLIQLKAFLRAHNQINRGAYDGWPEASPSPCGSWRGVGCDADGRVSSLDLSSSSISGPLFGNFSGLSGLVRLDLSDNSIAGELPADLDRCVGLQHLNLSYNLISGALGVPSLTKLRTLDVSRNRLEGEVVVVSGNFNFLGACDDLVVLNVSGNSLGGDIAGLLGNCPRLRYVDLSMNGFTGRVTQGIASLAQFSAAENRLSGTVPPGVFPERCGLQSLDLSGNRLSGSFPDSVSNCPGLTYLSLSGNGFGGQIPAGVGAIPGLETLILGSNSFDREMPLSLTNCTALRYLDISGNGFGGEVQGLFAKLESLTHLILHSNSYTGGIVSSGILGLPKLAMLDLSLNRFSGKLPTEVTSMASIKYLVLAENTFSGQIPAAYGQIAQLQVLDLSYNNLTGGIPADVGSLSSLLVLMLAGNQLSGEIPKEIGNCTSLLWLNLAANRLSGQIPPEIAGVGRDPSPTFARNQKDAAELEIGTGKCPSVVRWIPLGYPGFNYVESEMSWKDCRSLEDRILKGYGIVTPPSVQPCIILGYVRLSGNLLSGQIPPMVSAMRNFNLLILDENLLSGVLPSEISQMSLVALNVSRNMISGEIPTEIGRMVLLETLDLSFNNFSDQLPSSLNQLYKLSKFNVSYNPLLSGNVPSTGQLSTFNEQSFLGNPLLSLHFANYGPRSESNNEDASTQGTAKGPVREEITVLVISFVVFFFATVAIREHDSFMYVYYTIKCRHDSTKIYAEL

SEQ ID NO: 174058 - protein, 788 aa, Zea Mays
MRENVLKTRECREAQESLHDLRMELMRKSMHVGSLASAVEGQVKEKSRLCQLLKELSEKFMVLKSEHQNLRQESVEYRKCVLDASQMSAAIQQYVSRYVSLECEFKDLKEKFNEEAKERKDLYNKLIELKGNIRVFCRCRPLNAEEIAEGASSAIDFDSAKDGELIVRGHVSSRKIYKFDSVFSPEEDQEKVFEKTAPYAISVLDGFNVCIFAYGQTGTGKTFTMEGIEGARGVNYRILEELFQIIKEREGTFQYEITVSVLEVYNEQIHDLLLTGSQPGATTKRLEVRQVGEGAHHVPGLVEARVTNMKEAWEVLRTGSKARVVGSTNANEHSSRSHCIHCVMVKGENLMNGECTKSKLWLIDLAGSERVAKTDAQGERLKEAQNINKSLSALGDVISALATKTSHIPFRNSKLTHLLQDSLSGDSKTLMFVQISPNENDVGETLCSLNFASRVRGIELGQAKKQVDVGELSRYKLMVGRAKQDSKNKDAQIKSMEERIQALEVKNKAKDLLTLNLQEKIKELESQLLVERKIARQHVDNKIAQDHLQKQHGMKEENNSYLRSPMAERNLNSTAEKAAATPKGLCISKQMFSDSNTDAYSFKQLMSLGEEEEKENNPEAAAQLPAPSTKARRVSLGNGGGYQQPLKPISRRTSLIPLPRHNSLLPMPTAAAAAVSPLDRITENLSSRSPSPCSPPVVSVDKGSRSRRVSSLLRRSLQKKVVIRPSVAAQAAKKAGAAAPAAQGTDSSARRAARRVPASGGGVGGQKVRQQNRDKERGWNNGTSLRNF

SEQ ID NO: 174059 - protein, 444 aa, Zea Mays
MASAAASAAAALARHVLLPPRYHASPPSAARRARAAPALTSASPRCVLRRVGRTPRYGTTGKKRTRRFGAPRAGMDMDLASGAVEVINDLGFDTLTFLGVTVLVVPAFRVVKASPILGFFCAGVVLNQFGLIRNLTDVKLLSEWGILFLLFEMGLELSLSRLKALARYAFGMGLPQVLLSTLAFTAFELPPNDAIGTKILQFLFDSRPDLVNIRSIDEAIVIGAALSLSSSAFVLQLLAEKGELPTRFGSATLGILLLQDIAVVPLLVILPVLESQNIIEQSVWPILLAESLKALGGLGLLSLGGKYFIRRVFEFVAESRSSEAFVALCLLTVAGTSLITQKLGFSDTLGAFLAGAILAETNFRTQIEADIRPFRGLLLGLFFVTTGTSIDMQVQLFMFFQVNKWLNVNHTFYSRVVHVFPWLRYIGLHVFISISISICWILTK

SEQ ID NO: 174060 - protein, 590 aa, Zea Mays
MDVDSRMATESDSDSDARGGGSGSGSETPTASASASASPSTSAPAPGTPTAAAASPGLVAGPRPAPGYTVVDAAMDKKEDGPGCRCGHTLTAVPAVGEEGSPGYVGPRLILFGGATALEGNSATPPSPAGSAGIRLAGATADVHCYDVLSNKWTRLTPLGEPPSPRAAHVATAVGTMVVIQGGIGPAGLSAEDLHVLDLTQQRPRWHRVVVQGPGPGPRYGHVMALVGQRFLLTIGGNDGKRPLADVWALDTAAKPYEWRKLEPEGEGPPPCMYATASARSDGLLLLCGGRDANSVPLSSAYGLAKHRDGRWEWAMAPGVSPSPRYQHAAVFVNARLHVSGGALGGGRMVEDSSSVAVLDTAAGVWCDTKSVVTTPRTGRYSADAAGGDASVELTRRCRHAAAAVGDLIFVYGGLRGGVLLDDLLVAEDLAAAETTSAANHAAAAAASTNGQREPGRYAYNDEQSGQTVTVSSPDGAVVLGTPVAPPVNGDMYTDISPENAIIQGQRKMSKGVDYLVEASAAEAEAISATLAAVKARQVNGEMEHSPDREQSPDAAPSTKQNSSLIKPDVALVNNSTAPPGVRLHHRAVS

SEQ ID NO: 174061 - protein, 775 aa, Zea Mays
MALVGQRFLLTIGGNDGKRPLADVWALDTAAKPYEWRKLEPEGEGPPPCMYATASARSDGLLLLCGGRDANSVPLSSAYGLAKHRDGRWEWAMAPGVSPSPRYQHAAVFVNARLHVSGGALGGGRMVEDSSSVAVLDTAAGVWCDTKSVVTTPRTGRYSADAAGGDASVELTRRCRHAAAAVGDLIFVYGGLRGGVLLDDLLVAEDLAAAETTSAANHAAAAAASTNGQREPGRYAYNDEQSGQTVTVSSPDGAVVLGTPVAPPVNGDMYTDISPENAIIQGQRKMSKGVDYLVEASAAEAEAISATLAAVKARQVNGEMEHSPDREQSPDAAPSTKQNSSLIKPDVALVNNSTAPPGVRLHHRAVVVAAETGGALGGMVRQLSIDQFENEGRRVIYGTPENATAARKLLDRQMSINSVPKKVIASLLKPRGWKPPVRRQFFLDCNEIADLCDSAERIFSSEPSVLQLKAPIKIFGDLHGQFGDLMRLFDEYGAPSTAGDIAYIDYLFLGDYVDRGQHSLETISLLLALKVEYPHNVHLIRGNHEAADINALFGFRIECIERMGERDGIWTWHRVNRLFNWLPLAALIEKKIICMHGGIGRSINHIEQIENLQRPITMEAGSVVLMDLLWSDPTENDSVEGLRPNARGPGLVTFGPDRVMEFCNNNDLQLIVRAHECVMDGFERFAQGHLITLFSATNYCGTANNAGAILVLGRDLVVVPKLIHPLPPAITSPETSPEHHIEDTWMQELNANRPPTPTRGRPQAPNNDRGSLAWI

SEQ ID NO: 174062 - protein, 984 aa, Zea Mays
MDVDSRMATESDSDSDARGGGSGSGSETPTASASASASPSTSAPAPGTPTAAAASPGLVAGPRPAPGYTVVDAAMDKKEDGPGCRCGHTLTAVPAVGEEGSPGYVGPRLILFGGATALEGNSATPPSPAGSAGIRLAGATADVHCYDVLSNKWTRLTPLGEPPSPRAAHVATAVGTMVVIQGGIGPAGLSAEDLHVLDLTQQRPRWHRVVVQGPGPGPRYGHVMALVGQRFLLTIGGNDGKRPLADVWALDTAAKPYEWRKLEPEGEGPPPCMYATASARSDGLLLLCGGRDANSVPLSSAYGLAKHRDGRWEWAMAPGVSPSPRYQHAAVFVNARLHVSGGALGGGRMVEDSSSVAVLDTAAGVWCDTKSVVTTPRTGRYSADAAGGDASVELTRRCRHAAAAVGDLIFVYGGLRGGVLLDDLLVAEDLAAAETTSAANHAAAAAASTNGQREPGRYAYNDEQSGQTVTVSSPDGAVVLGTPVAPPVNGDMYTDISPENAIIQGQRKMSKGVDYLVEASAAEAEAISATLAAVKARQVNGEMEHSPDREQSPDAAPSTKQNSSLIKPDVALVNNSTAPPGVRLHHRAVVVAAETGGALGGMVRQLSIDQFENEGRRVIYGTPENATAARKLLDRQMSINSVPKKVIASLLKPRGWKPPVRRQFFLDCNEIADLCDSAERIFSSEPSVLQLKAPIKIFGDLHGQFGDLMRLFDEYGAPSTAGDIAYIDYLFLGDYVDRGQHSLETISLLLALKVEYPHNVHLIRGNHEAADINALFGFRIECIERMGERDGIWTWHRVNRLFNWLPLAALIEKKIICMHGGIGRSINHIEQIENLQRPITMEAGSVVLMDLLWSDPTENDSVEGLRPNARGPGLVTFGLIVRAHECVMDGFERFAQGHLITLFSATNYCGTANNAGAILVLGRDLVVVPKLIHPLPPAITSPETSPEHHIEDTWMQELNANRPPTPTRGRPQAPNNDRGSLAWI

SEQ ID NO: 174063 - protein, 593 aa, Zea Mays
MDVDSRMATESDSDSDARGGGSGSGSETPTASASASASPSTSAPAPGTPTAAAASPGLVAGPRPAPGYTVVDAAMDKKEDGPGCRCGHTLTAVPAVGEEGSPGYVGPRLILFGGATALEGNSATPPSPAGSAGIRLAGATADVHCYDVLSNKWTRLTPLGEPPSPRAAHVATAVGTMVVIQGGIGPAGLSAEDLHVLDLTQQRPRWHRVVVQGPGPGPRYGHVMALVGQRFLLTIGGNDGKRPLADVWALDTAAKPYEWRKLEPEGEGPPPCMYATASARSDGLLLLCGGRDANSVPLSSAYGLAKHRDGRWEWAMAPGVSPSPRYQHAAVFVNARLHVSGGALGGGRMVEDSSSVAVLDTAAGVWCDTKSVVTTPRTGRYSADAAGGDASVELTRRCRHAAAAVGDLIFVYGGLRGGVLLDDLLVAEDLAAAETTSAANHAAAAAASTNGQREPGRYAYNDEQSGQTVTVSSPDGAVVLGTPVAPPVNGDMYTDISPENAIIQGQRKMSKGVDYLVEASAAEAEAISATLAAVKARQVNGEMEHSPDREQSPDAAPSTKQNSSLIKPDVALVNNSTAPPGVRLHHRAKLEVP

SEQ ID NO: 174064 - protein, 52 aa, Zea Mays
MTSFVDSLKSETNKKRTGQKQTIKGCYQKQKMQWRTTRTRNQKQRKIQNQAK

SEQ ID NO: 174065 - protein, 91 aa, Zea Mays
MATTPKLLASSSPAQRLSLLAEPSCPLASLPVLPWCFSTAICSSRSARRRGFQLDGMALCSAIAAVPSFSSCSSRFLASCRRCPCFPWRFP

SEQ ID NO: 174066 - protein, 202 aa, Zea Mays
MAERPLHLWSTSSRARLFTGELPGAAPGSLPQDLAARACLCSAALTPAPCSAMEDASRAQVPARPSAPTCAPMSMPRSQCRAPAASLSLSMAAESLCARLAPCTDPLPLPRSRLSAQLAPALLSRRSPASVCHAQLAFLLDARSACRLPARRGIPAFPSSERVQSPARRARSSSLRTRRAQLCPYARCGRPCLLSVHASCVE

SEQ ID NO: 174067 - protein, 56 aa, Zea Mays
MGSLFLPVIMCFWRLWIMGIKGLEVGLDVGLGFDLEFSFCRMADSTISVNGGFPWS

SEQ ID NO: 174068 - protein, 531 aa, Zea Mays
MRFLSLSEKYYVHSDGAEFSCDTDSLDDDLDDREHDDEFGGSAVRKSFSYGSLQTMNVGALLYAPRIDGDDEGWVHYSHRNSDVGYHVEQVPPPTAEEHASIPLRRKRSILPARWRKVKLPKAKGEPLLKPYGEEGGDDIDYDRRLLTPSDGSVSEVHILLTSQGSNGSNSMVSVFGDDDFVVGNWESKEVFSRDGHLKLSTQVFFASIDQRSERAAGESACTALVAVVADWFQTNQDLMPIRSQFDNLIREGSLEWRRLCENETYRERFPDKHFDLETVLHAKIRPLTVAHSKSFIGFFHPQGTEDVTGFDFLDGAMSFDNIWDEISRAAECSSGKPALYIVSWNDHFFVLKVDANAIYIIDTLGERLSEGCNQAYILKFDDTTTIHKTPAEKKEPSPDHRGRRKDSSETCSTEQGSGSDTEECEPVLKGKDACKEYIKSFLAAIPIRELQADIKKGLMASTPLHHRLQIEFHYTEPRPAEIAAPSPLPPFEAPFEFCWPEPPSPPAATESTVTHPPAMEAGITQAVAVV

SEQ ID NO: 174069 - protein, 102 aa, Zea Mays
MPNSNLKPMPAHNGDGVPNEASESRTCRIALSLSHRPSPTSPPLRLQEPSTGDVLARASMTPRRTRAPRSPPPWRSTLAPAWRRTAPTRCSGPPRRERGRAP

SEQ ID NO: 174070 - protein, 337 aa, Zea Mays
MWQQLLKNKYLRVKSLTQISRRPGDSHFWSGLMNTKDQFLRWGRFEARNGQTIRFWKDKWLTSRPLCEQFPNLFNIVRNKSALVVDVFSATNLNLSFRRTIRGIKLMEWHNMLILLSNVTLNPSSDKFVWDSHKNGIFSVQSMYHCLMNNPNDERNKKLWKLKLPLKIKVFLWNLCRGAILTKDNLAKRRWNGSLSCSFCNQNESIHHLFFDCYMASNIWRLIYYALKIDRPVSINHVIGSWGSNMSPGYKKLLLSGISALFWSIWLSRNEVAFNHKPIPSILQVIFRGTYWFRFWRLLQKEESHQQILDVCQALEVVAMEVFANHGWRSNARIEDA

SEQ ID NO: 174071 - protein, 159 aa, Zea Mays
MTRDDLFNINAGIVRTLCEGIAKCCPNAIVNVISNPVNSTVPIAAEVFKKAGTYDPKRLLGVTTLDVVRANTFVGEVLGLDPREVNVPVIGGHAGITILPLLSQVNPSCSFTSEEVKYLTSRIQNGGTEVVEAKAGAGSATLSMVGTLPMQLPNLQMLA

SEQ ID NO: 174072 - protein, 184 aa, Zea Mays
MTRDDLFNINAGIVRTLCEGIAKCCPNAIVNVISNPVNSTVPIAAEVFKKAGTYDPKRLLGVTTLDVVRANTFVGEVLGLDPREVNVPVIGGHAGITILPLLSQVNPSCSFTSEEVKYLTSRIQNGGTEVVEAKAGAGSATLSMAYAAAKFADACLRGLRGDAGIIECSYVASQSCLSLHPKCG

SEQ ID NO: 174073 - protein, 604 aa, Zea Mays
MEYKHIARLKLLHLTSATPKPNHFTVLVRGIPKADKESCSDVVDNFFTKYHSSSYLFHQVVYKVGKVQKIMTGAKKAYKKFKHFTDETVDQGCRTVTYRCCLCGASSNSFKLLNTECEQNKGKADNKSILDLDDEECTTAFVFFKTRYAALIASEILQTSNPMKWVANLAPEPEDVYWSNLWLPYKQLWARRIATLLGSIFFMFIFLIPVTFIQGLSQLEQLQQRLPFLRGILKKKYYMTQLVTGYLPSVILQIFLYIVAPIMMLFSTLEGPTSHSERKRSACCKVLYFTVWNIFFANVLSGTVISQLNVLSSPKDIPVQLAKAVPGQATFFITYVLTSGWASLSSEVMQLFGLIWNFIIKYVLRMREDTEFVPSFPYHTEVPKVLLFGLLGFTFSVLAPLILPFLLVYFCLGYVVYRNQLLNVYRTRYDTGGLYWPIAYNTVIFSLVLTQIICLGVFGLKESPVAAGFTVPLIILTLLFNQYCRNRLLPLFKTFPAQDLIDMDREDERSGRMDEIHHGLHSAYCQFADTVDVPLDKIEIVGGDEEQGSSSGQSSVKETCEDPKKHLAHPTLKGLPVNRLRHAVRSVTFLIRLQRRGLSEQKIG

SEQ ID NO: 174074 - protein, 214 aa, Zea Mays
MNVPAAASQPPHRPSSLRSAAPPKSRRELRRLEPALLLAPRAATLLLAPVLLALAEPLDVERQVLQLRRGPSLVQLRKQRSRGSGVVVVALLRLLLLLHATVGRRGADGPPPLPEGGREQRRARQQHYPSPHVVAVDRESRGGIESPTIVDVVATPLMSEEEALKIHTDCVHFQTSSPHLSPTGSSKKATKGNSPDKGRNKFWKNINLGFKTST

SEQ ID NO: 174075 - protein, 235 aa, Zea Mays
MNVPAAASQPPHRPSSLRSAAPPKSRRELRRLEPALLLAPRAATLLLAPVLLALAEPLDVERQVLQLRRGPSLVQLRKQRSRGSGVVVVALLRLLLLLHATVGRRGADGPPPLPEGGREQRRARQQHYPSPHVVAVDRESRGGIESPTIVDVVATPLMSEEEALKIHTDCVHFQTSSPHLSPTGSSKKATKGNSPDKGRNKFWKNINLGFKTSTSSIKLSLICKKFEPLESPPKR

SEQ ID NO: 174076 - protein, 88 aa, Zea Mays
MLSSIAFNTVLQSAFNHGHESLPTRACSRHRLFTSSPSIMASSPHPLHFSPLTIGSFSYPVLPSVVIGGAGNRPSPSTPTPDFPRLGL

SEQ ID NO: 174077 - protein, 106 aa, Zea Mays
MTSSSSPSRKALSKIACNRLQKELAEWQLSPPAGFKHKVSDNLQRWVIEVTGAAGTLYAGETYQLQVDFPEHYPMEAPQVIFLNPAPMHPHIYSNGHICLATSSGQ

SEQ ID NO: 174078 - protein, 111 aa, Zea Mays
MTSSSSPSRKALSKIACNRLQKELAEWQLSPPAGFKHKVSDNLQRWVIEVTGAAGTLYAGETYQLQVDFPEHYPMEAPQVIFLNPAPMHPHIYSNGHICLDGSYSSNYPGR

SEQ ID NO: 174079 - protein, 480 aa, Zea Mays
MQLGGIISPSIGRLDKLQRLALHQNSLHGPIPAEIKNCTELRAIYLRANYLQGGIPSEIGELVHLTILDLSSNLLRGTIPASIGSLTHLRFLNLSTNFFSGEIPNAGVLGTFKSSSFVGNLELCGLSIQKACRGTLGFPAVLPHSDPLSSAGVSPINNNKTSHFLNGVVIGSMSTLALALVAVLGFLWICLLSRKKSIGGNYVKMDKQTVPDGAKLVTYQWNLPYSSSEIIRRLELLDEEDVVGCGGFGTVYRMVMDDGTSFAVKRIDLSRESRDRTFEKELEILGSIRHINLVNLRGYCRLPTAKLLVYDFVELGSLECYLHGDEQEEQPLNWNARMKIALGSARGLAYLHHDCSPGIVHRDIKASNILLDRSLEPRVSDFGLARLLVDSAAHVTTVVAGTFGYLAPEYLQNGHATEKSDVYSFGVLMLELVTGKRPTDSCFIKKGLNIVGWVSSVRFSFFPLPFLPPLPRHVGWVFCS

SEQ ID NO: 174080 - protein, 117 aa, Zea Mays
MHGGLPRINTTLVLLETSGWRTSKILVRSIHSSSVDIVTKISSVHALHLARSLAYWHGRRCGLGEHMGSNVGMGRHGRRRTAGVDDTGAERGRAGGLTELASIGTVGEGAGLRGLVP

SEQ ID NO: 174081 - protein, 68 aa, Zea Mays
MHGGLPRINTTLVLLETSGWRTSKILVRSIHSSSVDIVTKISSVHALHLARSLAYLHDMRDAHEWIGA

SEQ ID NO: 174082 - protein, 144 aa, Zea Mays
MHGGLPRINTTLVLLETSGWRTSKILVRSIHSSSVDIVTKISSVHALHLARSLAYHNRIDLIYVRTATVPWFYFVEHLERTEWHGRRCGLGEHMGSNVGMGRHGRRRTAGVDDTGAERGRAGGLTELASIGTVGEGAGLRGLVP

SEQ ID NO: 174083 - protein, 67 aa, Zea Mays
MWLLLQPPYDSLSQDCREAPTAMGGAPARGREGGSPRQRRTTSGQGGARRGWDRGRGMSSRAVSRHS

SEQ ID NO: 174084 - protein, 714 aa, Zea Mays
MAAGGELSPSPVPPASPIKHSRSPDDAQPDASPKRRKRHHHRRHHHHRRHRHADSPVPVAADEEVEEGEILEDATAASAMEVDAESAAPEAFLAPEHFGNGADTDSNTDATKMQAPALPTLPSSEDGRRSLHDAPESERGDILSSDVEDNKGHERRQRQNRSKSPKSRREKERRHKDDHHTSSSKDYHSRNHSRTSPYSRHQSEAHSRDLYLRYREKGDYTNGSRANLRDGSDHESNDRNGKSGRHTTRTHGSERERSSSHGIHDRHGDRYSDRRASQERHRDDRIYRDKIDSLEAAPRHRERSRSHSRSDPRENTRLRDQSRERERRSGSSRHRDHDSKRDTSKDRHRESDRVNSAHERDRGREARDREWHRVKGSETHRAKEGRDKVSDNDRHRDSTRSKYSVSDGYKERTRSGEKGRDADHKNRKFEEMKENSLKEEDEEEYQEKIEQQLAMQEEDDPEKIKEEARRRKEAIMAKYRQQQSQKEDMESKPSGNDEEVRAMDGNEAIHQKDDIDSSFMGNVEAENKHDSSEVFDGKTGFNVGRSPAHNYASTSTGAFTDERTIGVSGLGEGSPKSERSADMFCDDIFGESPTGIRKLGKDDGLHIERNALHDNWDDADGYYTYRFGELLDGRYEIIAAHGKGVFSTVVRAKDLKASKDDPEEVAIKIIRNNETMYKAGKQEVSILEKLASADREDKRHCVRFISSFISFSSP

SEQ ID NO: 174085 - protein, 905 aa, Zea Mays
MAAGGELSPSPVPPASPIKHSRSPDDAQPDASPKRRKRHHHRRHHHHRRHRHADSPVPVAADEEVEEGEILEDATAASAMEVDAESAAPEAFLAPEHFGNGADTDSNTDATKMQAPALPTLPSSEDGRRSLHDAPESERGDILSSDVEDNKGHERRQRQNRSKSPKSRREKERRHKDDHHTSSSKDYHSRNHSRTSPYSRHQSEAHSRDLYLRYREKGDYTNGSRANLRDGSDHESNDRNGKSGRHTTRTHGSERERSSSHGIHDRHGDRYSDRRASQERHRDDRIYRDKIDSLEAAPRHRERSRSHSRSDPRENTRLRDQSRERERRSGSSRHRDHDSKRDTSKDRHRESDRVNSAHERDRGREARDREWHRVKGSETHRAKEGRDKVSDNDRHRDSTRSKYSVSDGYKERTRSGEKGRDADHKNRKFEEMKENSLKEEDEEEYQEKIEQQLAMQEEDDPEKIKEEARRRKEAIMAKYRQQQSQKEDMESKPSGNDEEVRAMDGNEAIHQKDDIDSSFMGNVEAENKHDSSEVFDGKTGFNVGRSPAHNYASTSTGAFTDERTIGVSGLGEGSPKSERSADMFCDDIFGESPTGIRKLGKDDGLHIERNALHDNWDDADGYYTYRFGELLDGRYEIIAAHGKGVFSTVVRAKDLKASKDDPEEVAIKIIRNNETMYKAGKQEVSILEKLASADREDKRHCLFIALKHLKNCKVLHCDIKPDNMLVNEAKNVLKVCDFGNAMLAGMNEVTPYLVSRFYRAPEIVLGLAYDHPLDMWSVGCCLYELYTGKVLFPGPSNNAMLRLHMELKGPFPKKMLRKGAFTMQHFDQDLNFHATEEDPVTKTAVRRLILNIKPKDVGSLFPNFPGEDPKMLSSFKDLLDKIFTLDPEKRITVSQALSHPFITGK

SEQ ID NO: 174086 - protein, 502 aa, Zea Mays
MAAGGELSPSPVPPASPIKHSRSPDDAQPDASPKRRKRHHHRRHHHHRRHRHADSPVPVAADEEVEEGEILEDATAASAMEVDAESAAPEAFLAPEHFGNGADTDSNTDATKMQAPALPTLPSSEDGRRSLHDAPESERGDILSSDVEDNKGHERRQRQNRSKSPKSRREKERRHKDDHHTSSSKDYHSRNHSRTSPYSRHQSEAHSRDLYLRYREKGDYTNGSRANLRDGSDHESNDRNGKSGRHTTRTHGSERERSSSHGIHDRHGDRYSDRRASQERHRDDRIYRDKIDSLEAAPRHRERSRSHSRSDPRENTRLRDQSRERERRSGSSRHRDHDSKRDTSKDRHRESDRVNSAHERDRGREARDREWHRVKGSETHRAKEGRDKVSDNDRHRDSTRSKYSVSDGYKERTRSGEKGRDADHKNRKFEEMKENSLKEEDEEEYQEKIEQQLAMQEEDDPEKIKEEARRRKEAIMAKYRQQQSQKEDMESKPSGNDEVLSL

SEQ ID NO: 174087 - protein, 104 aa, Zea Mays
MAVGGADGDRVDEAIVESTGRVGVPDVPRHRRPQLQPLGHHRIRDNLNRITNRNVLYPVDQHHLDDPHVKANLLFQAHFSKAELPISDYVTNLKLVLDQSIHII

SEQ ID NO: 174088 - protein, 108 aa, Zea Mays
MHYHSLETPLLGTFGVRRSSKTGFNSIPAVQCVNRYPRTKVGIAVDRNNTKVDSEPKVRAGKLRRDSKEWNRLKDEKAIQTSIDYYRVIIKCKGHECNFVRAVSRVYK

SEQ ID NO: 174089 - protein, 234 aa, Zea Mays
MARKKATVEQLRTLNKVREFKRRRNMHKAAGAGPGNKGENVCAICDDGGNLTCCEGCCQRSFHLDNEHNCIKTLGLTIQEAKNIIEKEDFICKNCQYKQHQCFICGSLGSSDDTDTSSQQVFQCEHDDCARFYHPKCVAQMLYPDSQELFELHVAAGESFTCPMHECIVCKEVDNKKDKSMQFAVCRRCPTVYHRKCLPRDIIFKPKKGRRGPMRRAWKNMLPDRILIFCIMRS

SEQ ID NO: 174090 - protein, 51 aa, Zea Mays
MEGLISTSAKAKTTVSLQDHVIYVYRIWGHVCNFTRCGTVAHHYWDGDKET

SEQ ID NO: 174091 - protein, 213 aa, Zea Mays
MNSLSVLNLRENNLQKDDVVDLHKILIKMPNLRDLDISGNPVMDEGIRSLIPFISWSIQKENPLLRLTVENSALARFLGSHVRALNATDIGLGTVGFQILEETLPTEVALSHINISKNRGGIRAAYFVSRLICRAPDLVSVNAAGNLLPPESLEVICNSLKQGTCNLERVDLTGNMHLSSNIFPAFLEFKKHGKPILVVPPNLSTSAPYDDDP

SEQ ID NO: 174092 - protein, 277 aa, Zea Mays
MDKICMSVYLKGSQSHGIQQFSIKSSQICETKPLTISSGLFKILSSGKSLHLLSLRDIKMQSPFARMIIHTLLESSCDLHTLEISENNIAGWLSELNKCSTNLLALKSDIFMNSLSVLNLRENNLQKDDVVDLHKILIKMPNLRDLDISGNPVMDEGIRSLIPFISWSIQKENPLLRLTVENCELSSIGVIILLECLTNAKQLLDVLSIADNHLGSSVAAALARFLGSHVRALNATDIGLGTVGFQILEETLPTEVALSHINIRIVVGSEQHILFPD

SEQ ID NO: 174093 - protein, 181 aa, Zea Mays
MKGGGGTTRTRKKNDDSGLLKNGDTMQTTRRRSATAAAAGEIRDAVTEDGGDAWKRHGETLLFIDVESRPAQSLTCVSRTSLHEIELSMCALFSGMIVNGACLLLSWHAETLLSLEFIHCQLYPTVMDKICMSVYLKGSQSHGIQQFSIKSSQICETKPLTISSGLFKILSSGKLLAGFRN

SEQ ID NO: 174094 - protein, 331 aa, Zea Mays
MEELSNKALAPSLLSLCLDAVADRLISDNAAAGGGVGRTGSSGGCSGGGGLAGFSEDDGGEADEDRLHPQELAEGLPWELLHRLASRLPPVVLESLHHAAHARYCSAETTSGLGVQDGERRGVKRSRCEDFNSTWQLLFKLRWPLGGNTGHNNLVTVDWQQKYWEKHLQECLNEAAEHAFLPFFCGSIGELSISAKIMNSIYQSMGTSQQHSRLAYQCSKFGCYVRSLRLQGVLCTAETYVLLQQCKLERLMFIRIISDLEIAGWLSELNKCSTNLLALKSDIFMNSLSVLNLRENNLQKDDVVDLHKILIKMPNLRDLDISGNPVMDEDH

SEQ ID NO: 174095 - protein, 195 aa, Zea Mays
MEELSNKALAPSLLSLCLDAVADRLISDNAAAGGGVGRTGSSGGCSGGGGLAGFSEDDGGEADEDRLHPQELAEGLPWELLHRLASRLPPVVLESLHHAAHARYCSAETTSGLGVQDGERRGVKRSRCEDFNSTWQLLFKLRWPLGGNTGHNNLVTVDWQQKYWEKHLQECLNEAAEHAFLPFFCGSIGELSISG

SEQ ID NO: 174096 - protein, 302 aa, Zea Mays
MQSPFARMIIHTLLESSCDLHTLEISENNIAGWLSELNKCSTNLLALKSDIFMNSLSVLNLRENNLQKDDVVDLHKILIKMPNLRDLDISGNPVMDEGIRSLIPFISWSIQKENPLLRLTVENCELSSIGVIILLECLTNAKQLLDVLSIADNHLGSSVAAALARFLGSHVRALNATDIGLGTVGFQILEETLPTEVALSHINISKNRGGIRAAYFVSRLICRAPDLVSVNAAGNLLPPESLEVICNSLKQGTCNLERVDLTGNMHLSSNIFPAFLEFKKHGKPILVVPPNLSTSAPYDDDP

SEQ ID NO: 174097 - protein, 316 aa, Zea Mays
MFIRIISDLEVNGACLLLSWHAETLLSLEFIHCQLYPTVMDKICMSVYLKGSQSHGIQQFSIKSSQICETKPLTISSGLFKILSSGKSLHLLSLRDIKMQSPFARMIIHTLLESSCDLHTLEISENNIAGWLSELNKCSTNLLALKSDIFMNSLSVLNLRENNLQKDDVVDLHKILIKMPNLRDLDISGNPVMDEGIRSLIPFISWSIQKENPLLRLTVENCELSSIGVIILLECLTNAKQLLDVLSIADNHLGSSVAAALARFLGSHVRALNATDIGLGTVGFQILEETLPTEVALSHINIRIVVGSEQHILFPD

SEQ ID NO: 174098 - protein, 416 aa, Zea Mays
MEELSNKALAPSLLSLCLDAVADRLISDNAAAGGGVGRTGSSGGCSGGGGLAGFSEDDGGEADEDRLHPQELAEGLPWELLHRLASRLPPVVLESLHHAAHARYCSAETTSGLGVQDGERRGVKRSRCEDFNSTWQLLFKLRWPLGGNTGHNNLVTVDWQQKYWEKHLQECLNEAAEHAFLPFFCGSIGELSISAKIMNSIYQSMGTSQQHSRLAYQCSKFGCYVRSLRLQGVLCTAETYIAGWLSELNKCSTNLLALKSDIFMNSLSVLNLRENNLQKDDVVDLHKILIKMPNLRDLDISGNPVMDEGIRSLIPFISWSIQKENPLLRLTVENCELSSIGVIILLECLTNAKQLLDVLSIADNHLGSSVAAALARFLGSHVRALNATDIGLGTVGFQILEETLPTEVALSHINIR

SEQ ID NO: 174099 - protein, 645 aa, Zea Mays
MEELSNKALAPSLLSLCLDAVADRLISDNAAAGGGVGRTGSSGGCSGGGGLAGFSEDDGGEADEDRLHPQELAEGLPWELLHRLASRLPPVVLESLHHAAHARYCSAETTSGLGVQDGERRGVKRSRCEDFNSTWQLLFKLRWPLGGNTGHNNLVTVDWQQKYWEKHLQECLNEAAEHAFLPFFCGSIAKIMNSIYQSMGTSQQHSRLAYQCSKFGCYVRSLRLQGVLCTAETYVLLQQCKLERLMFIRIISDLEVNGACLLLSWHAETLLSLEFIHCQLYPTVMDKICMSVYLKGSQSHGIQQFSIKSSQICETKPLTISSGLFKILSSGKSLHLLSLRDIKMQSPFARMIIHTLLESSCDLHTLEISENNIAGWLSELNKCSTNLLALKSDIFMNSLSVLNLRENNLQKDDVVDLHKILIKMPNLRDLDISGNPVMDEGIRSLIPFISWSIQKENPLLRLTVENCELSSIGVIILLECLTNAKQLLDVLSIADNHLGSSVAAALARFLGSHVRALNATDIGLGTVGFQILEETLPTEVALSHINISKNRGGIRAAYFVSRLICRAPDLVSVNAAGNLLPPESLEVICNSLKQGTCNLERVDLTGNMHLSSNIFPAFLEFKKHGKPILVVPPNLSTSAPYDDDP

SEQ ID NO: 174100 - protein, 345 aa, Zea Mays
MEELSNKALAPSLLSLCLDAVADRLISDNAAAGGGVGRTGSSGGCSGGGGLAGFSEDDGGEADEDRLHPQELAEGLPWELLHRLASRLPPVVLESLHHAAHARYCSAETTSGLGVQDGERRGVKRSRCEDFNSTWQLLFKLRWPLGGNTGHNNLVTVDWQQKYWEKHLQECLNEAAEHAFLPFFCGSIGELSISAKIMNSIYQSMGTSQQHSRLAYQCSKFGCYVRSLRLQGVLCTAETYVLLQQCKLERLMFIRIISDLEVNGACLLLSWHAETLLSLEFIHCQLYPTVMDKICMSVYLKGSQSHGIQQFSIKSSQICETKPLTISSGLFKILSSGKLLAGFRN

SEQ ID NO: 174101 - protein, 339 aa, Zea Mays
MEELSNKALAPSLLSLCLDAVADRLISDNAAAGGGVGRTGSSGGCSGGGGLAGFSEDDGGEADEDRLHPQELAEGLPWELLHRLASRLPPVVLESLHHAAHARYCSAETTSGLGVQDGERRGVKRSRCEDFNSTWQLLFKLRWPLGGNTGHNNLVTVDWQQKYWEKHLQECLNEAAEHAFLPFFCGSIAKIMNSIYQSMGTSQQHSRLAYQCSKFGCYVRSLRLQGVLCTAETYVLLQQCKLERLMFIRIISDLEVNGACLLLSWHAETLLSLEFIHCQLYPTVMDKICMSVYLKGSQSHGIQQFSIKSSQICETKPLTISSGLFKILSSGKLLAGFRN

SEQ ID NO: 174102 - protein, 347 aa, Zea Mays
MEELSNKALAPSLLSLCLDAVADRLISDNAAAGGGVGRTGSSGGCSGGGGLAGFSEDDGGEADEDRLHPQELAEGLPWELLHRLASRLPPVVLESLHHAAHARYCSAETTSGLGVQDGERRGVKRSRCEDFNSTWQLLFKLRWPLGGNTGHNNLVTVDWQQKYWEKHLQECLNEAAEHAFLPFFCGSIGELSISAKIMNSIYQSMGTSQQHSRLAYQCSKFGCYVRSLRLQGVLCTAETYVLLQQCKLERLMFIRIISDLEVNGACLLLSWHAETLLSLEFIHCQLYPTVMDKICMSVYLKGSQSHGIQQFSIKSSQICETKPLTISSGRCTCCHFVILRCSHHLLG

SEQ ID NO: 174103 - protein, 334 aa, Zea Mays
MEELSNKALAPSLLSLCLDAVADRLISDNAAAGGGVGRTGSSGGCSGGGGLAGFSEDDGGEADEDRLHPQELAEGLPWELLHRLASRLPPVVLESLHHAAHARYCSAETTSGLGVQDGERRGVKRSRCEDFNSTWQLLFKLRWPLGGNTGHNNLVTVDWQQKYWEKHLQECLNEAAEHAFLPFFCGSIGELSISAKIMNSIYQSMGTSQQHSRLAYQCSKFGCYVRSLRLQGVLCTAETYVNGACLLLSWHAETLLSLEFIHCQLYPTVMDKICMSVYLKGSQSHGIQQFSIKSSQICETKPLTISSGLFKILSSGRCTCCHFVILRCSHHLLG

SEQ ID NO: 174104 - protein, 355 aa, Zea Mays
MEELSNKALAPSLLSLCLDAVADRLISDNAAAGGGVGRTGSSGGCSGGGGLAGFSEDDGGEADEDRLHPQELAEGLPWELLHRLASRLPPVVLESLHHAAHARYCSAETTSGLGVQDGERRGVKRSRCEDFNSTWQLLFKLRWPLGGNTGHNNLVTVDWQQKYWEKHLQECLNEAAEHAFLPFFCGSIGELSISAKIMNSIYQSMGTSQQHSRLAYQCSKFGCYVRSLRLQGVLCTAETYVLLQQCKLERLMFIRIISDLEVNGACLLLSWHAETLLSLEFIHCQLYPTVMDKICMSVYLKGSQSHGIQQFSIKSSQICETKPLTISSGLFKILSSGRCTCCHFVILRCSHHLLG

SEQ ID NO: 174105 - protein, 520 aa, Zea Mays
MEELSNKALAPSLLSLCLDAVADRLISDNAAAGGGVGRTGSSGGCSGGGGLAGFSEDDGGEADEDRLHPQELAEGLPWELLHRLASRLPPVVLESLHHAAHARYCSAETTSGLGVQDGERRGVKRSRCEDFNSTWQLLFKLRWPLGGNTGHNNLVTVDWQQKYWEKHLQECLNEAAEHAFLPFFCGSIGELSISAKIMNSIYQSMGTSQQHSRLAYQCSKFGCYVRSLRLQGVLCTAETYVLLQQCKLERLMFIRIISDLEIAGWLSELNKCSTNLLALKSDIFMNSLSVLNLRENNLQKDDVVDLHKILIKMPNLRDLDISGNPVMDEGIRSLIPFISWSIQKENPLLRLTVENCELSSIGVIILLECLTNAKQLLDVLSIADNHLGSSVAAALARFLGSHVRALNATDIGLGTVGFQILEETLPTEVALSHINIRLICRAPDLVSVNAAGNLLPPESLEVICNSLKQGTCNLERVDLTGNMHLSSNIFPAFLEFKKHGKPILVVPPNLSTSAPYDDDP

SEQ ID NO: 174106 - protein, 212 aa, Zea Mays
MGSSGADTSSKPNKASAPQEQQQPATSGAATPAVYPDWSSFQAYPPIPPHGFFPSPVASSPQGHPYMWGAQPMIPPYGAPPYVMYPPGVYAHPSMASGAHPFTPYAITSPNGNADATGTTAVACDTDGKPSEGKDKSPTKRPKGTLGSLNMLTGKNPSEHGKTSGASANGATSQSGESGSDSSSEGSEGNSHNVSIAELFIHFCCIFVMYAK

SEQ ID NO: 174107 - protein, 50 aa, Zea Mays
MSEVEPLDRYTLLLSWTIDAVCINDLRNYVYSWFQFICFPILFLFGLCSI

SEQ ID NO: 174108 - protein, 122 aa, Zea Mays
MIAVQRCTSSVAILQQYFSNTISRLLLPVDGAHPSACEDMGSAVSVVEAAAHKGLLQCIDTVMSEVERLLSSEQKATDYRTPDDGAAPDHRPTNACIREIACIRGCLIIGRSSHLVPVVAYG

SEQ ID NO: 174109 - protein, 66 aa, Zea Mays
MPTAANPAAALPLTLDLEDFKIDKRLQNLKKEVAVQDAKHRKTLGEVSYNARRILYLSPITAEILL

SEQ ID NO: 174110 - protein, 723 aa, Zea Mays
MHGSQEQHDFAGEWEADDISQGHEDIFMFDKLDELNEDIHYKSMESTDNSLVIVKHLVSGRQDLEGSRRPNQSLCHSTDISHVSFKATCSRCGKFFDAMDVDEEGVYCDACATKDGNILTSPIVQTIGEENQQYGKTANLKPCIASDSPVPTDCEIYSKEVSLDHQLVNNESYADCLDQAPPIHSMGHTPQEMLLGQEENIDAEHRNKHVGDSLGNTNDNSFHRSSVDECEQTEPTSVGQDLFIIDQMNNHNRGLSQCNENVSESVTCDNSHQLGSTTYQNPKLETTEDTGISVLLVPKPNSNKWPNMLCSEPYYARDGVSMMKRSFGLGSSSAASSSDLGSSRQSIICFERLRSGKKGDFEKSQISSTISCQSIASVSDMSICSSSASLCPQSDAVGDSCFPIDTLESGTSGTLISSQENDDAFCKDTLPSAMECPSSSQFIADDDSPGDMKIQSYLSEVGYTTVENHSACRMTDMDCTSTNMYSLDTEMPSDTLESSGPVESSMPETEEDAYTISQCNKGSAPEHSSDENNFDNIQMQSEIVQGSAEENRLDDCCMSAISEEDVLISGQEDDIRNLPNDEELCAEVEGPRKQIQRCFTLEEAADTILFCSSIVHDLAYKAATIALENKKEPKFVDSIRPTVAIVRGSFAKEESLPKLPHRRTPNRKVKRKRLEGETTTTETTEKDVVANDSPPVCSASGITRNSDNMKPPKLESKCNCIIM

SEQ ID NO: 174111 - protein, 697 aa, Zea Mays
MHGSQEQHDFAGEWEADDISQGHEDIFMFDKLDELNEDIHYKSMESTDNSLVIVKHLVSGRQDLEGSRRPNQSLCHSTDISHVSFKATCSRCGKFFDAMDVDEEGVYCDACATKDGNILTSPIVQTIGEENQQYGKTANLKPCIASDSPVPTDCEIYSKEVSLDHQLVNNESYADCLDQAPPIHSMGHTPQEMLLGQEENIDAEHRNKHVGDSLGNTNDNSFHRSSVDECEQTEPTSVGQDLFIIDQMNNHNRGLSQCNENVSESVTCDNSHQLGSTTYQNPKLETTEDTGISVLLVPKPNSNKWPNMLCSEPYYARDGVSMMKRSFGLGSSSAASSSDLGSSRQSIICFERLRSGKKGDFEKSQISSTISCQSIASVSDMSICSSSASLCPQSDAVGDSCFPIDTLESGTSGTLISSQENDDAFCKDTLPSAMECPSSSQFIADDDSPGDMKIQSYLSEVGYTTVENHSACRMTDMDCTSTNMYSLDTEMPSDTLESSGPVESSMPETEEDAYTISQCNKAEENRLDDCCMSAISEEDVLISGQEDDIRNLPNDEELCAEVEGPRKQIQRCFTLEEAADTILFCSSIVHDLAYKAATIALENKKEPKFVDSIRPTVAIVRGSFAKEESLPKLPHRRTPNRKVKRKRLEGETTTTETTEKDVVANDSPPVCSASGITRNSDNMKPPKLESKCNCIIM

SEQ ID NO: 174112 - protein, 1103 aa, Zea Mays
MKKLRYFPEVKLGVNIPAHGESHELLNTDGDKNDYEWLLTPPETPLFRSLDDEENQSITQVSRGRAQSKPIQISRSSMVDNNQRASRSSASSSRLSPSPCSMGRTRSSSSASRSSPPLAETQTPSRRLSTPPIAKTLTPPRRSPSPVSRRMSTGSSGPTLNGTRGASPVKSNHRSSSPKLHGWQSNVPGFSFDAPLNLRTSLTDRPVCRSRGGSPSSFSGLEKGSRGRRLSMSPTPPRRASSSHSIERDRMSSYSKASATSSGEDDLESMQSVPISYSSSPVVKKSLVVMKTRTIASSKNLSKKLTPSSVPKRSFDSALWLMDHRKAPQDRFRPLLSGAPANTFGAGNGNDVHKPMFSHNSSLTTSSTASSYHGATFGSYMHGSQEQHDFAGEWEADDISQGHEDIFMFDKLDELNEDIHYKSMESTDNSLVIVKHLVSGRQDLEGSRRPNQSLCHSTDISHVSFKATCSRCGKFFDAMDVDEEGVYCDACATKDGNILTSPIVQTIGEENQQYGKTANLKPCIASDSPVPTDCEIYSKEVSLDHQLVNNESYADCLDQAPPIHSMGHTPQEMLLGQEENIDAEHRNKHVGDSLGNTNDNSFHRSSVDECEQTEPTSVGQDLFIIDQMNNHNRGLSQCNENVSESVTCDNSHQLGSTTYQNPKLETTEDTGISVLLVPKPNSNKWPNMLCSEPYYARDGVSMMKRSFGLGSSSAASSSDLGSSRQSIICFERLRSGKKGDFEKSQISSTISCQSIASVSDMSICSSSASLCPQSDAVGDSCFPIDTLESGTSGTLISSQENDDAFCKDTLPSAMECPSSSQFIADDDSPGDMKIQSYLSEVGYTTVENHSACRMTDMDCTSTNMYSLDTEMPSDTLESSGPVESSMPETEEDAYTISQCNKGSAPEHSSDENNFDNIQMQSEIVQGSAEENRLDDCCMSAISEEDVLISGQEDDIRNLPNDEELCAEVEGPRKQIQRCFTLEEAADTILFCSSIVHDLAYKAATIALENKKEPKFVDSIRPTVAIVRGSFAKEESLPKLPHRRTPNRKVKRKRLEGETTTTETTEKDVVANDSPPVCSASGITRNSDNMKPPKLESKCNCIIM

SEQ ID NO: 174113 - protein, 1026 aa, Zea Mays
MVDNNQRASRSSASSSRLSPSPCSMGRTRSSSSASRSSPPLAETQTPSRRLSTPPIAKTLTPPRRSPSPVSRRMSTGSSGPTLNGTRGASPVKSNHRSSSPKLHGWQSNVPGFSFDAPLNLRTSLTDRPVCRSRGGSPSSFSGLEKGSRGRRLSMSPTPPRRASSSHSIERDRMSSYSKASATSSGEDDLESMQSVPISYSSSPVVKKSLVVMKTRTIASSKNLSKKLTPSSVPKRSFDSALWLMDHRKAPQDRFRPLLSGAPANTFGAGNGNDVHKPMFSHNSSLTTSSTASSYHGATFGSYMHGSQEQHDFAGEWEADDISQGHEDIFMFDKLDELNEDIHYKSMESTDNSLVIVKHLVSGRQDLEGSRRPNQSLCHSTDISHVSFKATCSRCGKFFDAMDVDEEGVYCDACATKDGNILTSPIVQTIGEENQQYGKTANLKPCIASDSPVPTDCEIYSKEVSLDHQLVNNESYADCLDQAPPIHSMGHTPQEMLLGQEENIDAEHRNKHVGDSLGNTNDNSFHRSSVDECEQTEPTSVGQDLFIIDQMNNHNRGLSQCNENVSESVTCDNSHQLGSTTYQNPKLETTEDTGISVLLVPKPNSNKWPNMLCSEPYYARDGVSMMKRSFGLGSSSAASSSDLGSSRQSIICFERLRSGKKGDFEKSQISSTISCQSIASVSDMSICSSSASLCPQSDAVGDSCFPIDTLESGTSGTLISSQENDDAFCKDTLPSAMECPSSSQFIADDDSPGDMKIQSYLSEVGYTTVENHSACRMTDMDCTSTNMYSLDTEMPSDTLESSGPVESSMPETEEDAYTISQCNKGSAPEHSSDENNFDNIQMQSEIVQGSAEENRLDDCCMSAISEEDVLISGQEDDIRNLPNDEELCAEVEGPRKQIQRCFTLEEAADTILFCSSIVHDLAYKAATIALENKKEPKFVDSIRPTVAIVRGSFAKEESLPKLPHRRTPNRKVKRKRLEGETTTTETTEKDVVANDSPPVCSASGITRNSDNMKPPKLESKCNCIIM

SEQ ID NO: 174114 - protein, 1131 aa, Zea Mays
MCFLQNQRMMNSLCSLICRKLRRTTSYWNQKLRYFPEVKLGVNIPAHGESHELLNTDGDKNDYEWLLTPPETPLFRSLDDEENQSITQVSRGRAQSKPIQISRSSMVDNNQRASRSSASSSRLSPSPCSMGRTRSSSSASRSSPPLAETQTPSRRLSTPPIAKTLTPPRRSPSPVSRRMSTGSSGPTLNGTRGASPVKSNHRSSSPKLHGWQSNVPGFSFDAPLNLRTSLTDRPVCRSRGGSPSSFSGLEKGSRGRRLSMSPTPPRRASSSHSIERDRMSSYSKASATSSGEDDLESMQSVPISYSSSPVVKKSLVVMKTRTIASSKNLSKKLTPSSVPKRSFDSALWLMDHRKAPQDRFRPLLSGAPANTFGAGNGNDVHKPMFSHNSSLTTSSTASSYHGATFGSYMHGSQEQHDFAGEWEADDISQGHEDIFMFDKLDELNEDIHYKSMESTDNSLVIVKHLVSGRQDLEGSRRPNQSLCHSTDISHVSFKATCSRCGKFFDAMDVDEEGVYCDACATKDGNILTSPIVQTIGEENQQYGKTANLKPCIASDSPVPTDCEIYSKEVSLDHQLVNNESYADCLDQAPPIHSMGHTPQEMLLGQEENIDAEHRNKHVGDSLGNTNDNSFHRSSVDECEQTEPTSVGQDLFIIDQMNNHNRGLSQCNENVSESVTCDNSHQLGSTTYQNPKLETTEDTGISVLLVPKPNSNKWPNMLCSEPYYARDGVSMMKRSFGLGSSSAASSSDLGSSRQSIICFERLRSGKKGDFEKSQISSTISCQSIASVSDMSICSSSASLCPQSDAVGDSCFPIDTLESGTSGTLISSQENDDAFCKDTLPSAMECPSSSQFIADDDSPGDMKIQSYLSEVGYTTVENHSACRMTDMDCTSTNMYSLDTEMPSDTLESSGPVESSMPETEEDAYTISQCNKGSAPEHSSDENNFDNIQMQSEIVQGSAEENRLDDCCMSAISEEDVLISGQEDDIRNLPNDEELCAEVEGPRKQIQRCFTLEEAADTILFCSSIVHDLAYKAATIALENKKEPKFVDSIRPTVAIVRGSFAKEESLPKLPHRRTPNRKVKRKRLEGETTTTETTEKDVVANDSPPVCSASGITRNSDNMKPPKLESKCNCIIM

SEQ ID NO: 174115 - protein, 331 aa, Zea Mays
MEHGVLGQCQSGLVVHPEFHRSSVSPEEITEQSSQPERLSRSSGRRYVLGLAAGHGHHLLLDRLPANEALAEEEEDPACALASVDVTGVVVVAVPDKVCLPRAPRVVETVVESPRNIADDPLHSLLMLRRRSLQEPTNVADGVCQVRPCVDEVAKAPHKTPVLCSIHLLRRAVATQLQPLLHRSESWVAVGEPSQLNNALGIGGLAKCDPGVSLVHLNPQVEGEMPQVTHLEGGLHLVLERCHLCVLGAGDHQVVDVDTHQQGTSSIAPPIDGRLVRAWRETHSFERGIQLGIPRPRCLSQAIESLAQAQHLALLARDRKTWRLVYVDLLL

SEQ ID NO: 174116 - protein, 218 aa, Zea Mays
MIPYATAAEAEGALGRTMTWAETAWYEYSAVMPDSWLHCHTTFILFVIYSIAPLPLLLLEQFAPSVVLPYKLQPRVRLPPAASLSCYMDAACIFPLAVGLQFVSYPAVAKILRTRMGLPLPSVRETIAQLVVYSLVEDYLSYWMHRLLHTQWCYEKIHRVHHEFTAPTGFAMSYSHWAENVVLSIPALAGPVLVPCHVTTQWLWFSIRLIEGINTHSG

SEQ ID NO: 174117 - protein, 273 aa, Zea Mays
MIPYATAAEAEGALGRTMTWAETAWYEYSAVMPDSWLHCHTTFILFVIYSIAPLPLLLLEQFAPSVVLPYKLQPRVRLPPAASLSCYMDAACIFPLAVGLQFVSYPAVAKILRTRMGLPLPSVRETIAQLVVYSLVEDYLSYWMHRLLHTQWCYEKIHRVHHEFTAPTGFAMSYSHWAENVVLSIPALAGPVLVPCHVTTQWLWFSIRLIEGINTHSGYHFPFSPCRLIPFYGGAAYHDYHHYAGGRSQSNFAPLFTYCDYLYRTDKATDTTS

SEQ ID NO: 174118 - protein, 103 aa, Zea Mays
MAITEFFLDGFPDSNRLLKILGDFKEVKTGPGLESTWMHAMRYLLIQLLLQVLLHPDEYWEATFDVAICCKKSFPVIAQGDNSCAQEFVEHGIHGLHQGHSKH

SEQ ID NO: 174119 - protein, 119 aa, Zea Mays
MDSSTSVSPNQQAHHNMAITEFFLDGFPDSNRLLKILGDFKEVKTGPGLESTWMHAMRYLLIQLLLQVLLHPDEYWEATFDVAICCKKSFPVIAQGDNSCAQEFVEHGIHGLHQGHSKH

SEQ ID NO: 174120 - protein, 114 aa, Zea Mays
MEYCLLLAHHNMAITEFFLDGFPDSNRLLKILGDFKEVKTGPGLESTWMHAMRYLLIQLLLQVLLHPDEYWEATFDVAICCKKSFPVIAQGDNSCAQEFVEHGIHGLHQGHSKH

SEQ ID NO: 174121 - protein, 130 aa, Zea Mays
MAEAVASAGRLAMDSSTSVSPNQAHHNMAITEFFLDGFPDSNRLLKILGDFKEVKTGPGLESTWMHAMRYLLIQLLLQVLLHPDEYWEATFDVAICCKKSFPVIAQGDNSCAQEFVEHGIHGLHQGHSKH

SEQ ID NO: 174122 - protein, 153 aa, Zea Mays
MEQQGQGWRRRQIPAFGRWNQHTDEAGYLESAVQAGLVRPGHCYHDDGGNEVVLFRSSASPPPHKPAKKVRSTMEGHGHHHQVQVEAGSRKQRPFVAGDGSRSRAAKPRPRVVRAAVDEDLYIVPSDMSRKKKGVPLIFSCCIYLTHIYIRPV

SEQ ID NO: 174123 - protein, 704 aa, Zea Mays
MSSPAMETTSQDESESDEQDQPLEAKPLRSLAPMLPLPMKYDVATQSTDPMLVFVTPFRPCTSPEPSAARQPLPKSPAPLRATPVSAAFPMPRPGAGGDPLEATPVSAAAPAFRMPRREDESSEEEYNPFFCGRKKPTRLKTAGKRTHQQAECSNARDMKRRPTQTSLSLNKELATFTPSSSSDPTESVQETLTMFDSLRRRILQLDENREDAAGKRADLKAGSLMMQNGLRINNLKTVGPVPGVEVGDIFFFRMEMCVVGLHAPAMAGIDYVSARRGGSGTDEVVAVSVVSSGGYENDDTDSDVLVYTGQGGSSRRRKDKHDQRLERGNLALMNSMERRSVVRVVRGAQDPFCRSSKIYVYDGLYRVEGSWTERARDGFSVFKYKLRREPGQRDGISVWKMAERWRADPVTRSHVVSADMSSSAEKLPVCLVNDADDDDEQRVPGRFNYVTGVEYEYPRPLGKTKPCKCPSVCLPSDDPDCSCARLNSGHLPYTACGLLVKRVPVLYECGPECRCSGNCRNRVAQKGVRLRFEVFWTGDACGWGVRSWDPIRAGAFVCEYAGQAVDVSTGGEEDEYAFCASGEGWRWWNLGAGLVEEASDGDAAENLEERLPVMISARRSGNVARFLNHSCSPNLLWQPVRYGDGGYPHVMFFAMRHVPPMAQLTYDYGTTRGAAPPGFQGKFPNACRLKPCFCGSTSCRGSF

SEQ ID NO: 174124 - protein, 58 aa, Zea Mays
MIHGNNECFQLGTATIRNRTTNDRREWFSLELVHSYCQLPISLFCNLHKHQRQFKTGA

SEQ ID NO: 174125 - protein, 62 aa, Zea Mays
MILHEALRLYPPATFLTRRTYKKMELIGIKYLAGVDLFLPVIFIHSDPNIWGKIQKEKSRMS

SEQ ID NO: 174126 - protein, 80 aa, Zea Mays
MTIDDLFELFVEHFVNITLPASSSPDALYFLMMHRTSTRLITHTRDEAGSVEMCAREGELVVPRVDDEQDTDQGVCLGVE

SEQ ID NO: 174127 - protein, 323 aa, Zea Mays
MAYAAPPMASSLTASHPPLSPSHLITHPHRCPARPNPTTGLLRLTPSRRRGRPPVAVRLAISASSTSAPPPSADRSEAASSLERYLSATVTGAVMGTGAAPPASAPPRAPPAMKGGRKQYSALGAVTLEKAKLDLSQRRKNIMPELATGGGGGDIGKRIGHGGGDGGDDDGDDDDYFDDFDEGEEEGGLFRRRIVVQELFNREFVEAVLQEWYKTMSDLPTGLRQACEMGLVSSAQMVRYLSIFARPTNARSFSRALPGWLSRGLVGRTLADPSFPHKMSLEFIATIASSIWCEMNIRKESLLQLDGSWTFSTMPFICEYISI

SEQ ID NO: 174128 - protein, 379 aa, Zea Mays
MVGVMVVMMMVTMMTTLMILMRERKKVGFSGGELLYKREFVEAVLQEWYKTMSDLPTGLRQACEMGLVSSAQMVRYLSIFARPTNARSFSRALPGWLSRGLVGRTLADPSFPHKMSLEFIATIASSIWCEMNIRKERFKQEWDLVIVNALTAACCNLMVLGLLAPCRSYASTSRFDFQNAIEKLPNNIFEKSYPLREFDLAKRISAFFYKAAELSLVGFVAGSVQGGMSIVLSARKERRLSVTIPSISTNALGYGAFLGLYANLRYQLLCGVDQYMVKRFDVLGVAIFFSTAARLMNIQIGEASRRTWLGEEADPQYSDRLLRAYKRPVEVDADQSRWFISKDAIVSGLGLLGIKQGGPEATFSKSRRKRVIRKKVTSG

SEQ ID NO: 174129 - protein, 123 aa, Zea Mays
MPPPLAVGSYTRGSNLRSASSFSFRASASIAVIGSHPTTTISCRDKMKDGLMSTISALDKFEQRVKDYMGVYTFFCKARSHFSRLFKMTYYFYFPPMFEVKFHLPLFIGDICCTYILFISYDI

SEQ ID NO: 174130 - protein, 746 aa, Zea Mays
MNIELKVEPDTDEVYAQLTLLPDKKQDENTSTTVEEEEVVVPPALPATNEGPHIHSFCKTLTASDTSTHGGFSVLRRHADECLPPLDMSQHPPNQELVAKDLHGAEWRFRHIFRGQPRRHLLQSGWSVFVSAKRLVAGDAFIFLRGENGELRVGVRRALRHQTTIPSSVISSHNMHLGVLATAWHAVNTDSMFTVYYKPRTSPAEFVVSRDRYYESLKRNYSIGMRFKMRFEGEEAAEQRFTGTIVGIGASDPSGWADSKWRSLKVRWDEPSSISRPERVSPWQIEPSVSPCHVNPLPVRFKRSRSSVNALPSDVSTVTREVMADSQQNSLTRALHNQGRTQLTVRYHDNSDVKTTQDLTVWSSGTEQQRNNIAAQTKLCLEGWTPTRSPEGYNQIFSAFKPLKDIHNPLGPFPSQISGTHSNSWDTADARYPVQQANYSMLPGTWSLRPHNSGFRMNQQNYLVMPEGANFTGKSAFTSLQDHGTDKCSTGCFGHIESSSHTDHASSSLIRPQPLVLGNGVQKSKGTSFKLFGIPLGSPEKSEPLVSPPSVAYDGKLQTSPSEKGNQLDVVEVDNCSHPSKTVKPLDGPQSDSITENNQPSPEATLNIQNKVQSSSTRSCKKVHKQGSALGRSIDLTKFACYDELIAELDQMFDFDGELKSPCKSWLVVYTDNEGDIMLVGDDPWNEFCDMVHKIFIYTREEVERMNPGALNSRSEDSLSDSLGRGVASRDPRGGGSTSALDSENC

SEQ ID NO: 174131 - protein, 695 aa, Zea Mays
MNIELKVEPDTDEVYAQLTLLPDKKQDENTSTTVEEEEVVVPPALPATNEGPHIHSFCKTLTASDTSTHGGFSVLRRHADECLPPLDMSQHPPNQELVAKDLHGAEWRFRHIFRGQPRRHLLQSGWSVFVSAKRLVAGDAFIFLRTSPAEFVVSRDRYYESLKRNYSIGMRFKMRFEGEEAAEQRFTGTIVGIGASDPSGWADSKWRSLKVRWDEPSSISRPERVSPWQIEPSVSPCHVNPLPVRFKRSRSSVNALPSDVSTVTREVTSKVMADSQQNSLTRALHNQGRTQLTVRYHDNSDVKTTQDLTVWSSGTEQQRNNIAAQTKLCLEGWTPTRSPEGYNQIFSAFKPLKDIHNPLGPFPSQISGTHSNSWDTADARYPVQQANYSMLPGTWSLRPHNSGFRMNQQNYLVMPEGANFTGKSAFTSLQDHGTDKCSTGCFGHIESSSHTDHASSSLIRPQPLVLGNGVQKSKGTSFKLFGIPLGSPEKSEPLVSPPSVAYDGKLQTSPSEKGNQLDVVEVDNCSHPSKTVKPLDGPQSDSITENNQPSPEATLNIQNKVQSSSTRSCKKVHKQGSALGRSIDLTKFACYDELIAELDQMFDFDGELKSPCKSWLVVYTDNEGDIMLVGDDPWNEFCDMVHKIFIYTREEVERMNPGALNSRSEDSLSDSLGRGVASRDPRGGGSTSALDSENC

SEQ ID NO: 174132 - protein, 412 aa, Zea Mays
MAAAACAGAEAGRGCGGKDALFVELWKACAGPLSCVPPLGEKVYYLPQGHIEQVEASTNQLAEQQGTPLYNLPWKIPCKLMNIELKVEPDTDEVYAQLTLLPDKKQDENTSTTVEEEEVVVPPALPATNEGPHIHSFCKTLTASDTSTHGGFSVLRRHADECLPPLDMSQHPPNQELVAKDLHGAEWRFRHIFRGQPRRHLLQSGWSVFVSAKRLVAGDAFIFLRGENGELRVGVRRALRHQTTIPSSVISSHNMHLGVLATAWHAVNTDSMFTVYYKPRTSPAEFVVSRDRYYESLKRNYSIGMRFKMRFEGEEAAEQRFTGTIVGIGASDPSGWADSKWRSLKVRWDEPSSISRPERVSPWQIEPSVSPCHVNPLPVRFKRSRSSVNALPSDVSTVTREGLNLTLCCGLI

SEQ ID NO: 174133 - protein, 408 aa, Zea Mays
MSSEQIGCSLADAASSCEYTHFLREASRCYPSLHVIYINTSLETKAHAHELVPTITCTSSNVVPTILQAFAQIPNLNVWYGPDSYMGANIADLFQRMATMSDEEIAKIHPDHNRKSLSSLLPRLHYYQGGNCMVHDMFGHEVVGKIKEQYCDAFLTAHFEVPGEMFSLAMEAKRRAMGVVGSTQNILDFIKDHVMGALDRNVDEHLQFVLGTESGMITSIVAAVQELLHLYSSQERANIEVEIVFPVSSDAISKTSNGSHHVGSSMATDLNSLTIVPGVSSGEGCSIHGGCASCPYMKMNTLGSLLKVCHQLPDKNNKLSVYQANRINVRTPLGKSVAEVGCEPILHMRHFQKTRRLPDKLVHQVVNGLESNIEGHLTGDLGGNGEFMWPSSLGMEDLIYLGKDVLKV

SEQ ID NO: 174134 - protein, 290 aa, Zea Mays
MGANIADLFQRMATMSDEEIAKIHPDHNRKSLSSLLPRLHYYQGGNCMVHDMFGHEVVGKIKEQYCDAFLTAHFEVPGEMFSLAMEAKRRAMGVVGSTQNILDFIKDHVMGALDRNVDEHLQFVLGTESGMITSIVAAVQELLHLYSSQERANIEVEIVFPVSSDAISKTSNGSHHVGSSMATDLNSLTIVPGVSSGEGCSIHGGCASCPYMKMNTLGSLLKVCHQLPDKNNKLSVYQANRINVRTPLGKSVAEVGCEPILHMRHFQKTRRLPDKLVHQVVNGNGDKPLQ

SEQ ID NO: 174135 - protein, 233 aa, Zea Mays
MVHDMFGHEVVGKIKEQYCDAFLTAHFEVPGEMFSLAMEAKRRAMGVVGSTQNILDFIKDHVMGALDRNVDEHLQFVLGTESGMITSIVAAVQELLHLYSSQERANIEVEIVFPVSSDAISKTSNGSHHVGSSMATDLNSLTIVPGVSSGEGCSIHGGCASCPYMKMNTLGSLLKVCHQLPDKNNKLSVYQANRINVRTPLGKSVAEVGCEPILHMRHFQKQGGYPTSLFTRL

SEQ ID NO: 174136 - protein, 222 aa, Zea Mays
MDTAAASLLPRAAAVKTRRVFSPLHVSRSGLLPRQSSFLAARCAHSRAPPPPPPLPRADCDDAAAKAHPRLRLRLLAEEFRALPSDADRARRLLSLAAALPRLPEPDRAQGNRVMGCVARVWLVARCNAATGWRMWFAADSDSDLSRGYCACLVAALDGAEPEDVLAVDPADPDLAPLGAGTTAARSRASTWHNVLVGMQKRARTAIAAREGRHPGKPFPSA

SEQ ID NO: 174137 - protein, 131 aa, Zea Mays
MEGFDTGNEQILLIETLVHHGCEEARAWIIRNLLEKDGLFMLSEEETSAICKLTEGYSGSDMKNLVKDASMGPLREALQTGVEIAKLSKEDMRPVMLKDFENAMREVRPSVSSSELGTYEEWNRQFGSLSI

SEQ ID NO: 174138 - protein, 118 aa, Zea Mays
MEGFDTGNEQILLIGATNRPQELDEAARRRLTKRLYIPLPSLGYSGSDMKNLVKDASMGPLREALQTGVEIAKLSKEDMRPVMLKDFENAMREVRPSVSSSELGTYEEWNRQFGSLSI

SEQ ID NO: 174139 - protein, 150 aa, Zea Mays
MEGFDTGNEQILLIGATNRPQELDEAARRRLTKRLYIPLPSLEARAWIIRNLLEKDGLFMLSEEETSAICKLTEGYSGSDMKNLVKDASMGPLREALQTGVEIAKLSKEDMRPVMLKDFENAMREVRPSVSSSELGTYEEWNRQFGSLSI

SEQ ID NO: 174140 - protein, 398 aa, Zea Mays
MKGLDVVQKPAQNGPQGASVSPQCDNNYSTRNYGVRPSWNSRRGPRGSFIPPIRNNGGSGTTISRVTGKNDESMEDSTRKCIEMLCAPDGELPEKLRNLEPRLIEHVSNEIMDRDPNVRWNDIAGLEHAKKCVTEMVIWPLLRPDIFRGCRSPGRGLLLFGPPGTGKTMIGKAIAGEAKATFFYISASSLTSKWIGEGEKLVRALFGVASCRQPAVIFVDEIDSLLSQRKSDGEHESSRRLKTQFLIEMEGFDTGNEQILLIGATNRPQELDEAARRRLTKRLYIPLPSLEARAWIIRNLLEKDGLFMLSEEETSAICKLTEGYSGSDMKNLVKDASMGPLREALQTGVEIAKLSKEDMRPVMLKDFENAMREVRPSVSSSELGTYEEWNRQFGSLSI

SEQ ID NO: 174141 - protein, 263 aa, Zea Mays
MVIWPLLRPDIFRGCRSPGRGLLLFGPPGTGKTMIGKAIAGEAKATFFYISASSLTSKWIGEGEKLVRALFGVASCRQPAVIFVDEIDSLLSQRKSDGEHESSRRLKTQFLIEMEGFDTGNEQILLIGATNRPQELDEAARRRLTKRLYIPLPSLEARAWIIRNLLEKDGLFMLSEEETSAICKLTEGYSGSDMKNLVKDASMGPLREALQTGVEIAKLSKEDMRPVMLKDFENAMREVRPSVSSSELGTYEEWNRQFGSLSI

SEQ ID NO: 174142 - protein, 336 aa, Zea Mays
MLQPEVVATQEHKFSAAFELARTDVGCVFANQGDNNVERIQRSKYFQALLQKSKANVSEQRNATCQEFSVQWAPCVDESQAEMENEKLSIRASKLMMQTKLTSLYSSKSLKTNGVPNKNMFKSENSSKVCAGVENRTSQNSNRRHAYLDVEEDEKSHGQLQNAKWKHTGFRSPIFEVANSPSSNDEADAPANEFTTAKRMMGLDVVQKPAQNGPQGASVSPQCDNNYSTRNYGVRPSWNSRRGPRGSFIPPIRNNGGSGTTISRVTGKNDESMEDSTRKCIEMLCAPDGELPEKLRNLEPRLIEHVSNEIMDRDPNVRWNDIEVCDRDGDMATATS

SEQ ID NO: 174143 - protein, 273 aa, Zea Mays
MLQPEVVATQEHKFSAAFELARTDVGCVFANQGDNNVERIQRSKYFQALLQKSKANVSEQRNATCQEFSVQWAPCVDESQAEMENEKLSIRASKLMMQTKLTSLYSSKSLKTNGVPNKNMFKSENSSKVCAGVENRTSQNSNRRHAYLDVEEDEKSHGQLQNAKWKHTGFRSPIFEVANSPSSNDEADAPANEFTTAKRMMGLDVVQKPAQNGPQGASVSPQCDNNYSTRNYGVRPSWNSRRGPRGSFIPPIRNNGGSVLKCFVLLMVSFLRS

SEQ ID NO: 174144 - protein, 597 aa, Zea Mays
MLQPEVVATQEHKFSAAFELARTDVGCVFANQGDNNVERIQRSKYFQALLQKSKANVSEQRNATCQEFSVQWAPCVDESQAEMENEKLSIRASKLMMQTKLTSLYSSKSLKTNGVPNKNMFKSENSSKVCAGVENRTSQNSNRRHAYLDVEEDEKSHGQLQNAKWKHTGFRSPIFEVANSPSSNDEADAPANEFTTAKRMMGLDVVQKPAQNGPQGASVSPQCDNNYSTRNYGVRPSWNSRRGPRGSFIPPIRNNGGSGTTISRVTGKNDESMEDSTRKCIEMLCAPDGELPEKLRNLEPRLIEHVSNEIMDRDPNVRWNDIAGLEHAKKCVTEMVIWPLLRPDIFRGCRSPGRGLLLFGPPGTGKTMIGKAIAGEAKATFFYISASSLTSKWIGEGEKLVRALFGVASCRQPAVIFVDEIDSLLSQRKSDGEHESSRRLKTQFLIEMEGFDTGNEQILLIGATNRPQELDEAARRRLTKRLYIPLPSLEARAWIIRNLLEKDGLFMLSEEETSAICKLTEGYSGSDMKNLVKDASMGPLREALQTGVEIAKLSKEDMRPVMLKDFENAMREVRPSVSSSELGTYEEWNRQFGSLSI

SEQ ID NO: 174145 - protein, 122 aa, Zea Mays
MRHHGCCGRRHQRVLASAAGGSRAGDGAVLVLLPVPKAAMLGSPPTAQLMPAPQLLLQSVPILTAEDSLHFLWHLELAFRGRPLHRPRSRGVPRLPVAVAGAPPMFPRHMLRRLVLPRRMPQ

SEQ ID NO: 174146 - protein, 97 aa, Zea Mays
MAPRVGLQGKTAPQAKKSWGSEIASSGGRSSSDVSTPYATTSCASTPDATIDKHIKTVMSLNLCPYLKPIWLITKDSHHPLPHVAAQYSRLNPEFDC

SEQ ID NO: 174147 - protein, 124 aa, Zea Mays
MGAADGATNVCLQARQEGAEPEMGRCWCCCRVGLQGKTAPQAKKSWGSEIASSGGRSSSDVSTPYATTSCASTPDATIDKHIKTVMSLNLCPYLKPIWLITKDSHHPLPHVAAQYSRLNPEFDC

SEQ ID NO: 174148 - protein, 101 aa, Zea Mays
MPPAPGDAMDIGASLPPPQLLLWSSRNLPRGSIWVVSTWRWSCLHHERRAAASGLKAAGAALGSSHFQPCDVRISGRSWRPRSRLSTLSPRCRMRRRLLLE

SEQ ID NO: 174149 - protein, 268 aa, Zea Mays
MTSPWRRLLWVLRLHRSPAQGPRPPRQHWRLSPRPVHLLRHSLPLALVLPGRAWAAGVEVAEAGAVVVVAAVVAAVVVAPAVVPVAAHRRRVPAGCALAHFPPLVVRTHLHMAVPGARFRRSSPGGHVRWCATGVHLAVGVRLRLSIALALDTCRFVVAHVAGYATVRTDWLGRGRPGCFPDSHFDSADGSQVDCGHRCYLPHHSQPWYTHLCSPSFLSPFIYHGGEWLVSSCHICGCRRLSRLFSHSRCSCRSFFSPQSSFYSSVYC

SEQ ID NO: 174150 - protein, 142 aa, Zea Mays
MKKPSCQKGFILDGFPRTVTQAQKLDEMLAKQGANVDKVLNFAIDDAVLEERITGRWIHSASGRTYHSKFAPPKSPGVDDVTGEPLIQRRDDTAEVLKSRLEAFHRQTEPVIDYYSKKGLVVNLPAEKPPKEVTAEVQKALS

SEQ ID NO: 174151 - protein, 91 aa, Zea Mays
MGSAIDECSCFSSLDVALYVPLDVSVYLQPRIYSSSFPLLTTSGKLDLRASDIFKCTVLFSSNSRPALCELSGHSWALVISCLSSGVNTLC

SEQ ID NO: 174152 - protein, 1008 aa, Zea Mays
MAHRGRAQVKPISISRSSTMENTQSFNRRSASPSRLSPAPRSCSSTMLTRIRSSNSSSRCSPALHLQPAAPSRRSSTPPASRTSTPPQRSPSPASRRLSTGSSDPILNRKGGTSPVKTSNRPSSPKLQGWQSSDPGFSFDAPPNLRTSLSDRLVSHSRGGSPSSFSGLDMNWRGRRQSVSPTPSRRASSSHSNDRFSSYSKASATSSAEDDLESMQSVLISYSSSPALRKNMPVIKSRTIASPKKPSKSFSPSSGPKRSFDSAVWLMDRRKAPQDKFRPLLSSVPCTTFGVGKGDNVHSSMLSHNSSLTTSSNLSSDHGVTFSPCMGNEQGPSDIAGDCEATPTYSLSATQSSPKSPSTEKNAESNMEDLNMERSRIVETSGNVASGSKAGLTKMATCTRCEKLFNAIKDDGEIDLCEECGLVDEVLFVNPKIETLEEHQKDHKTRISKPCVALEAPHITPDHGEDTKKSFLDSQLLNDEPPADCLQKCPQSQSTIYTTDRMLLMLHGENVNENLRPDDVGNSSQGSSLDISSHQCNINNYQQSELASVVECDNLRDQTANHQNEVFQRLPGSVYQSIEFASNTLTYDSCCKQGSAGHSNLKVENTEGAGISVLLQKSSSNKWPVIEGRPLAGTNIICSEPYYTRDGVTMLKRTIGWDSSSASSIDQGSTRQSGHLEHLKSSNRHDFEKSQISSTMSCKSIASMSDMSSSNCSVSVCPRDDAIADTGFLTDNSESSAPRSIICTEELNESCKYTLSSAIECWSAAQAIVNVGIGSTEDVVIQKLCTGRMVHKDYTSDNSCSSDTETCSNISLSLAPEERCIQKIEEGTSVGTPEHPDGDCGISNYQMQHETIPEADRLDDGCASVISEEANIMGLPVEGPREQTQRCFTLEEATDTILFCSSIAHDIAYRAATIGLEHEQHSELASARRPAVPMAGQSIPRGDGSRKPPHRLVPRHRKRSEGETVTEPDKMEVVAEDPIPVRPVPEFSRTSGSFKSPKVDSKCNCAIM

SEQ ID NO: 174153 - protein, 841 aa, Zea Mays
MNWRGRRQSVSPTPSRRASSSHSNDRFSSYSKASATSSAEDDLESMQSVLISYSSSPALRKNMPVIKSRTIASPKKPSKSFSPSSGPKRSFDSAVWLMDRRKAPQDKFRPLLSSVPCTTFGVGKGDNVHSSMLSHNSSLTTSSNLSSDHGVTFSPCMGNEQGPSDIAGDCEATPTYSLSATQSSPKSPSTEKNAESNMEDLNMERSRIVETSGNVASGSKAGLTKMATCTRCEKLFNAIKDDGEIDLCEECGLVDEVLFVNPKIETLEEHQKDHKTRISKPCVALEAPHITPDHGEDTKKSFLDSQLLNDEPPADCLQKCPQSQSTIYTTDRMLLMLHGENVNENLRPDDVGNSSQGSSLDISSHQCNINNYQQSELASVVECDNLRDQTANHQNEVFQRLPGSVYQSIEFASNTLTYDSCCKQGSAGHSNLKVENTEGAGISVLLQKSSSNKWPVIEGRPLAGTNIICSEPYYTRDGVTMLKRTIGWDSSSASSIDQGSTRQSGHLEHLKSSNRHDFEKSQISSTMSCKSIASMSDMSSSNCSVSVCPRDDAIADTGFLTDNSESSAPRSIICTEELNESCKYTLSSAIECWSAAQAIVNVGIGSTEDVVIQKLCTGRMVHKDYTSDNSCSSDTETCSNISLSLAPEERCIQKIEEGTSVGTPEHPDGDCGISNYQMQHETIPEADRLDDGCASVISEEANIMGLPGNVEGPREQTQRCFTLEEATDTILFCSSIAHDIAYRAATIGLEHEQHSELASARRPAVPMAGQSIPRGDGSRKPPHRLVPRHRKRSEGETVTEPDKMEVVAEDPIPVRPVPEFSRTSGSFKSPKVDSKCNCAIM

SEQ ID NO: 174154 - protein, 1015 aa, Zea Mays
MAHRGRAQVKPISISRSSTMENTQSFNRRSASPSRLSPAPRSCSSTMLTRIRSSNSSSRCSPALHLQPAAPSRRSSTPPASRTSTPPQRSPSPASRRLSTGSSDPILNRKGGTSPVKTSNRPSSPKLQGWQSSDPGFSFDAPPNLRTSLSDRLVSHSRGGSPSSFSGLDMNWRGRRQSVSPTPSRRASSSHSNDRFSSYSKASATSSAEDDLESMQSVLISYSSSPALRKNMPVIKSRTIASPKKPSKSFSPSSGPKRSFDSAVWLMDRRKAPQDKFRPLLSSVPCTTFGVGKGDNVHSSMLSHNSSLTTSSNLSSDHGVTFSPCMGNEQGPSDIAGDCEATPTYSLSATQSSPKSPSTEKNAESNMEDLNMERSRIVETSGNVASGSKAGLTKMATCTRCEKLFNAIKDDGEIDLCEECGLVDEVLFVNPKIETLEEHQKDHKTRISKPCVALEAPHITPDHGEDTKKSFLDSQLLNDEPPADCLQKCPQSQSTIYTTDRMLLMLHGENVNENLRPDDVGNSSQGSSLDISSHQCNINNYQQSELASVVECDNLRDQTANHQNEVFQRLPGSVYQSIEFASNTLTYDSCCKQGSAGHSNLKVENTEGAGISVLLQKSSSNKWPVIEGRPLAGTNIICSEPYYTRDGVTMLKRTIGWDSSSASSIDQGSTRQSGHLEHLKSSNRHDFEKSQISSTMSCKSIASMSDMSSSNCSVSVCPRDDAIADTGFLTDNSESSAPRSIICTEELNESCKYTLSSAIECWSAAQAIVNVGIGSTEDVVIQKLCTGRMVHKDYTSDNSCSSDTETCSNISLSLAPEERCIQKIEEGTSVGTPEHPDGDCGISNYQMQHETIPEADRLDDGCASVISEEANIMGLPGNESLATVEGPREQTQRCFTLEEATDTILFCSSIAHDIAYRAATIGLEHEQHSELASARRPAVPMAGQSIPRGDGSRKPPHRLVPRHRKRSEGETVTEPDKMEVVAEDPIPVRPVPEFSRTSGSFKSPKVDSKCNCAIM

SEQ ID NO: 174155 - protein, 1120 aa, Zea Mays
MPPSPSPRRSLKEVCHARGHSFVSILPAKSKDDELTLFKDMQKYERDNFLLEATEDFDESISKLRYFRDSKIGVNIAARGENRDLLNTDGERNDYDWLLTPPETPLFRSLDDEDQHIGMAHRGRAQVKPISISRSSTMENTQSFNRRSASPSRLSPAPRSCSSTMLTRIRSSNSSSRCSPALHLQPAAPSRRSSTPPASRTSTPPQRSPSPASRRLSTGSSDPILNRKGGTSPVKTSNRPSSPKLQGWQSSDPGFSFDAPPNLRTSLSDRLVSHSRGGSPSSFSGLDMNWRGRRQSVSPTPSRRASSSHSNDRFSSYSKASATSSAEDDLESMQSVLISYSSSPALRKNMPVIKSRTIASPKKPSKSFSPSSGPKRSFDSAVWLMDRRKAPQDKFRPLLSSVPCTTFGVGKGDNVHSSMLSHNSSLTTSSNLSSDHGVTFSPCMGNEQGPSDIAGDCEATPTYSLSATQSSPKSPSTEKNAESNMEDLNMERSRIVETSGNVASGSKAGLTKMATCTRCEKLFNAIKDDGEIDLCEECGLVDEVLFVNPKIETLEEHQKDHKTRISKPCVALEAPHITPDHGEDTKKSFLDSQLLNDEPPADCLQKCPQSQSTIYTTDRMLLMLHGENVNENLRPDDVGNSSQGSSLDISSHQCNINNYQQSELASVVECDNLRDQTANHQNEVFQRLPGSVYQSIEFASNTLTYDSCCKQGSAGHSNLKVENTEGAGISVLLQKSSSNKWPVIEGRPLAGTNIICSEPYYTRDGVTMLKRTIGWDSSSASSIDQGSTRQSGHLEHLKSSNRHDFEKSQISSTMSCKSIASMSDMSSSNCSVSVCPRDDAIADTGFLTDNSESSAPRSIICTEELNESCKYTLSSAIECWSAAQAIVNVGIGSTEDVVIQKLCTGRMVHKDYTSDNSCSSDTETCSNISLSLAPEERCIQKIEEGTSVGTPEHPDGDCGISNYQMQHETIPEADRLDDGCASVISEEANIMGLPGNVEGPREQTQRCFTLEEATDTILFCSSIAHDIAYRAATIGLEHEQHSELASARRPAVPMAGQSIPRGDGSRKPPHRLVPRHRKRSEGETVTEPDKMEVVAEDPIPVRPVPEFSRTSGSFKSPKRM

SEQ ID NO: 174156 - protein, 446 aa, Zea Mays
MAACGGAGCGPQCSSSSSAGGQEDALVESMGRLSTASAAAACGKCDGGGAAVAVAGGVGMCAGCFRAHLFGKFKLSVTSNAMVRPTDAVLLAFSGGPASRVALQFIHEMQSKAIQSWEASNSQALPVFSLGVAFVDERSVISASLPGHEIQAAIEDIRSVVSGLSPGDKRVHIASLEEVFSSGSDDKAARLKEVVGVISDETGRDDFVRRLRMLSLQKVALENRYTKIMLGTCASGIACHVLSATVKGQGYALPADVQYVDTRWEVPVVLPLHDCLAQELNLLCEIDSLKTQQLLDRPCSGINGLVSSFVSRLREENSSREHTILRTAQKLKPFSFNKFSANGYHDFLPSRLRPKFQNIDANECTFSEILCLICGSPFSESELLNLENTKLKAQKKIDLYTAHCCQSCHFQILPAATDMYGHFFSLLPKFWTEKVDAASASHSSLR

SEQ ID NO: 174157 - protein, 324 aa, Zea Mays
MAACGGAGCGPQCSSSSSAGGQEDALVESMGRLSTASAAAACGKCDGGGAAVAVAGGVGMCAGCFRAHLFGKFKLSVTSNAMVALENRYTKIMLGTCASGIACHVLSATVKGQGYALPADVQYVDTRWEVPVVLPLHDCLAQELNLLCEIDSLKTQQLLDRPCSGINGLVSSFVSRLREENSSREHTILRTAQKLKPFSFNKFSANGYHDFLPSRLRPKFQNIDANECTFSEILCLICGSPFSESELLNLENTKLKAQKKIDLYTAHCCQSCHFQILPAATDMYGHFFSLLPKFWTEKVDAASASHSSLRDQIADYLLDEDDGN

SEQ ID NO: 174158 - protein, 232 aa, Zea Mays
MLGTCASGIACHVLSATVKGQGYALPADVQYVDTRWEVPVVLPLHDCLAQELNLLCEIDSLKTQQLLDRPCSGINGLVSSFVSRLREENSSREHTILRTAQKLKPFSFNKFSANGYHDFLPSRLRPKFQNIDANECTFSEILCLICGSPFSESELLNLENTKLKAQKKIDLYTAHCCQSCHFQILPAATDMYGHFFSLLPKFWTEKVDAASASHSSLRDQIADYLLDEDDGN

SEQ ID NO: 174159 - protein, 182 aa, Zea Mays
MKWSVAREEPRRTQSFQERRTKKPGRGIMFQDITTLLLDPKAFRDTIDLFVERYKDQGITVVAGVEARGFIFGPPIALAIGAKFVPLRKPKKLPGEVISEEYSLEYGTDKIEMHVGAVQANDRALVVDDLIATGGTLCAAVKLIERVGAKVVECACVIELPELKGRDKLGDRPVFVLVEADA

SEQ ID NO: 174160 - protein, 1442 aa, Zea Mays
MVRDHAALRRTPAKASASEAGNDENSPGVVPDVAAVGVAVAATDPGRPPLLAIQPPASGLKRKPESPAPTPSKLPFRTPEKAATRSRFGWVPPRADEAPPRVGVGATPHCAMTTPRAHRGKAVTVAPAASEGGSTHSTPTKSVTKPAHSIGASGSRPPMSGGGPRGAGFGLGFTMAGRGPPTSLGPPTVVNSVEVPHFELREDPSFWMDNNVQVVIRVRPLNNNEKNLHSYYRCLKQESAQTITWIGQPETRFTFDHVACEAVDQEVLFRVAGLPMVENCMAGYNSCVFAYGQTGSGKTYTMLGEISDLEVRPSPDRGMTPRIFEFLFARIKAEEESRRDEKLKYSCKCSFLEIYNEQITDLLDPSATNLPLREDIRNGVYVENLTEFEVGCASDIIKLLMQGSANRRVAATNMNRESSRSHSVFTCIIESRWEKDSASNLRFARLNLVDLAGSERQRTSGAEGERLKEAVNINKSLSTLGLVIMSLVDLAHGKQRHIPYRDSRLTFLLQDSLGGNSKTMIIANVSPSVCSANETLSTLKFAQRARLIQNNAVVNEDASGDVLALQHQIRLLKEELAVLKRQHVTRSLSFSADVFGGDVDDGSENMSVDDKNDNKAHNGHFLKDIRFSNKQVRSLEEALAGALRRESTAENTIKELELQIEQLNELVRQREDDTRSAKMMLKFRDDKIHRMEVLVNSKLPAQSYLLEENKTLSQEVELLRERVDKNPEVTRFALENIRLSSQLKRSQLFFNEGERELLLNEISELRNQVSQILEQRTETEQQNTFSDKTKLKRTSQEVETCRSNRQVCLESNIALTREIADLVEEKTAHAEAEEKPAGLGDKLQEANIHILQSCKHCEAMERELNESRSLIEALESQQIILINEIAELKKGCVEISRLNSELDLHHRQDYLTKEEPKAELLKCFGKEDSPLQRKFKRMQASLEKARNLNTRYQIDQASHCFAEKEMDEVRKQVEVETAKVIQCLEEDLISVQQQLNASNKNDLLAKQSINELQLEIKQLNDKLLEVLKENEIFSSVTKEKEKEIELLSNDWNRLAADIGKCLVDGNAALGEASDQVAFISKSLSQRKWIEKQVRKLCSGISERDELLEELQNRLKEADDIRRDLDLKLRSLRGAMQVVNEEHQQEKCDQEKEIYFLRSQISEQGHVNNHQLEEIHRINLLLDESIETFVQKEVLQQTCVSLQKAMGEEIHRLESQLDQSKIHFAHLLNQTQEKEQLIGKLKNEELNVLLRLMSEVLKTNSTVRELRIGFNTLQSSLYMSPEVIACQNSDLNLEDRVDLRANEAFQSVERQNAEVLCQHSKEMELAVQGMQIMQSQMTKLLQEKENAKEFNLESQRTIKDLSDEVLRLNSHIIEKERSYEAKLEELNTKIHEHDASFISWNEENEVKIERHFELRFRRQNLLWPRNLLSLQLLQPNLKKRRQL

SEQ ID NO: 174161 - protein, 1598 aa, Zea Mays
MVRDHAALRRTPAKASASEAGNDENSPGVVPDVAAVGVAVAATDPGRPPLLAIQPPASGLKRKPESPAPTPSKLPFRTPEKAATRSRFGWVPPRADEAPPRVGVGATPHCAMTTPRAHRGKAVTVAPAASEGGSTHSTPTKSVTKPAHSIGASGSRPPMSGGGPRGAGFGLGFTMAGRGPPTSLGPPTVVNSVEVPHFELREDPSFWMDNNVQVVIRVRPLNNNEKNLHSYYRCLKQESAQTITWIGQPETRFTFDHVACEAVDQEVLFRVAGLPMVENCMAGYNSCVFAYGQTGSGKTYTMLGEISDLEVRPSPDRGMTPRIFEFLFARIKAEEESRRDEKLKYSCKCSFLEIYNEQITDLLDPSATNLPLREDIRNGVYVENLTEFEVGCASDIIKLLMQGSANRRVAATNMNRESSRSHSVFTCIIESRWEKDSASNLRFARLNLVDLAGSERQRTSGAEGERLKEAVNINKSLSTLGLVIMSLVDLAHGKQRHIPYRDSRLTFLLQDSLGGNSKTMIIANVSPSVCSANETLSTLKFAQRARLIQNNAVVNEDASGDVLALQHQIRLLKELAVLKRQHVTRSLSFSADVFGGDVDDGSENMSVDDKNDNKAHNGHFLKDIRFSNKQVRSLEEALAGALRRESTAENTIKELELQIEQLNELVRQREDDTRSAKMMLKFRDDKIHRMEVLVNSKLPAQSYLLEENKTLSQEVELLRERVDKNPEVTRFALENIRLSSQLKRSQLFFNEGERELLLNEISELRNQVSQILEQRTETEQQNTFSDKTKLKRTSQEVETCRSNRQVCLESNIALTREIADLVEEKTAHAEAEEKPAGLGDKLQEANIHILQSCKHCEAMERELNESRSLIEALESQQIILINEIAELKKGCVEISRLNSELDLHHRQDYLTKEEPKAELLKCFGKEDSPLQRKFKRMQASLEKARNLNTRYQIDQASHCFAEKEMDEVRKQVEVETAKVIQCLEEDLISVQQQLNASNKNDLLAKQSINELQLEIKQLNDKLLEVLKENEIFSSVTKEKEKEIELLSNDWNRLAADIGKCLVDGNAALGEASDQVAFISKSLSQRKWIEKQVRKLCSGISERDELLEELQNRLKEADDIRRDLDLKLRSLRGAMQVVNEEHQQEKCDQEKEIYFLRSQISEQGHVNNHQLEEIHRINLLLDESIETFVQKEVLQQTCVSLQKAMGEEIHRLESQLDQSKIHFAHLLNQTQEKEQLIGKLKNEELNVLLRLMSEVLKTNSTVRELRIGFNTLQSSLYMSPEVIACQNSDLNLEDRVDLRANEAFQSVERQNAEVLCQHSKEMELAVQGMQIMQSQMTKLLQEKENAKEFNLESQRTIKDLSDEVLRLNSHIIEKERSYEAKLEELNTKIHEHDASFISWNEENEALRIEVSEAKLVVAQKSFESATLTAKFEEAQATIRDADSTVKALVEANEKAKFEADKYEEKEALFSAETESMLSEISSLKMLLDMKEQSYKLMEKQFQSGLLEANELALELEDGIRLTQNLLQQKLEFVSSDVEWMKERVQQFAGLTRKWLEENWLEIIGKDCAISVLHLCHMEILLERITGLNAENGFPSARAV

SEQ ID NO: 174162 - protein, 1559 aa, Zea Mays
MVRDHAALRRTPAKASASEAGNDENSPGVVPDVAAVGVAVAATDPGRPPLLAIQPPASGLKRKPESPAPTPSKLPFRTPEKAATRSRFGWVPPRADEAPPRVGVGATPHCAMTTPRAHRGKAVTVAPAASEGGSTHSTPTKSVTKPAHSIGASGSRPPMSGGGPRGAGFGLGFTMAGRGPPTSLGPPTVVNSVEVPHFELREDPSFWMDNNVQVVIRVRPLNNNEKNLHSYYRCLKQESAQTITWIGQPETRFTFDHVACEAVDQEVLFRVAGLPMVENCMAGYNSCVFAYGQEEESRRDEKLKYSCKCSFLEIYNEQITDLLDPSATNLPLREDIRNGVYVENLTEFEVGCASDIIKLLMQGSANRRVAATNMNRESSRSHSVFTCIIESRWEKDSASNLRFARLNLVDLAGSERQRTSGAEGERLKEAVNINKSLSTLGLVIMSLVDLAHGKQRHIPYRDSRLTFLLQDSLGGNSKTMIIANVSPSVCSANETLSTLKFAQRARLIQNNAVVNEDASGDVLALQHQIRLLKEELAVLKRQHVTRSLSFSADVFGGDVDDGSENMSVDDKNDNKAHNGHFLKDIRFSNKQVRSLEEALAGALRRESTAENTIKELELQIEQLNELVRQREDDTRSAKMMLKFRDDKIHRMEVLVNSKLPAQSYLLEENKTLSQEVELLRERVDKNPEVTRFALENIRLSSQLKRSQLFFNEGERELLLNEISELRNQVSQILEQRTETEQQNTFSDKTKLKRTSQEVETCRSNRQVCLESNIALTREIADLVEEKTAHAEAEEKPAGLGDKLQEANIHILQSCKHCEAMERELNESRSLIEALESQQIILINEIAELKKGCVEISRLNSELDLHHRQDYLTKEEPKAELLKCFGKEDSPLQRKFKRMQASLEKARNLNTRYQIDQASHCFAEKEMDEVRKQVEVETAKVIQCLEEDLISVQQQLNASNKNDLLAKQSINELQLEIKQLNDKLLEVLKENEIFSSVTKEKEKEIELLSNDWNRLAADIGKCLVDGNAALGEASDQVAFISKSLSQRKWIEKQVRKLCSGISERDELLEELQNRLKEADDIRRDLDLKLRSLRGAMQVVNEEHQQEKCDQEKEIYFLRSQISEQGHVNNHQLEEIHRINLLLDESIETFVQKEVLQQTCVSLQKAMGEEIHRLESQLDQSKIHFAHLLNQTQEKEQLIGKLKNEELNVLLRLMSEVLKTNSTVRELRIGFNTLQSSLYMSPEVIACQNSDLNLEDRVDLRANEAFQSVERQNAEVLCQHSKEMELAVQGMQIMQSQMTKLLQEKENAKEFNLESQRTIKDLSDEVLRLNSHIIEKERSYEAKLEELNTKIHEHDASFISWNEENEALRIEVSEAKLVVAQKSFESATLTAKFEEAQATIRDADSTVKALVEANEKAKFEADKYEEKEALFSAETESMLSEISSLKMLLDMKEQSYKLMEKQFQSGLLEANELALELEDGIRLTQNLLQQKLEFVSSDVEWMKERVQQFAGLTRKWLEENWLEIIGKDCAISVLHLCHMEILLERITGLNAENGFPSARAV

SEQ ID NO: 174163 - protein, 539 aa, Zea Mays
MVRDHAALRRTPAKASASEAGNDENSPGVVPDVAAVGVAVAATDPGRPPLLAIQPPASGLKRKPESPAPTPSKLPFRTPEKAATRSRFGWVPPRADEAPPRVGVGATPHCAMTTPRAHRGKAVTVAPAASEGGSTHSTPTKSVTKPAHSIGASGSRPPMSGGGPRGAGFGLGFTMAGRGPPTSLGPPTVVNSVEVPHFELREDPSFWMDNNVQVVIRVRPLNNNEKNLHSYYRCLKQESAQTITWIGQPETRFTFDHVACEAVDQEVLFRVAGLPMVENCMAGYNSCVFAYGQEEESRRDEKLKYSCKCSFLEIYNEQITDLLDPSATNLPLREDIRNGVYVENLTEFEVGCASDIIKLLMQGSANRRVAATNMNRESSRSHSVFTCIIESRWEKDSASNLRFARLNLVDLAGSERQRTSGAEGERLKEAVNINKSLSTLGLVIMSLVDLAHGKQRHIPYRDSRLTFLLQDSLGGNSKTMIIANVSPSVCSANETLSTLKFAQRARLIQNNAVVNEDASGDVLALQHQIRLLKVMHGEF

SEQ ID NO: 174164 - protein, 122 aa, Zea Mays
MNTQDGRRSPGAFCYWHLALRCICIQLAALLALLCVIWANLTAFWAQLVVAYPVGPCSQLLSQAYSEWVASQPNMCSMFTKSWARMFSQYKEKNIFYVYQLWLKLVFSSSTIKTQHSSFIIF

SEQ ID NO: 174165 - protein, 1306 aa, Zea Mays
MLINFFLGIWRLETSLYKNEAVNLFFSDTSAWGTSKEGTSRNTGGMEVALVSTVLKVLGTKLAPLALKELSSKAGVAKDLQELQDLVEEINNWLQTVGDKDRSSKWLKKLKEVAYDAEDLVHEFHIEAEKQDREITGGKNTLVKYFITKPKATVTEFKIAHKIKKIKNRFDAIVKGRSDYSTIANSMPVDYPVEHTRKTIGEVPLYTIVDETSIFGRDQAKNQIISKLIETDSQQRIKIVSVIGLGGSGKTTLAKQVFNDGNIIKHFEVILWVHVSREFAVEKLVAKLFEAIAGDMSDHLLLQHVSRTISDKLVGKRFLAVLDDVWTEDRVEWERFMVHLKCGAPGSSILLTTRSRKVAEAVDSSYAYDLPLLSMEDSWKVFQQCFGIAMKALDPEFLQSGIEIVEKCGGVPLAIKVIAGILHGMKGIEEWQSICNSNLLDVQDDEHRVFACLWLSFVHLPDHLKPCFLHCSIFPRGYVINRCHLISQWIAHGFVPTNQARQAEDVGIGYFDSLLKVGFLQDHDRDQIWSTRGEVTCKMHDLVHDLARQILRDEFESEIETNKQIKRCRYLSLTSCTGKLDNKLCGKVRALYVCGRALEFDKTMSKQCCVRTIILKYITADSLPLFVSKFEYLGYLEISDVNCEALPEALSRCWNLQALHILNCSRLAVVPESIGKLKKLRTLELNGVSSIKSLPQSIGDCDNLRRLYLEGCHRFEDIPNSLGKLENLRILSIVHCFSFEKLSPSASFGKLLNLQTITFNCCFNLRNLPQCMTSLSHLEMVDLGYCYELVELPEGIGNLRNLKVLNLKQCTQLRGLPAGCGQLTRLQQLSLFVIGDSAKHARISELGNLDKLDGELQIKNIRYVKDPSDTDKVRLKKKIGIRKLSLDWYSRLEVQPDDVEEELSLNMEKELHLLDSLEPPSKIEKLRIRGYRGSQLPRWMAKQSDSCGPADDTHIVMQRNPSEFSHLTELVLDNLPNLEHLGELVELPLVKILKLKRLPKLVELLTTTTGEEGVEVLCRFHHVSTLVIIDCRKLVVKPYFPPSLQRLTLEGNNMQLVSSGCFFHPRHHHASHAHGDESSSSSYFADETGTHLERLELRRLTGSSSGWEVLQHLTGLHTLEIYMCTDLTHLPESIHCPTTLCRLMIRSCDNLRVLPDWLVELKSLQSLDIDSCDALQQLPEQIGELCSLQHLQIISMPFLTCLPESMQHLTSLRILNLCECNALTHLPEWLGELSALKKLLIQSCRGLTSLPRSIQCLTALEELYISGNPKLLQISASYSKEDKDGQAPTTFRSHGLTGRHTNPRSM

SEQ ID NO: 174166 - protein, 1275 aa, Zea Mays
MEVALVSTVLKVLGTKLAPLALKELSSKAGVAKDLQELQDLVEEINNWLQTVGDKDRSSKWLKKLKEVAYDAEDLVHEFHIEAEKQDREITGGKNTLVKYFITKPKATVTEFKIAHKIKKIKNRFDAIVKGRSDYSTIANSMPVDYPVEHTRKTIGEVPLYTIVDETSIFGRDQAKNQIISKLIETDSQQRIKIVSVIGLGGSGKTTLAKQVFNDGNIIKHFEVILWVHVSREFAVEKLVAKLFEAIAGDMSDHLLLQHVSRTISDKLVGKRFLAVLDDVWTEDRVEWERFMVHLKCGAPGSSILLTTRSRKVAEAVDSSYAYDLPLLSMEDSWKVFQQCFGIAMKALDPEFLQSGIEIVEKCGGVPLAIKVIAGILHGMKGIEEWQSICNSNLLDVQDDEHRVFACLWLSFVHLPDHLKPCFLHCSIFPRGYVINRCHLISQWIAHGFVPTNQARQAEDVGIGYFDSLLKVGFLQDHDRDQIWSTRGEVTCKMHDLVHDLARQILRDEFESEIETNKQIKRCRYLSLTSCTGKLDNKLCGKVRALYVCGRALEFDKTMSKQCCVRTIILKYITADSLPLFVSKFEYLGYLEISDVNCEALPEALSRCWNLQALHILNCSRLAVVPESIGKLKKLRTLELNGVSSIKSLPQSIGDCDNLRRLYLEGCHRFEDIPNSLGKLENLRILSIVHCFSFEKLSPSASFGKLLNLQTITFNCCFNLRNLPQCMTSLSHLEMVDLGYCYELVELPEGIGNLRNLKVLNLKQCTQLRGLPAGCGQLTRLQQLSLFVIGDSAKHARISELGNLDKLDGELQIKNIRYVKDPSDTDKVRLKKKIGIRKLSLDWYSRLEVQPDDVEEELSLNMEKELHLLDSLEPPSKIEKLRIRGYRGSQLPRWMAKQSDSCGPADDTHIVMQRNPSEFSHLTELVLDNLPNLEHLGELVELPLVKILKLKRLPKLVELLTTTTGEEGVEVLCRFHHVSTLVIIDCRKLVVKPYFPPSLQRLTLEGNNMQLVSSGCFFHPRHHHASHAHGDESSSSSYFADETGTHLERLELRRLTGSSSGWEVLQHLTGLHTLEIYMCTDLTHLPESIHCPTTLCRLMIRSCDNLRVLPDWLVELKSLQSLDIDSCDALQQLPEQIGELCSLQHLQIISMPFLTCLPESMQHLTSLRILNLCECNALTHLPEWLGELSALKKLLIQSCRGLTSLPRSIQCLTALEELYISGNPKLLQISASYSKEDKDGQAPTTFRSHGLTGLTTSIAVRPKSSIWSGTCSSSQ

SEQ ID NO: 174167 - protein, 1287 aa, Zea Mays
MQKKNKVAALDKFNLQGTSKEGTSRNTGGMEVALVSTVLKVLGTKLAPLALKELSSKAGVAKDLQELQDLVEEINNWLQTVGDKDRSSKWLKKLKEVAYDAEDLVHEFHIEAEKQDREITGGKNTLVKYFITKPKATVTEFKIAHKIKKIKNRFDAIVKGRSDYSTIANSMPVDYPVEHTRKTIGEVPLYTIVDETSIFGRDQAKNQIISKLIETDSQQRIKIVSVIGLGGSGKTTLAKQVFNDGNIIKHFEVILWVHVSREFAVEKLVAKLFEAIAGDMSDHLLLQHVSRTISDKLVGKRFLAVLDDVWTEDRVEWERFMVHLKCGAPGSSILLTTRSRKVAEAVDSSYAYDLPLLSMEDSWKVFQQCFGIAMKALDPEFLQSGIEIVEKCGGVPLAIKVIAGILHGMKGIEEWQSICNSNLLDVQDDEHRVFACLWLSFVHLPDHLKPCFLHCSIFPRGYVINRCHLISQWIAHGFVPTNQARQAEDVGIGYFDSLLKVGFLQDHDRDQIWSTRGEVTCKMHDLVHDLARQILRDEFESEIETNKQIKRCRYLSLTSCTGKLDNKLCGKVRALYVCGRALEFDKTMSKQCCVRTIILKYITADSLPLFVSKFEYLGYLEISDVNCEALPEALSRCWNLQALHILNCSRLAVVPESIGKLKKLRTLELNGVSSIKSLPQSIGDCDNLRRLYLEGCHRFEDIPNSLGKLENLRILSIVHCFSFEKLSPSASFGKLLNLQTITFNCCFNLRNLPQCMTSLSHLEMVDLGYCYELVELPEGIGNLRNLKVLNLKQCTQLRGLPAGCGQLTRLQQLSLFVIGDSAKHARISELGNLDKLDGELQIKNIRYVKDPSDTDKVRLKKKIGIRKLSLDWYSRLEVQPDDVEEELSLNMEKELHLLDSLEPPSKIEKLRIRGYRGSQLPRWMAKQSDSCGPADDTHIVMQRNPSEFSHLTELVLDNLPNLEHLGELVELPLVKILKLKRLPKLVELLTTTTGEEGVEVLCRFHHVSTLVIIDCRKLVVKPYFPPSLQRLTLEGNNMQLVSSGCFFHPRHHHASHAHGDESSSSSYFADETGTHLERLELRRLTGSSSGWEVLQHLTGLHTLEIYMCTDLTHLPESIHCPTTLCRLMIRSCDNLRVLPDWLVELKSLQSLDIDSCDALQQLPEQIGELCSLQHLQIISMPFLTCLPESMQHLTSLRILNLCECNALTHLPEWLGELSALKKLLIQSCRGLTSLPRSIQCLTALEELYISGNPKLLQISASYSKEDKDGQVRHFCFSLACAHTFVSE

SEQ ID NO: 174168 - protein, 69 aa, Zea Mays
MLPMLLGDLFLVQLHLSDLACRCPDLLSHFLLLETTSSATSLVTLSRIAQRVMLPAGKLMLWMRARKER

SEQ ID NO: 174169 - protein, 472 aa, Zea Mays
MEKTTVVLYPGAGVGHLAPMLELAKALLRHAGDQVDVAIVVVEPPVYADGFAATVARAKASNASVACHVLPPPASDGGAEPDDPLTRLLRFLRATNAPLRDFLRALSASRRVQAIVLDMFCAGALDVAADLGLPAYFHFASGAAGLAYFLGLPAMRASVGTSFAELGGSTVLSFPGVPPLTVADLPQGVLNDSEACRVIMGAAARMPDARGILINSFESLEPRAMRALRDGLCVPGRATPPVYCVGPMVSPGGDGAGHECLRWLDAQPDRSVVFLCFGSLGTFPKRQLEEIAVGLERSGQRFLWVVRSPPGGPPADDVRALLPAGFAERTEGRGLVVASWAPQVDVLRHRAAGAFVTHCGWNSTLEGVVAGLPLLCWPLYAEQRMNKVRIVEEMKLGVEVRRDGEGLVTAQEVEAKVRWVMQDSDGARELKERAEAARARAAEALAEGGPSRAAFLDFPQVRRRPIGFGRHG

SEQ ID NO: 174170 - protein, 105 aa, Zea Mays
MFLILCLISIAFFVCNLFQLENGTTDPTVFYDCRITLTNTFSVLLVSTIHRFVFLISCLFGVSIDLVSVVPFFSVVVQMWCQQAFNLIFLPLLWALMNECFLSAP

SEQ ID NO: 174171 - protein, 686 aa, Zea Mays
MMTQTLQGKVMAYTPSSFPVQQQILPEDLEMLQLDNMDQGTSPVRAVIIKRIETCLRNREEFCNLCPDSLLKASEIIDNLLYKIDPQPQYMDLDTIEARVNDLLRSFLYGNQRDPWISSAVPSTKDLRQLPGIQMTDSSVYHNRVVPGFTNLPARPGGIPSHAVFTAQRYVPLNHNMTAASFALVERPESFMSTVVAPSVSGLPNCISGPGGIDSSGLQNGYSKDHFPALCDPITSSGAMIRSSMDFIPKASGQKLFTGKGQMFQQYREYEKELDGAWSHPTEKPVHSNRTTQSDEIYLKGECGPDTLTEMKENYGRISDSRDPCDPEREIVERSEQTSNITVSKATSPISDESSGRRPAKRLKADAPRLVNVNQVESPQEQKPVVNENHVSGGETVQSEITELPAKPPCSSLGDINAESNNMLEQGSEDVPNMDIVKEEELSRAKGDIEMKDAKTVALDHTPKGVNLSSRRKRGASILYGLTAEELRDHMSSLINRHTCQSKVTSQEFPSIDGLPDQNTCSLCGMEKLLFEPPPRFCALCFKIINSAGCYYVEVENGTEKSSICSKCHHLSSLRAKYQKKFNYAETDAEAEWWVQCDKCKAWQHEICALFNRKCEGAKAEYTCAKCFLKEKDSGDIQALESSTVLGAQELQRTKLSDHIEQRLSERLEQDRQQRASASGKVAEEV

SEQ ID NO: 174172 - protein, 707 aa, Zea Mays
MMTQTLQGKVMAYTPSSFPVQQQILPEDLEMLQLDNMDQGTSPVRAVIIKRIETCLRNREEFCNLCPDSLLKASEIIDNLLYKIDPQPQYMDLDTIEARVNDLLRSFLYGNQRDPWISSAVPSTKDLRQLPGIQMTDSSVYHNRVVPGFTNLPARPGGIPSHAVFTAQRYVPLNHNMTAASFALVERPESFMSTVVAPSVSGLPNCISGPGGIDSSGLQNGYSKDHFPGDAYHVDSPQLSMSGSPSPLSALCDPITSSGAMIRSSMDFIPKASGQKLFTGKGQMFQQYREYEKELDGAWSHPTEKPVHSNRTTQSDEIYLKGECGPDTLTEMKENYGRISDSRDPCDPEREIVERSEQTSNITVSKATSPISDESSGRRPAKRLKADAPRLVNVNQVESPQEQKPVVNENHVSGGETVQSEITELPAKPPCSSLGDINAESNNMLEQGSEDVPNMDIVKEEELSRAKGDIEMKDAKTVALDHTPKGVNLSSRRKRGASILYGLTAEELRDHMSSLINRHTCQSKVTSQEFPSIDGLPDQNTCSLCGMEKLLFEPPPRFCALCFKIINSAGCYYVEVENGTEKSSICSKCHHLSSLRAKYQKKFNYAETDAEAEWWVQCDKCKAWQHEICALFNRKCEGAKAEYTCAKCFLKEKDSGDIQALESSTVLGAQELQRTKLSDHIEQRLSERLEQDRQQRASASGKVAEEV

SEQ ID NO: 174173 - protein, 1227 aa, Zea Mays
MMTQTLQGKVMAYTPSSFPVQQQILPEDLEMLQLDNMDQGTSPVRAVIIKRIETCLRNREEFCNLCPDSLLKASEIIDNLLYKIDPQPQYMDLDTIEARVNDLLRSFLYGNQRDPWISSAVPSTKDLRQLPGIQMTDSSVYHNRVVPGFTNLPARPGGIPSHAVFTAQRYVPLNHNMTAASFALVERPESFMSTVVAPSVSGLPNCISGPGGIDSSGLQNGYSKDHFPGDAYHVDSPQLSMSGSPSPLSALCDPITSSGAMIRSSMDFIPKASGQKLFTGKGQMFQQYREYEKELDGAWSHPTEKPVHSNRTTQSDEIYLKGECGPDTLTEMKENYGRISDSRDPCDPEREIVERSEQTSNITVSKATSPISDESSGRRPAKRLKADAPRLVNVNQVESPQEQKPVVNENHVSGGETVQSEITELPAKPPCSSLGDINAESNNMLEQGSEDVPNMDIVKEEELSRAKGDIEMKDAKTVALDHTPKGVNLSSRRKRGASILYGLTAEELRDHMSSLINRHTCQSKVTSQEFPSIDGLPDQNTCSLCGMEKLLFEPPPRFCALCFKIINSAGCYYVEVENGTEKSSICSKCHHLSSLRAKYQKKFNYAETDAEAEWWVQCDKCKAWQHEICALFNRKCEGAKAEYTCAKCFLKEKDSGDIQALESSTVLGAQELQRTKLSDHIEQRLSERLEQDRQQRASASGKVAEEVPGVKGLTVRVVSSAERLLQVQPRFRGFFKQGKYPGEFPYKSKAILLFQKIEGVDVCLFAMYVQEYGSDCPPPNQRHVYLAYIDSVKYFRPEIKSATGEALRTFVYHEILKRGFVSCSIWACPSTKRDDYVLYCHPTVQKMPKSDKLRSWYQNLIKKAIKEGVVVERNTLSDFFLQPTNECKANISAACLPYCENDFWPGEAERLLEKKDDNASQKEETQVGRLLRVAKRDDRKGNLDDILLVHKLGERMRTMKEDFIMLCLQQFCKHCHHPILSGKSWVCTSCKNFHLCDKCHAEEQNTAQKDRHPATTKQKHAFERMEVQPLPETDDGDPTMESKYFDSRIDFLKHCQDNQFQFDTIRRAKHSTMMILYYLHNSTCSACHRAVDQCLVWRCLECLGCTFCGQCYKQNGQGLHIHELRQIDTRETSQKHTLQDYIDGLVHASRCYDPRNCTHPLCLTLKKLFAHGARCHVRACNSGGCKKCLFMWKLLFRHSKDCNDGDCAVPRCRDVKAFIAEKMKLKI

SEQ ID NO: 174174 - protein, 1142 aa, Zea Mays
MMTQTLQGKVMAYTPSSFPVQQQILPEDLEMLQLDNMDQGTSPVRAVIIKRIETCLRNREEFCNLCPDSLLKASEIIDNLLYKIDPQPQYMDLDTIEARVNDLLRSFLYGNQRDPWISSAVPSTKDLRQLPGIQMTDSSVYHNRVVPGFTNLPARPGGIPSHAVFTAQRYVPLNHNMTAASFALVERPESFMSTVVAPSVSGLPNCISGPGGIDSSGLQNGYSKDHFPGDAYHVDSPQLSMSGSPSPLSALCDPITSSGAMIRSSMDFIPKASGQKLFTGKGQMFQQYREYEKELDGAWSHPTEKPVHSNRTTQSDEIYLKGECGPDTLTEMKENYGRISDSRDPCDPEREIVERSEQTSNITVSKATSPISDESSGRRPAKRLKADAPRLVNVNQVESPQEQKPVVNENHVSGGETVQSEITELPAKPPCSSLGDINAESNNMLEQGSEDVPNMDIVKEEELSRAKGDIEMKDAKTVALDHTPKGVNLSSRRKRGASILYGLTAEELRDHMSSLINRHTCQSKVTSQEFPSIDGLPDQNTCSLCGMEKLLFEPPPRFCALCFKIINSAGCYYVEVENGTEKSSICSKCHHLSSLRAKYQKKFNYAETDAEAEWWVQCDKCKAWQHEICALFNRKCEGAKAEYTCAKCFLKEKDSGDIQALESSTVLGAQELQRTKLSDHIEQRLSERLEQDRQQRASASGKVAEEVPGVKGLTVRVVSSAERLLQVQPRFRGFFKQGKYPGEFPYKSKAILLFQKIEGVDVCLFAMYVQEYGSDCPPPNQRHVYLAYIDSVKYFRPEIKSATGEALRTFVYHEILIGYLDYCKKRGFVSCSIWACPSTKRDDYVLYCHPTVQKMPKSDKLRSWYQNLIKKAIKEGVVVERNTLSDFFLQPTNECKANISAACLPYCENDFWPGEAERLLEKKDDNASQKEETQLGERMRTMKEDFIMLCLQQFCKHCHHPILSGKSWVCTSCKNFHLCDKCHAEEQNTAQKDRHPATTKQKHAFERMEVQPLPETDDGDPTMESKYFDSRIDFLKHCQDNQFQFDTIRRAKHSTMMILYYLHNSTCSACHRAVDQCLVWRCLECLGCTFCGQCYKQNGQGLHIHELRQIDTRETSQKHTLQVSCGSHHHSSKQNFAQMIFI

SEQ ID NO: 174175 - protein, 135 aa, Zea Mays
MLLLFFLSLRTLAQVRIGYQKLFYVAFIRRITNSYFTITNDSREMQRQSSRSRCRTPKQRRRALAHWERQGRCQLGHGAAVLEDGDGRPSGVQLRRHRSVEAKALEWTASGSRQMGRNRLLICQHCGGSVGQLYE

SEQ ID NO: 174176 - protein, 330 aa, Zea Mays
MLPSTLFNPKLCFCATWLTLIVPTSMTAYLYLYSHGEVSLAASQPVLLYAILLMILLSPFDMFYLSSRFYFLRTVWRIILPLQAITFPDFFLADIFTSMSKVFSDLERSVCRMVNRQVATIAWFEADSICGSHSVAIPLVLMLPYLWRLFQCLRQYKDTKEKTCLLNALKYSTAIPVIFLSALKYHVHPDQWVGFYRPLWLISSVVNSLYSFYWDIKRDWDLSILTRIFMFKNPSIWTYLLYGQNWVLYWVLGSNLVLRCTWTYKLSAHLRHNYLTVFTIAALEILRRWQWVFFRVENEWNKMTAKQNMEMSSDMPSEGDRLLDSSNHTV

SEQ ID NO: 174177 - protein, 272 aa, Zea Mays
MMPSTAAAAGSPSPPQSTSYAQMRARLSSAPESSRGLDLACSSSRCSPHPFGAPKLVQPLSVQFQIGSVAHRYPFHQQQSRQKLQAEMFRRSNSGISLKFDSPSPSGGAAGTMSSARSFMSSLSIDRSMASLDGKRPFHLVGTPVASDPADAHRAPKRRCTGRGEDGRGKCATTGRCHCSKRRKLRIKRSIRVPAISNKIADIPPDEYSWRKYGQKPIKGSPHPRGYYKCSSVRGCPARKHVERCVDDPAMLIVTYEGEHSHTQLPAQPAQT

SEQ ID NO: 174178 - protein, 498 aa, Zea Mays
MQTSETTGTASPPAVEPEAEDKVEEGARANEEAAAKVGGDDEDDWESEHEGRRGRRQRCRRGGAAGDSAVAMVKRELLTRCLTCPLCDHLLRQATTISECLHTFCRKCIYKKLNDEDLDHCPVCKIDLGCTPVEKLRADHNIQDVRSKFFPFKRKKVNAEEAESPIMLPVKVKERSISSLVVNTPRVTPAALTGRRTRAVTRKAAALRGLGPIIVDPLKKDNDNPNKQTDNSSLLDSLNKIPQTRRQLLSNGDTTSHLSVKDKAGDNKDLDKSEFWKPLNCLVEAASKTKPLTSAPRPALKGDKPRKSPSSDSEHSSRTKTREPLQKSKAEVDKSDPGPIVMLRKRGRPGRKRKNPLPETNADSTATAIQARKALSPIWFSLIASFDQCPSFASDTCTLFENKGWEHTRVIYSKVHCAEAQSSKRIRGRNKLLRADREPWATCAQLGGAVAEGWPGAPAAHGDRLLRGRLCDGDKLWAAQVRVLLKPYHHRRPGEVDS

SEQ ID NO: 174179 - protein, 79 aa, Zea Mays
MQAPSDHERIRSHWPGAKGHGEMQEQKLRRRRTDGSLHLSTTRGGWMQEEQISMAFAALLVSVSYSSSLPFRPLYLPDQ

SEQ ID NO: 174180 - protein, 205 aa, Zea Mays
MATGPVVPEEHHVRAVRQGRRRRQRRQVLAGGRRRCRVREGELGRRALPAQSGPQDVQELPAAVQGAREHVQLLHHRKLWVSRDERHEREQAGGSAQRLRVRADLRGQGRGLDARRRCAVGDVRRIMQAPSDHERIRSHWPGAKGHGEMQEQKLRRRRTDGSLHLSTTRGGWMQEEQISMAFAALLVSVSYSSSLPFRPLYLPDQ

SEQ ID NO: 174181 - protein, 273 aa, Zea Mays
MATTTDLGFEATELRLGLPGGGGGGEPALGGEGRSSSSASGKRGFAETIDLKLKLEPAAVVEAEEEEEDHGVAVALEKEEEAGKMKRSPSQSSVAAAAAAVLADPAEKPRAAKAQVVGWPPVRSFRKNIMSVQSDKGAAAANGDKSSPAAGGGAAFVKVSLDGAPYLRKVDLKMYRSYQQLSKALENMFSSFTIGSGSCGSQGMNGMNESKLVDLLNGSEYVPTYEDKDGDWMLVGDVPWEMFVESCKRLRIMKGSEAIGLAPRAMEKCKNRS

SEQ ID NO: 174182 - protein, 417 aa, Zea Mays
MAIMQKGYSVTIMLAVLTFGVSTRWLLYTEQAPSAWLNFALCGLVGIITAYAFVWISKYYTDYKHEPVRLLALSSSTGHGTNIIAGVSLGMESTALPVLVISVAIISSYWLGQTSGLVDESGNPTGGLFGTAVATMGMLSTAGYVLTMDMFGPIADNAGGIVEMSQQHESVREITDVLDAVGNTTKATTKGFAIGSAALASFLLFSAYMDEVASFAQMPFKEVDIAVPEIFVGGLLGSMLIFLFSAWACSAVGKTAQEVVNEVRRQFIERPGIMDYKEKPDYGRCVAIVASASLREMIKPGALAIISPMAVGVVFRILGHSTGQPLLGAKVVASMLMFATVAGILMALFLNTAGGAWDNAKKYIETGALGGKGSESHKAAVTGDTVGDPFKDTAGPSLHVLIKMLATITLVMAPIFL

SEQ ID NO: 174183 - protein, 473 aa, Zea Mays
MILGGTMAQRCKIEDPSGFILFPLVVHSFDLVVSSVGILSIRGTRDSGLISPIEDPMAIMQKGYSVTIMLAVLTFGVSTRWLLYTEQAPSAWLNFALCGLVGIITAYAFVWISKYYTDYKHEPVRLLALSSSTGHGTNIIAGVSLGMESTALPVLVISVAIISSYWLGQTSGLVDESGNPTGGLFGTAVATMGMLSTAGYVLTMDMFGPIADNAGGIVEMSQQHESVREITDVLDAVGNTTKATTKGFAIGSAALASFLLFSAYMDEVASFAQMPFKEVDIAVPEIFVGGLLGSMLIFLFSAWACSAVGKTAQEVVNEVRRQFIERPGIMDYKEKPDYGRCVAIVASASLREMIKPGALAIISPMAVGVVFRILGHSTGQPLLGAKVVASMLMFATVAGILMALFLNTAGGAWDNAKKYIETGALGGKGSESHKAAVTGDTVGDPFKDTAGPSLHVLIKMLATITLVMAPIFL

SEQ ID NO: 174184 - protein, 706 aa, Zea Mays
MRRRKISDAIRDGAEGFFRTQYGTISKMAFILAFVILGIYIFRTTTPQQEASGLGRATLAYITVASFLLGALCSGIAGFVGMWVSVRANVRVSSAARRSARESLQIAVRAGGFSAIVVVCMAVFGVAILYSTFYVWLGVDSPGSMKVTDLPLLLVGYGFGASFVALFAQLGGGIYTKAADVGADLVGKVEQGIPEDDPRNPAVIADLVGDNVGDCAARGADLFESIAAEIISAMILGGTMAQRCKIEDPSGFILFPLVVHSFDLVVSSVGILSIRGTRDSGLISPIEDPMAIMQKGYSVTIMLAVLTFGVSTRWLLYTEQAPSAWLNFALCGLVGIITAYAFVWISKYYTDYKHEPVRLLALSSSTGHGTNIIAGVSLGMESTALPVLVISVAIISSYWLGQTSGLVDESGNPTGGLFGTAVATMGMLSTAGYVLTMDMFGPIADNAGGIVEMSQQHESVREITDVLDAVGNTTKATTKGFAIGSAALASFLLFSAYMDEVASFAQMPFKEVDIAVPEIFVGGLLGSMLIFLFSAWACSAVGKTAQEVVNEVRRQFIERPGIMDYKEKPDYGRCVAIVASASLREMIKPGALAIISPMAVGVVFRILGHSTGQPLLGAKVVASMLMFATVAGILMALFLNTAGGAWDNAKKYIETGALGGKGSESHKAAVTGDTVGDPFKDTAGPSLHVLIKMLATITLVMAPIFL

SEQ ID NO: 174185 - protein, 443 aa, Zea Mays
MSRRGRNSMLCSTISDAIRDGAEGFFRTQYGTISKMAFILAFVILGIYIFRTTTPQQEASGLGRATLAYITVASFLLGALCSGIAGFVGMWVSVRANVRVSSAARRSARESLQIAVRAGGFSAIVVVCMAVFGVAILYSTFYVWLGVDSPGSMKVTDLPLLLVGYGFGASFVALFAQLGGGIYTKAADVGADLVGKVEQGIPEDDPRNPAVIADLVGDNVGDCAARGADLFESIAAEIISAMILGGTMAQRCKIEDPSGFILFPLVVHSFDLVVSSVGILSIRGTRDSGLISPIEDPMAIMQKGYSVTIMLAVLTFGVSTRWLLYTEQAPSAWLNFALCGLVGIITAYAFVWISKYYTDYKHEPVRLLALSSSTGHGTNIIAGVSLGMESTALPVLVISVAIISSYWLGQTSGLVDESGNPTGGLFGTAVATMGMLSTAGMKV

SEQ ID NO: 174186 - protein, 739 aa, Zea Mays
MRANSYPIMMEEDMENGRSYQERPRAFSTVRSKSSVPLISDAIRDGAEGFFRTQYGTISKMAFILAFVILGIYIFRTTTPQQEASGLGRATLAYITVASFLLGALCSGIAGFVGMWVSVRANVRVSSAARRSARESLQIAVRAGGFSAIVVVCMAVFGVAILYSTFYVWLGVDSPGSMKVTDLPLLLVGYGFGASFVALFAQLGGGIYTKAADVGADLVGKVEQGIPEDDPRNPAVIADLVGDNVGDCAARGADLFESIAAEIISAMILGGTMAQRCKIEDPSGFILFPLVVHSFDLVVSSVGILSIRGTRDSGLISPIEDPMAIMQKGYSVTIMLAVLTFGVSTRWLLYTEQAPSAWLNFALCGLVGIITAYAFVWISKYYTDYKHEPVRLLALSSSTGHGTNIIAGVSLGMESTALPVLVISVAIISSYWLGQTSGLVDESGNPTGGLFGTAVATMGMLSTAGYVLTMDMFGPIADNAGGIVEMSQQHESVREITDVLDAVGNTTKATTKGFAIGSAALASFLLFSAYMDEVASFAQMPFKEVDIAVPEIFVGGLLGSMLIFLFSAWACSAVGKTAQEVVNEVRRQFIERPGIMDYKEKPDYGRCVAIVASASLREMIKPGALAIISPMAVGVVFRILGHSTGQPLLGAKVVASMLMFATVAGILMALFLNTAGGAWDNAKKYIETGALGGKGSESHKAAVTGDTVGDPFKDTAGPSLHVLIKMLATITLVMAPIFL

SEQ ID NO: 174187 - protein, 786 aa, Zea Mays
MRANSYPIMMEEDMENGRSYQERPRAFSTVRSKSSVPLAFRLLMRVNPRAVIILSLLVFSGVLYVGASTSPILVFVFCICTLSLFFSVYLTKWVLAKDEGPPEMSEISDAIRDGAEGFFRTQYGTISKMAFILAFVILGIYIFRTTTPQQEASGLGRATLAYITVASFLLGALCSGIAGFVGMWVSVRANVRVSSAARRSARESLQIAVRAGGFSAIVVVCMAVFGVAILYSTFYVWLGVDSPGSMKVTDLPLLLVGYGFGASFVALFAQLGGGIYTKAADVGADLVGKVEQGIPEDDPRNPAVIADLVGDNVGDCAARGADLFESIAAEIISAMILGGTMAQRCKIEVGILSIRGTRDSGLISPIEDPMAIMQKGYSVTIMLAVLTFGVSTRWLLYTEQAPSAWLNFALCGLVGIITAYAFVWISKYYTDYKHEPVRLLALSSSTGHGTNIIAGVSLGMESTALPVLVISVAIISSYWLGQTSGLVDESGNPTGGLFGTAVATMGMLSTAGYVLTMDMFGPIADNAGGIVEMSQQHESVREITDVLDAVGNTTKATTKGFAIGSAALASFLLFSAYMDEVASFAQMPFKEVDIAVPEIFVGGLLGSMLIFLFSAWACSAVGKTAQEVVNEVRRQFIERPGIMDYKEKPDYGRCVAIVASASLREMIKPGALAIISPMAVGVVFRILGHSTGQPLLGAKVVASMLMFATVAGILMALFLNTAGGAWDNAKKYIETGALGGKGSESHKAAVTGDTVGDPFKDTAGPSLHVLIKMLATITLVMAPIFL

SEQ ID NO: 174188 - protein, 541 aa, Zea Mays
MVLVPLLLPFLLSWVVEYTRKLLMLELIWLEKLSREYQKMILVGDNVGDCAARGADLFESIAAEIISAMILGGTMAQRCKIEDPSGFILFPLVVHSFDLVVSSVGILSIRGTRDSGLISPIEDPMAIMQKGYSVTIMLAVLTFGVSTRWLLYTEQAPSAWLNFALCGLVGIITAYAFVWISKYYTDYKHEPVRLLALSSSTGHGTNIIAGVSLGMESTALPVLVISVAIISSYWLGQTSGLVDESGNPTGGLFGTAVATMGMLSTAGYVLTMDMFGPIADNAGGIVEMSQQHESVREITDVLDAVGNTTKATTKGFAIGSAALASFLLFSAYMDEVASFAQMPFKEVDIAVPEIFVGGLLGSMLIFLFSAWACSAVGKTAQEVVNEVRRQFIERPGIMDYKEKPDYGRCVAIVASASLREMIKPGALAIISPMAVGVVFRILGHSTGQPLLGAKVVASMLMFATVAGILMALFLNTAGGAWDNAKKYIETGALGGKGSESHKAAVTGDTVGDPFKDTAGPSLHVLIKMLATITLVMAPIFL

SEQ ID NO: 174189 - protein, 90 aa, Zea Mays
MVVMRRTSRLFAYFIVHVIVCYVHGNLAMNNPHPCMQPVGLIKMTCCSRDREQNVLRASILLDRLTYCVQGSVDGSHKSDPKSAAHNHTP

SEQ ID NO: 174190 - protein, 583 aa, Zea Mays
MDQYEVLEQIGKGAFGSALLVRHKVEKKKYVLKKIRLARQTDRTRRSAHQEMQLIATVRNPFIVEYKDSWVEKGCYVCIVIGYCEGGDMAEVIKRANGNHFSEEKLCKWLVQLLMALDYLHANHILHRDVKCSNIFIARDQSIRLGDFGLAKILTSDDLASSVVGTPSYMCPELLADIPYGCCIYEMTALRPAFKAFDMQALISKITKSIVSPLPTRYSGSLLFYSNKNISHNWHMQAAELLKHVHLQPYVLQVQLKSSPSRNMSPIYQALTDKVKKMTFPSDITDSARRVARRNSLGNERTVTFCKPSPERNSISSTRSIKEYTTTQSVKELSVDSSQIDDEVTSKAIRTKTTGILRTPKSTPAKTLTTRNRLDPPKTSYSRTNHSELTSRTPLNKSAVTARRASLPLPTYRAPNSRAASVLDQLDSPDVSVNAPRIDRIAEFPLASSEDPLAPMKKNLSSAPGHDGSCSTPPFINRSITKDKYTVQVLHRGDGDNASDSSGRNATAASSGGSNDSRQQRFDTSSYQQRAEALEGLLEFSAQLLQQERYEELGILLKPFGPEKASPRETAIWLTKSFKETAS

SEQ ID NO: 174191 - protein, 225 aa, Zea Mays
MDADVGAGATNQPWPEPDDAHLSPPPPPPPPPASAPTPAAEAAAPTASAAVSPPAPAEANGNSDRKRRRKADDGDGCKACSCKKSRCLKLYCVCYASGSHCTELCGCEPCHNKPPQGAPWTAPVLPLKPVQTLEAGQEIVEQLIRSPMDLIRRKCTCKKSGCLKKEGQDALSTVSAMIVETHLGEKSALFWMVKAAVFPRPYMCMKETGLKLTRAATTRKTTTCT

SEQ ID NO: 174192 - protein, 557 aa, Zea Mays
MRSDSPVFNFINNLSPIPPPKPLDSAHNVQLFKSSDLAPVSSIFASPHVNPTKGTKVLIRDESVQLPHELHSPSSVRTRIGTSGSFRMIRCKDIVPENCNITCQLNEASIDSSDHTSSSTGQLTQSIKDAAGSMESDKDQCAGGKIDLTMSQECTGLEGMNLDESSPDRMDSSHSGIVVHENQLSEQNNDEPAAYNGVYMITHQSSSDMLTLAVPSGTEAQPMNDTQKADNPYPCESLLDVQSSGNCTQNSVHEPHLYWNGAVEGAAVAYTPQALPGALQSQLMPCNKLNEPKDYMPTEQNALSQHLRGMRRRSLFNEKAGLSNKGVDKASDHHPVNSTTPKCKTISGDNSKTLRTPPCALPGIGLHLNALAATATPKEKIVPQDIQSTINESSNLIGPAGSSPAPSEQNIINDDFTQTTDVATAEASSQGSPKKKRHKFDSGDGTSCKRCSCKKSKCLKLYCECFAAGVYCSEPCSCIGCMNNQSHTETVLSTRQQIESRNPLAFAPKVIHTSEPGLELRDFSNKTPASARHKRGCNCKKSSCLKKYCECFQMRGL

SEQ ID NO: 174193 - protein, 470 aa, Zea Mays
MRSDSPVFNFINNLSPIPPPKPLDSAHNVQLFKSSDLAPVSSIFASPHVNPTKGTKVLIRDESVQLPHELHSPSSVRTRIGTSGSFRMIRCKDIVPENCNITCQLNEASIDSSDHTSSSTGQLTQSIKDAAGSMESDKDQCAGGKIDLTMSQECTGLEGMNLDESSPDRMDSSHSGIVVHENQLSEQNNDEPAAYNGVYMITHQSSSDMLTLAVPSGTEAQPMNDTQKADNPYPCESLLDVQSSGNCTQNSVHEPHLYWNGAVEGAAVAYTPQALPGALQSQLMPCNKLNEPKDYMPTEQNALSQHLRGMRRRSLFNEKAGLSNKGVDKASDHHPVNSTTPKCKTISGDNSKTLRTPPCALPGIGLHLNALAATATPKEKIVPQDIQSTINESSNLIGPAGSSPAPSEQNIINDDFTQTTDVATAEASSQGSPKKKRHKFDSGDGTSCKRCSCKKSKCLKLGCRVKHRGT

SEQ ID NO: 174194 - protein, 470 aa, Zea Mays
MIRCKDIVPENCNITCQLNEASIDSSDHTSSSTGQLTQSIKDAAGSMESDKDQCAGGKIDLTMSQECTGLEGMNLDESSPDRMDSSHSGIVVHENQLSEQNNDEPAAYNGVYMITHQSSSDMLTLAVPSGTEAQPMNDTQKADNPYPCESLLDVQSSGNCTQNSVHEPHLYWNGAVEGAAVAYTPQALPGALQSQLMPCNKLNEPKDYMPTEQNALSQHLRGMRRRSLFNEKAGLSNKGVDKASDHHPVNSTTPKCKTISGDNSKTLRTPPCALPGIGLHLNALAATATPKEKIVPQDIQSTINESSNLIGPAGSSPAPSEQNIINDDFTQTTDVATAEASSQGSPKKKRHKFDSGDGTSCKRCSCKKSKCLKLYCECFAAGVYCSEPCSCIGCMNNQSHTETVLSTRQQIESRNPLAFAPKVIHTSEPGLELRDFSNKTPASARHKRGCNCKKSSCLKKYCECFQGLPC

SEQ ID NO: 174195 - protein, 788 aa, Zea Mays
MARSPPPPPPSPAQGNGNGSGSGSLTARDALAYIKAIKDNFQDKRHMYEQFLQVMRDFKSNRLDSAGVIARVKTLFHGYPDLVLGISAFLPKGHAIRPQDLSEDKEPVDYPRAINLVNRIKIRFQQEEHVYKSFLGILSMYRMDNKPIQDVYDEVTLLFHGHPDLLEEFTHFLPDTPIPPPEAGTTSKVRNDDKNAITHSAMRAQTVQRERALPSAADSDSSVDCLDLEHDIQKECIEKDKVHNACHDQHRGDYKRNRKNDEYENEDLDSEQSGLKSQRKVEGTGDDTPGIATMSSFNCNEGDNDPEEESKVRNDDKNAIMHSAMRAQTVQRERALPSAADSDSSVDRLDLEHDIQKGCIEKDKVRNACHGQHRRYYKRNRKNDKYENEDLDAEQSVPKSQRKVEGTGDDTPGVATMSSFNCNEGDSDPEKESKVRNDDKNAIMHSAMRAQTVQRDRALPSAADSDSSVDRLDLEHDIQKGCIEKDKVRNACHGQHRRDYKRNRKNDEYENEDLDAERSGPKSQRKVEGTGDDSPGIAAMSSFNCNEGDSDPEKERYNEREKFERVLTFNSKEGAAHEASTFPSKEKYNLCKPISELDLSNCQWCTPSYRLLPKNYPVPSASKRTDIEASVLNDFCVLVTSGSGAFKHMRKNQYEEILFICEDDMFELDVLLESVSVTIKRVGELVESMEGNSLKPDSSIHLNEHLTSLNMRCIEWLYGDHGLDVVDVLQKNAGVTLPVILTRLKQKQEEWSMCQSDFNKVWAEVYSKNYRKSLDYRSFYSKQQDTRI

SEQ ID NO: 174196 - protein, 332 aa, Zea Mays
MARSPPPPPPSPAQGNGNGSGSGSLTARDALAYIKAIKDNFQDKRHMYEQFLQVMRDFKSNRLDSAGVIARVKTLFHGYPDLVLGISAFLPKGHAIRPQDLSEDKEPVDYPRAINLVNRIKIRFQQEEHVYKSFLGILSMYRMDNKPIQDVYDEVTLLFHGHPDLLEEFTHFLPDTPIPPPEAGTTSKVRNDDKNAITHSAMRAQTVQRERALPSAADSDSSVDRLDLEHDIQKGCIEKDKVRNACHGQHRRYYKRNRKNDKYENEDLDAEQSVPKSQRKVEGTGDDTPGVATMSSFNCNEGDSDPEKESKVRNDDKNAIMHSAMRAQTVQV

SEQ ID NO: 174197 - protein, 256 aa, Zea Mays
MFLSSLYLQRERALPSAADSDSSVDCLDLEHDIQKECIEKDKVHNACHDQHRGDYKRNRKNDEYENEDLDSEQSGLKSQRKVEGTGDDTPGIATMSSFNCNEGDNDPEEESKVRNDDKNAIMHSAMRAQTVQRERALPSAADSDSSVDRLDLEHDIQKGCIEKDKVRNACHGQHRRYYKRNRKNDKYENEDLDAEQSVPKSQRKVEGTGDDTPGVATMSSFNCNEGDSDPEKESKVRNDDKNAIMHSAMRAQTVQV

SEQ ID NO: 174198 - protein, 349 aa, Zea Mays
MSSFNCNEGDNDPEEESKVRNDDKNAIMHSAMRAQTVQRERALPSAADSDSSVDRLDLEHDIQKGCIEKDKVRNACHGQHRRYYKRNRKNDKYENEDLDAEQSVPKSQRKVEGTGDDTPGVATMSSFNCNEGDSDPEKESKVRNDDKNAIMHSAMRAQTVQRDRALPSAADSDSSVDRLDLEHDIQKGCIEKDKVRNACHGQHRRDYKRNRKNDEYENEDLDAERSGPKSQRKVEGTGDDSPGIAAMSSFNCNEGDSDPEKERYNEREKFERVLTFNSKEGAAHEASTFPSKEKYNLCKPISELDLSNCQWCTPSYRLLPKNYPVPSASKRTVSRTWNPRLAGPRLRSS

SEQ ID NO: 174199 - protein, 342 aa, Zea Mays
MARSPPPPPPSPAQGNGNGSGSGSLTARDALAYIKAIKDNFQDKRHMYEQFLQVMRDFKSNRLDSAGVIARVKTLFHGYPDLVLGISAFLPKGHAIRPQDLSEDKEPVDYPRAINLVNRIKIRFQQEEHVYKSFLGILSMYRMDNKPIQDVYDEVTLLFHGHPDLLEEFTHFLPDTPIPPPEAGTTSKVRNDDKNAITHSAMRAQTVQSDLFLHLPLNFKMLCSYLLYISRGRELFHQLLIRTPVLIALILSMIFKKSVLRRTKSIMPAMISIEEIIKGTGRMTNMKTKIWIQNNLVSNLKERWRVLVMIHQGLLPCPHSIVMRGTTILRKSLKLGMMTRML

SEQ ID NO: 174200 - protein, 111 aa, Zea Mays
MSLRPSEREQMRKGNYKQTVDAEESRCRCEGQMMDMRKAKREESFQKKRCDGFPASAAGVPPMGHSTALQQKGMGDVVALDLLGSDLIFLVTGWLAGDGAGRPLQRPLRAA

SEQ ID NO: 174201 - protein, 109 aa, Zea Mays
MSLRPSEREQMRKGNYKQTVDAEESRCRCEGQMMDMRKAKREESFQKKRCDGFPASAAGVPPMGHSTALQQKAVHSNDPSVQLEATTQFRKLLSIGEIGILCAVSIPDG

SEQ ID NO: 174202 - protein, 52 aa, Zea Mays
MFHLTLALLNAGACCSSREVGSSSTFTFTLIITLLRRSHDLTRSFLSKDVCF

SEQ ID NO: 174203 - protein, 70 aa, Zea Mays
MGKRVVGRWMLHQKSSETSLLFSHKINPRWPPSSPSWPPPLPLSWPPHFSPLAGRPLSPHCSSPPILFPP

SEQ ID NO: 174204 - protein, 529 aa, Zea Mays
MYAVLRRAAPLRRRAVSALAAALLQQQPAALGAVAPRAPTPLPAAAWFHSSPAWLGFRDTTELAARAEFAAEEGLFYEDDSRAPAGGPAAEGLEIAKLGISSKIVERLASKGITKLFPIQRAVLEPVMQGRDMVGRAKTGTGKTLAFGIPIMDAIIRHNEKYKPGKFPLAIVLAPTRELAKQVEREFLDSSPLETLCVYGGTPIMQQIKQLNYGVDVVIGTPGRVIDLLKRGALSLAEIRFVVLDEADQMLSVGFDKDVETILERVPPQHQTLMFSATMPTWIRKLTQKFLNSPVTVDLVGEDDQKLAEGISLLSVSSENREKPAVLGKLIKEHAKGGKCIVFTQTKRDADRLSHNMSRSFQCEALHGDISQSERERTLAGFRDGRFNILIATDVASRGLDIPNVDLVIHFELPNSSEIFVHRSGRTGRAGKKGTAIVMYNYEQSRAVRVIERDVGCKFTELPKINVEGSDLLGGGFDSFGGGGFSDSGFGRSGGSGGGFSDSGSGRFGGGFGSSRSGSFGGFGDKDSR

SEQ ID NO: 174205 - protein, 190 aa, Zea Mays
MLTLVIKTPRSSPPSLSCSPLRQLTGPAVRQATVYAVLKVLLTVLLVDSASRVSRYTDTFSPSLDSVLSALTIITVPLLAGVRRAYAQPRHREIYLASKPCSPQPSHRLPSRSAPASCAPRANPDSKRRHNLVLDSRHHIVALLHRRPCRRLPAVFAHVPEHLEEVALKKKPAPSTVDLVVEFHLTNCRD

SEQ ID NO: 174206 - protein, 397 aa, Zea Mays
MEAAADLLEYELQREISGILIQNYVCGLRQEYEMKLWEHRNCISALNRNWAEKVSEITALRDELRDVLCTSEPATHHHHHRSHGSLEDETIIAKTEGDSEPPVTEKSSESTLEIPDFSLLKHMHGEEITSFLRTEWLKLRRQHESELHEKTEELFRVKREHAKEKASLPLKKERELELHRSKLLQTIARLGEIASRKEESCSDCNEDEEMCRLKDRIGVLLQENNRLRGLLADKKQEVKHLSLQVSDSRSKIAQYSLPESKLSNNCEKLRAELEDFKIERHLNDLLDSSVFREVCHNYEDQICDLNQEGSFLRDLLDEKEDQLSIMYEDRQKLKHENDQLVSIAGSIIQHHDQANLVHDELMIYKEKLCEQELLILESKGEYNSMKRMPHLTPQSER

SEQ ID NO: 174207 - protein, 658 aa, Zea Mays
MHPGGLGRCREKQRKESSRLQTVNRKLSAMNKLLMEENDRLQKQVSRLVFDNGYMKNRLHSPSVATTDTSCESVVTSGQHNQQQNPAVLHPPQRDANNPAGLLAIAEETLAEFMSKATGTAVNWVQMVGMKPGPDSVGIIAVSHNCSGVAARACGLVSLEPTKVAEILKDRASWYRDCRHVDVLHVIPTGNGGTIELIYMQTYALTTLAEPRDFWTLRYTSGLDDGSLVICERSLTQSTGGPSGPNTPNFIRAEVLPSGYLIRPCDGGGSMIYIVDHVNLNACSVPEVLRPLYESPKILAQKMTAAALRHIRQIAHESSGEMPYGAGRQPAVLRTFSQRLSRGFNDAVSGFPDDGWSCLLNTDGAEDITVTINSSPNKLVGSHVSASPLFSAMGGGIMCAKASMLLQNVPPALLVRFLREHRSEWADPGIDAYSVASLRANPYTVPGLRAGGFMGNQVILPLARTLEHEESLEVIRLEGHGFSHEEVLMSRDMFLLQLCSGVDEDAPGACAQLVFAPIDESFADDAPLLPSGFRVIPLDAKTGAHWNGDPLVGHRRRGLSTDAVLEAQRRDTLLLSEAAGFHAQVRQQRRLRHPGDDDGEHPGPAAGGGPRRGGPEGPVRAAPRDHAAGPGVPPRWRVQVEHGAAGVVRAGSGVEGGG

SEQ ID NO: 174208 - protein, 787 aa, Zea Mays
MHPGGLGRCREKQRKESSRLQTVNRKLSAMNKLLMEENDRLQKQVSRLVFDNGYMKNRLHSPSVATTDTSCESVVTSGQHNQQQNPAVLHPPQRDANNPAGLLAIAEETLAEFMSKATGTAVNWVQMVGMKPGPDSVGIIAVSHNCSGVAARACGLVSLEPTKVAEILKDRASWYRDCRHVDVLHVIPTGNGGTIELIYMQTYALTTLAEPRDFWTLRYTSGLDDGSLVICERSLTQSTGGPSGPNTPNFIRAEVLPSGYLIRPCDGGGSMIYIVDHVNLNACSVPEVLRPLYESPKILAQKMTAAALRHIRQIAHESSGEMPYGAGRQPAVLRTFSQRLSRGFNDAVSGFPDDGWSCLLNTDGAEDITVTINSSPNKLVGSHVSASPLFSAMGGGIMCAKASMLLQNVPPALLVRFLREHRSEWADPGIDAYSVASLRANPYTVPGLRAGGFMGNQVILPLARTLEHEESLEVIRLEGHGFSHEEVLMSRDMFLLQLCSGVDEDAPGACAQLVFAPIDESFADDAPLLPSGFRVIPLDAKTDVPTATTRTLDLASALEVGSGGSGMRASCDGSGTCATRSVLTIAFQFSFENHLRESVAAMAKQYVRGVMASVQRVAMAIAPSRLGSRIELKHPPGSPEALALATWIGRSYRAHTGTEIRWSDTEGADSPLMLFWKHSDAILCCSLKPPAFTLKFANSAGFDILETTMVNIQDLPLEAVLDEEGQKALSAQLPAIMQQGLAYLPGGVCRSSMGRQASYEQAVAWKVVGDDGAPQCLALMLANWTFI

SEQ ID NO: 174209 - protein, 887 aa, Zea Mays
MKERERVTRKHLLLLQSSSTVLLLNKPRALLLLSSPPPHSTTAHSHPTRAQPPPTPYSLHYSPRKHAQRHGHGGSAHGGLLLRLRFLSSPALLAGPLATMAAVASRERLSPGAAPQVDAGKYVRYTPEQVEALERVYSECPKPSSLRRQHLIRDCPILRNIEPKQIKVWFQNRRCREKQRKESSRLQTVNRKLSAMNKLLMEENDRLQKQVSRLVFDNGYMKNRLHSPSVATTDTSCESVVTSGQHNQQQNPAVLHPPQRDANNPAGLLAIAEETLAEFMSKATGTAVNWVQMVGMKPGPDSVGIIAVSHNCSGVAARACGLVSLEPTKICERSLTQSTGGPSGPNTPNFIRAEVLPSGYLIRPCDGGGSMIYIVDHVNLNACSVPEVLRPLYESPKILAQKMTAAALRHIRQIAHESSGEMPYGAGRQPAVLRTFSQRLSRGFNDAVSGFPDDGWSCLLNTDGAEDITVTINSSPNKLVGSHVSASPLFSAMGGGIMCAKASMLLQNVPPALLVRFLREHRSEWADPGIDAYSVASLRANPYTVPGLRAGGFMGNQVILPLARTLEHEESLEVIRLEGHGFSHEEVLMSRDMFLLQLCSGVDEDAPGACAQLVFAPIDESFADDAPLLPSGFRVIPLDAKTDVPTATTRTLDLASALEVGSGGSGMRASCDGSGTCATRSVLTIAFQFSFENHLRESVAAMAKQYVRGVMASVQRVAMAIAPSRLGSRIELKHPPGSPEALALATWIGRSYRAHTGTEIRWSDTEGADSPLMLFWKHSDAILCCSLKPPAFTLKFANSAGFDILETTMVNIQDLPLEAVLDEEGQKALSAQLPAIMQQGLAYLPGGVCRSSMGRQASYEQAVAWKVVGDDGAPQCLALMLANWTFI

SEQ ID NO: 174210 - protein, 332 aa, Zea Mays
MFRGSPKIVALSKAAQKKASPKAAKSKKCGGGIERAAWNVELEKSLVDLLFEHNMPPHRAQNGWSPDAWNKIVSEFHEKHEYVTFNKIQIQEKERELKREYKILKEVRKQSGVSWNEKRCMIIAEPTIWDNIITTFPRAKKFRKKSFPLFDALGELYDGHIAQGTWNITSTQPLQNSDEGEKFKTIEVEDEDTNEPQVDARIEQDEDIVIVERVEQRLPKRSGAPTVNQEKETKRVRKDALEGLIGRYLDVKTKQVADEAAQSTKEKEVAQGNDFSIKRCISVLKTMDITRDEKIKAAGVFNTPNYRETFICFNDDEPEVALLWLRGKMDKL

SEQ ID NO: 174211 - protein, 100 aa, Zea Mays
MQVTSDRPHRPPPSLFPSTPALKFETQTIPSSPVATPSATPRRPTPAPSAAARVLPLRPRAALIPPSAVGSALGPSPLDPPLVGNFMCAFIHEELKISHD

SEQ ID NO: 174212 - protein, 120 aa, Zea Mays
MHPAGLPLPTDAIEEPVYVNAKQYNAILRRRQSRAKAESERKLVKGRKPYLHESRHQHALKRARGAGGRFLNSKSDDKEENSDSSQKEIQNGVAPQKGGQPSTPPSPNGASSAYQAPSRE

SEQ ID NO: 174213 - protein, 145 aa, Zea Mays
MTSVVQSVSGDHRAEDQSHQKKQTEPGDQQEAPVTSSDSQPTVGTPSTDYVAPYAPHDMSHAMGQYAYPNIDPYYGSLYAAAYGGHPLMHPTLVGMHPAGLPLPTDAIEEPVYVNAKQYNAILRRRQSRAKAESERKLVKGRKSK

SEQ ID NO: 174214 - protein, 165 aa, Zea Mays
MTSVVQSVSGDHRAEDQSHQKKQTEPGDQQEAPVTSSDSQPTVGTPSTDYVAPYAPHDMSHAMGQYAYPNIDPYYGSLYAAAYGGHPLMHPTLVGMHPAGLPLPTDAIEEPVYVNAKQYNAILRRRQSRAKAESERKLVKGRKVNLCNHILHCHMKEFLMSLFCP

SEQ ID NO: 174215 - protein, 107 aa, Zea Mays
MSHAMGQYAYPNIDPYYGSLYAAAYGGHPLMHPTLVGMHPAGLPLPTDAIEEPVYVNAKQYNAILRRRQSRAKAESERKLVKGRKVNLCNHILHCHMKEFLMSLFCP

SEQ ID NO: 174216 - protein, 591 aa, Zea Mays
MRFRMLFETEESSVRRYMGTITCISDLDSERWPNSHWRSVKVGWDESTAGDKQPRVSLWEIEPLMAFPMYPTAFPLRLKRPWASGLPMFNGGRSDEFARYSSLMWLRDGNRGAQSLNFQGLGASPWLQPRIDYPLLGLKLDTYQQMAAAALEEIRAGDHLKQISSLLPVQQPQNLSGGLDPLYGNPVLQQMQFQSQQSSLQVVQQGYGPNASDSGFLQNQLQLQKQQEPLPQQQQQALQQQSHQEMQHHLSASCHDIANVASGVSESGSASQTESSLLSGSSYQQIYDGNSGPGLHLHNGFHNCSSQESSNLLNLSRSGQFMASEGWPLKRLAVESLSGHELQPVQHKFEKVNHQSNVSHISSTLPPLSARDSYSAQASGTNDQSHLLSSSFAIHDGLTAVRSGGVGSGTDAITIASLRYNDMNLLPENPIATSSCLGESGTFNSLDDVCGVNPSQGGTFVKVYKSGSPGRSLDITRFSSYYELRSELERLFGLEGQLEDPVRSGWQLVFVDRENDILLVGDDPWQEFVNSVWCIKILSPQDVQQMVRGGGDLLSTTGVRTLQGSVCDDYSAGHDMQNLTGSIAPVVPLDY

SEQ ID NO: 174217 - protein, 484 aa, Zea Mays
MRFRMLFETEESSVRRYMGTITCISDLDSERWPNSHWRSVKVGWDESTAGDKQPRVSLWEIEPLMAFPMYPTAFPLRLKRPWASGLPMFNGGRSDEFARYSSLMWLRDGNRGAQSLNFQGLGASPWLQPRIDYPLLGLKLDTYQQMAAAALEEIRAGDHLKQISSLLPVQQPQNLSGGLDPLYGNPVLQQMQFQSQQSSLQVVQQGYGPNASDSGFLQNQLQLQKQQEPLPQQQQQALQQQSHQEMQHHLSASCHDIANVASGVSESGSASQTESSLLSGSSYQQIYDGNSGPGLHLHNGFHNCSSQESSNLLNLSRSGQFMASEGWPLKRLAVESLSGHELQPVQHKFEKVNHQSNVSHISSTLPPLSARDSYSAQASGTNDQSHLLSSSFAIHDGLTAVRSGGVGSGTDAITIASLRYNDMNLLPENPIATSSCLGESGTFNSLDDVCGVNPSQGGTFVKVCNLTYAVCSLFIKWHVKLPSW

SEQ ID NO: 174218 - protein, 434 aa, Zea Mays
MQLHRELTHYSSKVLFYKFHDTTMEHVDPISLGPWIPSLRPTPFQGSGSMRLWSLFLLPLLCLPARVRSEDYADATVIVRGSETIASTSDEFVCATIDWWPPEKCNYDQCPWERASVLNLDLTNPLLAKAIQAFSPLRIRVGGSLQDQVLYGTPNLGLPCDPFTKVSSGLFGFSQGCITLERWDDINDMFLKTGAVVTFGLNALRGRQQTRKGVWGGPWNSSNAREFIEYTVLKNYPIDSWEFGNELSGSGVGASVSAEQYGKDLVELQTIISELYGDSNKPLVVAPGGFYDQKWFAQLLDVSGPNVLNAMTHHIYNLGAGNDPQVPNRILNPQYLSRTSDTFRSLQLTIQRHGPWSAPWVGESGGAYNSGSRLVSNTFLNSFWYLDQLGQSAKYDTKVYCRQTLIGGNYGLLDTETFVPNPDYYSSWGQEFFL

SEQ ID NO: 174219 - protein, 219 aa, Zea Mays
MQLHRELTHYSSKVLFYKFHDTTMEHVDPISLGPWIPSLRPTPFQGSGSMRLWSLFLLPLLCLPARVRSEDYADATVIVRGSETIASTSDEFVCATIDWWPPEKCNYDQCPWERASVLNLDLTNPLLAKAIQAFSPLRIRVGGSLQDQVLYGTPNLGLPCDPFTKVSSGLFGFSQGCITLERWDDINDMFLKTGCYIRSQRASRKTADKKRCLGWSLEF

SEQ ID NO: 174220 - protein, 68 aa, Zea Mays
MHEAFDFWPKGFEVKSRFSRLNIIQPEQQKTVVRVLRGCTLQKAVWKQLLPLNCQALPTPDQLADLTK

SEQ ID NO: 174221 - protein, 1111 aa, Zea Mays
MILWPHSSFVRAMLLKKKVFDCCFSTETMDQYRYKNYLDNIILQLREQFADSSLMVLNFRDEGKSLISGIFSKYNITAKDYPCKYLGCPLLPLDIILHFLRLSERWLMLEGQQNILLMHCEKDGWPVLAFMLAGLLLYRKQYNGEQRTLDMVYKQAPKELLQMLTTLNPQPSHLRYLGYICRMDDGIGWPTQPIPFTLDCVILREIPNFDGVGGCRPIVRVYGQDIPTTDRSHSVISPPSKAKKHIRRYRQADNAPVKLNVGSCVQGDVVLECLHVDDGQGNERLMFRVMFNTFFIQSHILPLNFEDIDVPWDADHQFTKNFKAEVLFSEFDAESDASTEVAPDYDYDYDYDNDMDVASADEFFEAEEIFSNAESQDGNKDADTLSMVSTDYIRTPSAECWKNSPFSNFDLNIDIDGSQDNKADNLGLLLETVNDGKTCTSTEANILLNNETAVVKSTFTATIACTSTEANILLNDETAVVKSTFTATIDGDTDSGISSSTYKEDGCMFEKGSSKQDIRMGSNQDLSQIDNVLVKEVIILETNSTDDIQMIKEVIISEVTTPKQVVEGNMMETELDEAVHSSESTALGEDEDTKRPNTFFKKDEGQSARDEYAAYDNGIVIEREESRNKEKFTITGTDSLVAEPKDLPHLDSSNTSLELSSANENIDQLRACSSNVTAERRAGIDTSFSSSRSQSSNISCANILPEESNLIINHASTSVNANTDTTDSSRLVLKKKPFLPLATSSLFSPSSPRRNLLRAASTDLSFFSPSQTESKQNSVTSTSGRGDSDTSSVLPPFQLYTSLGSSSKMSLVHPTLRPIRTISSLPSLSFGTFIEMSMASSRSPKHQEHVRSPSIPQDQHLHPPMTEENDLHSGSLTLPASNQYGPQTPHPPPLPPPHDSCTQSYSSTIIYEPEQIRADGSCSYSPDYRQSVLNLGDSSLTSLSNSSIAATECPLGASDFVDEEVTSRPNIVTAMDVPFTNEDTNSLLHMTCSSPPKTLQRAEPPTLPPPPLPLVPPPSQLPLPTICSDSGSVPLVYSNPSSDCPYKEPTMLPEHKSDVPATSLEGHEASEVQFLQSDTAVELSPSEHSEYKVQHVVGSAEDTISTMLNSM

SEQ ID NO: 174222 - protein, 1925 aa, Zea Mays
MILWPHSSFVRAMLLKKKVFDCCFSTETMDQYRYKNYLDNIILQLREQFADSSLMVLNFRDEGKSLISGIFSKYNITAKDYPCKYLGCPLLPLDIILHFLRLSERWLMLEGQQNILLMHCEKDGWPVLAFMLAGLLLYRKQYNGEQRTLDMVYKQAPKELLQMLTTLNPQPSHLRYLGYICRMDDGIGWPTQPIPFTLDCVILREIPNFDGVGGCRPIVRVYGQDIPTTDRSHSVISPPSKAKKHIRRYRQADNAPVKLNVGSCVQGDVVLECLHVDDGQGNERLMFRVMFNTFFIQSHILPLNFEDIDVPWDADHQFTKNFKAEVLFSEFDAESDASTEVAPDYDYDYDYDNDMDVASADEFFEAEEIFSNAESQDGNKDADTLSMVSTDYIRTPSAECWKNSPFSNFDLNIDIDGSQDNKADNLGLLLETVNDGKTCTSTEANILLNNETAVVKSTFTATIACTSTEANILLNDETAVVKSTFTATIDGDTDSGISSSTYKEDGCMFEKGSSKQDIRMGSNQDLSQIDNVLVKEVIILETNSTDDIQMIKEVIISEVTTPKQVVEGNMMETELDEAVHSSESTALGEDEDTKRPNTFFKKDEGQSARDEYAAYDNGIVIEREESRNKEKFTITGTDSLVAEPKDLPHLDSSNTSLELSSANENIDQLRACSSNVTAERRAGIDTSFSSSRSQSSNISCANILPEESNLIINHASTSVNANTDTTDSSRLVLKKKPFLPLATSSLFSPSSPRRNLLRAASTDLSFFSPSQTESKQNSVTSTSGRGDSDTSSVLPPFQLYTSLGSSSKMSLVHPTLRPIRTISSLPSLSFGTFIEMSMASSRSPKHQEHVRSPSIPQDQHLHPPMTEENDLHSGSLTLPASNQYGPQTPHPPPLPPPHDSCTQSYSSTIIYEPEQIRADGSCSYSPDYRQSVLNLGDSSLTSLSNSSIAATECPLGASDFVDEEVTSRPNIVTAMDVPFTNEDTNSLLHMTCSSPPKTLQRAEPPTLPPPPLPLVPPPSQLPLPTICSDSGSVPLVYSNPSSDCPYKEPTMLPEHKSDVPATSLEGHEASEVQFLQSDTAVELSPSEHSEYKVQHVVGSAEDTISSMSSYIPAAPPYPMFHIVTDNSSCSISAEQVNCEQPLDQTTLSIHLRPFEVEISQGETINGVLASIIDDKEHGGIPILQLPQKLPHSGEHMKSPPPPPPPPQPPPCHATVIPSLCLSSKPPSPTEHYENPPSSPPPFSRESCVVLPPLPAPLLNHPSLPGKHINLYPPPPPPPPTLHHIAPASPCSYQPSFYADIATQPTFSEDIVIVPPPHSKGVNIIPLPPPPPRTSETLSQPLDGGQSTGPASLLEVTKENPPPPLLPPEGQMGSPLSTLCGEIVNIPIPPPSLPGGHGEVPLSTPPRGCGAIPPPPPFTKGIGGITLPIGFHSGDLSFLQSTRESKGPSCLPPPPPPPPPPPPPPLSSNGHIGDLPPPPTSVFVEASIPLPPQTGCGGDPPPPPPTGGHVGPPPPPPPLGECAWDLQPPKACVRAPPPPPPPGGYAEVLMPPPPPRGYVGAPAPPPPPGGYAGAPPPPPPPGGYAGAPPPPPPPGGYAGAPPPPPPPGGYAGAPPPPPPPGGYAGAPPPPPSYGGIGGVPPPPPPFGGLGGTPPPPPPAGFRGGAPSPPPPPGGHGGPPPPPPRGHGSGPPPPPGAPSPPMPPGMSGGPPPPPGGRGMPTPPGGRGHGLARTLGPTLQSAMRKSSLKPLHWVKVTRAMQGSLWAELQKQVEANSHAEFDVNELESLFTIAPKAKAGSKSEGRGKSLGTKSDKVQLIDLRRANNTEIMLTKIKMPLPDMMSAALALDDSVLDADQIENLIKFCPTKEEMELLKNYSGDKEALGKCEHFFLELMKVPRVESKLKIFAFKIQFQSQGCQKEFADCIICL

SEQ ID NO: 174223 - protein, 1867 aa, Zea Mays
MILWPHSSFVRAMLLKKKVFDCCFSTETMDQYRYKNYLDNIILQLREQFADSSLMVLNFRDEGKSLISGIFSKYNITAKDYPCKYLGCPLLPLDIILHFLRLSERWLMLEGQQNILLMHCEKDGWPVLAFMLAGLLLYRKQYNGEQRTLDMVYKQAPKELLQMLTTLNPQPSHLRYLGYICRMDDGIGWPTQPIPFTLDCVILREIPNFDGVGGCRPIVRVYGQDIPTTDRSHSVISPPSKAKKHIRRYRQADNAPVKLNVGSCVQGDVVLECLHVDDGQGNERLMFRVMFNTFFIQSHILPLNFEDIDVPWDADHQFTKNFKAEVLFSEFDAESDASTEVAPDYDYDYDYDNDMDVASADEFFEAEEIFSNAESQDGNKDADTLSMVSTDYIRTPSAECWKNSPFSNFDLNIDIDGSQDNKADNLGLLLETVNDGKTCTSTEANILLNNETAVVKSTFTATIACTSTEANILLNDETAVVKSTFTATIDGDTDSGISSSTYKEDGCMFEKGSSKQDIRMGSNQDLSQIDNVLVKEVIILETNSTDDIQMIKEVIISEVTTPKQVVEGNMMETELDEAVHSSESTALGEDEDTKRPNTFFKKDEGQSARDEYAAYDNGIVIEREESRNKEKFTITGTDSLVAEPKDLPHLDSSNTSLELSSANENIDQLRACSSNVTAERRAGIDTSFSSSRSQSSNISCANILPEESNLIINHASTSVNANTDTTDSSRLVLKKKPFLPLATSSLFSPSSPRRNLLRAASTDLSFFSPSQTESKQNSVTSTSGRGDSDTSSVLPPFQLYTSLGSSSKMSLVHPTLRPIRTISSLPSLSFGTFIEMSMASSRSPKHQEHVRSPSIPQDQHLHPPMTEENDLHSGSLTLPASNQYGPQTPHPPPLPPPHDSCTQSYSSTIIYEPEQIRADGSCSYSPDYRQSVLNLGDSSLTSLSNSSIAATECPLGASDFVDEEVTSRPNIVTAMDVPFTNEDTNSLLHMTCSSPPKTLQRAEPPTLPPPPLPLVPPPSQLPLPTICSDSGSVPLVYSNPSSDCPYKEPTMLPEHKSDVPATSLEGHEASEVQFLQSDTAVELSPSEHSEYKVQHVVGSAEDTISSMSSYIPAAPPYPMFHIVTDNSSCSISAEQVNCEQPLDQTTLSIHLRPFEVEISQGETINGVLASIIDDKEHGGIPILQLPQKLPHSGEHMKSPPPPPPPPQPPPCHATVIPSLCLSSKPPSPTEHYENPPSSPPPFSRESCVVLPPLPAPLLNHPSLPGKHINLYPPPPPPPPTLHHIAPASPCSYQPSFYADIATQPTFSEDIVIVPPPHSKGVNIIPLPPPPPRTSETLSQPLDGGQSTGPASLLEVTKENPPPPLLPPEGQMGSPLSTLCGEIVNIPIPPPSLPGGHGEVPLSTPPRGCGAIPPPPPFTKGIGGITLPIGFHSGDLSFLQSTRESKGPSCLPPPPPPPPPPPPPPLSSNGHIGDLPPPPTSVFVEASIPLPPQTGCGGDPPPPPPTGGHVGPPPPPPPLGECAWDLQPPKACVRAPPPPPPPGGYAEVLMPPPPPRGYVGAPAPPPPPGGYAGAPPPPPPPGGYAGAPPPPPPPGGYAGAPPPPPPPGGYAGAPPPPPPPGGYAGAPPPPPSYGGIGGVPPPPPPFGGLGGTPPPPPPAGFRGGAPSPPPPPGGHGGPPPPPPRGHGSGPPPPPGAPSPPMPPGMSGGPPPPPGGRGMPTPPGGRGHGLARTLGPTLQSAMRKSSLKPLHWVKVTRAMQGSLWAELQKQVEANSHAEFDVNELESLFTIAPKAKAGSKSEGRGKSLGTKSDKVQLIDLRRANNTEIMLTKIKMPLPDMMDCRKVISLFKSESPVFQCCSSFGRFSFGC

SEQ ID NO: 174224 - protein, 915 aa, Zea Mays
MALFRRLFYRKPPDRLLEIADRVYGTVPHNVDYHSVETAAVVLWHLAYYFLPPIVFDCCFSTETMDQYRYKNYLDNIILQLREQFADSSLMVLNFRDEGKSLISGIFSKYNITAKDYPCKYLGCPLLPLDIILHFLRLSERWLMLEGQQNILLMHCEKDGWPVLAFMLAGLLLYRKQYNGEQRTLDMVYKQAPKELLQMLTTLNPQPSHLRYLGYICRMDDGIGWPTQPIPFTLDCVILREIPNFDGVGGCRPIVRVYGQDIPTTDRSHSVISPPSKAKKHIRRYRQADNAPVKLNVGSCVQGDVVLECLHVDDGQGNERLMFRVMFNTFFIQSHILPLNFEDIDVPWDADHQFTKNFKAEVLFSEFDAESDASTEVAPDYDYDYDYDNDMDVASADEFFEAEEIFSNAESQDGNKDADTLSMVSTDYIRTPSAECWKNSPFSNFDLNIDIDGSQDNKADNLGLLLETVNDGKTCTSTEANILLNNETAVVKSTFTATIACTSTEANILLNDETAVVKSTFTATIDGDTDSGISSSTYKEDGCMFEKGSSKQDIRMGSNQDLSQIDNVLVKEVIILETNSTDDIQMIKEVIISEVTTPKQVVEGNMMETELDEAVHSSESTALGEDEDTKRPNTFFKKDEGQSARDEYAAYDNGIVIEREESRNKEKFTITGTDSLVAEPKDLPHLDSSNTSLELSSANENIDQLRACSSNVTAERRAGIDTSFSSSRSQSSNISCANILPEESNLIINHASTSVNANTDTTDSSRLVLKKKPFLPLATSSLFSPSSPRRNLLRAASTDLSFFSPSQTESKQNSVTSTSGRGDSDTSSVLPPFQLYTSLGSSSKMSLVHPTLRPIRTISSLPSLSFGTFIEMSMASSRSPKHQEHVRSPSIPQDQHLHPPMTEENDLHSAMLNSM

SEQ ID NO: 174225 - protein, 2116 aa, Zea Mays
MALFRRLFYRKPPDRLLEIADRVYGTVPHNVDYHSVETAAVVLWHLAYYFLPPIVFDCCFSTETMDQYRYKNYLDNIILQLREQFADSSLMVLNFRDEGKSLISGIFSKYNITAKDYPCKYLGCPLLPLDIILHFLRLSERWLMLEGQQNILLMHCEKDGWPVLAFMLAGLLLYRKQYNGEQRTLDMVYKQAPKELLQMLTTLNPQPSHLRYLGYICRMDDGIGWPTQPIPFTLDCVILREIPNFDGVGGCRPIVRVYGQDIPTTDRSHSVISPPSKAKKHIRRYRQADNAPVKLNVGSCVQGDVVLECLHVDDGQGNERLMFRVMFNTFFIQSHILPLNFEDIDVPWDADHQFTKNFKAEVLFSEFDAESDASTEVAPDYDYDYDYDNDMDVASADEFFEAEEIFSNAESQDGNKDADTLSMVSTDYIRTPSAECWKNSPFSNFDLNIDIDGSQDNKADNLGLLLETVNDGKTCTSTEANILLNNETAVVKSTFTATIACTSTEANILLNDETAVVKSTFTATIDGDTDSGISSSTYKEDGCMFEKGSSKQDIRMGSNQDLSQIDNVLVKEVIILETNSTDDIQMIKEVIISEVTTPKQVVEGNMMETELDEAVHSSESTALGEDEDTKRPNTFFKKDEGQSARDEYAAYDNGIVIEREESRNKEKFTITGTDSLVAEPKDLPHLDSSNTSLELSSANENIDQLRACSSNVTAERRAGIDTSFSSSRSQSSNISCANILPEESNLIINHASTSVNANTDTTDSSRLVLKKKPFLPLATSSLFSPSSPRRNLLRAASTDLSFFSPSQTESKQNSVTSTSGRGDSDTSSVLPPFQLYTSLGSSSKMSLVHPTLRPIRTISSLPSLSFGTFIEMSMASSRSPKHQEHVRSPSIPQDQHLHPPMTEENDLHSGSLTLPASNQYGPQTPHPPPLPPPHDSCTQSYSSTIIYEPEQIRADGSCSYSPDYRQSVLNLGDSSLTSLSNSSIAATECPLGASDFVDEEVTSRPNIVTAMDVPFTNEDTNSLLHMTCSSPPKTLQRAEPPTLPPPPLPLVPPPSQLPLPTICSDSGSVPLVYSNPSSDCPYKEPTMLPEHKSDVPATSLEGHEASEVQFLQSDTAVELSPSEHSEYKVQHVVGSAEDTISKQVNCEQPLDQTTLSIHLRPFEVEISQGETINGVLASIIDDKEHGGIPILQLPQKLPHSGEHMKSPPPPPPPPQPPPCHATVIPSLCLSSKPPSPTEHYENPPSSPPPFSRESCVVLPPLPAPLLNHPSLPGKHINLYPPPPPPPPTLHHIAPASPCSYQPSFYADIATQPTFSEDIVIVPPPHSKGVNIIPLPPPPPRTSETLSQPLDGGQSTGPASLLEVTKENPPPPLLPPEGQMGSPLSTLCGEIVNIPIPPPSLPGGHGEVPLSTPPRGCGAIPPPPPFTKGIGGITLPIGFHSGDLSFLQSTRESKGPSCLPPPPPPPPPPPPPPLSSNGHIGDLPPPPTSVFVEASIPLPPQTGCGGDPPPPPPTGGHVGPPPPPPPLGECAWDLQPPKACVRAPPPPPPPGGYAEVLMPPPPPRGYVGAPAPPPPPGGYAGAPPPPPPPGGYAGAPPPPPPPGGYAGAPPPPPPPGGYAGAPPPPPPPGGYAGAPPPPPSYGGIGGVPPPPPPFGGLGGTPPPPPPAGFRGGAPSPPPPPGGHGGPPPPPPRGHGSGPPPPPGAPSPPMPPGMSGGPPPPPGGRGMPTPPGGRGHGLARTLGPTLQSAMRKSSLKPLHWVKVTRAMQGSLWAELQKQVEANSHAEFDVNELESLFTIAPKAKAGSKSEGRGKSLGTKSDKVQLIDLRRANNTEIMLTKIKMPLPDMMSAALALDDSVLDADQIENLIKFCPTKEEMELLKNYSGDKEALGKCEHFFLELMKVPRVESKLKIFAFKIQFQSQIRDVRKNLQTVSSACEELRSSEKLKVIMKNILLIGNTLNQGTPRGQAVGFRLDSLLKLIETRATSGRMTLMHFLCKSLAEKSPEVMDFHEDLVHLEASSKLQLKALAEEQLAVVKGLEKVEQELTASESDGPVSDVFRKTLKEFIDCSSADVCSLSAFYSEVGKSADALALYFGEDPAKFPFEQGNIHAYRPMEMV

SEQ ID NO: 174226 - protein, 1931 aa, Zea Mays
MALFRRLFYRKPPDRLLEIADRVYVFDCCFSTETMDQYRYKNYLDNIILQLREQFADSSLMVLNFRDEGKSLISGIFSKYNITAKDYPCKYLGCPLLPLDIILHFLRLSERWLMLEGQQNILLMHCEKDGWPVLAFMLAGLLLYRKQYNGEQRTLDMVYKQAPKELLQMLTTLNPQPSHLRYLGYICRMDDGIGWPTQPIPFTLDCVILREIPNFDGVGGCRPIVRVYGQDIPTTDRSHSVISPPSKAKKHIRRYRQADNAPVKLNVGSCVQGDVVLECLHVDDGQGNERLMFRVMFNTFFIQSHILPLNFEDIDVPWDADHQFTKNFKAEVLFSEFDAESDASTEVAPDYDYDYDYDNDMDVASADEFFEAEEIFSNAESQDGNKDADTLSMVSTDYIRTPSAECWKNSPFSNFDLNIDIDGSQDNKADNLGLLLETVNDGKTCTSTEANILLNNETAVVKSTFTATIACTSTEANILLNDETAVVKSTFTATIDGDTDSGISSSTYKEDGCMFEKGSSKQDIRMGSNQDLSQIDNVLVKEVIILETNSTDDIQMIKEVIISEVTTPKQVVEGNMMETELDEAVHSSESTALGEDEDTKRPNTFFKKDEGQSARDEYAAYDNGIVIEREESRNKEKFTITGTDSLVAEPKDLPHLDSSNTSLELSSANENIDQLRACSSNVTAERRAGIDTSFSSSRSQSSNISCANILPEESNLIINHASTSVNANTDTTDSSRLVLKKKPFLPLATSSLFSPSSPRRNLLRAASTDLSFFSPSQTESKQNSVTSTSGRGDSDTSSVLPPFQLYTSLGSSSKMSLVHPTLRPIRTISSLPSLSFGTFIEMSMASSRSPKHQEHVRSPSIPQDQHLHPPMTEENDLHSGSLTLPASNQYGPQTPHPPPLPPPHDSCTQSYSSTIIYEPEQIRADGSCSYSPDYRQSVLNLGDSSLTSLSNSSIAATECPLGASDFVDEEVTSRPNIVTAMDVPFTNEDTNSLLHMTCSSPPKTLQRAEPPTLPPPPLPLVPPPSQLPLPTICSDSGSVPLVYSNPSSDCPYKEPTMLPEHKSDVPATSLEGHEASEVQFLQSDTAVELSPSEHSEYKVQHVVGSAEDTISSMSSYIPAAPPYPMFHIVTDNSSCSISAEQVNCEQPLDQTTLSIHLRPFEVEISQGETINGVLASIIDDKEHGGIPILQLPQKLPHSGEHMKSPPPPPPPPQPPPCHATVIPSLCLSSKPPSPTEHYENPPSSPPPFSRESCVVLPPLPAPLLNHPSLPGKHINLYPPPPPPPPTLHHIAPASPCSYQPSFYADIATQPTFSEDIVIVPPPHSKGVNIIPLPPPPPRTSETLSQPLDGGQSTGPASLLEVTKENPPPPLLPPEGQMGSPLSTLCGEIVNIPIPPPSLPGGHGEVPLSTPPRGCGAIPPPPPFTKGIGGITLPIGFHSGDLSFLQSTRESKGPSCLPPPPPPPPPPPPPPLSSNGHIGDLPPPPTSVFVEASIPLPPQTGCGGDPPPPPPTGGHVGPPPPPPPLGECAWDLQPPKACVRAPPPPPPPGGYAEVLMPPPPPRGYVGAPAPPPPPGGYAGAPPPPPPPGGYAGAPPPPPPPGGYAGAPPPPPPPGGYAGAPPPPPPPGGYAGAPPPPPSYGGIGGVPPPPPPFGGLGGTPPPPPPAGFRGGAPSPPPPPGGHGGPPPPPPRGHGSGPPPPPGAPSPPMPPGMSGGPPPPPGGRGMPTPPGGRGHGLARTLGPTLQSAMRKSSLKPLHWVKVTRAMQGSLWAELQKQVEANSHAEFDVNELESLFTIAPKAKAGSKSEGRGKSLGTKSDKVQLIDLRRANNTEIMLTKIKMPLPDMMSAALALDDSVLDADQIENLIKFCPTKEEMELLKNYSGDKEALGKCEHFFLELMKVPRVESKLKIFAFKIQFQSQGCQKEFADCIICL

SEQ ID NO: 174227 - protein, 1924 aa, Zea Mays
MALFRRLFYRKPPDRLLEIADRVYGTVPHNVDYHSVETAAVVLWHLAYYFLPPIVFDCCFSTETMDQYRYKNYLDNIILQLREQFADSSLMVLNFRDEGKSLISGIFSKYNITAKDYPCKYLGCPLLPLDIILHFLRLSERWLMLEGQQNILLMHCEKDGWPVLAFMLAGLLLYRKQYNGEQRTLDMVYKQAPKELLQMLTTLNPQPSHLRYLGYICRMDDGIGWPTQPIPFTLDCVILREIPNFDGVGGCRPIVRVYGQDIPTTDRSHSVISPPSKAKKHIRRYRQADNAPVKLNVGSCVQGDVVLECLHVDDGQGNERLMFRVMFNTFFIQSHILPLNFEDIDVPWDADHQFTKNFKAEVLFSEFDAESDASTEVAPDYDYDYDYDNDMDVASADEFFEAEEIFSNAESQDGNKDADTLSMVSTDYIRTPSAECWKNSPFSNFDLNIDIDGSQDNKADNLGLLLETVNDGKTCTSTEANILLNNETAVVKSTFTATIACTSTEANILLNDETAVVKSTFTATIDGDTDSGISSSTYKEDGCMFEKGSSKQDIRMGSNQDLSQIDNVLVKEVIILETNSTDDIQMIKEVIISEVTTPKQVVEGNMMETELDEAVHSSESTALGEDEDTKRPNTFFKKDEGQSARDEYAAYDNGIVIEREESRNKEKFTITGTDSLVAEPKDLPHLDSSNTSLELSSANENIDQLRACSSNVTAERRAGIDTSFSSSRSQSSNISCANILPEESNLIINHASTSVNANTDTTDSSRLVLKKKPFLPLATSSLFSPSSPRRNLLRAASTDLSFFSPSQTESKQNSVTSTSGRGDSDTSSVLPPFQLYTSLGSSSKMSLVHPTLRPIRTISSLPSLSFGTFIEMSMASSRSPKHQEHVRSPSIPQDQHLHPPMTEENDLHSGHEASEVQFLQSDTAVELSPSEHSEYKVQHVVGSAEDTISKQVNCEQPLDQTTLSIHLRPFEVEISQGETINGVLASIIDDKEHGGIPILQLPQKLPHSGEHMKSPPPPPPPPQPPPCHATVIPSLCLSSKPPSPTEHYENPPSSPPPFSRESCVVLPPLPAPLLNHPSLPGKHINLYPPPPPPPPTLHHIAPASPCSYQPSFYADIATQPTFSEDIVIVPPPHSKGVNIIPLPPPPPRTSETLSQPLDGGQSTGPASLLEVTKENPPPPLLPPEGQMGSPLSTLCGEIVNIPIPPPSLPGGHGEVPLSTPPRGCGAIPPPPPFTKGIGGITLPIGFHSGDLSFLQSTRESKGPSCLPPPPPPPPPPPPPPLSSNGHIGDLPPPPTSVFVEASIPLPPQTGCGGDPPPPPPTGGHVGPPPPPPPLGECAWDLQPPKACVRAPPPPPPPGGYAEVLMPPPPPRGYVGAPAPPPPPGGYAGAPPPPPPPGGYAGAPPPPPPPGGYAGAPPPPPPPGGYAGAPPPPPPPGGYAGAPPPPPSYGGIGGVPPPPPPFGGLGGTPPPPPPAGFRGGAPSPPPPPGGHGGPPPPPPRGHGSGPPPPPGAPSPPMPPGMSGGPPPPPGGRGMPTPPGGRGHGLARTLGPTLQSAMRKSSLKPLHWVKVTRAMQGSLWAELQKQVEANSHAEFDVNELESLFTIAPKAKAGSKSEGRGKSLGTKSDKVQLIDLRRANNTEIMLTKIKMPLPDMMSAALALDDSVLDADQIENLIKFCPTKEEMELLKNYSGDKEALGKCEHFFLELMKVPRVESKLKIFAFKIQFQSQIRDVRKNLQTVSSACEELRSSEKLKVIMKNILLIGNTLNQGTPRGQAVGFRLDSLLKLIETRATSGRMTLMHFLCKSLAEKSPEVMDFHEDLVHLEASSKLQLKALAEEQLAVVKGLEKVEQELTASESDGPVSDVFRKTLKEFIDCSSADVCSLSAFYSEVGKSADALALYFGEDPAKFPFEQGNIHAYRPMEMV

SEQ ID NO: 174228 - protein, 2080 aa, Zea Mays
MILWPHSSFVRAMLLKKKVFDCCFSTETMDQYRYKNYLDNIILQLREQFADSSLMVLNFRDEGKSLISGIFSKYNITAKDYPCKYLGCPLLPLDIILHFLRLSERWLMLEGQQNILLMHCEKDGWPVLAFMLAGLLLYRKQYNGEQRTLDMVYKQAPKELLQMLTTLNPQPSHLRYLGYICRMDDGIGWPTQPIPFTLDCVILREIPNFDGVGGCRPIVRVYGQDIPTTDRSHSVISPPSKAKKHIRRYRQADNAPVKLNVGSCVQGDVVLECLHVDDGQGNERLMFRVMFNTFFIQSHILPLNFEDIDVPWDADHQFTKNFKAEVLFSEFDAESDASTEVAPDYDYDYDYDNDMDVASADEFFEAEEIFSNAESQDGNKDADTLSMVSTDYIRTPSAECWKNSPFSNFDLNIDIDGSQDNKADNLGLLLETVNDGKTCTSTEANILLNNETAVVKSTFTATIACTSTEANILLNDETAVVKSTFTATIDGDTDSGISSSTYKEDGCMFEKGSSKQDIRMGSNQDLSQIDNVLVKEVIILETNSTDDIQMIKEVIISEVTTPKQVVEGNMMETELDEAVHSSESTALGEDEDTKRPNTFFKKDEGQSARDEYAAYDNGIVIEREESRNKEKFTITGTDSLVAEPKDLPHLDSSNTSLELSSANENIDQLRACSSNVTAERRAGIDTSFSSSRSQSSNISCANILPEESNLIINHASTSVNANTDTTDSSRLVLKKKPFLPLATSSLFSPSSPRRNLLRAASTDLSFFSPSQTESKQNSVTSTSGRGDSDTSSVLPPFQLYTSLGSSSKMSLVHPTLRPIRTISSLPSLSFGTFIEMSMASSRSPKHQEHVRSPSIPQDQHLHPPMTEENDLHSGSLTLPASNQYGPQTPHPPPLPPPHDSCTQSYSSTIIYEPEQIRADGSCSYSPDYRQSVLNLGDSSLTSLSNSSIAATECPLGASDFVDEEVTSRPNIVTAMDVPFTNEDTNSLLHMTCSSPPKTLQRAEPPTLPPPPLPLVPPPSQLPLPTICSDSGSVPLVYSNPSSDCPYKEPTMLPEHKSDVPATSLEGHEASEVQFLQSDTAVELSPSEHSEYKVQHVVGSAEDTISKQVNCEQPLDQTTLSIHLRPFEVEISQGETINGVLASIIDDKEHGGIPILQLPQKLPHSGEHMKSPPPPPPPPQPPPCHATVIPSLCLSSKPPSPTEHYENPPSSPPPFSRESCVVLPPLPAPLLNHPSLPGKHINLYPPPPPPPPTLHHIAPASPCSYQPSFYADIATQPTFSEDIVIVPPPHSKGVNIIPLPPPPPRTSETLSQPLDGGQSTGPASLLEVTKENPPPPLLPPEGQMGSPLSTLCGEIVNIPIPPPSLPGGHGEVPLSTPPRGCGAIPPPPPFTKGIGGITLPIGFHSGDLSFLQSTRESKGPSCLPPPPPPPPPPPPPPLSSNGHIGDLPPPPTSVFVEASIPLPPQTGCGGDPPPPPPTGGHVGPPPPPPPLGECAWDLQPPKACVRAPPPPPPPGGYAEVLMPPPPPRGYVGAPAPPPPPGGYAGAPPPPPPPGGYAGAPPPPPPPGGYAGAPPPPPPPGGYAGAPPPPPPPGGYAGAPPPPPSYGGIGGVPPPPPPFGGLGGTPPPPPPAGFRGGAPSPPPPPGGHGGPPPPPPRGHGSGPPPPPGAPSPPMPPGMSGGPPPPPGGRGMPTPPGGRGHGLARTLGPTLQSAMRKSSLKPLHWVKVTRAMQGSLWAELQKQVEANSHAEFDVNELESLFTIAPKAKAGSKSEGRGKSLGTKSDKVQLIDLRRANNTEIMLTKIKMPLPDMMSAALALDDSVLDADQIENLIKFCPTKEEMELLKNYSGDKEALGKCEHFFLELMKVPRVESKLKIFAFKIQFQSQIRDVRKNLQTVSSACEELRSSEKLKVIMKNILLIGNTLNQGTPRGQAVGFRLDSLLKLIETRATSGRMTLMHFLCKSLAEKSPEVMDFHEDLVHLEASSKLQLKALAEEQLAVVKGLEKVEQELTASESDGPVSDVFRKTLKEFIDCSSADVCSLSAFYSEVGKSADALALYFGEDPAKFPFEQGNIHAYRPMEMV

SEQ ID NO: 174229 - protein, 1886 aa, Zea Mays
MALFRRLFYRKPPDRLLEIADRVYVFDCCFSTETMDQYRYKNYLDNIILQLREQFADSSLMVLNFRDEGKSLISGIFSKYNITAKDYPCKYLGCPLLPLDIILHFLRLSERWLMLEGQQNILLMHCEKDGWPVLAFMLAGLLLYRKQYNGEQRTLDMVYKQAPKELLQMLTTLNPQPSHLRYLGYICRMDDGIGWPTQPIPFTLDCVILREIPNFDGVGGCRPIVRVYGQDIPTTDRSHSVISPPSKAKKHIRRYRQADNAPVKLNVGSCVQGDVVLECLHVDDGQGNERLMFRVMFNTFFIQSHILPLNFEDIDVPWDADHQFTKNFKAEVLFSEFDAESDASTEVAPDYDYDYDYDNDMDVASADEFFEAEEIFSNAESQDGNKDADTLSMVSTDYIRTPSAECWKNSPFSNFDLNIDIDGSQDNKADNLGLLLETVNDGKTCTSTEANILLNNETAVVKSTFTATIACTSTEANILLNDETAVVKSTFTATIDGDTDSGISSSTYKEDGCMFEKGSSKQDIRMGSNQDLSQIDNVLVKEVIILETNSTDDIQMIKEVIISEVTTPKQVVEGNMMETELDEAVHSSESTALGEDEDTKRPNTFFKKDEGQSARDEYAAYDNGIVIEREESRNKEKFTITGTDSLVAEPKDLPHLDSSNTSLELSSANENIDQLRACSSNVTAERRAGIDTSFSSSRSQSSNISCANILPEESNLIINHASTSVNANTDTTDSSRLVLKKKPFLPLATSSLFSPSSPRRNLLRAASTDLSFFSPSQTESKQNSVTSTSGRGDSDTSSVLPPFQLYTSLGSSSKMSLVHPTLRPIRTISSLPSLSFGTFIEMSMASSRSPKHQEHVRSPSIPQDQHLHPPMTEENDLHSGSLTLPASNQYGPQTPHPPPLPPPHDSCTQSYSSTIIYEPEQIRADGSCSYSPDYRQSVLNLGDSSLTSLSNSSIAATECPLGASDFVDEEVTSRPNIVTAMDVPFTNEDTNSLLHMTCSSPPKTLQRAEPPTLPPPPLPLVPPPSQLPLPTICSDSGSVPLVYSNPSSDCPYKEPTMLPEHKSDVPATSLEGHEASEVQFLQSDTAVELSPSEHSEYKVQHVVGSAEDTISSMSSYIPAAPPYPMFHIVTDNSSCSISAEQVNCEQPLDQTTLSIHLRPFEVEISQGETINGVLASIIDDKEHGGIPILQLPQKLPHSGEHMKSPPPPPPPPQPPPCHATVIPSLCLSSKPPSPTEHYENPPSSPPPFSRESCVVLPPLPAPLLNHPSLPGKHINLYPPPPPPPPTLHHIAPASPCSYQPSFYADIATQPTFSEDIVIVPPPHSKGVNIIPLPPPPPRTSETLSQPLDGGQSTGPASLLEVTKENPPPPLLPPEGQMGSPLSTLCGEIVNIPIPPPSLPGGHGEVPLSTPPRGCGAIPPPPPFTKGIGGITLPIGFHSGDLSFLQSTRESKGPSCLPPPPPPPPPPPPPPLSSNGHIGDLPPPPTSVFVEASIPLPPQTGCGGDPPPPPPTGGHVGPPPPPPPLGECAWDLQPPKACVRAPPPPPPPGGYAEVLMPPPPPRGYVGAPAPPPPPGGYAGAPPPPPPPGGYAGAPPPPPPPGGYAGAPPPPPPPGGYAGAPPPPPPPGGYAGAPPPPPSYGGIGGVPPPPPPFGGLGGTPPPPPPAGFRGGAPSPPPPPGGHGGPPPPPPRGHGSGPPPPPGAPSPPMPPGMSGGPPPPPGGRGMPTPPGGRGHGLARTLGPTLQSAMRKSSLKPLHWVKVTRAMQGSLWAELQKQVEANSHAEFDVNELESLFTIAPKAKAGSKSEGRGKSLGTKSDKVQLIDLRRANNTEIMLTKIKMPLPDMMSAALALDDSVLDADQIENLIKFCPTKEEMELLKWGQGSSWQV

SEQ ID NO: 174230 - protein, 2080 aa, Zea Mays
MDQYRYKNYLDNIILQLREQFADSSLMVLNFRDEGKSLISGIFSKYNITAKDYPCKYLGCPLLPLDIILHFLRLSERWLMLEGQQNILLMHCEKDGWPVLAFMLAGLLLYRKQYNGEQRTLDMVYKQAPKELLQMLTTLNPQPSHLRYLGYICRMDDGIGWPTQPIPFTLDCVILREIPNFDGVGGCRPIVRVYGQDIPTTDRSHSVISPPSKAKKHIRRYRQADNAPVKLNVGSCVQGDVVLECLHVDDGQGNERLMFRVMFNTFFIQSHILPLNFEDIDVPWDADHQFTKNFKAEVLFSEFDAESDASTEVAPDYDYDYDYDNDMDVASADEFFEAEEIFSNAESQDGNKDADTLSMVSTDYIRTPSAECWKNSPFSNFDLNIDIDGSQDNKADNLGLLLETVNDGKTCTSTEANILLNNETAVVKSTFTATIACTSTEANILLNDETAVVKSTFTATIDGDTDSGISSSTYKEDGCMFEKGSSKQDIRMGSNQDLSQIDNVLVKEVIILETNSTDDIQMIKEVIISEVTTPKQVVEGNMMETELDEAVHSSESTALGEDEDTKRPNTFFKKDEGQSARDEYAAYDNGIVIEREESRNKEKFTITGTDSLVAEPKDLPHLDSSNTSLELSSANENIDQLRACSSNVTAERRAGIDTSFSSSRSQSSNISCANILPEESNLIINHASTSVNANTDTTDSSRLVLKKKPFLPLATSSLFSPSSPRRNLLRAASTDLSFFSPSQTESKQNSVTSTSGRGDSDTSSVLPPFQLYTSLGSSSKMSLVHPTLRPIRTISSLPSLSFGTFIEMSMASSRSPKHQEHVRSPSIPQDQHLHPPMTEENDLHSGSLTLPASNQYGPQTPHPPPLPPPHDSCTQSYSSTIIYEPEQIRADGSCSYSPDYRQSVLNLGDSSLTSLSNSSIAATECPLGASDFVDEEVTSRPNIVTAMDVPFTNEDTNSLLHMTCSSPPKTLQRAEPPTLPPPPLPLVPPPSQLPLPTICSDSGSVPLVYSNPSSDCPYKEPTMLPEHKSDVPATSLEGHEASEVQFLQSDTAVELSPSEHSEYKVQHVVGSAEDTISSMSSYIPAAPPYPMFHIVTDNSSCSISAEQVNCEQPLDQTTLSIHLRPFEVEISQGETINGVLASIIDDKEHGGIPILQLPQKLPHSGEHMKSPPPPPPPPQPPPCHATVIPSLCLSSKPPSPTEHYENPPSSPPPFSRESCVVLPPLPAPLLNHPSLPGKHINLYPPPPPPPPTLHHIAPASPCSYQPSFYADIATQPTFSEDIVIVPPPHSKGVNIIPLPPPPPRTSETLSQPLDGGQSTGPASLLEVTKENPPPPLLPPEGQMGSPLSTLCGEIVNIPIPPPSLPGGHGEVPLSTPPRGCGAIPPPPPFTKGIGGITLPIGFHSGDLSFLQSTRESKGPSCLPPPPPPPPPPPPPPLSSNGHIGDLPPPPTSVFVEASIPLPPQTGCGGDPPPPPPTGGHVGPPPPPPPLGECAWDLQPPKACVRAPPPPPPPGGYAEVLMPPPPPRGYVGAPAPPPPPGGYAGAPPPPPPPGGYAGAPPPPPPPGGYAGAPPPPPPPGGYAGAPPPPPPPGGYAGAPPPPPSYGGIGGVPPPPPPFGGLGGTPPPPPPAGFRGGAPSPPPPPGGHGGPPPPPPRGHGSGPPPPPGAPSPPMPPGMSGGPPPPPGGRGMPTPPGGRGHGLARTLGPTLQSAMRKSSLKPLHWVKVTRAMQGSLWAELQKQVEANSHAEFDVNELESLFTIAPKAKAGSKSEGRGKSLGTKSDKVQLIDLRRANNTEIMLTKIKMPLPDMMSAALALDDSVLDADQIENLIKFCPTKEEMELLKNYSGDKEALGKCEHFFLELMKVPRVESKLKIFAFKIQFQSQIRDVRKNLQTVSSACEELRSSEKLKVIMKNILLIGNTLNQGTPRGQAVGFRLDSLLKLIETRATSGRMTLMHFLCKSLAEKSPEVMDFHEDLVHLEASSKLQLKALAEEQLAVVKGLEKVEQELTASESDGPVSDVFRKTLKEFIDCSSADVCSLSAFYSEVGKSADALALYFGEDPAKFPFEQGNIHAYRPMEMV

SEQ ID NO: 174231 - protein, 1117 aa, Zea Mays
MALFRRLFYRKPPDRLLEIADRVYVFDCCFSTETMDQYRYKNYLDNIILQLREQFADSSLMVLNFRDEGKSLISGIFSKYNITAKDYPCKYLGCPLLPLDIILHFLRLSERWLMLEGQQNILLMHCEKDGWPVLAFMLAGLLLYRKQYNGEQRTLDMVYKQAPKELLQMLTTLNPQPSHLRYLGYICRMDDGIGWPTQPIPFTLDCVILREIPNFDGVGGCRPIVRVYGQDIPTTDRSHSVISPPSKAKKHIRRYRQADNAPVKLNVGSCVQGDVVLECLHVDDGQGNERLMFRVMFNTFFIQSHILPLNFEDIDVPWDADHQFTKNFKAEVLFSEFDAESDASTEVAPDYDYDYDYDNDMDVASADEFFEAEEIFSNAESQDGNKDADTLSMVSTDYIRTPSAECWKNSPFSNFDLNIDIDGSQDNKADNLGLLLETVNDGKTCTSTEANILLNNETAVVKSTFTATIACTSTEANILLNDETAVVKSTFTATIDGDTDSGISSSTYKEDGCMFEKGSSKQDIRMGSNQDLSQIDNVLVKEVIILETNSTDDIQMIKEVIISEVTTPKQVVEGNMMETELDEAVHSSESTALGEDEDTKRPNTFFKKDEGQSARDEYAAYDNGIVIEREESRNKEKFTITGTDSLVAEPKDLPHLDSSNTSLELSSANENIDQLRACSSNVTAERRAGIDTSFSSSRSQSSNISCANILPEESNLIINHASTSVNANTDTTDSSRLVLKKKPFLPLATSSLFSPSSPRRNLLRAASTDLSFFSPSQTESKQNSVTSTSGRGDSDTSSVLPPFQLYTSLGSSSKMSLVHPTLRPIRTISSLPSLSFGTFIEMSMASSRSPKHQEHVRSPSIPQDQHLHPPMTEENDLHSGSLTLPASNQYGPQTPHPPPLPPPHDSCTQSYSSTIIYEPEQIRADGSCSYSPDYRQSVLNLGDSSLTSLSNSSIAATECPLGASDFVDEEVTSRPNIVTAMDVPFTNEDTNSLLHMTCSSPPKTLQRAEPPTLPPPPLPLVPPPSQLPLPTICSDSGSVPLVYSNPSSDCPYKEPTMLPEHKSDVPATSLEGHEASEVQFLQSDTAVELSPSEHSEYKVQHVVGSAEDTISTMLNSM

SEQ ID NO: 174232 - protein, 2086 aa, Zea Mays
MALFRRLFYRKPPDRLLEIADRVYVFDCCFSTETMDQYRYKNYLDNIILQLREQFADSSLMVLNFRDEGKSLISGIFSKYNITAKDYPCKYLGCPLLPLDIILHFLRLSERWLMLEGQQNILLMHCEKDGWPVLAFMLAGLLLYRKQYNGEQRTLDMVYKQAPKELLQMLTTLNPQPSHLRYLGYICRMDDGIGWPTQPIPFTLDCVILREIPNFDGVGGCRPIVRVYGQDIPTTDRSHSVISPPSKAKKHIRRYRQADNAPVKLNVGSCVQGDVVLECLHVDDGQGNERLMFRVMFNTFFIQSHILPLNFEDIDVPWDADHQFTKNFKAEVLFSEFDAESDASTEVAPDYDYDYDYDNDMDVASADEFFEAEEIFSNAESQDGNKDADTLSMVSTDYIRTPSAECWKNSPFSNFDLNIDIDGSQDNKADNLGLLLETVNDGKTCTSTEANILLNNETAVVKSTFTATIACTSTEANILLNDETAVVKSTFTATIDGDTDSGISSSTYKEDGCMFEKGSSKQDIRMGSNQDLSQIDNVLVKEVIILETNSTDDIQMIKEVIISEVTTPKQVVEGNMMETELDEAVHSSESTALGEDEDTKRPNTFFKKDEGQSARDEYAAYDNGIVIEREESRNKEKFTITGTDSLVAEPKDLPHLDSSNTSLELSSANENIDQLRACSSNVTAERRAGIDTSFSSSRSQSSNISCANILPEESNLIINHASTSVNANTDTTDSSRLVLKKKPFLPLATSSLFSPSSPRRNLLRAASTDLSFFSPSQTESKQNSVTSTSGRGDSDTSSVLPPFQLYTSLGSSSKMSLVHPTLRPIRTISSLPSLSFGTFIEMSMASSRSPKHQEHVRSPSIPQDQHLHPPMTEENDLHSGSLTLPASNQYGPQTPHPPPLPPPHDSCTQSYSSTIIYEPEQIRADGSCSYSPDYRQSVLNLGDSSLTSLSNSSIAATECPLGASDFVDEEVTSRPNIVTAMDVPFTNEDTNSLLHMTCSSPPKTLQRAEPPTLPPPPLPLVPPPSQLPLPTICSDSGSVPLVYSNPSSDCPYKEPTMLPEHKSDVPATSLEGHEASEVQFLQSDTAVELSPSEHSEYKVQHVVGSAEDTISKQVNCEQPLDQTTLSIHLRPFEVEISQGETINGVLASIIDDKEHGGIPILQLPQKLPHSGEHMKSPPPPPPPPQPPPCHATVIPSLCLSSKPPSPTEHYENPPSSPPPFSRESCVVLPPLPAPLLNHPSLPGKHINLYPPPPPPPPTLHHIAPASPCSYQPSFYADIATQPTFSEDIVIVPPPHSKGVNIIPLPPPPPRTSETLSQPLDGGQSTGPASLLEVTKENPPPPLLPPEGQMGSPLSTLCGEIVNIPIPPPSLPGGHGEVPLSTPPRGCGAIPPPPPFTKGIGGITLPIGFHSGDLSFLQSTRESKGPSCLPPPPPPPPPPPPPPLSSNGHIGDLPPPPTSVFVEASIPLPPQTGCGGDPPPPPPTGGHVGPPPPPPPLGECAWDLQPPKACVRAPPPPPPPGGYAEVLMPPPPPRGYVGAPAPPPPPGGYAGAPPPPPPPGGYAGAPPPPPPPGGYAGAPPPPPPPGGYAGAPPPPPPPGGYAGAPPPPPSYGGIGGVPPPPPPFGGLGGTPPPPPPAGFRGGAPSPPPPPGGHGGPPPPPPRGHGSGPPPPPGAPSPPMPPGMSGGPPPPPGGRGMPTPPGGRGHGLARTLGPTLQSAMRKSSLKPLHWVKVTRAMQGSLWAELQKQVEANSHAEFDVNELESLFTIAPKAKAGSKSEGRGKSLGTKSDKVQLIDLRRANNTEIMLTKIKMPLPDMMSAALALDDSVLDADQIENLIKFCPTKEEMELLKNYSGDKEALGKCEHFFLELMKVPRVESKLKIFAFKIQFQSQIRDVRKNLQTVSSACEELRSSEKLKVIMKNILLIGNTLNQGTPRGQAVGFRLDSLLKLIETRATSGRMTLMHFLCKSLAEKSPEVMDFHEDLVHLEASSKLQLKALAEEQLAVVKGLEKVEQELTASESDGPVSDVFRKTLKEFIDCSSADVCSLSAFYSEVGKSADALALYFGEDPAKFPFEQGNIHAYRPMEMV

SEQ ID NO: 174233 - protein, 245 aa, Zea Mays
MPTSRGTRAIWCYTYEKGLVDILKEHADIPMYKAQNGWTTEGWVNITKQFNETFPLAYFTKQQIQNKEKELKGNYKIIQDVLKINGVSWNKSLGMIIAEPKIWHEVIKGNAKVSKFKKKPFLLYEYMSSLYAEMKSAPSNLNQEEQEDASGKKRKQTQTTAKLVELLEFRKNHIEKSMKEKKEKEDDYCVEKCIDVVDSMKDLTDEQKADANELFQSEMNRRIFMKTKNLNVRLIWLKKKISQNQ

SEQ ID NO: 174234 - protein, 327 aa, Zea Mays
MENLVQDLQDELEMKEGLTVKELPNETSSEHDDDNSKPQVVDSEAMSKIEAELEAELARLELNITSKRLEEETSDFNEADKEFIGDIVCGELKADMVPRDVTDYSSECDYGRDSRESSPDYTCGANYPVSPRDLSIRLHKVIQRRLEDRVKELESSIAHRQKQAQLQMMVTDEIFSEPICSNSESGSSGRGSPIFIQEISSLAEPYCLNLSGDALEAYDEAYEEFMRIADSPCTTSTNGKAQATEDYLVDRGLIWGMEDSSTKLKEVPTWERVLKSTDPNRDQESDRDESDDEDDDCKVLIQQIVERTKQGSPVLVNAQKLLFSVDQ

SEQ ID NO: 174235 - protein, 121 aa, Zea Mays
MLALLLCPEARWLAAHHSALCRRRLKVMLLLSARTDSPSLCAECALSFHSVCSRFSAPCVAVGAIRTAPLPPCCPLPPRICLLATSGQHSAVDSSQPFYLCFCKPLASLFWYLTSCYCLKL

SEQ ID NO: 174236 - protein, 75 aa, Zea Mays
MVWGQISDRVSSSAENYLPLETTTRLPLPQTAPLILGDHSDSLGPSNHRCNQGPRAVTLLIALAHDDGNQRWCKL

SEQ ID NO: 174237 - protein, 593 aa, Zea Mays
MAGKGDGPAIGIDLGTTYSCVGVWQHDRVEIIANDQGNRTTPSYVAFTDSERLIGDAAKNQVAMNPINTVFDAKRLIGRRFSDASVQSDIKLWPFKVISGPGEKPMIVVQHKGEEKQFAAEEISSMVLIKMREIAEAYLGSTIKNAVVTVPAYFNDSQRQATKDAGVIAGLNVLRIINEPTAAAIAYGLDKKATSVGEKNVLIFDLGGGTFDVSLLTIEEGIFEVKATAGDTHLGGEDFDNRMVNHFVQEFKRKNKKDITGNPRALRRLRTACERAKRTLSSTAQTTIEIDSLYEGIDFYSTITRARFEELNMDLFRKCMEPVEKCLRDAKMLQDFFNGKELCKNINPDEAVAYGAAVQAAILSGEGNEKVQDLLLLDVTPLSLGLETAGGVMTVLIPRNTTIPTKKEQVFSTYSDNQPGVLIQVYEGERTRTRDNNLLGKFELSGIPPAPRGVPQITVCFDIDANGILNVSAEDKTTGQKNKITITNDKGRLSKEEIEKMVQDDEKIASKLPADDKKKIEDAIDAAISWLDANQLAEADEFEDKMKELESLCNPIIAKMYQGAGEDMGGAGGMDEDAPAGSGGPGPKIEEVD

SEQ ID NO: 174238 - protein, 105 aa, Zea Mays
MPKHWFNHKFDSKKIILLILYYYCLVRAMHTSGGGLVVNCLSRSLEQLNLLLLSSGINLAHHSPSQNPCMWSWVNQLKSIRFPILQLTRTSLRSTRRKLDILAFI

SEQ ID NO: 174239 - protein, 77 aa, Zea Mays
MRLDASLPADDDPSNETASHRPSIILNAVALGNIDAGKSAVWNSLIGHPVLPTEGENHASQTAGNLGAAESCAVVCW

SEQ ID NO: 174240 - protein, 357 aa, Zea Mays
MSPAAATTTFVAISIAVPNPTAPSRGRVRLPLGGVPAAPRRAVASMAVSAPRSGAATSFLERRESERALHFVKYQGLGNDFIMVDNRDSSVPKVTPEEAAKLCDRNFGIGADGVIFVMPGVNGADYTMRIFNSDGSEPEMCGNGVRCFARFIAEIENLQGTNRFTIHTGAGKIVPEIQSDGQVKVDMGEPILSGLDIPTKLLATKNKAVVQAELAVEGLTWHVTCVSMGNPHCVTFGANELKVLQVDDLKLSEIGPKFEHHEMFPARTNTEFVQVLSRSHLKMRVWERGAGLTVGATLACGTGACAVVVAAVLEGRAERKCVVDLPGGPLEIEWREDDNHVYMTGPAEVVFYGSVVH

SEQ ID NO: 174241 - protein, 193 aa, Zea Mays
MAANQRFTIHTGAGKIVPEIQSDGQVKVDMGEPILSGLDIPTKLLATKNKAVVQAELAVEGLTWHVTCVSMGNPHCVTFGANELKVDDLKLSEIGPKFEHHEMFPARTNTEFVQVLSRSHLKMRVWERGAGATLACGTGACAVVVAAVLEGRAERKCVVDLPGGPLEIEWREDDNHVYMTGPAEVVFYGSVVH

SEQ ID NO: 174242 - protein, 161 aa, Zea Mays
MRYLWMPHLVDATATADDEYHQHQAAAAGNIDGLLAGGDVDHVQHALAAGVAAAMASSSSDSLASEPYSYEDGGLLASLRAGDDMQLVMSGGGWAAAQAQEANDQGLWPSSSGHGLSSSVQAAAGGAGQFEDPELSGWVQGFSDSIITGNLWALEEIWKMQ

SEQ ID NO: 174243 - protein, 383 aa, Zea Mays
MIRGKKNFLPPHPLVMGFGILFRLDESSLASHLNERRVRGEDEALHEMEAESRKKQSNPESDEDIGSEGANKETHEDESNGQTTNIQQNNDLELPDLSSNIGTANSSELLPEIQAEETLDNGSSILKEETIEASVSSQLDDLLDKTLCLGPAKVSGKSSLLTSIPSSLAEDDDDLEVKRPTIRDKPYISKAERRKLKKGQVNDETATDSQNGEAVETPGTSKQEKGKAETKATDSKASQPDTSQQEKGKANTKATGSKLSQPGNSQQEKGKGSTHAGNAKVSRGQKGKLKKIKEKYAEQDEEEREIRMALLAVKMIRQKYVINAKRLDIFLAIAQKAHLRWTEMMAVLVEAETIRVPILLLLVATVLWTKTMFKKLVMKRKKS

SEQ ID NO: 174244 - protein, 680 aa, Zea Mays
MKKKQESKQEKTITAHDKAFKAAEKKTRLQLAQEKTVAAITHMRKVHWFEKFNWFISSENYLIISGRDAQQNELIVKRYMSKGDLYVHAELHGASSTIIKNHKPDTPIPPLTLNQAGCFTVCHSKAWDSKIVTSAWWVYPHQVSKTAPTGEYLTVGSFMIRGKKNFLPPHPLVMGFGILFRLDESSLASHLNERRVRGEDEALHEMEAESRKKQSNPESDEDIGSEGANKETHEDESNGQTTNIQQNNDLELPDLSSNIGTANSSELLPEIQAEETLDNGSSILKEETIEASVSSQLDDLLDKTLCLGPAKVSGKSSLLTSIPSSLAEDDDDLEVKRPTIRDKPYISKAERRKLKKGQVNDETATDSQNGEAVETPGTSKQEKGKAETKATDSKASQPDTSQQEKGKANTKATGSKLSQPGNSQQEKGKGSTHAGNAKVSRGQKGKLKKIKEKYAEQDEEEREIRMALLASSGKALRKDKPSQDVEETSVKESKPSAGEDDSSKICYKCKKAGHLSRDCPESTSEVDRNDGSISRSRDDTGTNTAPAGGNSPMDEDDVQEIGDEEKEKLIDLDYLTGNPLPNDILLYAVPVCAPYNALQTYKYRVKITPGTAKKGKAAKTAMSLFLHTPDATNREKELMKACTDPELVAAIVGNAKITAPGLTQLKQKQKQKGKKSAKQN

SEQ ID NO: 174245 - protein, 780 aa, Zea Mays
MAELIEYNLEDVDAAILAVRVSLANEMSWEALTRMIKEERKAGNPVAGLIDKLNFERNCITLLLSNNLDDMDEDEKTAPVEKVEVDIALSAHANARRWYEMKKKQESKQEKTITAHDKAFKAAEKKTRLQLAQEKTVAAITHMRKVHWFEKFNWFISSENYLIISGRDAQQNELIVKRYMSKGDLYVHAELHGASSTIIKNHKPDTPIPPLTLNQAGCFTVCHSKAWDSKIVTSAWWVYPHQVSKTAPTGEYLTVGSFMIRGKKNFLPPHPLVMGFGILFRLDESSLASHLNERRVRGEDEALHEMEAESRKKQSNPESDEDIGSEGANKETHEDESNGQTTNIQQNNDLELPDLSSNIGTANSSELLPEIQAEETLDNGSSILKEETIEASVSSQLDDLLDKTLCLGPAKVSGKSSLLTSIPSSLAEDDDDLEVKRPTIRDKPYISKAERRKLKKGQVNDETATDSQNGEAVETPGTSKQEKGKAETKATDSKASQPDTSQQEKGKANTKATGSKLSQPGNSQQEKGKGSTHAGNAKVSRGQKGKLKKIKEKYAEQDEEEREIRMALLASSGKALRKDKPSQDVEETSVKESKPSAGEDDSSKICYKCKKAGHLSRDCPESTSEVDRNDGSISRSRDDTGTNTAPAGGNSPMDEDDVQEIGDEEKEKLIDLDYLTGNPLPNDILLYAVPVCAPYNALQTYKYRVKITPGTAKKGKAAKTAMSLFLHTPDATNREKELMKACTDPELVAAIVGNAKITAPGLTQLKQKQKQKGKKSAKQN

SEQ ID NO: 174246 - protein, 63 aa, Zea Mays
MDLDDIGFGEDEGQNSKENDLKSGHHPTNESDQSNNKKKNGGDWHGSAANGTGKRVVSLLSLS

SEQ ID NO: 174247 - protein, 297 aa, Zea Mays
MKKLRHPNILLFMGAVTSPQRLCIVTEFLPRGSLFRLLQRSATKLGVRRHVHMALDIARGMNYLHHSSPPIIHRDLKSSNLLVDKNWTVKVADFGLSRLKRETFLTTKTGKGTPQWMAPEVLRNEPSDEKSDVYSYGVILWELVTQKIPWENLNSMQGFAATIFFKIMLVWVASTIPNCRGYAPISVGHWRSRFYEPKVGYPKRSRSSVEINYPELLGKRPAATAVVPGASGEAPRAAEALRHPAAEREEQRRGVKTEECNATLPSGGGLALKHFASQQHARSREGPEPPVLGPGGC

SEQ ID NO: 174248 - protein, 418 aa, Zea Mays
MNHQKVSDSSIAPDSQGAEHNLPSKNEASGSWSSYNNNSTSSASSTGSTNSSALYKVDHEADCLDYEILWEDLVIGEQIGQGSCGTVYHALWYGSDVAVKVFSRQEYSEDVILSFRQEVSLMKKLRHPNILLFMGAVTSPQRLCIVTEFLPRGSLFRLLQRSATKLGVRRHVHMALDIARGMNYLHHSSPPIIHRDLKSSNLLVDKNWTVKVADFGLSRLKRETFLTTKTGKGTPQWMAPEVLRNEPSDEKSDVYSYGVILWELVTQKIPWENLNSMQGFAATIFFKIMLVWVASTIPNCRGYAPISVGHWRSRFYEPKVGYPKRSRSSVEINYPELLGKRPAATAVVPGASGEAPRAAEALRHPAAEREEQRRGVKTEECNATLPSGGGLALKHFASQQHARSREGPEPPVLGPGGC

SEQ ID NO: 174249 - protein, 426 aa, Zea Mays
MNQSAENLFGYPASEALGQDALMLLVDSGDHNVVNDIFRRISMGESWTGKFPVKSKQGDRFSAVATNTPFYDEDGSLVGIICVSSDSRHLEQIFCKPPTSARPQSESSRTSCDGSCSNTSRRINLLNRSPFDPQIPLQSTFASRITNLATKVTNKVRSRVSTDDYGIEREGGSGESHCSDRGAKEEPTSSGTNTPRGNAPHGPFSTDENSPGKSTNPSSDELEGKVGLHKFLSSKAEALLNKKGISWPWKVRENDGPDERNHVILLHGDQENVMNHQKVSDSSIAPDSQGAEHNLPSKNEASGSWSSYNNNSTSSASSTGSTNSSALYKVDHEADCLDYEILWEDLVIGEQIGQGSCGTVYHALWYGSDVAVKVFSRQEYSEDVILSFRQEVSLMKKLRHPNILLFMGAVTSPQRLCIVTEFLPRL

SEQ ID NO: 174250 - protein, 443 aa, Zea Mays
MNQSAENLFGYPASEALGQDALMLLVDSGDHNVVNDIFRRISMGESWTGKFPVKSKQGDRFSAVATNTPFYDEDGSLVGIICVSSDSRHLEQIFCKPPTSARPQSESSRTSCDGSCSNTSRRINLLNRSPFDPQIPLQSTFASRITNLATKVTNKVRSRVSTDDYGIEREGGSGESHCSDRGAKEEPTSSGTNTPRGNAPHGPFSTDENSPGKSTNPSSDELEGKVGLHKFLSSKAEALLNKKGISWPWKVRENDGPDERNHVILLHGDQENVMNHQKVSDSSIAPDSQGAEHNLPSKNEASGSWSSYNNNSTSSASSTGSTNSSALYKVDHEADCLDYEILWEDLVIGEQIGQGSCGTVYHALWYGSDVAVKVFSRQEYSEDVILSFRQEVSLMKKLRHPNILLFMGAVTSPQRLCIVTEFLPRYVPTFFYGHTCLQVFLIL

SEQ ID NO: 174251 - protein, 561 aa, Zea Mays
MDSSGEELLKKIRELEVGQAQLKQEMSKLIPGAVERRRSQSVSPRRGAPVPPPTKAKAGPPGRLLSGGFEGGQRAWARGSASFPHSSPLHREGRATGAGNGSTSARLPERQYSRVLQSLGHSVHILDLDGRIIYWNQSAENLFGYPASEALGQDALMLLVDSGDHNVVNDIFRRISMGESWTGKFPVKSKQGDRFSAVATNTPFYDEDGSLVGIICVSSDSRHLEQIFCKPPTSARPQSESSRTSCDGSCSNTSRRINLLNRSPFDPQIPLQSTFASRITNLATKVTNKVRSRVSTDDYGIEREGGSGESHCSDRGAKEEPTSSGTNTPRGNAPHGPFSTDENSPGKSTNPSSDELEGKVGLHKFLSSKAEALLNKKGISWPWKVRENDGPDERNHVILLHGDQENVMNHQKVSDSSIAPDSQGAEHNLPSKNEASGSWSSYNNNSTSSASSTGSTNSSALYKVDHEADCLDYEILWEDLVIGEQIGQGSCGTVYHALWYGSDVAVKVFSRQEYSEDVILSFRQEVSLMKKLRHPNILLFMGAVTSPQRLCIVTEFLPRNC

SEQ ID NO: 174252 - protein, 747 aa, Zea Mays
MDSSGEELLKKIRELEVGQAQLKQEMSKLIPGAVERRRSQSVSPRRGAPVPPPTKAKAGPPGRLLSGGFEGGQRAWARGSASFPHSSPLHREGRATGAGNGSTSARLPERQYSRVLQSLGHSVHILDLDGRIIYWNQSAENLFGYPASEALGQDALMLLVDSGDHNVVNDIFRRISMGESWTGKFPVKSKQGDRFSAVATNTPFYDEDGSLVGIICVSSDSRHLEQIFCKPPTSARPQSESSRTSCDGSCSNTSRRINLLNRSPFDPQIPLQSTFASRITNLATKVTNKVRSRVSTDDYGIEREGGSGESHCSDRGAKEEPTSSGTNTPRGNAPHGPFSTDENSPGKSTNPSSDELEGKVGLHKFLSSKAEALLNKKGISWPWKVRENDGPDERNHVILLHGDQENVMNHQKVSDSSIAPDSQGAEHNLPSKNEASGSWSSYNNNSTSSASSTGSTNSSALYKVDHEADCLDYEILWEDLVIGEQIGQGSCGTVYHALWYGSDVAVKVFSRQEYSEDVILSFRQEVSLMKKLRHPNILLFMGAVTSPQRLCIVTEFLPRGSLFRLLQRSATKLGVRRHVHMALDIARGMNYLHHSSPPIIHRDLKSSNLLVDKNWTVKVADFGLSRLKRETFLTTKTGKGTPQWMAPEVLRNEPSDENYGVILWELVTQKIPWENLNSMQVIGAVGFMNQRLDIPSEVDPQWRSIILNCWESDPQQRPSFQELLERLRELQRRYAIQQRNAKNSVEE

SEQ ID NO: 174253 - protein, 795 aa, Zea Mays
MDSSGEELLKKIRELEVGQAQLKQEMSKLIPGAVERRRSQSVSPRRGAPVPPPTKAKAGPPGRLLSGGFEGGQRAWARGSASFPHSSPLHREGRATGAGNGSTSARLPERQYSRVLQSLGHSVHILDLDGRIIYWNQSAENLFGYPASEALGQDALMLLVDSGDHNVVNDIFRRISMGESWTGKFPVKSKQGDRFSAVATNTPFYDEDGSLVGIICVSSDSRHLEQIFCKPPTSARPQSESSRTSCDGSCSNTSRRINLLNRSPFDPQIPLQSTFASRITNLATKVTNKVRSRVSTDDYGIEREGGSGESHCSDRGAKEEPTSSGTNTPRGNAPHGPFSTDENSPGKSTNPSSDELEGKVGLHKFLSSKAEALLNKKGISWPWKVRENDGPDERNHVILLHGDQENVMNHQKVSDSSIAPDSQGAEHNLPSKNEASGSWSSYNNNSTSSASSTGSTNSSALYKVDHEADCLDYEILWEDLVIGEQIGQGSCGTVYHALWYGSDVAVKVFSRQEYSEDVILSFRQEVSLMKKLRHPNILLFMGAVTSPQRLCIVTEFLPRGSLFRLLQRSATKLGVRRHVHMALDIARGMNYLHHSSPPIIHRDLKSSNLLVDKNWTVKVADFGLSRLKRETFLTTKTGKGTPQWMAPEVLRNEPSDEKSDVYSYGVILWELVTQKIPWENLNSMQGHWRSRFYEPKVGYPKRSRSSVEINYPELLGKRPAATAVVPGASGEAPRAAEALRHPAAEREEQRRGVKTEECNATLPSGGGLALKHFASQQHARSREGPEPPVLGPGGC

SEQ ID NO: 174254 - protein, 752 aa, Zea Mays
MDSSGEELLKKIRELEVGQAQLKQEMSKLIPGAVERRRSQSVSPRRGAPVPPPTKAKAGPPGRLLSGGFEGGQRAWARGSASFPHSSPLHREGRATGAGNGSTSARLPERQYSRVLQSLGHSVHILDLDGRIIYWNQSAENLFGYPASEALGQDALMLLVDSGDHNVVNDIFRRISMGESWTGKFPVKSKQGDRFSAVATNTPFYDEDGSLVGIICVSSDSRHLEQIFCKPPTSARPQSESSRTSCDGSCSNTSRRINLLNRSPFDPQIPLQSTFASRITNLATKVTNKVRSRVSTDDYGIEREGGSGESHCSDRGAKEEPTSSGTNTPRGNAPHGPFSTDENSPGKSTNPSSDELEGKVGLHKFLSSKAEALLNKKGISWPWKVRENDGPDERNHVILLHGDQENVMNHQKVSDSSIAPDSQGAEHNLPSKNEASGSWSSYNNNSTSSASSTGSTNSSALYKVDHEADCLDYEILWEDLVIGEQIGQGSCGTVYHALWYGSDVAVKVFSRQEYSEDVILSFRQEVSLMKKLRHPNILLFMGAVTSPQRLCIVTEFLPRGSLFRLLQRSATKLGVRRHVHMALDIARGMNYLHHSSPPIIHRDLKSSNLLVDKNWTVKVADFGLSRLKRETFLTTKTGKGTPQWMAPEVLRNEPSDEKSDVYSYGVILWELVTQKIPWENLNSMQVIGAVGFMNQRLDIPSEVDPQWRSIILNCWESDPQQRPSFQELLERLRELQRRYAIQQRNAKNSVEE

SEQ ID NO: 174255 - protein, 61 aa, Zea Mays
MAGTREHASGVCGGPDKRVSRCTGSSSCPDRWPCSCPSGGARDRGSGPRPCRLMAAARIGG

SEQ ID NO: 174256 - protein, 160 aa, Zea Mays
MSILSVHHPLKSQDKSPQQAITLSCSRESSLKITGKNSLLLDDNADLALVKHVIEGPSLPLLVPVVHLPHASRDQTQGQSNEDLLHHTRALEGGMRNPAACHLLSCLLRSDAKRLEPAEVGEVVRAEGMKRGWGAEARRRGVGWCARTRRRRDKRLGDST

SEQ ID NO: 174257 - protein, 165 aa, Zea Mays
MSPFYLARGASKLVRRITSETSVELKILSDKWRLLLAGLIFQYIHGLAAHGVHYLHRPGPTLQDLGFMILPELGKERGYISETLFTFVFLTFVLWTFHPFILQTKRFYTVLIWRRVLAFLCASQFLRIITFYATQLPGPNYHCREGSPLARLPPPQNAAEVFLIN

SEQ ID NO: 174258 - protein, 312 aa, Zea Mays
MSPFYLARGASKLVRRITSETSVELKILSDKWRLLLAGLIFQYIHGLAAHGVHYLHRPGPTLQDLGFMILPLGKERGYISETLFTFVFLTFVLWTFHPFILQTKRFYTVLIWRRVLAFLCASQFLRIITFYATQLPGPNYHCREGSPLARLPPPQNAAEVFLINFPTGVIYGCGDLIFSSHMIFTLVFVITYQKYGSIRFCKMLAWCIAVAQSLLIICSRKHYSVDVVVAWYTVNLVVFFVDKKLTELPDRSVGSTSVLPVSARDKDTKLKEENTRLLNGNSMDSADRRPRTQMNGKQIENESHVDSETVKT

SEQ ID NO: 174259 - protein, 307 aa, Zea Mays
MSPFYLARGASKLVRRITSETSVELKILSDKWRLLLAGLIFQYIHGLAAHGVHYLHRPGPTLQDLGFMILPELGKERGYISETLFTFVFLTFVLWTFHPFILQTKRFYTVLIWRRASQFLRIITFYATQLPGPNYHCREGSPLARLPPPQNAAEVFLINFPTGVIYGCGDLIFSSHMIFTLVFVITYQKYGSIRFCKMLAWCIAVAQSLLIICSRKHYSVDVVVAWYTVNLVVFFVDKKLTELPDRSVGSTSVLPVSARDKDTKLKEENTRLLNGNSMDSADRRPRTQMNGKQIENESHVDSETVKT

SEQ ID NO: 174260 - protein, 187 aa, Zea Mays
MLGHRFPAALGLPRGLLLGRSVTRRSLSAMAGGEAEGPLGGFFDYMERLRNYERSGVPRGAGTDSDDGFDLGRMRRLLRRLGDPHTDFPAVHIAGTKGKGSTAALLSNIMRAQGYNVGSYSSPHLLTIRERISVGNDGGPVPVRLLSDLFDGAKEAIDEAIELENGSLTHFEVVCYCKYAHLFSYED

SEQ ID NO: 174261 - protein, 243 aa, Zea Mays
MHDINLQLLGDHQRQNAVTAACTALCLRSLGWEISDASIQAGLRETQLPGRSQFLTAEEASVLGLDGASTVLIDGAHTEESAKALSGVIEAVRPEGPLALVVGMASDKEHLAFAEQLLSGQTPDVVLLTEASIAGGSSRAMPASSLKEVWIAAARHRGIEYVDIGGISGTETLEHIADLLGSPSLSSRRKPMVIGCQDMGPFSWNLIIAASQLLESRGRAPGLICVTGSLHLVGAILQKLGRH

SEQ ID NO: 174262 - protein, 294 aa, Zea Mays
MLGHRFPAALGLPRGLLLGRSVTRRSLSAMAGGEAEGPLGGFFDYMERLRNYERSGVPRGAGTDSDDGFDLGRMRRLLRRLGDPHTDFPAVHIAGTKGKGSTAALLSNIMRAQGYNVGSYSSPHLLTIRERISVGNDGGPVPVRLLSDLFDGAKEAIDEAIELENGSLTHFEVFTALSFLLFSQENVDIAIIEAGLGGARDATNVIRSTELAASVITTVGREHLVALGGSLQSIAIAKSGIIKQGQPVVIGGPFSAVIEQIIRDRAFLTQSPVISACDPGIKSFTKCIDWDNVH

SEQ ID NO: 174263 - protein, 259 aa, Zea Mays
MLGHRFPAALGLPRGLLLGRSVTRRSLSAMAGGEAEGPLGGFFDYMERLRNYERSGVPRGAGTDSDDGFDLGRMRRLLRRLGDPHTDFPAVHIAGTKGKGSTAALLSNIMRAQGYNVGSYSSPHLLTIRERISVGNDGGPVPVRLLSDLFDGAKEAIDEAIELENGSLTHFEVFTALSFLLFSQENVDIAIIEAGLGGARDATNVIRSTELAASVITTVGREHLVALGGSLQSIAIAKSGIIKQGQPGILDTISCDICL

SEQ ID NO: 174264 - protein, 192 aa, Zea Mays
MYFLHFQVYRMDSTANALAMAKDPEAAFFKRLEGLQPCEVSALKSGTHIFAVYGDNFFKPASYMIEAMCAKSYEDTTERLKEIESKILAKRNDLRQFETEYRKALARFQEVTNRYTQEREAVDDMLRERDNIHCSFTTERTLANPVGVGSSSRYTIEQSIPESPENGSVDGRDKSGKKKWFNLNLNRSDKKA

SEQ ID NO: 174265 - protein, 73 aa, Zea Mays
MVLVGDGAASMRRSRNDDAADDTGVVPRAVDDGGGGTSRAATSDRRQLSGEDGGTTETIPPLTSLILSGRFVP

SEQ ID NO: 174266 - protein, 303 aa, Zea Mays
MHDQESKHEEKNDENSGSNPVEVHKHDLFQDKEHVEEVDQKSSSNHVEISAHDMCEDNEHVEKIDHVERIDQNSSRDPVKAIMQEMIKVCLVSGSVEKVEEEDSSKKDLEKEIAPKDNKDMEASDGSKLGVNGPETGGAVADTEEDDTVAETEDVVTDTEDTVTDTEDALAETEAEKGERAIADKGELEQDEKKDLVALPELASSPALSSLVKPTVVKKELDFPRPNETGMKTEQDYTNGELREHNDLVSKVQGEGGVATTMESRSSALMIILALIFALATGITIVVRLYSPSRATKLQMDLP

SEQ ID NO: 174267 - protein, 484 aa, Zea Mays
MEGGGWAVGGHALGAAQEPRGQQQHREEEKAAGAAAERKGAGAGGGGGMKFRVRARAPHGVGALLLIGGAAVVGAAVLAWRRSRHGNKGGSVDQPDRRLPAKVEGLDGGIVEDGKVQGGSLVQKLSQSNEILSVGNTDIGSGRLDGNASEESHQIHKDGEITADQSESKHDGKIDENSGINPAEVQMHDQHEEKNDENSGSNPVEVHKHDLDKEHVEEVDQKSSSNHVEISAHDMCEDNEHVEKIDHVERIDQNSSRDPVKAIMQEMIKVCLVSGSVEKVEEEDSSKKDLEKEIAPKDNKDMEASDGSKLGVNGPETGGAVADTEEDDTVAETEDVVTDTEDTVTDTEDALAETEAEKGERAIADKGELEQDEKKDLVALPELASSPALSSLVKPTVVKKELDFPRPNETGMKTEQDYTNGELREHNDLVSKVQGEGGVATTMESRSSALMIILALIFALATGITIVVRLYSPSRATKLQMDLP

SEQ ID NO: 174268 - protein, 661 aa, Zea Mays
MSREAQKLDCATGGGGGVGIGVLSLDLLGQVLDRLREPRDRKACRLVSRAFERSEAAHRRALRVLRREPLPRLLRAFPALERLDLSACASLDDASLAAAVAGAGGGLAGLRSVCLARANGVGWRGLEALVAACPKLEAVDLSHCVSAGDREAAALAAAAGLRELRLDKCLAVTDMGLAKVAVGCPRLEKLSLKWCREISDIGIDLLAKKCPELRSLNISYLKVGNGSLRSISSLERLEELAMVCCSCIDDEGLELLSKGSDSLQSVDVSRCDHVTSHGLASLIDGRNFLQKLYAADCLHEIGQRFVSKLATLKETLTTLKLDGLEVSDSLLEAIGESCNKLVEIGLSKCSGVTDEGISSLVARCSDLRTIDLTCCNLSTNNALDSIAGNCKMLECLRLESCSLINEKGLKRIATCCPNLKEIDLTDCGVDDAALEHLAKCSELRVLKLGLCSSISDKGIAFISSNCGKLVELDLYRSITDDGLAALANGCKRIKLLNLCYCNKITDTGLGHLGSLEELTNLELRCLVRITGIGISSVAIGCKNLIELDLKRCYSVDDAGLWALARYALNLRQLTISYCQVTGLGLCHLLSSLRCLQDIKMVHLSWVSIEGFEIALRAACGRLKKLKMLCGLKTVLSPELIQMLQACGCRIRWVNKPLVYKD

SEQ ID NO: 174269 - protein, 122 aa, Zea Mays
MARPAHRCQHVLPRCPPHLNPSSSSCISSPICSHGGALLTILTTTASPKPLSSSLNLLDKMPLSARCCPHVVSPAREFVKSSRVVDPCRHDVSASRFAGFAQRLRIVVKILARCCRCASRDA

SEQ ID NO: 174270 - protein, 60 aa, Zea Mays
MFSRQALVHLPPPCCFKIFITLYDALGDRSCVLNHCCISFLGKIDYPSLTPFYKKDFYDV

SEQ ID NO: 174271 - protein, 117 aa, Zea Mays
MHRELCSLVICFIPPMSTPQPPGSVFRSFVQSLVLKARGGDHRMVVNGTFNNTVLISLYTVILHLLSAGALPSWWSLRFKRNDAYHSTGMIPELDKKNLSQFFVVVRHRLLPLSVCG

SEQ ID NO: 174272 - protein, 50 aa, Zea Mays
MGIDWVDKDCSTESLPSPSVRFAWFVPTSSPYSTSKWSRNPELKRWKTLS

SEQ ID NO: 174273 - protein, 127 aa, Zea Mays
MNQLESSSVTRGRGKNKRIWTYYEDEELIKALYEISLDPKWKSEGGFKNGYCSVLENELKARLPGCGLSAIPHIESRVRHFRTKYGSIEVMLAKSGFNQMTMLFALPETLRREFILNMIADLYPFFR

SEQ ID NO: 174274 - protein, 108 aa, Zea Mays
MARLPLSTRTRKRNLTFRNVTSAIMLMYYYILALLVLSHKWKCWKIERRIKVKELRSQRMYHLICESDVKCINDLRMDRRTFHILCDMLRDVGGLRGTRNTPLEEIVA

SEQ ID NO: 174275 - protein, 149 aa, Zea Mays
MSPFGAVITPETLKYMSKYQGREITQVDCAREAMRLIHAEDKNLKAEDSAWELKKKFGNGVSTMVLVYNATGASLSLVDDGKDWMGSVYSSPIPDTFHNGQWIAFLHVKPGSLAQGSQAARVFRGRDVDGRTRDFVVAWYIPWDNIPTR

SEQ ID NO: 174276 - protein, 100 aa, Zea Mays
MCLRWRHARVNGLAAASRARTCYCVCAPLPAFKHAASSPTPSPLRRGGSRGRTRISLAAALSLLPRSLSSCSPPRPGSPAPHAVIGQSVGTLRSGGLLQS

SEQ ID NO: 174277 - protein, 392 aa, Zea Mays
MSSSPSPAATRLDLDGNPIAPLTICMIGAGGFIGSHLCEKLMAETHHTVLAVDVYCDKIRHLVDPAPPHLAGRISFHRLNIKNDSRLEGLIKMADLTINLAAICTPADYNTRPLDTIYSNFIDALPVVKYCSENSKRLIHFSTCEVYGKTIGSFLPKDHPLRKEPEFYVLKEDESPCIFGPIVKQRWSYACAKQLIERLVFGAENGLDFTIVRPFNWIGPRMDFIPGVDGPSEGVPRVLACFSNNLLRREPLKLVDGGQSQRTFVYIKDAIEAVVLMIENPARANGHIFNVGNPNNEVTVRELAQMMTEVYANVSGEAPLDEPMIDVSSSQFYGEGYDDSDKRIPDMTIINKQLGWNPKTPLKDLLETTLTYQHKTYKEAVKRQMSQASAST

SEQ ID NO: 174278 - protein, 87 aa, Zea Mays
MVQVFPMKRLLLLQRIYLSGFIGSIFCPNSNSFLLPTHTDNCATNFITIVELFTNHSQQLNKGQLKEYKVEDVLRRDVQNKVIFLIK

SEQ ID NO: 174279 - protein, 385 aa, Zea Mays
MRVPPGSHAYTSAAELNAPLRGKLICCSQVPPATAPSANGDCSDFYAGGVAVYSGLLWSTPCRDLPVLLAQPRSLPVIVTYRPNWEGGQYAGEDEPRFEALLLAMELGAEYVDVEFKVADKFMKYLSGKKPQNCKLIISAYDYKTTPSVHELLNLVAQIRATGADIVKIETTAADIVDTSRMFQVLAHCHVPIIGLVRKEHGFISRIICAKYGGYLTFASLENGKESTTEQPTVADLINKYKIRQIGPDTKVFGIIGNPVSHSKSPIVQNQAFRSVGFDAVFLPFLSDDLVQFLYTFSAPDYAGFSCTMPHKETALRCCDDVDPIARDIGAINTIIRRPDGKLVGYNTDYSGAISAIEDGIRGCHVPPFAILCFADLYMVHITAF

SEQ ID NO: 174280 - protein, 534 aa, Zea Mays
MRVPPGSHAYTSAAELNAPLRGKLICCSQVPPATAPSANGDCSDFYAGGVAVYSGLLWSTPCRDLPVLLAQPRSLPVIVTYRPNWEGGQYAGEDEPRFEALLLAMELGAEYVDVEFKVADKFMKYLSGKKPQNCKLIISAYDYKTTPSVHELLNLVAQIRATGADIVKIETTAADIVDTSRMFQVLAHCHEKQVPIIGLVRKEHGFISRIICAKYGGYLTFASLENGKESTTEQPTVADLINKYKIRQIGPDTKVFGIIGNPVSHSKSPIVQNQAFRSVGFDAVFLPFLSDDLVQFLYTFSAPDYAGFSCTMPHKETALRCCDDVDPIARDIGAINTIIRRPDGKLVGYNTDYSGAISAIEDGIRAPCAASQPTDSITSPLAGRLFVVIGAGGAGKALAYGAKEKGARVVIANRTFARAQELAHIIGGTALTLSELESYHPEKGMILANATSVGMHPNVDETPLSKHALKSYAVVFDAVFVPRETRLLREAAVCGATVIDGLEMLIRLVMVQFKLFTGGMTERLMREAILTKTH

SEQ ID NO: 174281 - protein, 355 aa, Zea Mays
MFQVLAHCHEKQVPIIGLVRKEHGFISRIICAKYGGYLTFASLENGKESTTEQPTVADLINKYKIRQIGPDTKVFGIIGNPVSHSKSPIVQNQAFRSVGFDAVFLPFLSDDLVQFLYTFSAPDYAGFSCTMPHKETALRCCDDVDPIARDIGAINTIIRRPDGKLVGYNTDYSGAISAIEDGIRAPCAASQPTDSITSPLAGRLFVVIGAGGAGKALAYGAKEKGARVVIANRTFARAQELAHIIGGTALTLSELESYHPEKGMILANATSVGMHPNVDETPLSKHALKSYAVVFDAVFVPRETRLLREAAVCGATVIDGLEMLIRLVMVQFKLFTGGMTAPERLMREAILTKTH

SEQ ID NO: 174282 - protein, 403 aa, Zea Mays
MRSQFHTSTHLQSQKSRRWPAAKTHVGFRRRRQELGDKATPAGATFMRVPPGSHAYTSAAELNAPLRGKLICCSQVPPATAPSANGDCSDFYAGGVAVYSGLLWSTPCRDLPVLLAQPRSLPVIVTYRPNWEGGQYAGEDEPRFEALLLAMELGAEYVDVEFKVADKFMKYLSGKKPQNCKLIISAYDYKTTPSVHELLNLVAQIRATGADIVKIETTAADIVDTSRMFQVLAHCHEKQVPIIGLVRKEHGFISRIICAKYGGYLTFASLENGKESTTEQPTVADLINKYKIRQIGPDTKVFGIIGNPVSHSKSPIVQNQAFRSVGFDAVFLPFLSDDLVQFLYTFSAPDYAGFSIFFDPINWAVVAQCPIKKLHLGAVTMSTLSPGTSELLIQSLEDLMENL

SEQ ID NO: 174283 - protein, 434 aa, Zea Mays
MRSQFHTSTHLQSQKSRRWPAAKTHVGFRRRRQELGDKATPAGATFMRVPPGSHAYTSAAELNAPLRGKLICCSQVPPATAPSANGDCSDFYAGGVAVYSGLLWSTPCRDLPVLLAQPRSLPVIVTYRPNWEGGQYAGEDEPRFEALLLAMELGAEYVDVEFKVADKFMKYLSGKKPQNCKLIISAYDYKTTPSVHELLNLVAQIRATGADIVKIETTAADIVDTSRMFQVLAHCHEKQVPIIGLVRKEHGFISRIICAKYGGYLTFASLENGKESTTEQPTVADLINKYKIRQIGPDTKVFGIIGNPVSHSKSPIVQNQAFRSVGFDAVFLPFLSDDLVQFLYTFSAPDYAGFSCTMPHKETALRCCDDVDPIARDIGAINTIIRRPDGKLVGYNTDYSGAISAIEDGIRGCHVPPFAILCFADLYMVHITAF

SEQ ID NO: 174284 - protein, 514 aa, Zea Mays
MLCSEEKYQQFQADQNLQYTCAACRGECSQIRDTEDAIRELWKRRDVADHELMATLRAAAALPSLEDVSPPYQNSDDEKLGAYALKNESRNTLKFSLKSNSSKPPPDTPEQEKIVFKSSGSNKKPSKKKSGQANKTVDGHDEIFLERRHAVKSSNSCLGDQTINENHDRSPFKNDDNVYVSSSTRSLEKNLKSPSMKAVANNADMIPKVKIKGSKVSSLHYKDGEENTPKNDTGKATKLVIHLGSRHKTRSGSPKSELSNSQREQDLGSIHGGKIDVTSQLKSSRNEVKERSVMKLVRDTGVQQRNSLLGDLGTSKKHATGKRSNALISGMENANETGTRNRSFAQKQSHSSQVENHGTADSPDSLKPSLLKLKFKRPHFEQLNTQASQPEEPTSWVSQQEEQLNVAKGQRSKRKRPSMEKADGLDGITPAKRHQQSTDEVMDANWILRKLGKDAIGKRIEVHLTSDGKWHQGMVSNVMGGTLCIRLDNGRSENVELGKQAIRLIASRSKGGKR

SEQ ID NO: 174285 - protein, 523 aa, Zea Mays
MFVKSGCILSVMASVRKSTNNSKLIKTFSTHVQHAVVNAPRDTEDAIRELWKRRDVADHELMATLRAAAALPSLEDVSPPYQNSDDEKLGAYALKNESRNTLKFSLKSNSSKPPPDTPEQEKIVFKSSGSNKKPSKKKSGQANKTVDGHDEIFLERRHAVKSSNSCLGDQTINENHDRSPFKNDDNVYVSSSTRSLEKNLKSPSMKAVANNADMIPKVKIKGSKVSSLHYKDGEENTPKNDTGKATKLVIHLGSRHKTRSGSPKSELSNSQREQDLGSIHGGKIDVTSQLKSSRNEVKERSVMKLVRDTGVQQRNSLLGDLGTSKKHATGKRSNALISGMENANETGTRNRSFAQKQSHSSQVENHGTADSPDSLKPSLLKLKFKRPHFEQLNTQASQPEEPTSWVSQQEEQLNVAKGQRSKRKRPSMEKADGLDGITPAKRHQQSTDEVMDANWILRKLGKDAIGKRIEVHLTSDGKWHQGMVSNVMGGTLCIRLDNGRSENVELGKQAIRLIASRSKGGKR

SEQ ID NO: 174286 - protein, 308 aa, Zea Mays
MAFHVACPITCRRVCDCELGFGAAAARKGGGGGAAAAVWAGTAAVLEGFLVDPWLLRPAGAVDEDAATVQVEVPPLEPDPEDGEDEARRAAAQRGAAAAEDLARRFESGAYGSPEAGEDEDEWDREDQGNAAVKVMCRLCFSGENEGSTKAAKMLPCKLCSKRYHRNCLKSWGEHRDLFHWSSWVCPSCRSCEVCRRPGDPNKLMFCKRCDGAYHCYCQQPSHKNVTHGPYLCPKHTRCHSCGSGVPGSGHSTRWFLGYTCCDACGRLFVKGNYCPICLKVYRDSEVIPMVCCDVCEKWVHIECDGIR

SEQ ID NO: 174287 - protein, 218 aa, Zea Mays
MAQDTKPPSTRICINSACKAVFNSDNTFCKRCSCCICHGFDDNKDPSLWLVCSSETGDQDCCGSSFHVECALKHRKAGCIELAQSIQLDGNYCCAACGKVIGILGFWKRQLVVAKDARRVDSLCSRIYLSHRLLDGTTRFKELHQIVEDAKAKLESEVGPLDGLNLKILQLHLWCWFSRKLFPRSIMLSKAINSGTGIAEKRLTQGSLLFSPKTKEGF

SEQ ID NO: 174288 - protein, 117 aa, Zea Mays
MGRLIVQHFYPKMVPIKPNNTCMHGEATTVGKNLSAESPGCGCFLFNYSSPQIRPDQDQTVEHAFASSMFVNFLLAVMDCNARTIICHSTHMHHQHLRGLFFLSRLSLSFIGKTTHE

SEQ ID NO: 174289 - protein, 83 aa, Zea Mays
MAIKLWTGQACGCRMPLNMFGLGIGGGCGFGLGLGWGFGNAFGCQYRSSRVQFQGIEFQKKAEGDDAPKVVSPELAQKSRPYG

SEQ ID NO: 174290 - protein, 281 aa, Zea Mays
MSARPPPPPRPRLALPPRSTAESLFTGAGDASPGPLTLASALFPSDADGGGGPGGASSSAAGAATFTQLLTGSLAPPPQQQQHEAQTGGGGVARAGPALSVAPPASSFAGASLFTVPPGLSPSGLLDSPGLLFSPAMGGFGMSHQQALAQVTAQATHSPLRMFDHLEQPSFSTAATTSGALHHMNSAASMAGISDMTMATANNENPSFQSAEASQRYQVNAPVDKPADDGYNWRKYGQKVVKGSDCPRSYYKCTHPNCPVKKKVPREIRTIYTGCLSKHMV

SEQ ID NO: 174291 - protein, 191 aa, Zea Mays
MALANKLGGLLKKATSSNPSVYQAIRCMSSKLFVGGISYQTDDHSLRDEFAKYGQVIEARIIIDRESGRSRGFGFVTYTSSEEASAAITALDGKTLDGRSIRVNHANEKTGGFRGGNFTAGGSDSFANSNFGSDSSFGGNGAGGFDATGGSTGDDGFSGTPDDNFGGNKNEETMDDIFKDDEPDSYADKRS

SEQ ID NO: 174292 - protein, 50 aa, Zea Mays
MQNLAFLSQIYKSFFILRFCIYGSFFQNIFTCLFAYSSSMNHVGEMDKTR

SEQ ID NO: 174293 - protein, 259 aa, Zea Mays
MGIDTNSAYVFQSWDATSISLSAACDLFMRFVTRTSHLEHEKFDAAKSRLIERGEKFGEISLKARKTIAMLSQDFIYDGCTILVHGYSRVVLEVLKLAASNRKLFRVLCTEGRPDRTGLRMSNELAALGIPVKVLIDSAVAYSIDEVDMVFVGADGVVESGGIINMMGTYQIALVAHTMDKPVYVAAESYKFARLYPLDQKDMTPAHRPIDFGVPIPIGVEVETSARDYTPPQYLTLLLTDLGVLTPSVVSDELIQLYL

SEQ ID NO: 174294 - protein, 111 aa, Zea Mays
MVHVNFYRNYGKTFKKPRRPYEKERLDAELKLVGEYGLRCKRELWRVQYALSRIRNAARHLLTLDEKNPRRIFEGWHGQVHSPCSCLDQAASHQGWQANCQRPIIHGEGGV

SEQ ID NO: 174295 - protein, 195 aa, Zea Mays
MLVSAYLNKEVNIFQGYYDAIERKDQSGKTSDDKLAEAKAEFRERQHGRAFSVFHVWMILRHEPKWAFRESKLKDPQETNNASSDAPINIDRPPGRKAEKEKARARKHGACDVDGDPFFEELKKMRESQEENDKDRKALDEKFYELEKIKVEAEQDRQVKEIMQTDTSTMDDESKQYFKLMKKEILIRRFGSSQP

SEQ ID NO: 174296 - protein, 426 aa, Zea Mays
MLISTDYIEKSNGAGPFSFESSGGSAGSLPKLHLNPYSWSKVSSVIYLDSPAGVGLSYSNNVSDYETGDFKTAADSHTFLLKWFQLYPEFLANPFYIAGESYAGVYVPTLSSEVVKGIHKGVKPVINFKGYMVGNGVCDTVFDGNALVPFAHGMALISESIYKEASTACQGNYWNSSSAKCDEALSKVETEIDGLNIYDILEPCYHAPADTKQAAVTPQAQSTSELPQSFKDLGVTSNKPLPVRTRMHGRAWPLRAPVRDGRVPSWQELAADVASTSSGVPCMSDEVATAWLNNNSVRSAIHAEPVSSIGPWELCTDKLDFDHDAGSMIIYHKNLTSQGYRAFIYSGDHDMCVPYTGTEAWTASLGYAVVDPWRQWIVDEQVAGYTQGYEKGLTFATIKGAGHTVPEYKPQEALAFYSRWLAGAKL

SEQ ID NO: 174297 - protein, 377 aa, Zea Mays
MPEAEWNDEHTRIVCELFEEQVRAGNRPNTHLNNIGYRQVAAKFQQRTELLYTKLQLKNKWDKFKNDYITWRKLLVVGKGLPWDTAKGTFVADEEWWKKINKELPGARKFRHGGLHHEDKLNVMFDYITSNGVDPSPPAPESPKNGVNHSPPAATGLPSAPDCALNGVDHSPVTAHGLPSGPYSPMNGMDQLPLPAHDLRSVQEIPMNGVNLDGLDNNTEDNDDIYQEPVFQYTSNRKKRPISFSATKKNKKNKAETALLMQAHLYRITELAQKAQDTFKKFSSQADLVPWPSIQDVMTLVWECGARCGSNEHFIATELFVSREQREMFLTMETAEERFQWLRRKYIVKYLSGAGPWVGIARCTAEAGIRWGGIVFM

SEQ ID NO: 174298 - protein, 366 aa, Zea Mays
MPEAEWNDEHTRIVCELFEEQVRAGNRPNTHLNNIGYRQVAAKFQQRTELLYTKLQLKNKWDKFKNDYITWRKLLVVGKGLPWDTAKGTFVADEEWWKKINKELPGARKFRHGGLHHEDKLNVMFDYITSNGVDPSPPAPESPKNGVNHSPPAATGLPSAPDCALNGVDHSPVTAHGLPSGPYSPMNGMDQLPLPAHDLRSVQEIPMNGVNLDGLDNNTEDNDDIYQEPVFQYTSNRKKRPISFSATKKNKKNKAETALLMQAHLYRITELAQKAQDTFKKFSSQADLVPWPSIQDVMTLVWECGARCGSNEHFIATELFVSREQREMFLTMETAEERFQWLRRKYIVKYLSGTRRAMGRHRSLHC

SEQ ID NO: 174299 - protein, 165 aa, Zea Mays
MGGAFRDGAAPDLCARKSFLSSLSIMRRPILRRRTTACLRVSKAPSSQGSLAAAHDGVPLVSGQGCAARASSSLKSSHSMSILSSTANLAEPWRPPSCCWSPPAACCSTAETLLRWSCSCTAAVPTTPPGTSSHGDAEAEKSALHCSSGKLGNANSSIANLFLSL

SEQ ID NO: 174300 - protein, 237 aa, Zea Mays
MDPANEQKRSLQQAAAHRPTPRTTREASRGESRRSGKHHPAEMTVLLSPSSSLFLAKPSAVAKGRAAAVTCFSGPSLSVGREDQEGVAVVVGRRALASAAAVASVLGFAGRGLAANQGLLAGRVPGLSEPDENGWRTYRRPDDKSGGHGVGWSPIIPYSFKVPDGWDENVEGKVLSSETAAHSGRTYYQFELEPPHVFITATAAGNRLYLFSVTANGLQWKRHYKDLKQIAQSFRVV

SEQ ID NO: 174301 - protein, 190 aa, Zea Mays
MVSTSGDTLSGPSTLATYRYVLVKGGDMPDSSDAIDVLFDGKEFTELRGLRIKTRNTHGTGCTLASCIAAELAKGATMLHAVQAAKKFVESALYHSKDLVIGNGPQGPFDHHFELKSPSYKMGSLQKFNPDDLFLYAVTDSGMNKKWGRSIKDAVKAAIEGGATIVQLRLSFLKTTKVPLVIQSVFIRFR

SEQ ID NO: 174302 - protein, 185 aa, Zea Mays
MCNAAESIYKLGPKYVLVKGGDMPDSSDAIDVLFDGKEFTELRGLRIKTRNTHGTGCTLASCIAAELAKGATMLHAVQAAKKFVESALYHSKDLVIGNGPQGPFDHHFELKSPSYKMGSLQKFNPDDLFLYAVTDSGMNKKWGRSIKDAVKAAIEGGATIVQLRLSFLKTTKVPLVIQSVFIRFR

SEQ ID NO: 174303 - protein, 298 aa, Zea Mays
MLRRVEPYVAYGYPNLKSVRELIYKRGYGKLNKQRIPLSNNQVIEEGLGKHNIICVEDLVHEIMTVGPHFKEANNFLCRAVMPGGDQVEGNKLQIGGVAEHEEDAGEGAPQATVLQNTGAFQNSERIGRSHRRQVPAEEFLKIIHLLNNSFQLARLYLRLRQSFLYFCLWWNQHGLGGDNVFGSCRPLHNGLVSLMHWSGKGKPWDRLDADKPCALDHTWKVYDLYIGENDSSSASTSSGVVLLYRSQGKVMNCGGGGSCGTCIVEIIDGKELLNERTSTENRYLKKVVVQRLPQWKR

SEQ ID NO: 174304 - protein, 457 aa, Zea Mays
MAGLLHLQSTLLPSASALRRRAGVPVPSSSRRRCRIEAKIREIFMPALSSTMTEGKIVSWTAAEGDRLAKGDPVVVVESDKADMDVETFYDGFLAAVLVPAGDSAPVGSAIALLAESEEDIPVAQSQAASFSSTSPLPSPPQETAAQEASPSPPPPPPPGPVSVSAPTPPLPATQGERVVASPYAKKLAKDLGVDLFSVTGSGPCGRIVAKDVEAALAAPKKAAPVTAPRPDVPLGSTVPFTTMQGAVSKNMVESLAIPTFRVGYTITTDALDQLYKKIKSKGVTMTALLAKATAMALVQHPVVNSSCRDGKSFTYSSSINIAVAVAIDGGLITPVLQDADKLDIYSLSRKWKELVDKARAKQLQPHEYNSGTFTLSNLGMFGVDRFDAILPPGTGAIMAVGASEPTIVGTKDGRIGIKNQMQVNVTADHRVIYGADLAAFLQTLAKIIEDPKDLTF

SEQ ID NO: 174305 - protein, 552 aa, Zea Mays
MHQGGKRKEYWRKPWACWSNPQSRVSSRSDEPKPSYPSSSSANPPRLRYSQGSARQLQQQHQQARSSHQPTTISSDSSQILPPTLHFPPLPRHPAMAGLLHLQSTLLPSASALRRRAGVPVPSSSRRRCRIEAKIREIFMPALSSTMTEGKIVSWTAAEGDRLAKGDPVVVVESDKADMDVETFYDGFLAAVLVPAGDSAPVGSAIALLAESEEDIPVAQSQAASFSSTSPLPSPPQETAAQEASPSPPPPPPPGPVSVSAPTPPLPATQGERVVASPYAKKLAKDLGVDLFSVTGSGPCGRIVAKDVEAALAAPKKAAPVTAPRPDVPLGSTVPFTTMQGAVSKNMVESLAIPTFRVGYTITTDALDQLYKKIKSKGVTMTALLAKATAMALVQHPVVNSSCRDGKSFTYSSSINIAVAVAIDGGLITPVLQDADKLDIYSLSRKWKELVDKARAKQLQPHEYNSGTFTLSNLGMFGVDRFDAILPPGTGAIMAVGASEPTIVGTKDGRIGIKNQMQVNVTADHRVIYGADLAAFLQTLAKIIEDPKDLTF

SEQ ID NO: 174306 - protein, 776 aa, Zea Mays
MPRKASSNSDARAKSRKRKRAAASASPSKQPDDHSDDSDTAAAANGDDETSRAASVNGGGGTLAGVGGDDDPVLDLRAAEVLSSSAEPVSAFPAAVRRAVSRPHPSVLAVIAAERAAASSDDAPVTPASVPVLENISHGQLQVISAMLPDHPSLSYDPDKPSTYVCTPPPLMEGCGVHKQFYDKLHIVPRHSDWFVPQTVHRLERQVVPQYFSGKSQGQTPEKYIMLRNKVIAKYLERPGKRLVFAECQGLVTSTPELYDLSRIVRFLESWGIINYLATGSVYRGPRTASSLIKEETTGELQLVSAPMKSIDGLILFDRPKCSIQANDISSLVSTSSAPFVVNHDGDSANLDEKIWERLSESSCSFCSQPLPSMHYESQKETDIALCSDCFHNAKFVTGHSSLDFQRVDAMKDGSDTDGDRWTDQETLLLLEGIEKFNDNWNHIAGHVGTKSKAQCIHHFIRLPVADGLLENIEVPEASLPSGMQSSGFLHSDSNGSTSGSQPGNQIPFINSANPVMSLVAFLAAEVGPRVAASCASAALSVLTREDSRMNAEGIDAMGHGTHLNYGPSSSISSETVKNAASCGLSAAATKSKLFADQEEREIQRLSATIINHQLKRLELKLKQFAEVETMLLKESERLDLMRQQLVTQRIRMLSTRFTSTGGTIPGGSSGMVSNLMNQASGLRPPLMMPGSVTQSSMPAMYANNMQGHPQMALLQQRQQMLSFGPRLPLSAINPGSSSSAPNMMFNHGMPNSAAPNHHPLLRSPSGDNSNVEISS

SEQ ID NO: 174307 - protein, 466 aa, Zea Mays
MKSIDGLILFDRPKCSIQANDISSLVSTSSAPFVVNHDGDSANLDEKIWERLSESSCSFCSQPLPSMHYESQKETDIALCSDCFHNAKFVTGHSSLDFQRVDAMKDGSDTDGDRWTDQETLLLLEGIEKFNDNWNHIAGHVGTKSKAQCIHHFIRLPVADGLLENIEVPEASLPSGMQSSGFLHSDSNGSTSGSQPGNQIPFINSANPVMSLVAFLAAEVGPRVAASCASAALSVLTREDSRMNAEGIDAMGHGTHLNYGPSSSISSETVKNAASCGLSAAATKSKLFADQEEREIQRLSATIINHQLKRLELKLKQFAEVETMLLKESERLDLMRQQLVTQRIRMLSTRFTSTGGTIPGGSSGMVSNLMNQASGLRPPLMMPGSVTQSSMPAMYANNMQGHPQMALLQQRQQMLSFGPRLPLSAINPGSSSSAPNMMFNHGMPNSAAPNHHPLLRSPSGDNSNVG

SEQ ID NO: 174308 - protein, 749 aa, Zea Mays
MPRKASSNSDARAKSRKRKRAAASASPSKQPDDHSDDSDTAAAANGDDETSRAASVNGGGGTLAGVGGDDDPVLDLRAAEVLSSSAEPVSAFPAAVRRAVSRPHPSVLAVIAAERAAASSDDAPVTPASVPVLENISHGQLQVISAMLPDHPSLSYDPDKPSTYVCTPPPLMEGCGVHKQFYDKLHIVPRHSDWFVPQTVHRLERQVVPQYFSGKSQGQTPEKYIMLRNKVIAKYLERPGKRLVFAECQGLVTSTPELYDLSRIVRFLESWGIINYLATGSVYRGPRTASSLIKEETTGELQLVSAPMKSIDGLILFDRPKCSIQANDISSLVSTSSAPFVVNHDGDSANLDEKIWERLSESSCSFCSQPLPSMHYESQKETDIALCSDCFHNAKFVTGHSSLDFQRVDAMKDGSDTDGDRWTDQETLLLLEGIEKFNDNWNHIAGHVGTKSKAQCIHHFIRLPVADGLLENIEVPEASLPSGMQSSGFLHSDSNGSTSAAEVGPRVAASCASAALSVLTREDSRMNAEGIDAMGHGTHLNYGPSSSISSETVKNAASCGLSAAATKSKLFADQEEREIQRLSATIINHQLKRLELKLKQFAEVETMLLKESERLDLMRQQLVTQRIRMLSTRFTSTGGTIPGGSSGMVSNLMNQASGLRPPLMMPGSVTQSSMPAMYANNMQGHPQMALLQQRQQMLSFGPRLPLSAINPGSSSSAPNMMFNHGMPNSAAPNHHPLLRSPSGDNSNVG

SEQ ID NO: 174309 - protein, 405 aa, Zea Mays
MPRKASSNSDARAKSRKRKRAAASASPSKQPDDHSDDSDTAAAANGDDETSRAASVNGGGGTLAGVGGDDDPVLDLRAAEVLSSSAEPVSAFPAAVRRAVSRPHPSVLAVIAAERAAASSDDAPVTPASVPVLENISHGQLQVISAMLPDHPSLSYDPDKPSTYVCTPPPLMEGCGVHKQFYDKLHIVPRHSDWFVPQTVHRLERQVVPQYFSGKSQGQTPEKYIMLRNKVIAKYLERPGKRLVFAECQGLVTSTPELYDLSRIVRFLESWGIINYLATGSVYRGPRTASSLIKEETTGELQLVSAPMKSIDGLILFDRPKCSIQANDISSLVSTSSAPFVVNHDGDSANLDEKIWERLSESSCSFCSQPLPSMHYESQKEVMLGQNQKHNVFTISFVSRWQMVC

SEQ ID NO: 174310 - protein, 253 aa, Zea Mays
MGNVSGRAEDLVDADIDDGNNMRRASSSSAGYVRGGGSSSSPPASPPRPHSPRMFVPQQEDSDGPPQKKIPTLLTCTLGGRNIYVEGSWDNWTSKKLVEKSGKDHTILLMLSSGVHRYRFIVDGERRFIPDLPCETDNVGQILNLVDVHDFVPDSVESVSELMAPPSPDSSYGFHVPGEKEFSKEPPQLPAQLYLGVLNSRSTEEGCARPRHVVLDHLYIEKGWGAHPLVALSYTHRFRSKYVTCVLYKAIER

SEQ ID NO: 174311 - protein, 259 aa, Zea Mays
MGNVSGRAEDLVDADIDDGNNMRRASSSSAGYVRGGGSSSSPPASPPRPHSPRMFVPQILMNQQQEDSDGPPQKKIPTLLTCTLGGRNIYVEGSWDNWTSKKLVEKSGKDHTILLMLSSGVHRYRFIVDGERRFIPDLPCETDNVGQILNLVDVHDFVPDSVESVSELMAPPSPDSSYGFHVPGEKEFSKEPPQLPAQLYLGVLNSRSTEEGCARPRHVVLDHLYIEKGWGAHPLVALSYTHRFRSKYVTCVLYKAIER

SEQ ID NO: 174312 - protein, 236 aa, Zea Mays
MHGLYGGMLLLISCKNLVARKFLDLDALLSHAYDTCKAGLKTKHLGFHKALCVLMGWNWHVAPDTSKSHHSIPSEEVNAMRGDLMLWPPVVVIHNSSTGHEAKDTDAKIVSIEEIEGVLADIGVAHEKARVSHGRSANQSVFLVKFQPTISGFQEAMRVHTHFSTRNHGKEEFQLMKGSKGKKAASTDSLEELLYAHIGVVEDLGLLDEGTKKRCKVMRKKEIEANAEATLNLEVY

SEQ ID NO: 174313 - protein, 519 aa, Zea Mays
MAGAPGVGPGAGGGGGAAAGLKTYFKTPEGRYKLQYEKAHSAVLHYSHGGKTVSQLTVAYLKEKPASQGSQPSTPSASSGMRSAAARLLGTGNGSKALSFGGGNGASRAVAGSSRVGGGLGTPTGLGGSQGGTNYDGKGTYIVFNAADTLFISDLNSQEKDPLKSIHFSNSNPLCHAFDPEAKEGHDLIIGMGSGDVYSMSLRQQLQDPGRKPVAALHYNKGDKDVSPNGRHDQGSIGTCLNKDGNTDCTFPAVKDQSQFMVAHAKSSKSNPVARWHICQGSINAISFSPDGAYLATVGRDGYLRVFDFSKEQLIFGGRSYYGALLCCTWSSDGKYLLTGGEDDLVQVSGVAFDSYWSPPSSDGNGENVYRFGSVGQDTQLLLWDLALDEIVVPLRHPSSASPTFSSGSPSTHWDNACPPTGVLQPSPRMRDVPKLSPLVAHRVHADPLSGMVFTSESILTICREGLIKIWVRPEQSENNQQSNSSEFALGPASKDRAITSSNKASSSSFKKLPPVLVT

SEQ ID NO: 174314 - protein, 270 aa, Zea Mays
MVAHAKSSKSNPVARWHICQGSINAISFSPDGAYLATVGRDGYLRVFDFSKEQLIFGGRSYYGALLCCTWRGGEDDLVQVWGMDDRKIVAWGEGHNSWVSGVAFDSYWSPPSSDGNGENVYRFGSVGQDTQLLLWDLALDEIVVPLRHPSSASPTFSSGSPSTHWDNACPPTGVLQPSPRMRDVPKLSPLVAHRVHADPLSGMVFTSESILTICREGLIKIWVRPEQSENNQQSNSSEFALGPASKDRAITSSNKASSSSFKKLPPVLVT

SEQ ID NO: 174315 - protein, 564 aa, Zea Mays
MAGAPGVGPGAGGGGGAAAGLKTYFKTPEGRYKLQYEKAHSAVLHYSHGGKTVSQLTVAYLKEKPASQGSQPSTPSASSGMRSAAARLLGTGNGSKALSFGGGNGASRAVAGSSRVGGGLGTPTGLGGSQGGTNYDGKGTYIVFNAADTLFISDLNSQEKDPLKSIHFSNSNPLCHAFDPEAKEGHDLIIGMGSGDVYSMSLRQQLQDPGRKPVAALHYNKGDKDVSPNGRHDQGSIGTCLNKDGNTDCTFPAVKDQSQFMVAHAKSSKSNPVARWHICQGSINAISFSPDGAYLATVGRDGYLRVFDFSKEQLIFGGRSYYGALLCCTWSSDGKYLLTGGEDDLVQVWGMDDRKIVAWGEGHNSWVSGVAFDSYWSPPSSDGNGENVYRFGSVGQIRDKNYFFSVLMGLFSHDVLKVIYVFDTQLLLWDLALDEIVVPLRHPSSASPTFSSGSPSTHWDNACPPTGVLQPSPRMRDVPKLSPLVAHRVHADPLSGMVFTSESILTICREGLIKIWVRPEQSENNQQSNSSEFALGPASKDRAITSSNKASSSSFKKLPPVLVT

SEQ ID NO: 174316 - protein, 242 aa, Zea Mays
MAGAPGVGPGAGGGGGAAAGLKTYFKTPEGRYKLQYEKAHSAVLHYSHGGKTVSQLTVAYLKEKPASQGSQPSTPSASSGMRSAAARLLGTGNGSKALSFGGGNGASRAVAGSSRVGGGLGTPTGLGGSQGGTNYDGKGTYIVFNAADTLFISDLNSQEKDPLKSIHFSNSNPLCHAFDPEAKEGHDLIIGMGSGDVYSMSLRQQLQDPGRKPVAALHYNKGDKDVSPNGSRCTSVAWGARA

SEQ ID NO: 174317 - protein, 267 aa, Zea Mays
MAGAPGVGPGAGGGGGAAAGLKTYFKTPEGRYKLQYEKAHSAVLHYSHGGKTVSQVRMGTGKCASARGIYADCCGGWMLLLTVAYLKEKPASQGSQPSTPSASSGMRSAAARLLGTGNGSKALSFGGGNGASRAVAGSSRVGGGLGTPTGLGGSQGGTNYDGKGTYIVFNAADTLFISDLNSQEKDPLKSIHFSNSNPLCHAFDPEAKEGHDLIIGMGSGDVYSMSLRQQLQDPGRKPVAALHYNKGDKDVSPNGSRCTSVAWGARA

SEQ ID NO: 174318 - protein, 533 aa, Zea Mays
MAGAPGVGPGAGGGGGAAAGLKTYFKTPEGRYKLQYEKAHSAVLHYSHGGKTVSQVRMGTGKCASARGIYADCCGGWMLLLTVAYLKEKPASQGSQPSTPSASSGMRSAAARLLGTGNGSKALSFGGGNGASRAVAGSSRVGGGLGTPTGLGGSQGGTNYDGKGTYIVFNAADTLFISDLNSQEKDPLKSIHFSNSNPLCHAFDPEAKEGHDLIIGMGSGDVYSMSLRQQLQDPGRKPVAALHYNKGDKDVSPNGRHDQGSIGTCLNKDGNTDCTFPAVKDQSQFMVAHAKSSKSNPVARWHICQGSINAISFSPDGAYLATVGRDGYLRVFDFSKEQLIFGGRSYYGALLCCTWSSDGKYLLTGGEDDLVQVWGMDDRKIVAWGEGHNSWDTQLLLWDLALDEIVVPLRHPSSASPTFSSGSPSTHWDNACPPTGVLQPSPRMRDVPKLSPLVAHRVHADPLSGMVFTSESILTICREGLIKIWVRPEQSENNQQSNSSEFALGPASKDRAITSSNKASSSSFKKLPPVLVT

SEQ ID NO: 174319 - protein, 339 aa, Zea Mays
MAGAPGVGPGAGGGGGAAAGLKTYFKTPEGRYKLQYEKAHSAVLHYSHGGKTVSQLTVAYLKEKPASQGSQPSTPSASSGMRSAAARLLGTGNGSKALSFGGGNGASRAVAGSSRVGGGLGTPTGLGGSQGGTNYDGKGTYIVFNAADTLFISDLNSQEKDPLKSIHFSNSNPLCHAFDPEAKEGHDLIIGMGSGDVYSMSLRQQLQDPGRKPVAALHYNKGDKDVSPNGRHDQGSIGTCLNKDGNTDCTFPAVKDQSQFMVAHAKSSKSNPVARWHICQGSINAISFSPDGAYLATVGRDGYLRVFDFSKEQLIFGGRSYYGALLCCTWRWKISINRW

SEQ ID NO: 174320 - protein, 304 aa, Zea Mays
MVAHAKSSKSNPVARWHICQGSINAISFSPDGAYLATVGRDGYLRVFDFSKEQLIFGGRSYYGALLCCTWSSDGKYLLTGGEDDLVQVWGMDDRKIVAWGEGHNSWVSGVAFDSYWSPPSSDGNGENVYRFGSVGQIRDKNYFFSVLMGLFSHDVLKVIYVFDTQLLLWDLALDEIVVPLRHPSSASPTFSSGSPSTHWDNACPPTGVLQPSPRMRDVPKLSPLVAHRVHADPLSGMVFTSESILTICREGLIKIWVRPEQSENNQQSNSSEFALGPASKDRAITSSNKASSSSFKKLPPVLVT

SEQ ID NO: 174321 - protein, 544 aa, Zea Mays
MAGAPGVGPGAGGGGGAAAGLKTYFKTPEGRYKLQYEKAHSAVLHYSHGGKTVSQVRMGTGKCASARGIYADCCGGWMLLLTVAYLKEKPASQGSQPSTPSASSGMRSAAARLLGTGNGSKALSFGGGNGASRAVAGSSRVGGGLGTPTGLGGSQGGTNYDGKGTYIVFNAADTLFISDLNSQEKDPLKSIHFSNSNPLCHAFDPEAKEGHDLIIGMGSGDVYSMSLRQQLQDPGRKPVAALHYNKGDKDVSPNGRHDQGSIGTCLNKDGNTDCTFPAVKDQSQFMVAHAKSSKSNPVARWHICQGSINAISFSPDGAYLATVGRDGYLRVFDFSKEQLIFGGRSYYGALLCCTWSSDGKYLLTGGEDDLVQVSGVAFDSYWSPPSSDGNGENVYRFGSVGQDTQLLLWDLALDEIVVPLRHPSSASPTFSSGSPSTHWDNACPPTGVLQPSPRMRDVPKLSPLVAHRVHADPLSGMVFTSESILTICREGLIKIWVRPEQSENNQQSNSSEFALGPASKDRAITSSNKASSSSFKKLPPVLVT

SEQ ID NO: 174322 - protein, 304 aa, Zea Mays
MEICTCMIKTRMGTQTVRFQLSRISLSLWLHMQSRSNPVARWHICQGSINAISFSPDGAYLATVGRDGYLRVFDFSKEQLIFGGRSYYGALLCCTWSSDGKYLLTGGEDDLVQVWGMDDRKIVAWGEGHNSWVSGVAFDSYWSPPSSDGNGENVYRFGSVGQDTQLLLWDLALDEIVVPLRHPSSASPTFSSGSPSTHWDNACPPTGVLQPSPRMRDVPKLSPLVAHRVHADPLSGMVFTSESILTICREGLIKIWVRPEQSENNQQSNSSEFALGPASKDRAITSSNKASSSSFKKLPPVLVT

SEQ ID NO: 174323 - protein, 545 aa, Zea Mays
MAGAPGVGPGAGGGGGAAAGLKTYFKTPEGRYKLQYEKAHSAVLHYSHGGKTVSQLTVAYLKEKPASQGSQPSTPSASSGMRSAAARLLGTGNGSKALSFGGGNGASRAVAGSSRVGGGLGTPTGLGGSQGGTNYDGKGTYIVFNAADTLFISDLNSQEKDPLKSIHFSNSNPLCHAFDPEAKEGHDLIIGMGSGDVYSMSLRQQLQDPGRKPVAALHYNKGDKDVSPNGRHDQGSIGTCLNKDGNTDCTFPAVKDQSQFMVAHAKSSKSNPVARWHICQGSINAISFSPDGAYLATVGRDGYLRVFDFSKEQLIFGGRSYYGALLCCTWSSDGKYLLTGGEDDLVQVSGVAFDSYWSPPSSDGNGENVYRFGSVGQIRDKNYFFSVLMGLFSHDVLKVIYVFDTQLLLWDLALDEIVVPLRHPSSASPTFSSGSPSTHWDNACPPTGVLQPSPRMRDVPKLSPLVAHRVHADPLSGMVFTSESILTICREGLIKIWVRPEQSENNQQSNSSEFALGPASKDRAITSSNKASSSSFKKLPPVLVT

SEQ ID NO: 174324 - protein, 311 aa, Zea Mays
MEICTCMIKTRMGTQTVRFQLSRISLSLWLHMQSRSNPVARWHICQGSINAISFSPDGAYLATVGRDGYLRVFDFSKEQLIFGGRSYYGALLCCTWSSDGKYLLTGGEDDLVQVSGVAFDSYWSPPSSDGNGENVYRFGSVGQIRDKNYFFSVLMGLFSHDVLKVIYVFDTQLLLWDLALDEIVVPLRHPSSASPTFSSGSPSTHWDNACPPTGVLQPSPRMRDVPKLSPLVAHRVHADPLSGMVFTSESILTICREGLIKIWVRPEQSENNQQSNSSEFALGPASKDRAITSSNKASSSSFKKLPPVLVT

SEQ ID NO: 174325 - protein, 370 aa, Zea Mays
MAGAPGVGPGAGGGGGAAAGLKTYFKTPEGRYKLQYEKAHSAVLHYSHGGKTVSQLTVAYLKEKPASQGSQPSTPSASSGMRSAAARLLGTGNGSKALSFGGGNGASRAVAGSSRVGGGLGTPTGLGGSQGGTNYDGKGTYIVFNAADTLFISDLNSQEKDPLKSIHFSNSNPLCHAFDPEAKEGHDLIIGMGSGDVYSMSLRQQLQDPGRKPVAALHYNKGDKDVSPNGRHDQGSIGTCLNKDGNTDCTFPAVKDQSQFMVAHAKSSKSNPVARWHICQGSINAISFSPDGAYLATVGRDGYLRVFDFSKEQLIFGGRSYYGALLCCTWSSDGKYLLTGGEDDLVQVWGMDDRKIVAWGEGHNSWWSCF

SEQ ID NO: 174326 - protein, 205 aa, Zea Mays
MTCAKSIQMFMLFNQLFRSEECILLSVIGTSPHLRLPWKSRIETHLLISVHMGSKYLTHFHQELTIQELHLFSEIVSGRPKFEIARTFSALLQLVNSRSVDLDKGKATNELVCYTAENPFHVRLIGPNRRPEMEARFARKRVKSPLQNAGKVRESSLAQHECPNKPLCKNGKITVTTATKLTQDGKRRRRSSAHLMQPINLESSG

SEQ ID NO: 174327 - protein, 138 aa, Zea Mays
MKRPNGAELQYYQKLNRLLLELEQRSGGVSEESYVTSDLLYSFGSPIIWPLLYCSGLLSRLYKLYYVICCRLASWPLFRCSQALCSSFCTQSSGRADLQNNRRHVSDMAAQLLPLTALYLNCIDLPTTSLHPTWCCQQ

SEQ ID NO: 174328 - protein, 136 aa, Zea Mays
MKRPNELQYYQKLNRLLLELEQRSGGVSEESYVTSDLLYSFGSPIIWPLLYCSGLLSRLYKLYYVICCRLASWPLFRCSQALCSSFCTQSSGRADLQNNRRHVSDMAAQLLPLTALYLNCIDLPTTSLHPTWCCQQ

SEQ ID NO: 174329 - protein, 673 aa, Zea Mays
MTKVDFCAKFDTCLRINLKGNSKVTGLSYCVDDESWRILEKDVQSLLQQGLTDRTKMIRALWRSTPSEWKIVEGFSEFGSSPLLVGMMVSSLEKSFRLVDIGPNPENRVEAVKFRKFWGEKAELRRFKDGNIAESTVWECQSWEKHTIIKRIADYVLMKHLSLQKDDLIHVVDQLDFCLLVDGQDPVSSSGALLEAFDTIAKQLRLLDDIPLKISTVQPLDSAFRHTSVFPPEPHPLAYGRNSQRLPKFATTCIRSLEVMIQLEGSGNWPLDPVAMEKTKTAFLLKIGESLEDRGMFVSASENEVNVLTSGYSFLLKIFHERGLVMQKPVGDDKTQSVLSEDKMLFQRSQHSSMINGLHGRYQVYGPVVRLAKRWISAHLFSSFISEEAVELVVAHIFLKPFPFHAPSSRVAGFLRFLRLLSSFDWIFSPMVIDINNDFNLMDEKEINDNFMLSRKSYERNPHDIEPAMFLATSYDKTSEAWTKQSPSKSVLKRVAAYAKSSAELLTNLMLHGPSGEYTWECLFRTPMSNYDAVILLHQEKLCCPHHVLFPAENPDGKLVVWGKPSKDFCPYMPLNKGAVKGLHDAREKLLVNFDPTTYFLRDLKCAFSKTFKLWYGSVGGDAVGLTWENPKKRGREEADEAAPEPTSILKEVGDVGKGLVRGVYLVKAPKFQ

SEQ ID NO: 174330 - protein, 734 aa, Zea Mays
MKKRTVTKEDIATCLKTFDVAVFDISGHINLAFRMTRSAFLELQDEAVCALSCLDKCRDGGLEELFMTKVDFCAKFDTCLRINLKGNSKVTGLSYCVDDESWRILEKDVQSLLQQGLTDRTKMIRALWRSTPSEWKIVEGFSEFGSSPLLVGMMVSSLEKSFRLVDIGPNPENRVEAVKFRKFWGEKAELRRFKDGNIAESTVWECQSWEKHTIIKRIADYVLMKHLSLQKDDLIHVVDQLDFCLLVDGQDPVSSSGALLEAFDTIAKQLRLLDDIPLKISTVQPLDSAFRHTSVFPPEPHPLAYGRNSQRLPKFATTCIRSLEVMIQLEGSGNWPLDPVAMEKTKTAFLLKIGESLEDRGMFVSASENEVNVLTSGYSFLLKIFHERGLVMQKPVGDDKTQSVLSEDKMLFQRSQHSSMINGLHGRYQVYGPVVRLAKRWISAHLFSSFISEEAVELVVAHIFLKPFPFHAPSSRVAGFLRFLRLLSSFDWIFSPMVIDINNDFNLMDEKEINDNFMLSRKSYERNPHDIEPAMFLATSYDKTSEAWTKQSPSKSVLKRVAAYAKSSAELLTNLMLHGPSGEYTWECLFRTPMSNYDAVILLHQEKLCCPHHVLFPAENPDGKLVVWGKPSKDFCPYMPLNKGAVKGLHDAREKLLVNFDPTTYFLRDLKTFKLWYGSVGGDAVGLTWENPKKRGREEADEAAPEPTSILKEVGDVGKGLVRGVYLVKAPKFQ

SEQ ID NO: 174331 - protein, 602 aa, Zea Mays
MENSGKFGSSPLLVGMMVSSLEKSFRLVDIGPNPENRVEAVKFRKFWGEKAELRRFKDGNIAESTVWECQSWEKHTIIKRIADYVLMKHLSLQKDDLIHVVDQLDFCLLVDGQDPVSSSGALLEAFDTIAKQLRLLDDIPLKISTVQPLDSAFRHTSVFPPEPHPLAYGRNSQRLPKFATTCIRSLEVMIQLEGSGNWPLDPVAMEKTKTAFLLKIGESLEDRGMFVSASENEVNVLTSGYSFLLKIFHERGLVMQKPVGDDKTQSVLSEDKMLFQRSQHSSMINGLHGRYQVYGPVVRLAKRWISAHLFSSFISEEAVELVVAHIFLKPFPFHAPSSRVAGFLRFLRLLSSFDWIFSPMVIDINNDFNLMDEKEINDNFMLSRKSYERNPHDIEPAMFLATSYDKTSEAWTKQSPSKSVLKRVAAYAKSSAELLTNLMLHGPSGEYTWECLFRTPMSNYDAVILLHQEKLCCPHHVLFPAENPDGKLVVWGKPSKDFCPYMPLNKGAVKGLHDAREKLLVNFDPTTYFLRDLKCAFSKTFKLWYGSVGGDAVGLTWENPKKRGREEADEAAPEPTSILKEVGDVGKGLVRGVYLVKAPKFQ

SEQ ID NO: 174332 - protein, 1031 aa, Zea Mays
MAATVASEHSIDRKLSALVEQARPSAAAMLAAAEAVDAVAELIKRVPQQQATPEAARGFLRDLGLETEKLSFTFRPPEVVRLAGSHAAGAVARPEVAADLLVRLPKECFHEKDFLNHRYHAKRCLYLCVVEKNLRCSKLIRKVSWSTLQDEARKPVLHVYPATEIVDLPGFHVRIIPTADSLFNVSKLNVSTRNNVRAYTKDGVNLPTPKYNCSILEDMFLEENANFISSTFANWKALQEALVLVKVWARQRTSIYTHDCLNGYLISAILVFLTVDSGGSMITRSMTTRQIFRVLMNFLATSKAWAKGLVIQSMKKRTVTKEDIATCLKTFDVAVFDISGHINLAFRMTRDGGLEELFMTKVDFCAKFDTCLRINLKGNSKVTGLSYCVDDESWRILEKDVQSLLQQGLTDRTKMIRALWRSTPSEWKIVEGFSEFGSSPLLVGMMVSSLEKSFRLVDIGPNPENRVEAVKFRKFWGEKAELRRFKDGNIAESTVWECQSWEKHTIIKRIADYVLMKHLSLQKDDLIHVVDQLDFCLLVDGQDPVSSSGALLEAFDTIAKQLRLLDDIPLKISTVQPLDSAFRHTSVFPPEPHPLAYGRNSQRLPKFATTCIRSLEVMIQLEGSGNWPLDPVAMEKTKTAFLLKIGESLEDRGMFVSASENEVNVLTSGYSFLLKIFHERGLVMQKPVGDDKTQSVLSEDKMLFQRSQHSSMINGLHGRYQVYGPVVRLAKRWISAHLFSSFISEEAVELVVAHIFLKPFPFHAPSSRVAGFLRFLRLLSSFDWIFSPMVIDINNDFNLMDEKEINDNFMLSRKSYERNPHDIEPAMFLATSYDKTSEAWTKQSPSKSVLKRVAAYAKSSAELLTNLMLHGPSGEYTWECLFRTPMSNYDAVILLHQEKLCCPHHVLFPAENPDGKLVVWGKPSKDFCPYMPLNKGAVKGLHDAREKLLVNFDPTTYFLRDLKCAFSKTFKLWYGSVGGDAVGLTWENPKKRGREEADEAAPEPTSILKEVGDVGKGLVRGVYLVKAPKFQ

SEQ ID NO: 174333 - protein, 462 aa, Zea Mays
MAATVASEHSIDRKLSALVEQARPSAAAMLAAAEAVDAVAELIKRVPQQQATPEAARGFLRDLGLETEKLSFTFRPPEVVRLAGSHAAGAVARPEVAADLLVRLPKECFHEKDFLNHRYHAKRCLYLCVVEKNLRCSKLIRKVSWSTLQDEARKPVLHVYPATEIVDLPGFHVRIIPTADSLFNVSKLNVSTRNNVRAYTKDGVNLPTPKYNCSILEDMFLEENANFISSTFANWKALQEALVLVKVWARQRTSIYTHDCLNGYLISAILVFLTVDSGGSMITRSMTTRQIFRVLMNFLATSKAWAKGLVIQSMKKRTVTKEDIATCLKTFDVAVFDISGHINLAFRMTRSAFLELQDEAVCALSCLDKCRDGGLEELFMTKVDFCAKFDTCLRINLKGNSKVTGLSYCVDDESWRILEKDVQSLLQQGLTDRTKMIRALWRSTPSEWKIVENLAAVRFWLV

SEQ ID NO: 174334 - protein, 128 aa, Zea Mays
MARRPAVQPGQPPLLHPRRGQPARARASSALPANAASGPWRAANGSQPAWHGGQTQPALAAAAPCAARLPAQRSGVAVGPCRPVRSSRRVDRRSSMCRRPCSHWCSSLEGSKIKGWRPSDLVLRVLRG

SEQ ID NO: 174335 - protein, 141 aa, Zea Mays
MARRPAVQPGQPPLLHPRRGQPARARASSALPANAASGPWRAANGSQPAWHGGQTQPALAAAAPCAARLPAQRSGVAVGPCRPVRSSRRVDRRSSMCRRPCSHWCSSLEIAIRFRASRDRRSRVGDQVIWFFEFYEAEDPE

SEQ ID NO: 174336 - protein, 80 aa, Zea Mays
MVMLFIITTFTLITYISYLDVYLISAFKISYFPSQSEHCTVPIFPWSYPLLCHLQVFLTLSFVVFCLSSSLPFSSLYPTL

SEQ ID NO: 174337 - protein, 159 aa, Zea Mays
MARRPAVQPGQPPLLHPRRGQPARARASSALPANAASGPWRAANGSQPAWHGGQTQPALAAAAPCAARLPAQRSGVAVGPCRPVRSSRRVDRRSSMCRRPCSHWCSSLEIAICFRASRDRRSRVGDQVIWFFEFYEAEDPEHLFGEGKCSLTHYVPFTL

SEQ ID NO: 174338 - protein, 96 aa, Zea Mays
MPRIASVAARGHPRRFTTALPPPWYGSIRRRRKPLSPSRCTPLPLATSRFLCGGAGGLRRRRGLIGFYTPVGFGQRPFYGARAGPPMPHSIREVVD

SEQ ID NO: 174339 - protein, 801 aa, Zea Mays
MSQILRHRLSAHYHGVCGHCCRRLSSAVYGGGGSRRAVAAPPQDGEGSRAVRVSVWWDFENCHIPNGVNVHRVAPRVSAALRAAGIRGPLSITAFGDVLQLARSSQEALAATGVSISHVPSSGKNSSDRSFMADLVYWIAQNPPPVHFFLISGDRDFANILHRLRMSNYNVLLACPSSATSVLCSAATIMWPWEGLVRGEDLSPKRFNNPPDGLHGSWYGHYRGALDDPPLEKESEEPIKVASVPKQFSVPSNTKHCPVPKHVKNAILEVLRSYPEGVNISLLRNQLVKNKIDLGTNFFGHKKFSSFLESMPHVVKLLGSRLGENELYAIAANKKFLQPGDGALDDPFLEKGAEEPIKVSSDSQHCSVPSDTKSSSIPKYVTDAILEALCSYPEGINLSLLQEELAKKKICLGPDFFGHKDFSCLIQSIPDIVELVCPQTGGQLYAIAVNRRSLQPGDGSTKTLSSAQGNARENNPTGTAHSNKKNTLSSLRSIYKSRSFTETLSEHPPTFSVLPSPSNGLSEDQTECPVVDVNGSTESPAKHREVGEMTTPGTPSSSGVENAANEYGFFKRIWTMWNGPKNVKSEVSQNCESTSAEVIDDLQVSQNCESTFAKVIDDLRTPLEEYNGDHRIKLLRRIHETSSKNDRSDGTEGMLAVSDNLSISLGDDHSEKIKRDPSIPENPEPCRKPAAVSMIKSGKKDDISEMNRGMFNWASRWWPFGKSDADSSTTNINATDEPRTDSIEEFESSNAPTNGSAQQVVHEIFTKPDLWSVLEQQLSEPLGSEVVLKAKTRNWHTDCRS

SEQ ID NO: 174340 - protein, 547 aa, Zea Mays
MTTPGTPSSSGVENAANEYGFFKRIWTMWNGPKNVKSEVSQNCESTSAEVIDDLIHETSSKNDRSDGTEGMLAVSDNLSISLGDDHSEKIKRDPSIPENPEPCRKPAAVSMIKSGKKDDISEMNRGMFNWASRWWPFGKSDADSSTTNINATDEPRTDSIEEFESSNAPTNGSAQQVVHEIFTKPDLWSVLEQQLSEPLGSEVVLKAKTRQELAHRLQKLNCWPLKGLLDKDLHHLVHLLISEKKWIEETSSRIFPFRLTLPRKRRCVPSSSSKSNGLSYIFSSGKPQKGRYVDNNSRKSRSLTREEILSDCHKLVKELLSEHEYGFNIGIFKRRFSQEYGYELEHRKLGYLDLETLLHIMPDVRVKFPRVMRSEHGNGQAGSKGDGNRSSGDDLIWEELGPVSATTETAAAAADAGADKETCYRPPTPSDDEFSDSDSIKDRQPRRNAEQQSSLLQIIGAWNSSKGGDVSSNKPQDIDGLVDCSRSSPGSAGTSAASGKVQTSSPKLPHKQYSFVSDSGEESDPDKLVESVLDSLQKARGGSKLHN

SEQ ID NO: 174341 - protein, 738 aa, Zea Mays
MSQILRHRLSAHYHGVCGHCCRRLSSAVYGGGGSRRAVAAPPQDGEGSRAVRVSVWWDFENCHIPNGVNVHRVAPRVSAALRAAGIRGPLSITAFGDVLQLARSSQEALAATGVSISHVPSSGKNSSDRSFMADLVYWIAQNPPPVHFFLISGDRDFANILHRLRMSNYNVLLACPSSATSVLCSAATIMWPWEGLVRGEDLSPKRFNNPPDGLHGSWYGHYRGALDDPPLEKESEEPIKVASVPKQFSVPSNTKHCPVPKHVKNAILEVLRSYPEGVNISLLRNQLVKNKIDLGENELYAIAANKKFLQPGDGALDDPFLEKGAEEPIKVSSDSQHCSVPSDTKSSSIPKYVTDAILEALCSYPEGINLSLLQEELAKKKICLGPDFFGHKDFSCLIQSIPDIVELVCPQTGGQLYAIAVNRRSLQPGDGSTKTLSSAQGNARENNPTGTAHSNKKNTLSSLRSIYKSRSFTETLSEHPPTFSVLPSPSNGLSEDQTECPVVDVNGSTESPAKHREVGEMTTPGTPSSSGVENAANEYGFFKRIWTMWNGPKNVKSEVSQNCESTSAEVIDDLIHETSSKNDRSDGTEGMLAVSDNLSISLGDDHSEKIKRDPSIPENPEPCRKPAAVSMIKSGKKDDISEMNRGMFNWASRWWPFGKSDADSSTTNINATDEPRTDSIEEFESSNAPTNGSAQQVVHEIFTKPDLWSVLEQQLSEPLGSEVVLKAKTRNWHTDCRS

SEQ ID NO: 174342 - protein, 251 aa, Zea Mays
MVAAEGGPVEEGVGESSSPPRVDAAPAPSGSVGSGGRGGASDICAEVLERLVADGHAEASDPEFRDRLAAHFGRLPHSYQLDINVDKATDVLVHQNVLAEAKDPDRRPAFYVRFLRIEDIDPANDSDASEEGDGDGDDLSVRQDTPYTHIHEVVFSTIDKPKLLSQLSALLSDIGLNIREAHVFSTHDGYSLDVFVVDGWPIKDTDGLHKALEASILRNEGSWSGSSHSSAAERTLPFQVKGITGLTSVRM

SEQ ID NO: 174343 - protein, 164 aa, Zea Mays
MAVLERRSRLPAVAQLAVAFWLAATSACLCRSVIPDPDLEPGRPCVGRLFCRWPPLPLPSPPPPPVVTPPPAPETTTPPPRHHHTPPFCPSPLCRHRLPPHLPRPIYPPPTPLSPESPPLPPPPPVVTPPPPTPRHPYPTPRPCIYPFCPLRPPVCLCSISMFE

SEQ ID NO: 174344 - protein, 708 aa, Zea Mays
MHQTIYTDENGEQVAFDNQEQGREEDLAGNGEEDRDHNSIIPSREELTEELRNKVAYSEEEAYRLYCDYGHRMGFSVRKGKQYYFTGTKTIRTKDYYCSKEGLKDDEQLTEANFNKPETRTNCKAMVRFRVDSEGQWRVIQIIPEHNHELVRPEEIHLLRSVRTLSVPKSGVLNAMVNAEIQAMHDNLHINEDGTECHSQLSIRSYTLLEPKECEALVGYFKRRTNEQCMFYWDVEVDQEGRMTNFFWRDGKSRVDYDSFRDVVIFDTSYLTNKYNMICAPFIGLNNHRQNVMFGCAFLLDESLTSYEWLFKSFLESVGGRPPETIFTDQNEFISKAIEVVLPGTRHCLCQQLIEKKLMSHLGSINDSGTLHSLFSKCMRECESEAELDETWAMMHHEYNMQEHPWLTDLYQQRHKWCSALHKDAFDGGIESMDRNESLNNVLSNIDDESASLSTFVLELDKLAGSWRKTESLEDIQCNQAAPECTVKHNRILQHAAEVYTHKVYKSIETDFLDGCSATSYQAAQCNETLHKFEFLLENSPNVSVVFLNTSTMELSCTCKKFETMRILCSHALNALVLKNVDRIPERYILNRWTKYARKGTYPFPVDEFAEQDRTEVAFVYRNRAMWFVYDLLTKSKSHHNTRKLILDALENGEKSLESMCDLKRLHMNTLGKEKDGSRVEKRKKKSTKQEKHSSISFHLHSSCFSND

SEQ ID NO: 174345 - protein, 122 aa, Zea Mays
MTLSLFTTLPSTPPSVLCHHHQLRSSSFAFSGNVKQAVLPQTADPVFVDPPNQDQYFAAEDIASNQSVGRPFFYQGYPMTVVSTSQIQGHTNMHSEPQCASQEYSAYGTVQPPSQFGGGRNF

SEQ ID NO: 174346 - protein, 58 aa, Zea Mays
MCDTRHAISLSCDLAMTTNRELRARPTDSLAMTTNRELRARPTDSLRAGTSRRTARKE

SEQ ID NO: 174347 - protein, 356 aa, Zea Mays
MSISEELPGEGSDGEEEVFINEEDIIHEITIDEEDLPDRDDEDDDVVNGMVDSEDIDDSTYAFQGHQDEVFIVACSPTDSSLVASGGKDDRGFLWRIGSEEGALELTGHKDTVGTVAFSSDGNLLACGSFDGQINVWNTATRTLKGTLEGSGSGFEWLKWHSRGHLIIAGSEDCNVWMWNADHNAILNTFAGHSNTVTCGDFTPDGKLICTGSDDASLRIWDPRSAQSRHVVRGHGYHSDGLTCLSMTSDSQTVVSGSKDSSVHIVNLNSGQVVGSLAGHTNSIECLGISSSYGWVATGSMDQKLIIWDLTHQSSRCICEHDVRQGTLRQDALTARCASGTASLEPAPGSSVGMQM

SEQ ID NO: 174348 - protein, 395 aa, Zea Mays
MSISEELPGEGSDGEEEVFINEEDIIHEITIDEEDLPDRDDEDDDVVNGMVDSEDIDDSTYAFQGHQVFIVACSPTDSSLVASGGKDDRGFLWRIGSEEGALELTGHKDTVGTVAFSSDGNLLACGSFDGQINVWNTATRTLKGTLEGSGSGFEWLKWHSRGHLIIAGSEDCNVWMWNADHNAILNTFAGHSNTVTCGDFTPDGKLICTGSDDASLRIWDPRSAQSRHVVRGHGYHSDGLTCLSMTSDSQTVVSGSKDSSVHIVNLNSGQVVGSLAGHTNSIECLGISSSYGWVATGSMDQKLIIWDLTHQSSRCICEHDEGVTSLTWLGSSRYVASGCIDGKVRIWDSLSGACAREFSGHADVVQSLAITADGNTMVSASSDGSARVFDISMFK

SEQ ID NO: 174349 - protein, 81 aa, Zea Mays
MTRGRLKVFEWERSFFGSEVNNGDIGDSGSDVFDDCRCSGTSILGRSGNFISKLSCLLMDGALSDATIGSLASAICSEGGL

SEQ ID NO: 174350 - protein, 93 aa, Zea Mays
MALKLGWRRGGGGWLALPLGNRTTASSSACSSSNLFVGGLSYDTNETALKDVFSQCGDVIARRLYAIPQAASRKDLVLSSFLRKTKLTQHCKR

SEQ ID NO: 174351 - protein, 110 aa, Zea Mays
MLRSQITPLPHSTRNKSFLRSDNEPGTSTSSADRQERNHPRALGLGLGIGYHQPINRRRGPPAAAVCSLSLPCWLRCGCAAVDEGVPGSLPPGSNSGCFLRVQWQYIAWP

SEQ ID NO: 174352 - protein, 178 aa, Zea Mays
MMMLTKEFALSPPPGVVPRRRPSARVAPTAARGGSPVPDLWLRTAAPVPASAAAGFASSHSHDGDCDLAMLVTDFLENGATAGSGDSRNSSDSESGLPDLAHLADTISGGDEKENELLAMVHSLLLSIHEPQLQPFKTGQCGGSCIRHLLVKLLRYSGNDAAVCTSKWQGFDKIPGGT

SEQ ID NO: 174353 - protein, 236 aa, Zea Mays
MLKQGGDEKENELLAMVHSLLLSIHEPQLQPFKTGQCGGSCIRHLLVKLLRYSGNDAAVCTSKWQGFDKIPGGDYEYIDVIMHGDTTAPERLIVDIDFRSHFEIARAVDSYGTLLNSLPVVFVGTLPRLKQFLHVMVDAAKWSLKQNSMPLPPWRSLPYLQAKWQSKYERKDSITEGGFQSTSSDHALCIGHLKRLKTSLQLELETAGLLMMPIKANKKRMPKSSERRRRRSLLSC

SEQ ID NO: 174354 - protein, 133 aa, Zea Mays
MADEIDTRPASAGSRGRPAHATEDDDREEGEIAADAPSPALPAAHPLEHSWTFWFDNPHGKNKMAAWGSSIRPIHTFSTVEDFWGCVRLSLSDTCTPLNLLSLLSHSHNYWYKSRFTIYEPNLPWFTDLGSLD

SEQ ID NO: 174355 - protein, 431 aa, Zea Mays
MAFPADALVLEITDTSSSATAAAARAPSSPSPPPLSISDLALIESSSYFRALLGGSFSESGREHVRVGCNLEAAVQVLRYLFEPSESFNITHNNFLPLLEGALFLAVESLLVECQRWFGTIASQTSAMSVPLDFIIEVWYFAEEHGVTFVQDICQKFLAQNFVENMKACEQSNPNSVDGHLFILSKQVKICLLPLGFAAGTMRHWFDFGNKIICTILDLLKDSLKTLLDAVDDGNLDRYCIRITEYSKNIVLSGCPQVTTAFLYISVLPNDLSVSLKRRIVSSYTQVDHQTFVLYEELEKATKTLSFKNVHMVDISKCPNVHFGAAIDWLKLGFPELRVFRVSHCLSFQFDDLLYLLMRCPWIDEIDMTIDTSTVTPRHSVISSSSEVLSKAKPNQKRYGIHCSAYDRQPNSVFLNISRLTLEGRNDIDGN

SEQ ID NO: 174356 - protein, 441 aa, Zea Mays
MAFPADALVLEITDTSSSATAAAARAPSSPSPPPLSISDLALIESSSYFRALLGGSFSESGREHVRVGCNLEAAVQVLRYLFEPSESFNITHNNFLPLLEGALFLAVESLLVECQRWFGTIASQTSAMSVPLDFIIEVWYFAEEHGVTFVQDICQKFLAQNFVENMKACEQSNPNSVDGHLFILSKVKICLLPLGFAAGTMRHWFDFGNKIICTILDLLKDSLKTLLDAVDDGNLDRYCIRITEYSKNIVLSGCPQVTTAFLYISVLPNDLSVSLKRRIVSSYTQVDHQTFVLYEELEKATKTLSFKNVHMVDISKCPNVHFGAAIDWLKLGFPELRVFRVSHCLSFQFDDLLYLLMRCPWIDEIDMTIDTSTVTPRHSVISSSSEVLSKAKPNQKRYGIHCSAYDRQPNSVFLNISRLTLEGRNDIDARVQIWTCWRYLS

SEQ ID NO: 174357 - protein, 605 aa, Zea Mays
MAFPADALVLEITDTSSSATAAAARAPSSPSPPPLSISDLARFDPLPSPTVAVRVDRHRLIESSSYFRALLGGSFSESGREHVRVGCNLEAAVQVLRYLFEPSESFNITHNNFLPLLEGALFLAVESLLVECQRWFGTIASQTSAMSVPLDFIIEVWYFAEEHGVTFVQDICQKFLAQNFAHAISGRSFNKIPYDLLCSAIKCPHLTVDSEKQLCEAILYWVSENMKACEQSNPNSVDGHLFILSKQVKICLLPLGFAAGTMRHWFDFGNKIICTILDLLKDSLKTLLDAVDDGNLDRYCIRITEYSKNIVLSGCPQVTTAFLYISVLPNDLSVSLKRRIVSSYTQVDHQTFVLYEELEKATKTLSFKNVHMVDISKCPNVHFGAAIDWLKLGFPELRVFRVSHCLSFQFDDLLYLLMRCPWIDEIDMTIDTSTVTPRHSVISSSSEVLSKAKPNQKRYGIHCSAYDRQPNSVFLNISRLTLEGRNDIDDMDLLEISVLKNSLCYINIRNCFLLTDDGISNLLMKCTKIHSMVLSYTSFGNRSIQMLCAANPSGHNSGHAHVMASYMQELHLDGCKASEHYKYHKVFELKGNITYRWCTLQVCWL

SEQ ID NO: 174358 - protein, 604 aa, Zea Mays
MAFPADALVLEITDTSSSATAAAARAPSSPSPPPLSISDLARFDPLPSPTVAVRVDRHRLIESSSYFRALLGGSFSESGREHVRVGCNLEAAVQVLRYLFEPSESFNITHNNFLPLLEGALFLAVESLLVECQRWFGTIASQTSAMSVPLDFIIEVWYFAEEHGVTFVQDICQKFLAQNFAHAISGRSFNKIPYDLLCSAIKCPHLTVDSEKQLCEAILYWVSENMKACEQSNPNSVDGHLFILSKVKICLLPLGFAAGTMRHWFDFGNKIICTILDLLKDSLKTLLDAVDDGNLDRYCIRITEYSKNIVLSGCPQVTTAFLYISVLPNDLSVSLKRRIVSSYTQVDHQTFVLYEELEKATKTLSFKNVHMVDISKCPNVHFGAAIDWLKLGFPELRVFRVSHCLSFQFDDLLYLLMRCPWIDEIDMTIDTSTVTPRHSVISSSSEVLSKAKPNQKRYGIHCSAYDRQPNSVFLNISRLTLEGRNDIDDMDLLEISVLKNSLCYINIRNCFLLTDDGISNLLMKCTKIHSMVLSYTSFGNRSIQMLCAANPSGHNSGHAHVMASYMQELHLDGCKASEHYKYHKVFELKGNITYRWCTLQVCWL

SEQ ID NO: 174359 - protein, 701 aa, Zea Mays
MKACEQSNPNSVDGHLFILSKVKICLLPLGFAAGTMRHWFDFGNKIICTILDLLKDSLKTLLDAVDDGNLDRYCIRITEYSKNIVLSGCPQVTTAFLYISVLPNDLSVSLKRRIVSSYTQVDHQTFVLYEELEKATKTLSFKNVHMVDISKCPNVHFGAAIDWLKLGFPELRVFRVSHCLSFQFDDLLYLLMRCPWIDEIDMTIDTSTVTPRHSVISSSSEVLSKAKPNQKRYGIHCSAYDRQPNSVFLNISRLTLEGRNDIDDMDLLEISVLKNSLCYINIRNCFLLTDDGISNLLMKCTKIHSMVLSYTSFGNRSIQMLCAANPSGHNSGHAHVMASYMQELHLDGCKGIDSVALSQLVSIISITKFLSLRETSLTDGALCKFVGSSLEYLDVSETVISMVSLAPVIQRNCKLNCLKTAGCCSLLLQCANVEHINGNKYGDFLQELGTTYCLEDVEMGWGFCPIRIEDLVPSFSKVRKMKIGLGTSLAENVLCALPMICPFLESLILRFQVISDRVVRRLLESATNLQVLCLHYCLGSLTSFSFQTKAPALRVLRLHWVTSWLTNDDLTILTENCNLAELSLSGCKLLDSSSQDIISSGWPNLALLHLEECGKVTVEGVSSFFNCKALEDVLLRHTVSMKNIVAGSWYIVLVNLKTQRRTILNDVTWLQLKQNFTMLLQNCSPSVHVISRTSTGVTFLR

SEQ ID NO: 174360 - protein, 610 aa, Zea Mays
MAFPADALVLEITDTSSSATAAAARAPSSPSPPPLSISDLALIESSSYFRALLGGSFSESGREHVRVGCNLEAAVQVLRYLFEPSESFNITHNNFLPLLEGALFLAVESLLVECQRWFGTIASQTSAMSVPLDFIIEVWYFAEEHGVTFVQDICQKFLAQNFAHAISGRSFNKIPYDLLCSAIKCPHLTVDSEKQLCEAILYWVSENMKACEQSNPNSVDGHLFILSKQVKICLLPLGFAAGTMRHWFDFGNKIICTILDLLKDSLKTLLDAVDDGNLDRYCIRITEYSKNIVLSGCPQVTTAFLYISVLPNDLSVSLKRRIVSSYTQVDHQTFVLYEELEKATKTLSFKNVHMVDISKCPNVHFGAAIDWLKLGFPELRVFRVSHCLSFQFDDLLYLLMRCPWIDEIDMTIDTSTVTPRHSVISSSSEVLSKAKPNQKRYGIHCSAYDRQPNSVFLNISRLTLEGRNDIDDMDLLEISVLKNSLCYINIRNCFLLTDDGISNLLMKCTKIHSMVLSYTSFGNRSIQMLCAANPSGHNSGHAHVMASYMQELHLDGCKGIDSVALSQLVSIISITKFLSLRETSLTDGALCKFVGSSLEYLDVSETVVRY

SEQ ID NO: 174361 - protein, 394 aa, Zea Mays
MLMLWHLICKNYIWMAAKLVSIISITKFLSLRETSLTDGALCKFVGSSLEYLDVSETVISMVSLAPVIQRNCKLNCLKTAGCCSLLLQCANVEHINGNKYGDFLQELGTTYCLEDVEMGWGFCPIRIEDLVPSFSKVRKMKIGLGTSLAENVLCALPMICPFLESLILRFQVISDRVVRRLLESATNLQVLCLHYCLGSLTSFSFQTKAPALRVLRLHWVTSWLTNDDLTILTENCNLAELSLSGCKLLDSSSQDIISSGWPNLALLHLEECGKVTVEGVSSFFNCKALEDVLLRHTGRGIGRSIIDDAIRELPLLRKLALDLCDACEDGYDSPNDAEGKMIRSVRMSRCKKMAGSCLEVPRQGSSTSRPVHKDTVVLEWSSRMFTTTIVKERV

SEQ ID NO: 174362 - protein, 507 aa, Zea Mays
MAFPADALVLEITDTSSSATAAAARAPSSPSPPPLSISDLALIESSSYFRALLGGSFSESGREHVRVGCNLEAAVQVLRYLFEPSESFNITHNNFLPLLEGALFLAVESLLVECQRWFGTIASQTSAMSVPLDFIIEVWYFAEEHGVTFVQDICQKFLAQNFAHAISGRSFNKIPYDLLCSAIKCPHLTVDSEKQLCEAILYWVSENMKACEQSNPNSVDGHLFILSKQVKICLLPLGFAAGTMRHWFDFGNKIICTILDLLKDSLKTLLDAVDDGNLDRYCIRITEYSKNIVLSGCPQVTTAFLYISVLPNDLSVSLKRRIVSSYTQVDHQTFVLYEELEKATKTLSFKNVHMVDISKCPNVHFGAAIDWLKLGFPELRVFRVSHCLSFQFDDLLYLLMRCPWIDEIDMTIDTSTVTPRHSVISSSSEVLSKAKPNQKRYGIHCSAYDRQPNSVFLNISRLTLEGRNDIDDMDLLEISVLKNSLCYINIRNCFLLTDDVLCLSSTT

SEQ ID NO: 174363 - protein, 960 aa, Zea Mays
MAFPADALVLEITDTSSSATAAAARAPSSPSPPPLSISDLARFDPLPSPTVAVRVDRHRLIESSSYFRALLGGSFSESGREHVRVGCNLEAAVQVLRYLFEPSESFNITHNNFLPLLEGALFLAVESLLVECQRWFGTIASQTSAMSVPLDFIIEVWYFAEEHGVTFVQDICQKFLAQNFAHAISGRSFNKIPYDLLCSAIKCPHLTVDSEKQLCEAILYWVSENMKACEQSNPNSVDGHLFILSKVKICLLPLGFAAGTMRHWFDFGNKIICTILDLLKDSLKTLLDAVDDGNLDRYCIRITEYSKNIVLSGCPQVTTAFLYISVLPNDLSVSLKRRIVSSYTQVDHQTFVLYEELEKATKTLSFKNVHMVDISKCPNVHFGAAIDWLKLGFPELRVFRVSHCLSFQFDDLLYLLMRCPWIDEIDMTIDTSTVTPRHSVISSSSEVLSKAKPNQKRYGIHCSAYDRQPNSVFLNISRLTLEGRNDIDDMDLLEISVLKNSLCYINIRNCFLLTDDGISNLLMKCTKIHSMVLSYTSFGNRSIQMLCAANPSGHNSGHAHVMASYMQELHLDGCKGIDSVALSQLVSIISITKFLSLRETSLTDGALCKFVGSSLEYLDVSETVISMVSLAPVIQRNCKLNCLKTAGCCSLLLQCANVEHINGNKYGDFLQELGTTYCLEDVEMGWGFCPIRIEDLVPSFSKVRKMKIGLGTSLAENVLCALPMICPFLESLILRFQVISDRVVRRLLESATNLQVLCLHYCLGSLTSFSFQTKAPALRVLRLHWVTSWLTNDDLTILTENCNLAELSLSGCKLLDSSSQDIISSGWPNLALLHLEECGKVTVEGVSSFFNCKALEDVLLRHTGRGIGRSIIDDAIRELPLLRKLALDLCDACEDGYDSPNDAEGKMIRSVRMSRCKKMAGSCLEVPRQGSSTSRPVHKDTVVLEWSSRMFTTTIVKERV

SEQ ID NO: 174364 - protein, 529 aa, Zea Mays
MAFPADALVLEITDTSSSATAAAARAPSSPSPPPLSISDLALIESSSYFRALLGGSFSESGREHVRVGCNLEAAVQVLRYLFEPSESFNITHNNFLPLLEGALFLAVESLLVECQRWFGTIASQTSAMSVPLDFIIEVWYFAEEHGVTFVQDICQKFLAQNFVENMKACEQSNPNSVDGHLFILSKVKICLLPLGFAAGTMRHWFDFGNKIICTILDLLKDSLKTLLDAVDDGNLDRYCIRITEYSKNIVLSGCPQVTTAFLYISVLPNDLSVSLKRRIVSSYTQVDHQTFVLYEELEKATKTLSFKNVHMVDISKCPNVHFGAAIDWLKLGFPELRVFRVSHCLSFQFDDLLYLLMRCPWIDEIDMTIDTSTVTPRHSVISSSSEVLSKAKPNQKRYGIHCSAYDRQPNSVFLNISRLTLEGRNDIDDMDLLEISVLKNSLCYINIRNCFLLTDDGISNLLMKCTKIHSMVLSYTSFGNRSIQMLCAANPSGHNSGHAHVMASYMQELHLDGCKDFYGIISTSYSKKL

SEQ ID NO: 174365 - protein, 572 aa, Zea Mays
MKACEQSNPNSVDGHLFILSKQVKICLLPLGFAAGTMRHWFDFGNKIICTILDLLKDSLKTLLDAVDDGNLDRYCIRITEYSKNIVLSGCPQVTTAFLYISVLPNDLSVSLKRRIVSSYTQVDHQTFVLYEELEKATKTLSFKNVHMVDISKCPNVHFGAAIDWLKLGFPELRVFRVSHCLSFQFDDLLYLLMRCPWIDEIDMTIDTSTVTPRHSVISSSSEVLSKAKPNQKRYGIHCSAYDRQPNSVFLNISRLTLEGRNDIDDMDLLEISVLKNSLCYINIRNCFLLTDDGISNLLMKCTKIHSMVLSYTSFGNRSIQMLCAANPSGHNSGHAHVMASYMQELHLDGCKGIDSVALSQLVSIISITKFLSLRETSLTDGALCKFVGSSLEYLDVSETVISMVSLAPVIQRNCKLNCLKTAGCCSLLLQCANVEHINGNKYGDFLQELGTTYCLEDVEMGWGFCPIRIEDLVPSFSKVRKMKIGLGTSLAENVLCALPMICPFLESLILRFQVISDRVVRRLLESATNLQRIAIWLNFHFLVANFLTPALKTLSHLGGQTWHFYTLRNVVK

SEQ ID NO: 174366 - protein, 892 aa, Zea Mays
MCVWAAIWRLLCKCCATFLSLPRALTSRTTISSPCWRCYPKSPTSLIIQGALFLAVESLLVECQRWFGTIASQTSAMSVPLDFIIEVWYFAEEHGVTFVQDICQKFLAQNFAHAISGRSFNKIPYDLLCSAIKCPHLTVDSEKQLCEAILYWVSENMKACEQSNPNSVDGHLFILSKQVKICLLPLGFAAGTMRHWFDFGNKIICTILDLLKDSLKTLLDAVDDGNLDRYCIRITEYSKNIVLSGCPQVTTAFLYISVLPNDLSVSLKRRIVSSYTQVDHQTFVLYEELEKATKTLSFKNVHMVDISKCPNVHFGAAIDWLKLGFPELRVFRVSHCLSFQFDDLLYLLMRCPWIDEIDMTIDTSTVTPRHSVISSSSEVLSKAKPNQKRYGIHCSAYDRQPNSVFLNISRLTLEGRNDIDDMDLLEISVLKNSLCYINIRNCFLLTDDGISNLLMKCTKIHSMVLSYTSFGNRSIQMLCAANPSGHNSGHAHVMASYMQELHLDGCKGIDSVALSQLVSIISITKFLSLRETSLTDGALCKFVGSSLEYLDVSETVISMVSLAPVIQRNCKLNCLKTAGCCSLLLQCANVEHINGNKYGDFLQELGTTYCLEDVEMGWGFCPIRIEDLVPSFSKVRKMKIGLGTSLAENVLCALPMICPFLESLILRFQVISDRVVRRLLESATNLQVLCLHYCLGSLTSFSFQTKAPALRVLRLHWVTSWLTNDDLTILTENCNLAELSLSGCKLLDSSSQDIISSGWPNLALLHLEECGKVTVEGVSSFFNCKALEDVLLRHTGRGIGRSIIDDAIRELPLLRKLALDLCDACEDGYDSPNDAEGKMIRSVRMSRCKKMAGSCLEVPRQGSSTSRPVHKDTVVLEWSSRMFTTTIVKERV

SEQ ID NO: 174367 - protein, 961 aa, Zea Mays
MAFPADALVLEITDTSSSATAAAARAPSSPSPPPLSISDLARFDPLPSPTVAVRVDRHRLIESSSYFRALLGGSFSESGREHVRVGCNLEAAVQVLRYLFEPSESFNITHNNFLPLLEGALFLAVESLLVECQRWFGTIASQTSAMSVPLDFIIEVWYFAEEHGVTFVQDICQKFLAQNFAHAISGRSFNKIPYDLLCSAIKCPHLTVDSEKQLCEAILYWVSENMKACEQSNPNSVDGHLFILSKQVKICLLPLGFAAGTMRHWFDFGNKIICTILDLLKDSLKTLLDAVDDGNLDRYCIRITEYSKNIVLSGCPQVTTAFLYISVLPNDLSVSLKRRIVSSYTQVDHQTFVLYEELEKATKTLSFKNVHMVDISKCPNVHFGAAIDWLKLGFPELRVFRVSHCLSFQFDDLLYLLMRCPWIDEIDMTIDTSTVTPRHSVISSSSEVLSKAKPNQKRYGIHCSAYDRQPNSVFLNISRLTLEGRNDIDDMDLLEISVLKNSLCYINIRNCFLLTDDGISNLLMKCTKIHSMVLSYTSFGNRSIQMLCAANPSGHNSGHAHVMASYMQELHLDGCKGIDSVALSQLVSIISITKFLSLRETSLTDGALCKFVGSSLEYLDVSETVISMVSLAPVIQRNCKLNCLKTAGCCSLLLQCANVEHINGNKYGDFLQELGTTYCLEDVEMGWGFCPIRIEDLVPSFSKVRKMKIGLGTSLAENVLCALPMICPFLESLILRFQVISDRVVRRLLESATNLQVLCLHYCLGSLTSFSFQTKAPALRVLRLHWVTSWLTNDDLTILTENCNLAELSLSGCKLLDSSSQDIISSGWPNLALLHLEECGKVTVEGVSSFFNCKALEDVLLRHTGRGIGRSIIDDAIRELPLLRKLALDLCDACEDGYDSPNDAEGKMIRSVRMSRCKKMAGSCLEVPRQGSSTSRPVHKDTVVLEWSSRMFTTTIVKERV

SEQ ID NO: 174368 - protein, 918 aa, Zea Mays
MAFPADALVLEITDTSSSATAAAARAPSSPSPPPLSISDLARFDPLPSPTVAVRVDRHRLIESSSYFRALLGGSFSESGREHVRVGCNLEAAVQVLRYLFEPSESFNITHNNFLPLLEGALFLAVESLLVECQRWFGTIASQTSAMSVPLDFIIEVWYFAEEHGVTFVQDICQKFLAQNFVENMKACEQSNPNSVDGHLFILSKVKICLLPLGFAAGTMRHWFDFGNKIICTILDLLKDSLKTLLDAVDDGNLDRYCIRITEYSKNIVLSGCPQVTTAFLYISVLPNDLSVSLKRRIVSSYTQVDHQTFVLYEELEKATKTLSFKNVHMVDISKCPNVHFGAAIDWLKLGFPELRVFRVSHCLSFQFDDLLYLLMRCPWIDEIDMTIDTSTVTPRHSVISSSSEVLSKAKPNQKRYGIHCSAYDRQPNSVFLNISRLTLEGRNDIDDMDLLEISVLKNSLCYINIRNCFLLTDDGISNLLMKCTKIHSMVLSYTSFGNRSIQMLCAANPSGHNSGHAHVMASYMQELHLDGCKGIDSVALSQLVSIISITKFLSLRETSLTDGALCKFVGSSLEYLDVSETVISMVSLAPVIQRNCKLNCLKTAGCCSLLLQCANVEHINGNKYGDFLQELGTTYCLEDVEMGWGFCPIRIEDLVPSFSKVRKMKIGLGTSLAENVLCALPMICPFLESLILRFQVISDRVVRRLLESATNLQVLCLHYCLGSLTSFSFQTKAPALRVLRLHWVTSWLTNDDLTILTENCNLAELSLSGCKLLDSSSQDIISSGWPNLALLHLEECGKVTVEGVSSFFNCKALEDVLLRHTGRGIGRSIIDDAIRELPLLRKLALDLCDACEDGYDSPNDAEGKMIRSVRMSRCKKMAGSCLEVPRQGSSTSRPVHKDTVVLEWSSRMFTTTIVKERV

SEQ ID NO: 174369 - protein, 299 aa, Zea Mays
MKACEQSNPNSVDGHLFILSKVKICLLPLGFAAGTMRHWFDFGNKIICTILDLLKDSLKTLLDAVDDGNLDRYCIRITEYSKNIVLSGCPQVTTAFLYISVLPNDLSVSLKRRIVSSYTQVDHQTFVLYEELEKATKTLSFKNVHMVDISKCPNVHFGAAIDWLKLGFPELRVFRVSHCLSFQFDDLLYLLMRCPWIDEIDMTIDTSTVTPRHSVISSSSEVLSKAKPNQKRYGIHCSAYDRQPNSVFLNISRLTLEGRNDIDDMDLLEISVLKNSLCYINIRNCFLLTDDVLCLSSTT

SEQ ID NO: 174370 - protein, 437 aa, Zea Mays
MDLLEISVLKNSLCYINIRNCFLLTDDGISNLLMKCTKIHSMVLSYTSFGNRSIQMLCAANPSGHNSGHAHVMASYMQELHLDGCKGIDSVALSQLVSIISITKFLSLRETSLTDGALCKFVGSSLEYLDVSETVISMVSLAPVIQRNCKLNCLKTAGCCSLLLQCANVEHINGNKYGDFLQELGTTYCLEDVEMGWGFCPIRIEDLVPSFSKVRKMKIGLGTSLAENVLCALPMICPFLESLILRFQVISDRVVRRLLESATNLQVLCLHYCLGSLTSFSFQTKAPALRVLRLHWVTSWLTNDDLTILTENCNLAELSLSGCKLLDSSSQDIISSGWPNLALLHLEECGKVTVEGVSSFFNCKALEDVLLRHTVSMKNIVAGSWYIVLVNLKTQRRTILNDVTWLQLKQNFTMLLQNCSPSVHVISRTSTGVTFLR

SEQ ID NO: 174371 - protein, 586 aa, Zea Mays
MAFPADALVLEITDTSSSATAAAARAPSSPSPPPLSISDLALIESSSYFRALLGGSFSESGREHVRVGCNLEAAVQVLRYLFEPSESFNITHNNFLPLLEGALFLAVESLLVECQRWFGTIASQTSAMSVPLDFIIEVWYFAEEHGVTFVQDICQKFLAQNFAHAISGRSFNKIPYDLLCSAIKCPHLTVDSEKQLCEAILYWVSENMKACEQSNPNSVDGHLFILSKVKICLLPLGFAAGTMRHWFDFGNKIICTILDLLKDSLKTLLDAVDDGNLDRYCIRITEYSKNIVLSGCPQVTTAFLYISVLPNDLSVSLKRRIVSSYTQVDHQTFVLYEELEKATKTLSFKNVHMVDISKCPNVHFGAAIDWLKLGFPELRVFRVSHCLSFQFDDLLYLLMRCPWIDEIDMTIDTSTVTPRHSVISSSSEVLSKAKPNQKRYGIHCSAYDRQPNSVFLNISRLTLEGRNDIDDMDLLEISVLKNSLCYINIRNCFLLTDDGISNLLMKCTKIHSMVLSYTSFGNRSIQMLCAANPSGHNSGHAHVMASYMQELHLDGCKASEHYKYHKVFELKGNITYRWCTLQVCWL

SEQ ID NO: 174372 - protein, 266 aa, Zea Mays
MKACEQSNPNSVDGHLFILSKQVKICLLPLGFAAGTMRHWFDFGNKIICTILDLLKDSLKTLLDAVDDGNLDRYCIRITEYSKNIVLSGCPQVTTAFLYISVLPNDLSVSLKRRIVSSYTQVDHQTFVLYEELEKATKTLSFKNVHMVDISKCPNVHFGAAIDWLKLGFPELRVFRVSHCLSFQFDDLLYLLMRCPWIDEIDMTIDTSTVTPRHSVISSSSEVLSKAKPNQKRYGIHCSAYDRQPNSVFLNISRLTLEGRNDIDGN

SEQ ID NO: 174373 - protein, 544 aa, Zea Mays
MAFPADALVLEITDTSSSATAAAARAPSSPSPPPLSISDLALIESSSYFRALLGGSFSESGREHVRVGCNLEAAVQVLRYLFEPSESFNITHNNFLPLLEGALFLAVESLLVECQRWFGTIASQTSAMSVPLDFIIEVWYFAEEHGVTFVQDICQKFLAQNFVENMKACEQSNPNSVDGHLFILSKVKICLLPLGFAAGTMRHWFDFGNKIICTILDLLKDSLKTLLDAVDDGNLDRYCIRITEYSKNIVLSGCPQVTTAFLYISVLPNDLSVSLKRRIVSSYTQVDHQTFVLYEELEKATKTLSFKNVHMVDISKCPNVHFGAAIDWLKLGFPELRVFRVSHCLSFQFDDLLYLLMRCPWIDEIDMTIDTSTVTPRHSVISSSSEVLSKAKPNQKRYGIHCSAYDRQPNSVFLNISRLTLEGRNDIDDMDLLEISVLKNSLCYINIRNCFLLTDDGISNLLMKCTKIHSMVLSYTSFGNRSIQMLCAANPSGHNSGHAHVMASYMQELHLDGCKASEHYKYHKVFELKGNITYRWCTLQVCWL

SEQ ID NO: 174374 - protein, 778 aa, Zea Mays
MAFPADALVLEITDTSSSATAAAARAPSSPSPPPLSISDLALIESSSYFRALLGGSFSESGREHVRVGCNLEAAVQVLRYLFEPSESFNITHNNFLPLLEGALFLAVESLLVECQRWFGTIASQTSAMSVPLDFIIEVWYFAEEHGVTFVQDICQKFLAQNFAHAISGRSFNKIPYDLLCSAIKCPHLTVDSEKQLCEAILYWVSENMKACEQSNPNSVDGHLFILSKVKICLLPLGFAAGTMRHWFDFGNKIICTILDLLKDSLKTLLDAVDDGNLDRYCIRITEYSKNIVLSGCPQVTTAFLYISVLPNDLSVSLKRRIVSSYTQVDHQTFVLYEELEKATKTLSFKNVHMVDISKCPNVHFGAAIDWLKLGFPELRVFRVSHCLSFQFDDLLYLLMRCPWIDEIDMTIDTSTVTPRHSVISSSSEVLSKAKPNQKRYGIHCSAYDRQPNSVFLNISRLTLEGRNDIDDMDLLEISVLKNSLCYINIRNCFLLTDDGISNLLMKCTKIHSMVLSYTSFGNRSIQMLCAANPSGHNSGHAHVMASYMQELHLDGCKGIDSVALSQLVSIISITKFLSLRETSLTDGALCKFVGSSLEYLDVSETVISMVSLAPVIQRNCKLNCLKTAGCCSLLLQCANVEHINGNKYGDFLQELGTTYCLEDVEMGWGFCPIRIEDLVPSFSKVRKMKIGLGTSLAENVLCALPMICPFLESLILRFQVISDRVVRRLLESATNLQRIAIWLNFHFLVANFLTPALKTLSHLGGQTWHFYTLRNVVK

SEQ ID NO: 174375 - protein, 385 aa, Zea Mays
MFWTQGLCPIKFLISSFILFPSLKNPNESGTVSNNDSKKKDPNGPMYYNGIYHQFYQYNPNGSLWGNIVWAHSVSTDLVNWIRLAPAIERTTPSDINGCWTGSATILKSGRPAIIYTGADTEKRQVQNVAFPKNLSDPYLREWVKPHDNPVIQPVGRGLNPGQFRDPTTGWIGPDGLWRIAVGAEVDGHSAALLYESEDFVRWDRVDHPLYSSNASAMWECPDFFAAMPGENSGLDMSAAVPDGAKHVLKMSLDGSDKYMVGVYDLKGDAFVPDTVIEDRRLWSRIDYGNYYASKSFFDSKKGRRVIWGWTNETDSSSDDVAKGWAGIHAIPRTIWLDKDSKQLLQWPVEEIESLRGKQVRHQGLELRKGDLFEIKEIDTLQMWR

SEQ ID NO: 174376 - protein, 334 aa, Zea Mays
MFWTQGLCPIKFLISSFILFPSLKNPNESGTVSNNDSKKKDPNGPMYYNGIYHQFYQYNPNGSLWGNIVWAHSVSTDLVNWIRLAPAIERTTPSDINGCWTGSATILKSGRPAIIYTGADTEKRQVQNVAFPKNLSDPYLREWVKPHDNPVIQPVGRGLNPGQFRDPTTGWIGPDGLWRIAVGAEVDGHSAALLYESEDFVRWDRVDHPLYSSNASAMWECPDFFAAMPGENSGLDMSAAVPDGAKHVLKMSLDGSDKYMVGVYDLKGDAFVPDTVIEDRRLWSRIDYGNYYASKSFFDSKKGRRVIWGWTNETDSSSDDVAKGWAGIHDYMVG

SEQ ID NO: 174377 - protein, 548 aa, Zea Mays
MFWTQGLCPIKFLISSFILFPSLKNPNESGTVSNNDSKKKDPNGPMYYNGIYHQFYQYNPNGSLWGNIVWAHSVSTDLVNWIRLAPAIERTTPSDINGCWTGSATILKSGRPAIIYTGADTEKRQVQNVAFPKNLSDPYLREWVKPHDNPVIQPVGRGLNPGQFRDPTTGWIGPDGLWRIAVGAEVDGHSAALLYESEDFVRWDRVDHPLYSSNASAMWECPDFFAAMPGENSGLDMSAAVPDGAKHVLKMSLDGSDKYMVGVYDLKGDAFVPDTVIEDRRLWSRIDYGNYYASKSFFDSKKGRRVIWGWTNETDSSSDDVAKGWAGIHAIPRTIWLDKDSKQLLQWPVEEIESLRGKQVRHQGLELRKGDLFEIKEIDTLQADVEIDFELTSIGSADPFDPSWLLDIEKQCREAGASAHGPFGLVVLASESMEEHTSVHFRVYYRSQEKHMVLMCADLRKSSLRPELYTPAYGGFFELDLEKEKTVVSLRTLSFGGGGRVCIMARVYPAALVDDGGTRMYAFNNGTSTVRVPRLEAWSMRRAQVNKG

SEQ ID NO: 174378 - protein, 597 aa, Zea Mays
MIHTHIFIFELICCHKARFWMQSEQPQATAVLFSYDGSGPGSSRRTRRSGVAQATQRVFLYPQAPKVSSIVSSKYRTAYHFQPPKNWINDPNGPMYYNGIYHQFYQYNPNGSLWGNIVWAHSVSTDLVNWIRLAPAIERTTPSDINGCWTGSATILKSGRPAIIYTGADTEKRQVQNVAFPKNLSDPYLREWVKPHDNPVIQPVGRGLNPGQFRDPTTGWIGPDGLWRIAVGAEVDGHSAALLYESEDFVRWDRVDHPLYSSNASAMWECPDFFAAMPGENSGLDMSAAVPDGAKHVLKMSLDGSDKYMVGVYDLKGDAFVPDTVIEDRRLWSRIDYGNYYASKSFFDSKKGRRVIWGWTNETDSSSDDVAKGWAGIHAIPRTIWLDKDSKQLLQWPVEEIESLRGKQVRHQGLELRKGDLFEIKEIDTLQADVEIDFELTSIGSADPFDPSWLLDIEKQCREAGASAHGPFGLVVLASESMEEHTSVHFRVYYRSQEKHMVLMCADLRKSSLRPELYTPAYGGFFELDLEKEKTVVSLRTLSFGGGGRVCIMARVYPAALVDDGGTRMYAFNNGTSTVRVPRLEAWSMRRAQVNKG

SEQ ID NO: 174379 - protein, 125 aa, Zea Mays
MFLSTVLAALAFMFSTSILLQILACALYSNWWPMLAALMYVLVPMPCLFFGGGSTHFLTSREGGGWINAAKFLTGASAMGSLAIPAILRHAGLIETGAMFIEFTSFFILVCTVLCFHRATLDEDW

SEQ ID NO: 174380 - protein, 254 aa, Zea Mays
MENFTADRVVLAASGVDHEHLLGYADLLLKDWHKGTPMEKPKSTYVGGDSRHRADSDMTHVALAFEVPGGWLQERDATIMTVIQTLMGGGGSFSSGGPGKGMHSRLYRRVLNKYHLVDSFSAFNNVYDSSGLFGIYLTTPSDFVAKAVDIAVSELIAVATPGEEVELQRAKNSTISSVLMNLESRVVVAEDIGRQLLSYGCRKPIDYFLQCMEEITLDDVATFARKMLATQPTMASWGNVDKVPPYEFICKRLQ

SEQ ID NO: 174381 - protein, 147 aa, Zea Mays
MENFTADRVVLAASGVDHEHLLGYADLLLKDWHKGTPMEKPKSTYVGGDSRHRADSDMTHVALAFEVPGGWLQERDATIMTVIQTLMGGGGSFSSGGPGKGMHSRLYRRVLNKYHLVDSFSAFNNVYDSSGLFAIRFCGKGCRHRSK

SEQ ID NO: 174382 - protein, 314 aa, Zea Mays
MAMLCRATRVLRKGPSACIGFFVDSGSIYESGETTGVSHLLERMAFKDTKHRSHLNIVSELELAGGNVGASASREQMVYSYDTLKGYMPEALEILIDCMRNPLFLQEEVERQLVLAREEVNELQKNPEKFLHEQLNLVGYSGALANPLIAPEDALARINDKIIQKFYHENFTADRVVLAASGVDHEHLLGYADLLLKDWHKGTPMEKPKSTYVGGDSRHRADSDMTHVALAFEVPGGWLQERDATIMTVIQTLMGGGGSFSSGGPGKGMHSRLYRRVLNKYHLVDSFSAFNNVYDSSGLFAIRFCGKGCRHRSK

SEQ ID NO: 174383 - protein, 239 aa, Zea Mays
MAMLCRATRVLRKVCGLGPAAAARRLSAAEAFAACEGSLLRPLPGLDLPPCLPDNLSRSPTRITTLPNGLRVATEDVPGPSACIGFFVDSGSIYESGETTGVSHLLERMAFKDTKHRSHLNIVSELELAGGNVGASASREQMVYSYDTLKGYMPEALEILIDCMRNPLFLQEEVERQLVLAREEVNELQKNPEKFLHEQLNLVGYSGALANPLIAPEDALARINDKIIQKFYHAMQICC

SEQ ID NO: 174384 - protein, 972 aa, Zea Mays
MSSLQLLQLTERGRNLLSSRRRTLAIVSGAVLAGGALAYAQSGRWKKHQEANSCSDANSHSSNNGRTSQNGIDGKLVKTRKKKSGLKSLHFLAAILLKKIGPNGTNYLIGLILTAVLRTAVGHRLAKVQGYLFRSAFLRRIPTFTRLIIENLLLCFLQSTLYQTSKYLTGSLGLRFKKILTDLVHADYFENMVYYKISHVDHRITNPEQRIASDIPKFCSELSDLVQDDLAAIVEGLIYIWRLCSYASPKYVLWILAYVIGAGGTIRKFSPAFGKLKSTEQQLEGEYRQLHSRLRTHAESVAFYGGENREASHIKQRFRALVKHLNVVLHENWWFGMIQDFLLKYLGATVGVILIIEPFFAGNLKPESSTLGRAEMLSNLRYHTSVIISLFQSLGTISISSRRLNILSGYANRIHELLDVSRELSGGRDRLITQNSSDGNYISEANYIEFSDVKVVTPSGNVLVDNLNLHLESGSNLLITGPNGSGKSSLFRVLGGLWPMVSGHIVKPGVGSNLNKEIFYVPQRPYTAVGTLRDQLIYPLTADQETEPLSYGGMVDLLKNVDLEYLLERYPLDKEVNWGDELSLGEQQRLGMARLFYHKPKFAILDECTSAVTTDMEERFCKRVRAMGTSCITISHRPALVAFHEIVLSLDGEGGWDIQDNRNGSFSPEVEFDVLKASESDRKSDALTVQRAFITSTKGNASMKPKKHSYSTEVIASSPSMEIEHTVQSSIVTQLQCSPRPLPVRVAAMSQILVPKLFDKQGGQLLAVVLLVFSRTWISDRIASLNGTSVKYVLEQDKAAFIRLAGTSVLQSAANSIVSPSLRNLTSRIALGWRIRMTNHLLQYYLKRNAFYKVFNISGMSMDADQRMTHDVEKLTNDLAGLLTGMVKPLVDIIWFTWRMKLLSGRRGVAILYAYMFLGLGFLRAVSPDFGDLANQEQELEGTFRFMHSRLRTHAESIAFFGGGSREKAACT

SEQ ID NO: 174385 - protein, 178 aa, Zea Mays
MGVTPHLLPPHGCSSSTPPSRQQQPPVHGCQPLLPFCPTAQQLCAPPPMDAQKFQQQGLHSSSSLTLCSQPWRPKKNPLAEPPLPASAPVPLLLLPRTAAARPTFPRCAAPRRNAAVPASPGFLAATAARMPSARHNVKGDVLLQHVVTLPGCSLFLAQTRSRHRRPSPPSKSRSAFG

SEQ ID NO: 174386 - protein, 328 aa, Zea Mays
MPPPNSAPKPKPNPSPTSAAPPTPLARAAIGACAGAAAGAFTYAALLPIDAVKTRLQVQAAAAPSVTSWQVFLDILRTDGPLGLYRGLSAVILGSASSSAVYFGTCELAKSLLRPHLPPFLVPPLAGASGNVSSSAIMVPKELITQRLQSGAATGRSWQVLLGILRADGFLGLYAGYAATLLRNLPAGVLSYSSFEYLKAFALRRRGGESLTPGESVLCGALAGAISAAVTTPLDVVKTRLMTRVGGAEGSRTVLGTMREVVAEEGLVGLSRGIGPRVLHSACFAALGYCAFETAKLAILQCYLERCQSKEPGAAAQPETEPGAAAAT

SEQ ID NO: 174387 - protein, 98 aa, Zea Mays
MVLLSLEALRKRNVAGPLLLFNLALYVSMLGFASWALNAFVDHIGDHQYYDPPAGDACTCMDTHTPAGAAPRSAGDEAMLHFHHHQPRQGGGPSCSVM

SEQ ID NO: 174388 - protein, 64 aa, Zea Mays
MVLLSLEALRKRNVAGPLLLFNLALYVSMLGFASWALNAFVDHIGDHQYYDPPAGAAPRSAGDE

SEQ ID NO: 174389 - protein, 97 aa, Zea Mays
MDSQTPTNSDGDQGRNADKEVQVPHLTAPSSVAGVSATNTNSNSNSINSQPPDANSDCRCCCCQEQEDRQPFKSKRQSVYSRIIYHQWRRSIKIPRV

SEQ ID NO: 174390 - protein, 190 aa, Zea Mays
MSSAQDPFYIVREEIQESIDKLQSNFHRWEQTASNTGEYVHLTKELLTSCESIEWQVDELEKTISVASRDPSYYGLDEVELSRRRNWTGSAHKQVGTVKRAIEKGKSNVATSKYQDTSRTNHYSAQDNDDFISSESDRQLLLMRQQDEELDELSESVQRIGGVGLTIHEELSGQDPKRLKLGDGDYFQQT

SEQ ID NO: 174391 - protein, 107 aa, Zea Mays
MSSAQDPFYIVREEIQESIDKLQSNFHRWEQTASNTGEYVHLTKELLTSCESIEWQMSWKRQSQLHQGIHHTMDLMKLNFPDEETGLVLLISRLVQLRELLKRARAM

SEQ ID NO: 174392 - protein, 282 aa, Zea Mays
MNLQLSLSPSLLSSSTEGSVPRSRGECVGDQGVVDWIHPLTCFPHQVSNPHLREELLSQGEIARNCANTCCSTPLNQSSRGVCCLSLFKMVARRNPSIIEEGSGSEEIQVERPRRSQTGHGRGQARGDVGGSSSQQPEIVHAAREEPVPQPPLHPSSSRAAAAAASRPMSRGKRSKKRGVRALIRGLNGIYAICRESYVQIAELKRKNVEYNENFRRFMLESDNFRRYVGRVPLRPAPPYNPPPPMPDTLDQWVQQTYGVPFDEDISDDEEEISDDEDESFW

SEQ ID NO: 174393 - protein, 542 aa, Zea Mays
MKGHDEASNQVSNKSRDIAVNNSDRVLKDQDEILQLRVLQADLEEQVDNLKSAKDETEILNMILRSKLEEQHTVMSLLLQNQRHELINSIEENKDLTQKLAEQSLKAEEFKNLSIHLRELKEKAEAGRKEKEGSLHTMQDSLRIAFIKEQYESKVQELKGQVFVSKKYAEEMLLKLQSALDDVETGKKNEIALAKRIEELSMKVSEMEVEMLDLSADKRELSNAYDSMMTELECTKLNLDCCNEEKQKIEVSLEECSEERNRIRVELDLIKKLLENMALTDNNTSHDSSESCTPGTTSIRHVLGDGKAEPASKATPNTTKIDSGLQEHEIQSRSSSSNLSQGAEDVVKFDNNEESKNLENCDEEMESPTKNNLNSNNSIKDISQEHKKLANGFNLFQKELERLKDENLSPLLPLDVNLTDPSLSGLERTLSQLDMANEHLQSIFPSFKELPGSGNALERLLALELELAEALQAKKKTNILFQRDINEVIQDTIELKRRQMAVENELKEMQGRYSELSVQFAEVEGERQKLEMNLKNRTPWRS

SEQ ID NO: 174394 - protein, 464 aa, Zea Mays
MKGHDEASNQVSNKSRDIAVNNSDRVLKDQDEILQLRVLQADLEEQVDNLKSAKDETEILNMILRSKLEEQHTVMSLLLQNQRHELINSIEENKDLTQKLAEQSLKAEEFKNLSIHLRELKEKAEAGRKEKEGSLHTMQDSLRIAFIKEQYESKVQELKGQVFVSKKYAEEMLLKLQSALDDVETGKKNEIALAKRIEELSMKVSEMEVEMLDLSADKRELSNAYDSMMTELECTKLNLDCCNEEKQKIEVSLEECSEERNRIRVELDLIKKLLENMALTDNNTSHDSSESCTPGTTSIRHVLGDGKAEPASKATPNTTKIDSGLQEHEIQSRSSSSNLSQGAEDVVKFDNNEESKNLENCDEEMESPTKNNLNSNNSIKDISQEHKKLANGFNLFQKELERLKDENLSPLLPLDVNLTDPSLSGLERTLSQLDMITRLGTRACRGSPSKEENKHPFPELQGHQ

SEQ ID NO: 174395 - protein, 466 aa, Zea Mays
MKGHDEASNQVSNKSRDIAVNNSDRVLKDQDEILQLRVLQADLEEQVDNLKSAKDETEILNMILRSKLEEQHTVMSLLLQNQRHELINSIEENKDLTQKLAEQSLKAEEFKNLSIHLRELKEKAEAGRKEKEGSLHTMQDSLRIAFIKEQYESKVQELKGQVFVSKKYAEEMLLKLQSALDDVETGKKNEIALAKRIEELSMKVSEMEVEMLDLSADKRELSNAYDSMMTELECTKLNLDCCNEEKQKIEVSLEECSEERNRIRVELDLIKKLLENMALTDNNTSHDSSESCTPGTTSIRHVLGDGKAEPASKATPNTTKIDSGLQEHEIQSRSSSSNLSQGAEDVVKFDNNEESKNLENCDEEMESPTKNNLNSNNSIKDISQEHKKLANGFNLFQKELERLKDENLSPLLPLDVNLTDPSLSGLERTLSQLDMITRLGTRACRGSPSKEENKHPFPEFILEAAQ

SEQ ID NO: 174396 - protein, 499 aa, Zea Mays
MKGHDEASNQVSNKSRDIAVNNSDRVLKDQDEILQLRVLQADLEEQVDNLKSAKDETEILNMILRSKLEEQHTVMSLLLQNQRHELINSIEENKDLTQKLAEQSLKAEEFKNLSIHLRELKEKAEAGRKEKEGSLHTMQDSLRIAFIKEQYESKVQELKGQVFVSKKYAEEMLLKLQSALDDVETGKKNEIALAKRIEELSMKVSEMEVEMLDLSADKRELSNAYDSMMTELECTKLNLDCCNEEKQKIEVSLEECSEERNRIRVELDLIKKLLENMALTDNNTSHDSSESCTPGTTSIRHVLGDGKAEPASKATPNTTKIDSGLQEHEIQSRSSSSNLSQGAEDVVKFDNNEESKNLENCDEEMESPTKNNLNSNNSIKDISQEHKKLANGFNLFQKELERLKDENLSPLLPLDVNLTDPSLSGLERTLSQLDMANEHLQSIFPSFKELPGSGNALERLLALELELAEALQAKKKTNILFQSTMMKQRSSKASGTSMK

SEQ ID NO: 174397 - protein, 1102 aa, Zea Mays
MSRVPKWKIEKTKVKIPSTGWDKLFLSFISADTGKVSAKTNKANVRNGSCKWPDPIYEATRLLQDPRTKTYDDKLYKLVVAMGTSRSSILGEVDVNLAEFAEALKPTSIALPLRGSDFGTLLHITAQLLTTKTGFREFEQQRETGTRSSQQLLNQRSHDPVEVAAASSDIGTDKVNSRIKLKENSLGFPLAEDSAGSTDDYENSSHTSDGIFTEKNDPHGAHEINSFRSSNDLPLCSTSQSPTPEKGAHWVKHLLSQGSNDWAHSSSPGYCADKDLAAAHDENNRLRTRLEVAESAFSQLKTEATSLEHVTDKLGTETQGLAQQLAVELMSRNQLTTEVSLLRTECSNLKQELEEIKSSKHLQNKFDVEGKTMTKYGKDILATESIHHLQTEWLQGLLLLESKLQQTRNNALHGLQASDLDFLLADLGALQRVIENLKQGVQPGQMKENHNAEHLVPIAGYLSNSGHDDTIKKSSGGSTGTMEEKMCELLQKLEDSKTEKENLLEKMSQMERYYESFIHKLEESQKQTTIELENLKKEHNSCFYTVSVLQAQKQKMHEEMNDQLMRFVEDRTALEAQNKEFERRAVATETALKRVRFNYSAAVERLQKDLELLSFQVLSMYESNETLAKQSLLEDFDSLPEEHSAVEDLCGNNEHEQYRPGVKQIRPEGLYAEKETDGQKNLIRALKIEDLRARSEFQAHTDSRGNHSNLEGPRRAYSAMESEHLEMFISNIEWQIFSDVLRESHYATLDIIKCMQGRLDVLEMQLHDSNDARQSLVLKLNSALAQAKSVKESEAGYVLKCDDLTVKNQILEAKLHDITVENALLMEKLTESERLVQEHKTCESKYKVCTEEVTRLDNLLIKETLLTNQLKDELTSLRESFEAMKDALNKQSSINNDIQMISTSLQDQLGDLCSKIISFNKEANISGLEEASLLHELESKNYAAVMKRLESFHQQTCDKVLHLLEEKEVMEKMCDALQRRSEKAETKLHGMEQQFICDMDATKQKLNLSEEIVEKLQQELQDMAHKLRICSDSQEKYSVTNGDLTSKLSQMEIELHHATSENKALVEKLKEFSVTVEELERTKWCLVQHEEDTRTFGPVITV

SEQ ID NO: 174398 - protein, 96 aa, Zea Mays
MVISEIDSSIATSLQAVKLLALYLTGDKEGAISSLKEWLSDSATGSNLVLRLIAGIIFMREQDYNEALKHTHSGGTLDLEAIIDPAEIFEQLEKKN

SEQ ID NO: 174399 - protein, 114 aa, Zea Mays
MVQPCSWGILLAVLVTAAVVVPPATATVASIDLGSSPSRPYGSRRGTNGVVPLPRAPKIIAVSTGAGARKLPQPALPSLSNPSSTHRWLPPQPPSHRRSLASRPPPPRLRSSRQ

SEQ ID NO: 174400 - protein, 829 aa, Zea Mays
MAILFLHWKIPQEMVDVHQGHGRRKPFHCEVACPYSKIAASVQCDDSSGDEKLNFAPDNEPIQKWHRSLSSDSVVQTLRCLRRKPAVAFTYFKDTHSLGFHHDFSTYSEIIQILSHSFQGKMLVSLFREILLGTGSGGPEILPLIDHLRKTCATSHVGMIEMGVKLDVHGFSSFIIGLCDCGKFDLAYNMVRRYAVLQEISQERVPIEAMAYNMVIDGLCKEMKLKEAEKVLEIKTRHGSAPDLYSYSYLIHSHCKMGNLEKAWYHVEDMVSHGIEINCYIVAYLLQCLRKLGMVSEVIVHFQKFRDLGVHLDGVLYNIAMDAYCKLGNMNEAVKLLNEMMAGSLVPDKIHYTCLINGYCLKGETENAWQVFEEMLKANIKPDVVTYNILASGYSRNGLVMKVFDILEHMMDQGLEPNSLTYGIAIAGFCRGGNLSEAEVLFNIVEERGIDNINVLYGSMVCGYLHSGWTDHAYMLFLRVAKQGNMVDRLSCSKLINGLCRDEKVGEASTVCKMMLEKNVVPDVISYSKLISAYCQTRDMHNARLWFHDMVERGLSDVIVYTVLMNGYCKVGRLQEACELFVQMINLGIKPDVVAYTVLLDGHLKETLQQGWQGIAKERRTFFLRTKHKVLLNSMKDMEIEPDVTCYTVLIDGRCKAEYLEEARGLFDEMLAKGLIPDVHTYTALINGYCSQGEIAKAEDLFQEMIAKGMKPDIWSMMRVIGVPMSGRRTPGLKDCSLSSALGRQGEQNDGTFSVRIDDCQWSCANTIVAKLAVALAPMPFMRVLLDRFVAATSGVFPDNQELQDRDLFAVFDIEAGEVGKWTQIAELG

SEQ ID NO: 174401 - protein, 727 aa, Zea Mays
MSPMILWRWTKCTAECFRRRKPFHCEVACPYSKIAASVQCDDSSGDEKLNFAPDNEPIQKWHRSLSSDSVVQTLRCLRRKPAVAFTYFKDTHSLGFHHDFSTYSEIIQILSHSFQGKMLVSLFREILLGTGSGGPEILPLIDHLRKTCATSHVGMIEMGVKLDVHGFSSFIIGLCDCGKFDLAYNMVRRYAVLQEISQERVPIEAMAYNMVIDGLCKEMKLKEAEKVLEIKTRHGSAPDLYSYSYLIHSHCKMGNLEKAWYHVEDMVSHGIEINCYIVAYLLQCLRKLGMVSEVIVHFQKFRDLGVHLDGVLYNIAMDAYCKLGNMNEAVKLLNEMMAGSLVPDKIHYTCLINGYCLKGETENAWQVFEEMLKANIKPDVVTYNILASGYSRNGLVMKVFDILEHMMDQGLEPNSLTYGIAIAGFCRGGNLSEAEVLFNIVEERGIDNINVLYGSMVCGYLHSGWTDHAYMLFLRVAKQGNMVDRLSCSKLINGLCRDEKVGEASTVCKMMLEKNVVPDVISYSKLISAYCQTRDMHNARLWFHDMVERGLSDVIVYTVLMNGYCKVGRLQEACELFVQMINLGIKPDVVAYTVLLDGHLKETLQQGWQGIAKERRTFFLRTKHKVLLNSMKDMEIEPDVTCYTVLIDGRCKAEYLEEARGLFDEMLAKGLIPDVHTYTALINGYCSQGEIAKAEDLFQEMIAKGMKPDVLSFSVLHKRTLRHEKAH

SEQ ID NO: 174402 - protein, 832 aa, Zea Mays
MSPMILWRWTKCTAECFRRRKPFHCEVACPYSKIAASVQCDDSSGDEKLNFAPDNEPIQKWHRSLSSDSVVQTLRCLRRKPAVAFTYFKDTHSLGFHHDFSTYSEIIQILSHSFQGKMLVSLFREILLGTGSGGPEILPLIDHLRKTCATSHVGMIEMGVKLDVHGFSSFIIGLCDCGKFDLAYNMVRRYAVLQEISQERVPIEAMAYNMVIDGLCKEMKLKEAEKVLEIKTRHGSAPDLYSYSYLIHSHCKMGNLEKAWYHVEDMVSHGIEINCYIVAYLLQCLRKLGMVSEVIVHFQKFRDLGVHLDGVLYNIAMDAYCKLGNMNEAVKLLNEMMAGSLVPDKIHYTCLINGYCLKGETENAWQVFEEMLKANIKPDVVTYNILASGYSRNGLVMKVFDILEHMMDQGLEPNSLTYGIAIAGFCRGGNLSEAEVLFNIVEERGIDNINVLYGSMVCGYLHSGWTDHAYMLFLRVAKQGNMVDRLSCSKLINGLCRDEKVGEASTVCKMMLEKNVVPDVISYSKLISAYCQTRDMHNARLWFHDMVERGLSDVIVYTVLMNGYCKVGRLQEACELFVQMINLGIKPDVVAYTVLLDGHLKETLQQGWQGIAKERRTFFLRTKHKVLLNSMKDMEIEPDVTCYTVLIDGRCKAEYLEEARGLFDEMLAKGLIPDVHTYTALINGYCSQGEIAKAEDLFQEMIAKGMKPDIWSMMRVIGVPMSGRRTPGLKDCSLSSALGRQGEQNDGTFSVRIDDCQWSCANTIVAKLAVALAPMPFMRVLLDRFVAATSGVFPDNQELQDRGKLSGSVLGQWGAVDDPESMLHHIHWAVMR

SEQ ID NO: 174403 - protein, 346 aa, Zea Mays
MAKPRRGRSASRSSSGSSSRSLSHSVSSGSVSSRSRSRSRSFSSSSSQSRSRSPPQAKRSSPGARKGRSPSPPPKKGSPSKKVRSPSPPLKKASPPRKVSPPAESAVLCIDHLSRNVNEAHLKEIFGNFGEVVNVELSMDRMVNLPRGYGYIEFKKRADAEKALLHMDGGQIDGNIVKLRFTLQPRQRAASPVKAPPPPPKRDALQIEKGVSSAEKDAQQRPKESSPRRKPASPLRKRSPNRRAESPRRPPDPSPRRRPDSPPIRRRPDPSPVRRGDTPRRRPPSPVRRRSPSPPPRRHRSPMRLSPRRGRGSPSPRRRSPGPLRRRCGLHVHIPAKCIKYSLDMG

SEQ ID NO: 174404 - protein, 312 aa, Zea Mays
MAAVTAAAEPVKKLEKVSKKQEEGLVTNKYKPKEPYVGRCLLNTRITGDQAPGETWHMVFSTEGEVPYREGQSIGVIADGEDKNGKPHKLRLYSIASSALGDFGDSKTVSLCVKRLVYTNDQGEVVKGVCSNFLCDLKPGAEVKITGPVGKEMLMPKDPNATIIMLATGTGIAPFRSFLWKMFFEEHEDYKYTGLAWLFLGVPTSDTLLYKEELEKMKEMAPDNFRLDFAVSREQTNAAGEKMYIQTRMAEYKEELWELLKKDNTYVYMCGLKGMEKGIDDIMLDLAAKDGINWLDYKKQLKKSEQWNVEVY

SEQ ID NO: 174405 - protein, 182 aa, Zea Mays
MAIVADVMLVYLPAPTIGLQPPLARNAGAIANFFYNCPDNTFQIAMAGRSFSLLQRIGAFVRNGIKLLAVGTTASLIGTSVTNAALKAKRAVDKDLEDEVMEIPVVSTSVAYGVYMSISSNLRYQLLAGVIEQRMLEPLLHNQKLLLSAMCFIVRTGNTFLGSLLWVDYARWIGVQKSHEEA

SEQ ID NO: 174406 - protein, 208 aa, Zea Mays
MTPFPSEQYRELLDNVLNGPFSITLRNRIQCHVIRDEAKDEIVSEEPFLVLNEVTIDRGISSYLTNLEVYCDSSFVTCVQGDGLIISTTSGSTAYSLAAGGSMVHPQVPGILFTPICPHSLSFRPLILPEYVTLRVQVPFNSRGNAWASFDGKDRQQLSPGDALICSISPWPVPTACLVDSTTDFLRSIHEGLHWNLRKSQSFDGPRD

SEQ ID NO: 174407 - protein, 250 aa, Zea Mays
MLRTKVDLIITLGGDGTVLWAASLFKGPVPPVVAFALGSLGFMTPFPSEQYRELLDNVLNGPFSITLRNRIQCHVIRDEAKDEIVSEEPFLVLNEVTIDRGISSYLTNLEVYCDSSFVTCVQGDGLIISTTSGSTAYSLAAGGSMVHPQVPGILFTPICPHSLSFRPLILPEYVTLRVQVPFNSRGNAWASFDGKDRQQLSPGDALICSISPWPVPTACLVDSTTDFLRSIHEGLHWNLRKSQSFDGPRD

SEQ ID NO: 174408 - protein, 462 aa, Zea Mays
MRTVAKALRRVAEGKAAAQAEAAEWKRKYELETAHKHRSKIKGYSSCINNDLDKLVSQLTLETPTSDQLGCCGKHGICAHEILQDEVPGPIPRSNHKVVGRKASFKLSWGCNGDKNGQHKHDFVSFEKGDITTAERSNKQILLKWESPPQTVLFITKPNSNSVRVLCAEMIRWLREHKNINIFVEPRVSKELLTEDSYYNFVQTWDNDEEIKMLRTKVDLIITLGGDGTVLWAASLFKGPVPPVVAFALGSLGFMTPFPSEQYRELLDNVLNGPFSITLRNRIQCHVIRDEAKDEIVSEEPFLVLNEVTIDRGISSYLTNLEVYCDSSFVTCVQGDGLIISTTSGSTAYSLAAGGSMVHPQVPGILFTPICPHSLSFRPLILPEYVTLRVQVPFNSRGNAWASFDGKDRQQLSPGDALICSISPWPVPTACLVDSTTDFLRSIHEGLHWNLRKSQSFDGPRD

SEQ ID NO: 174409 - protein, 280 aa, Zea Mays
MMAPSPVTCSPSAARHRPLQLRSPAPRAAVVAALPLRRREALPHALWIAADPWASARAWTSLGLGTGRRDAARCAAAGQVAGTSSAGVGRSAGMEVVVAAAAVVAMGTGNRVLYKLALVPLRKYPFFLAQFATFGYVVVYFSILYLRYRAGIVTDEMLSLPQKPFLAVGLLEAFGAAAGMAAGAVLSGASIPILSQTYLVWQLLLSAIFLKRRYRINEIAGCFLVAIGVIITVASGSGTSASFKSSGILWPLLMIISFFFQAADTILKSIVAGNNIYRCF

SEQ ID NO: 174410 - protein, 240 aa, Zea Mays
MMAPSPVTCSPSAARHRPLQLRSPAPRAAVVAALPLRRREALPHALWIAADPWASARAWTSLGLGTGRRDAARCAAAGQVAGTSSAGVGRSAGMEVVVAAAAVVAMGTGNRVLYKLALVPLRKYPFFLAQFATFGYVVVYFSILYLRYRAGIVTDEMLSLPQKPFLAVGLLEAFGAAAGMAAGVPLSIYAFTLPLPYIGAASSLPPGFVAGAAVLTTGLLLYSLPQAQHYGNSFHNKNDD

SEQ ID NO: 174411 - protein, 330 aa, Zea Mays
MLLAEGYPQRTIFDNLHDAGLSFGVYFQDVPAVLFYRNLRKLKYLLDFHPLRPSFADHARRGTLPNYAVIEQHYLDSKLDPANDDHPSHDVYQGQMLVKYVYETLRASPQWNQTLLVITYDEHGGFFDHVPTPVAGVPSPDGIVGPPPYNFTFDRLGVRVPAILVSPWIDRGTVVHGPHGPTPTSQYEHSSIPATVKKIFGLPQDFLTRRDAWAGTFEGVVQGRTEPRTDCPEQLPTPTRIRQTEADEEAKLSEFQQEIIQLASVLNGDYHLATLQDRIKNDMNVREGIDYMKAAVKRYFQAGAFARRMGVDGDQIVKMRPSLTTRIQRP

SEQ ID NO: 174412 - protein, 139 aa, Zea Mays
MPSQREQHGGTVHLFIGMGYDPYKITYMPFTFGDNSIALYRGLNGLFIFKSVPFSANMPKLSCLTASALCQPLYLLSFSLEDLRRRSIDPTVNVIGLRHKYSREHSNGVFRLRSVRIKKLGPSPNQYLFSLSHFNFLAE

SEQ ID NO: 174413 - protein, 214 aa, Zea Mays
MPLPSAAQSALVVAAVAIATATVLLPFPRTPPRDRFADMVLANGTIYTADPARPFADAMSVRGGRVLRVGTYESELKGPRTRELNLSGNVVLPGFIDSHVHFIDGGLQLARVPLRGVRSKDDLVARVKEAVRDKQPGQWILGGGWNDDFGGDGLPAAVWLDDISPDNPVWLSRMDGHMGVANSLAMKIAGIDKNTNDPIGGTIIRTTEGGNTTN

SEQ ID NO: 174414 - protein, 177 aa, Zea Mays
MLLSDTLQLARVPLRGVRSKDDLVARVKEAVRDKQPGQWILGGGWNDDFGGDGLPAAVWLDDISPDNPVWLSRMDGHMGVANSLAMKIAGIDKNTNDPIGGTIIRTTEGEPTGLLVNTAMKPIFDVIQNVSNHERREALLRASRHALMRGVTTVVDVGSYFPGASAEKTWQDFAGIL

SEQ ID NO: 174415 - protein, 222 aa, Zea Mays
MPLPSAAQSALVVAAVAIATATVLLPFPRTPPRDRFADMVLANGTIYTADPARPFADAMSVRGGRVLRVGTYESVKELKGPRTRELNLSGNVVLPGFIDSHVHFIDGGLQLARVPLRGVRSKDDLVARVKEAVRDKQPGQWILGGGWNDDFGGDGLPAAVWLDDISPDNPVWLSRMDGHMGVANSLAMKIAGIDKNTNDPIGGTIIRTTEGERLFLEQVDMP

SEQ ID NO: 174416 - protein, 200 aa, Zea Mays
MGSLYGKMILRVCLFFPMPTWSRVSDLISEHGRSLSQWIHLGGVKAFLDGSLGSSSALFHEPYEGDPDNYGLQMTDLDSLLNRTLESDKSGLQVAIHAIGDKANDILLDMVDKIVDLNGAKDRRFRIEHAQHLAPGAANRFGKHGTIASVQPDHLLDDADHAWSKIGVERFQTSTPCKLSDPQCSASLLDGRSPGSLRSA

SEQ ID NO: 174417 - protein, 190 aa, Zea Mays
MLILPNAHMVSCFRGVKAFLDGSLGSSSALFHEPYEGDPDNYGLQMTDLDSLLNRTLESDKSGLQVAIHAIGDKANDILLDMVDKIVDLNGAKDRRFRIEHAQHLAPGAANRFGKHGTIASVQPDHLLDDADHAWSKIGVERSERSSYTFRSLLDGDFRHQPLASYPIRSVPQASWMGGPLDPCGALDPG

SEQ ID NO: 174418 - protein, 154 aa, Zea Mays
MGSLYGKMILRVCLFFPMPTWSRVSDLISEHGRSLSQWIHLGGVKAFLDGSLGSSSALFHEPYEGDPDNYGLQMTDLDSLLNRTLESDKSGLQVAIHAIGDKANDILLDMVDKIVDLNGAKDRRFRIEHAQHLAPGAANRFGKHGTIASVQIIY

SEQ ID NO: 174419 - protein, 152 aa, Zea Mays
MPLPSAAQSALVVAAVAIATATVLLPFPRTPPRDRFADMVLANGTIYTADPARPFADAMSVRGGRVLRVGTYESVKELKGPRTRELNLSGNVVLPGFIDSHVHFIDGGLQLARVPLRGVRSKDDLVARVKEAVRGSVLVFCSNAFSCHKLLL

SEQ ID NO: 174420 - protein, 218 aa, Zea Mays
MGSLYGKMILRVCLFFPMPTWSRVSDLISEHGRSLSQWIHLGGVKAFLDGSLGSSSALFHEPYEGDPDNYGLQMTDLDSLLNRTLESDKSGLQVAIHAIGDKANDILLDMVDKIVDLNGAKDRRFRIEHAQHLAPGAANRFGKHGTIASVQPDHLLDDADHAWSKIGVERSERSSYTFRSLLDGDFRHQPLASYPIRSVPQASWMGGPLDPCGALDPG

SEQ ID NO: 174421 - protein, 130 aa, Zea Mays
MGSLYGKMILRVCLFFPMPTWSRVSDLISEHGRSLSQWIHLGGVKAFLDGSLGSSSALFHEPYEGDPDNYGLQMTDLDSLLNRTLESDKSGLQVAIHAIGDKANDILLDMVDKIVDLNGAKDRRFRTHSV

SEQ ID NO: 174422 - protein, 204 aa, Zea Mays
MGSLYGKMILRDLISEHGRSLSQWIHLGGVKAFLDGSLGSSSALFHEPYEGDPDNYGLQMTDLDSLLNRTLESDKSGLQVAIHAIGDKANDILLDMVDKIVDLNGAKDRRFRIEHAQHLAPGAANRFGKHGTIASVQPDHLLDDADHAWSKIGVERSERSSYTFRSLLDGDFRHQPLASYPIRSVPQASWMGGPLDPCGALDPG

SEQ ID NO: 174423 - protein, 279 aa, Zea Mays
MPLPSAAQSALVVAAVAIATATVLLPFPRTPPRDRFADMVLANGTIYTADPARPFADAMSVRGGRVLRVGTYESVKELKGPRTRELNLSGNVVLPGFIDSHVHFIDGGLQLARVPLRGVRSKDDLVARVKEAVRDKQPGQWILGGGWNDDFGGDGLPAAVWLDDISPDNPVWLSRMDGHMGVANSLAMKIAGIDKNTNDPIGGTIIRTTEGEPTGLLVNTAMKPIFDVIQNVSNHERREALLRASRHALMRGVTTVVDVGSYFPGASAEKTWQDFAGIL

SEQ ID NO: 174424 - protein, 240 aa, Zea Mays
MDGHMGVANSLAMKIAGIDKNTNDPIGGTIIRTTEGEPTGLLVNTAMKPIFDVIQNVSNHERREALLRASRHALMRGVTTVVDVGSYFPGASAEKTWQDFADHLLDDADHAWSKIGVERSERSSYTFRSLLDGGAQLAFGSDWPISDINPLQAIRSAVFRKPPGWEVPWIPAERLTLDESLKAHTMSAAYACFLDHAVGSLSEGKYADFVVVPSTSWDEFSSDLPGHVLATYVSGRQAYP

SEQ ID NO: 174425 - protein, 403 aa, Zea Mays
MSWKAAPEKEVIQLKKEGRRNEYDMHKLLALNQRQKMVLQRKTEEAAAATKRFMELLEAKNSSLETYGSGNASGMQALMRAVDDELEVTIRAHELRSYYQRQMQERAAISKEIAKLEEEPKHKMSDCPQAMSPSARSFRISALENMSSSSSAMVSMASQLSEAEERERVFNGKGRWYHVRSLPEAENIMNHLFQLASSSRCKEKEHTIMELKEKVVVLNSEIRQLETQATDLRSTNKRTYPVQSLILVQACNQTIQSIQSRSNGFIWKGLKLFNGLNNSKKSARSNGTGFAPRQVFFFECFQVYLVIFVRFGYSKDNFNWVDDMDISDSEQLDELEARDTEAAPRNSADIPLKLPRAMATPAESNPTLTDRNAAKPDKSVSTGIKDSTGAAATRPPSQLRLLR

SEQ ID NO: 174426 - protein, 361 aa, Zea Mays
MSWKAAPEKEVIQLKKEGRRNEYDMHKLLALNQRQKMVLQRKTEEAAAATKRFMELLEAKNSSLETYGSGNASGMQALMRAVDDELEVTIRAHELRSYYQRQMQERAAISKEIAKLEEEPKHKMSDCPQAMSPSARSFRISALENMSSSSSAMVSMASQLSEAEERERVFNGKGRWYHVRSLPEAENIMNHLFQLASSSRCKEKEHTIMELKEKVVVLNSEIRQLETQATDLRSTNKRTYPVQSLILVQACNQTIQSIQSRSNGFIWKGLKLFNGLNNSKKSARSNGTGFAPRQVFFFECFQVYLVIFVRFGYSKDNFNWVDDMDISDSEQLDELEGMRDGSDSDSVQSTRKGRNTPVKSV

SEQ ID NO: 174427 - protein, 413 aa, Zea Mays
MKQFAKSDIFVLKQHYEKKLDDLEQENKALQKEIENLHHALTNVCSSMDENAQKLKENYLQKLNALESQVHELKKQKSDEAAKRLQEDIQHIKSQKDQLQQKAKQESEKFMSWKAAPEKEVIQLKKEGRRNEYDMHKLLALNQRQKMVLQRKTEEAAAATKRFMELLEAKNSSLETYGSGNASGMQALMRAVDDELEVTIRAHELRSYYQRQMQERAAISKEIAKLEEEPKHKMSDCPQAMSPSARSFRISALENMSSSSSAMVSMASQLSEAEERERVFNGKGRWYHVRSLPEAENIMNHLFQLASSSRCKEKEHTIMELKEKVVVLNSEIRQLETQATDLRSTNKRTYPVQSLILVQACNQTIQSIQSRSNGFIWKGLKLFNGLNNSKKSARSNGTGFAPRQCSTFPAFWL

SEQ ID NO: 174428 - protein, 471 aa, Zea Mays
MKQFAKSDIFVLKQHYEKKLDDLEQENKALQKEIENLHHALTNVCSSMDENAQKLKENYLQKLNALESQVHELKKQKSDEAAKRLQEDIQHIKSQKDQLQQKAKQESEKFMSWKAAPEKEVIQLKKEGRRNEYDMHKLLALNQRQKMVLQRKTEEAAAATKRFMELLEAKNSSLETYGSGNASGMQALMRAVDDELEVTIRAHELRSYYQRQMQERAAISKEIAKLEEEPKHKMSDCPQAMSPSARSFRISALENMSSSSSAMVSMASQLSEAEERERVFNGKGRWYHVRSLPEAENIMNHLFQLASSSRCKEKEHTIMELKEKVVVLNSEIRQLETQATDLRSTNKRTYPVQSLILVQACNQTIQSIQSRSNGFIWKGLKLFNGLNNSKKSARSNGTGFAPRQVFFFECFQVYLVIFVRFGYSKDNFNWVDDMDISDSEQLDELEGMRDGSDSDSVQSTRKGRNTPVKSV

SEQ ID NO: 174429 - protein, 383 aa, Zea Mays
MKQFAKSDIFVLKQHYEKKLDDLEQENKALQKEIENLHHALTNVCSSMDENAQKLKENYLQKLNALESQVHELKKQKSDEAAKRLQEDIQHIKSQKDQLQQKAKQESEKFMSWKAAPEKEVIQLKKEGRRNEYDMHKLLALNQRQKMVLQRKTEEAAAATKRFMELLEAKNSSLETYGSGNASGMQALMRAVDDELEVTIRAHELRSYYQRQMQERAAISKEIAKLEEEPKHKMSDCPQAMSPSARSFRISALENMSSSSSAMVSMASQLSEAEERERVFNGKGRWYHVRSLPEAENIMNHLFQLASSSRCKEKEHTIMELKEKVVVLNSEIRQLETQATDLRSTNKRTYPVQSLILVQACNQTIQSIQSRSNGFIWKGLKVK

SEQ ID NO: 174430 - protein, 552 aa, Zea Mays
MYMRVWDVVKIAKDPSETRPLILCEYSHAMGNSNGNIDAYWMAIDNTFGLQGGFIWDWADQGLLKEDSDGSKFWAYGGDFGDTPNDSNFCLNGIVWPDRTIHPALHEVKYLHQPIKISSADNMLKIENGHFFETTEALDFSWVLHGDGCVLGSGPLNIPTLAPQTSQLINMESSPWFALWSACAAKEVFLSVNVKQRHETRWAKAGHLLASAQLCLPQKNGFVPSVIALSSSPLVCERIGDNVTICKNNAWKIKVNSQLGTIDSWKVNDVELMSKGILPCFWRAPTDNDKGGFFTKPYDSRWREAFLDNVSFHSSQFSVKELPDNTVEFSTLYYGVPGHLPKPDDEASESILFRVKMVCRIHGSGDVVLDYEVNPRSDLPPLPRVGVVFSAGRSLSHVTWYGRGPFECYPDRKAAAHVGVYESSVEELHVPYIAPVECGGRADVRWVALRDAGGLGLYASAHGGSPPMQMSASYYGAAELDRATHVHRLVKGDDIEVHLDHRHMGLGGDDSWSPCVHEQYLLPPTRYAFSLRLCPLLPSSSCHDIYRSQLPS

SEQ ID NO: 174431 - protein, 523 aa, Zea Mays
MGNSNGNIDAYWMAIDNTFGLQGGFIWDWADQGLLKEDSDGSKFWAYGGDFGDTPNDSNFCLNGIVWPDRTIHPALHEVKYLHQPIKISSADNMLKIENGHFFETTEALDFSWVLHGDGCVLGSGPLNIPTLAPQTSQLINMESSPWFALWSACAAKEVFLSVNVKQRHETRWAKAGHLLASAQLCLPQKNGFVPSVIALSSSPLVCERIGDNVTICKNNAWKIKVNSQLGTIDSWKVNDVELMSKGILPCFWRAPTDNDKGGFFTKPYDSRWREAFLDNVSFHSSQFSVKELPDNTVEFSTLYYGVPGHLPKPDDEASESILFRVKMVCRIHGSGDVVLDYEVNPRSDLPPLPRVGVVFSAGRSLSHVTWYGRGPFECYPDRKAAAHVGVYESSVEELHVPYIAPVECGGRADVRWVALRDAGGLGLYASAHGGSPPMQMSASYYGAAELDRATHVHRLVKGDDIEVHLDHRHMGLGGDDSWSPCVHEQYLLPPTRYAFSLRLCPLLPSSSCHDIYRSQLPS

SEQ ID NO: 174432 - protein, 720 aa, Zea Mays
MAHKQMLVNGCPVVLRGVNRHEHHPRLGKTNLEACMIKDLILMRQNNINAVRNSHYPQHPRWYELCDIFGLYVIDEANIETHGFDESNTFKHPTLEPIWANAMLDRVVSMVERDKNHACIIVWSLGNESSYGPNHASMSGWIRERDPTRLLHYEGGGSRTSSTDIVCPMYMRVWDVVKIAKDPSETRPLILCEYSHAMGNSNGNIDAYWMAIDNTFGLQGGFIWDWADQGLLKEDSDGSKFWAYGGDFGDTPNDSNFCLNGIVWPDRTIHPALHEVKYLHQPIKISSADNMLKIENGHFFETTEALDFSWVLHGDGCVLGSGPLNIPTLAPQTSQLINMESSPWFALWSACAAKEVFLSVNVKQRHETRWAKAGHLLASAQLCLPQKNGFVPSVIALSSSPLVCERIGDNVTICKNNAWKIKVNSQLGTIDSWKVNDVELMSKGILPCFWRAPTDNDKGGFFTKPYDSRWREAFLDNVSFHSSQFSVKELPDNTVEFSTLYYGVPGHLPKPDDEASESILFRVKMVCRIHGSGDVVLDYEVNPRSDLPPLPRVGVVFSAGRSLSHVTWYGRGPFECYPDRKAAAHVGVYESSVEELHVPYIAPVECGGRADVRWVALRDAGGLGLYASAHGGSPPMQMSASYYGAAELDRATHVHRLVKGDDIEVHLDHRHMGLGGDDSWSPCVHEQYLLPPTRYAFSLRLCPLLPSSSCHDIYRSQLPS

SEQ ID NO: 174433 - protein, 883 aa, Zea Mays
MRWSDGSYLEDQDHWRLSGIHRDVLLLSKPQIFITDYFFKATLDENFSLADIEVEVEIDSHKQDQEHVPTLSIEATLIDNSGLSNSIDADLSSANAVNLKPKPKRTRSPCLGFHGYVLGGKIENPKLWSSEHPNLYTLVVLLKDANGKLIDCESCQVGIRNVVMAHKQMLVNGCPVVLRGVNRHEHHPRLGKTNLEACMIKDLILMRQNNINAVRNSHYPQHPRWYELCDIFGLYVIDEANIETHGFDESNTFKHPTLEPIWANAMLDRVVSMVERDKNHACIIVWSLGNESSYGPNHASMSGWIRERDPTRLLHYEGGGSRTSSTDIVCPMYMRVWDVVKIAKDPSETRPLILCEYSHAMGNSNGNIDAYWMAIDNTFGLQGGFIWDWADQGLLKEDSDGSKFWAYGGDFGDTPNDSNFCLNGIVWPDRTIHPALHEVKYLHQPIKISSADNMLKIENGHFFETTEALDFSWVLHGDGCVLGSGPLNIPTLAPQTSQLINMESSPWFALWSACAAKEVFLSVNVKQRHETRWAKAGHLLASAQLCLPQKNGFVPSVIALSSSPLVCERIGDNVTICKNNAWKIKVNSQLGTIDSWKVNDVELMSKGILPCFWRAPTDNDKGGFFTKPYDSRWREAFLDNVSFHSSQFSVKELPDNTVEFSTLYYGVPGHLPKPDDEASESILFRVKMVCRIHGSGDVVLDYEVNPRSDLPPLPRVGVVFSAGRSLSHVTWYGRGPFECYPDRKAAAHVGVYESSVEELHVPYIAPVECGGRADVRWVALRDAGGLGLYASAHGGSPPMQMSASYYGAAELDRATHVHRLVKGDDIEVHLDHRHMGLGGDDSWSPCVHEQYLLPPTRYAFSLRLCPLLPSSSCHDIYRSQLPS

SEQ ID NO: 174434 - protein, 593 aa, Zea Mays
MLLEIAITHSTQGWIRERDPTRLLHYEGGGSRTSSTDIVCPMYMRVWDVVKIAKDPSETRPLILCEYSHAMGNSNGNIDAYWMAIDNTFGLQGGFIWDWADQGLLKEDSDGSKFWAYGGDFGDTPNDSNFCLNGIVWPDRTIHPALHEVKYLHQPIKISSADNMLKIENGHFFETTEALDFSWVLHGDGCVLGSGPLNIPTLAPQTSQLINMESSPWFALWSACAAKEVFLSVNVKQRHETRWAKAGHLLASAQLCLPQKNGFVPSVIALSSSPLVCERIGDNVTICKNNAWKIKVNSQLGTIDSWKVNDVELMSKGILPCFWRAPTDNDKGGFFTKPYDSRWREAFLDNVSFHSSQFSVKELPDNTVEFSTLYYGVPGHLPKPDDEASESILFRVKMVCRIHGSGDVVLDYEVNPRSDLPPLPRVGVVFSAGRSLSHVTWYGRGPFECYPDRKAAAHVGVYESSVEELHVPYIAPVECGGRADVRWVALRDAGGLGLYASAHGGSPPMQMSASYYGAAELDRATHVHRLVKGDDIEVHLDHRHMGLGGDDSWSPCVHEQYLLPPTRYAFSLRLCPLLPSSSCHDIYRSQLPS

SEQ ID NO: 174435 - protein, 1065 aa, Zea Mays
MALAHASAMFPPSSPSHKTWEDPSFFKWRKREAHVPLRSQDTLEAALKYWHERRNVNYHNADTAVWNDDAVRGALESAAFWSKGLPYAKSLSGYWKFLLSPSAESIPERFYYAHFDDSNWSGLPVPSNWQMHGFDRPIYTNVTYPFPLNPPFVPADNPTGCYRTVFHIPKEWKGRRILLHFEAVDSAFFAWVNGVLVGYSQDSRLPAEFEITDCCHPCDSDKENVLAVQVMRWSDGSYLEDQDHWRLSGIHRDVLLLSKPQIFITDYFFKATLDENFSLADIEVEVEIDSHKQDQEHVPTLSIEATLIDNSGLSNSIDADLSSANAVNLKPKPKRTRSPCLGFHGYVLGGKIENPKLWSSEHPNLYTLVVLLKDANGKLIDCESCQVGIRNVVMAHKQMLVNGCPVVLRGVNRHEHHPRLGKTNLEACMIKDLILMRQNNINAVRNSHYPQHPSMVERDKNHACIIVWSLGNESSYGPNHASMSGWIRERDPTRLLHYEGGGSRTSSTDIVCPMYMRVWDVVKIAKDPSETRPLILCEYSHAMGNSNGNIDAYWMAIDNTFGLQGGFIWDWADQGLLKEDSDGSKFWAYGGDFGDTPNDSNFCLNGIVWPDRTIHPALHEVKYLHQPIKISSADNMLKIENGHFFETTEALDFSWVLHGDGCVLGSGPLNIPTLAPQTSQLINMESSPWFALWSACAAKEVFLSVNVKQRHETRWAKAGHLLASAQLCLPQKNGFVPSVIALSSSPLVCERIGDNVTICKNNAWKIKVNSQLGTIDSWKVNDVELMSKGILPCFWRAPTDNDKGGFFTKPYDSRWREAFLDNVSFHSSQFSVKELPDNTVEFSTLYYGVPGHLPKPDDEASESILFRVKMVCRIHGSGDVVLDYEVNPRSDLPPLPRVGVVFSAGRSLSHVTWYGRGPFECYPDRKAAAHVGVYESSVEELHVPYIAPVECGGRADVRWVALRDAGGLGLYASAHGGSPPMQMSASYYGAAELDRATHVHRLVKGDDIEVHLDHRHMGLGGDDSWSPCVHEQYLLPPTRYAFSLRLCPLLPSSSCHDIYRSQLPS

SEQ ID NO: 174436 - protein, 962 aa, Zea Mays
MALAHASAMFPPSSPSHKTWEDPSFFKWRKREAHVPLRSQDTLEAALKYWHERRNVNYHNADTAVWNDDAVRGALESAAFWSKGLPYAKSLSGYWKFLLSPSAESIPERFYYAHFDDSNWSGLPVPSNWQMHGFDRPIYTNVTYPFPLNPPFVPADNPTGCYRTVFHIPKEWKGRRILLHFEAVDSAFFAWVNGVLVGYSQDSRLPAEFEITDCCHPCDSDKENVLAVQVMRWSDGSYLEDQDHWRLSGIHRDVLLLSKPQIFITDYFFKATLDENFSLADIEVEVEIDSHKQDQEHVPTLSIEATLIDNSGLSNSIDADLSSANAVNLKPKPKRTRSPCLGFHGYVLGGKIENPKLWSSEHPNLYTLVVLLKDANGKLIDCESCQVGIRNVVMAHKQMLVNGCPVVLRGVNRHEHHPRLGKTNLEACMIKDLILMRQNNINAVRNSHYPQHPRWYELCDIFGLYVIDEANIETHGFDESNTFKHPTLEPIWANAMLDRVVSMVERDKNHACIIVWSLGNESSYGPNHASMSGWIRERDPTRLLHYEGGGSRTSSTDIVCPMYMRVWDVVKIAKDPSETRPLILCEYSHAMGNSNGNIDAYWMAIDNTFGLQGGFIWDWADQGLLKEDSDGSKFWAYGGDFGDTPNDSNFCLNGIVWPDRTIHPALHEVKYLHQPIKISSADNMLKIENGHFFETTEALDFSWVLHGDGCVLGSGPLNIPTLAPQTSQLINMESSPWFALWSACAAKEVFLSVNVKQRHETRWAKAGHLLASAQLCLPQKNGFVPSVIALSSSPLVCERIGDNVTICKNNAWKIKVNSQLGTIDSWKVNDVELMSKGILPCFWRAPTDNDKGGFFTKPYDSRWREAFLDNVSFHSSQFSVKELPDNTVEFSTLYYGVPGHLPKPDDEASESILFRVKMVCRIHGSGDVVLDYEVNPRSDLPPLPRGNARPQAGEGGRHRGAS

SEQ ID NO: 174437 - protein, 396 aa, Zea Mays
MALAHASAMFPPSSPSHKTWEDPSFFKWRKREAHVPLRSQDTLEAALKYWHERRNVNYHNADTAVWNDDAVRGALESAAFWSKGLPYAKSLSGYWKFLLSPSAESIPERFYYAHFDDSNWSGLPVPSNWQMHGFDRPIYTNVTYPFPLNPPFVPADNPTGCYRTVFHIPKEWKGRRILLHFEAVDSAFFAWVNGVLVGYSQDSRLPAEFEITDCCHPCDSDKENVLAVQVMRWSDGSYLEDQDHWRLSGIHRDVLLLSKPQIFITDYFFKATLDENFSLADIEVEVEIDSHKQDQEHVPTLSIEATLIDNSGLSNSIDADLSSANAVNLKPKPKRTRSPCLGFHGYVLGGKIENPKLWSSEHMPMGSLLTVNHAKWAFVMWSWHTSKCSSMDVLLC

SEQ ID NO: 174438 - protein, 592 aa, Zea Mays
MNLHMDLIMLPCWIRERDPTRLLHYEGGGSRTSSTDIVCPMYMRVWDVVKIAKDPSETRPLILCEYSHAMGNSNGNIDAYWMAIDNTFGLQGGFIWDWADQGLLKEDSDGSKFWAYGGDFGDTPNDSNFCLNGIVWPDRTIHPALHEVKYLHQPIKISSADNMLKIENGHFFETTEALDFSWVLHGDGCVLGSGPLNIPTLAPQTSQLINMESSPWFALWSACAAKEVFLSVNVKQRHETRWAKAGHLLASAQLCLPQKNGFVPSVIALSSSPLVCERIGDNVTICKNNAWKIKVNSQLGTIDSWKVNDVELMSKGILPCFWRAPTDNDKGGFFTKPYDSRWREAFLDNVSFHSSQFSVKELPDNTVEFSTLYYGVPGHLPKPDDEASESILFRVKMVCRIHGSGDVVLDYEVNPRSDLPPLPRVGVVFSAGRSLSHVTWYGRGPFECYPDRKAAAHVGVYESSVEELHVPYIAPVECGGRADVRWVALRDAGGLGLYASAHGGSPPMQMSASYYGAAELDRATHVHRLVKGDDIEVHLDHRHMGLGGDDSWSPCVHEQYLLPPTRYAFSLRLCPLLPSSSCHDIYRSQLPS

SEQ ID NO: 174439 - protein, 551 aa, Zea Mays
MALAHASAMFPPSSPSHKTWEDPSFFKWRKREAHVPLRSQDTLEAALKYWHERRNVNYHNADTAVWNDDAVRGALESAAFWSKGLPYAKSLSGYWKFLLSPSAESIPERFYYAHFDDSNWSGLPVPSNWQMHGFDRPIYTNVTYPFPLNPPFVPADNPTGCYRTVFHIPKEWKGRRILLHFEAVDSAFFAWVNGVLVGYSQDSRLPAEFEITDCCHPCDSDKENVLAVQVMRWSDGSYLEDQDHWRLSGIHRDVLLLSKPQIFITDYFFKATLDENFSLADIEVEVEIDSHKQDQEHVPTLSIEATLIDNSGLSNSIDADLSSANAVNLKPKPKRTRSPCLGFHGYVLGGKIENPKLWSSEHPNLYTLVVLLKDANGKLIDCESCQVGIRNVVMAHKQMLVNGCPVVLRGVNRHEHHPRLGKTNLEACMIKDLILMRQNNINAVRNSHYPQHPRWYELCDIFGLYVIDEANIETHGFDESNTFKHPTLEPIWANAMLDRVVSMVERDKNHACIIVWSLGNESSYGPNHASMSDIHMLWETVMGILMRIGWP

SEQ ID NO: 174440 - protein, 1113 aa, Zea Mays
MALAHASAMFPPSSPSHKTWEDPSFFKWRKREAHVPLRSQDTLEAALKYWHERRNVNYHNADTAVWNDDAVRGALESAAFWSKGLPYAKSLSGYWKFLLSPSAESIPERFYYAHFDDSNWSGLPVPSNWQMHGFDRPIYTNVTYPFPLNPPFVPADNPTGCYRTVFHIPKEWKGRRILLHFEAVDSAFFAWVNGVLVGYSQDSRLPAEFEITDCCHPCDSDKENVLAVQVMRWSDGSYLEDQDHWRLSGIHRDVLLLSKPQIFITDYFFKATLDENFSLADIEVEVEIDSHKQDQEHVPTLSIEATLIDNSGLSNSIDADLSSANAVNLKPKPKRTRSPCLGFHGYVLGGKIENPKLWSSEHPNLYTLVVLLKDANGKLIDCESCQVGIRNVVMAHKQMLVNGCPVVLRGVNRHEHHPRLGKTNLEACMIKDLILMRQNNINAVRNSHYPQHPRWYELCDIFGLYVIDEANIETHGFDESNTFKHPTLEPIWANAMLDRVVSMVERDKNHACIIVWSLGNESSYGPNHASMSGWIRERDPTRLLHYEGGGSRTSSTDIVCPMYMRVWDVVKIAKDPSETRPLILCEYSHAMGNSNGNIDAYWMAIDNTFGLQGGFIWDWADQGLLKEDSDGSKFWAYGGDFGDTPNDSNFCLNGIVWPDRTIHPALHEVKYLHQPIKISSADNMLKIENGHFFETTEALDFSWVLHGDGCVLGSGPLNIPTLAPQTSQLINMESSPWFALWSACAAKEVFLSVNVKQRHETRWAKAGHLLASAQLCLPQKNGFVPSVIALSSSPLVCERIGDNVTICKNNAWKIKVNSQLGTIDSWKVNDVELMSKGILPCFWRAPTDNDKGGFFTKPYDSRWREAFLDNVSFHSSQFSVKELPDNTVEFSTLYYGVPGHLPKPDDEASESILFRVKMVCRIHGSGDVVLDYEVNPRSDLPPLPRVGVVFSAGRSLSHVTWYGRGPFECYPDRKAAAHVGVYESSVEELHVPYIAPVECGGRADVRWVALRDAGGLGLYASAHGGSPPMQMSASYYGAAELDRATHVHRLVKGDDIEVHLDHRHMGLGGDDSWSPCVHEQYLLPPTRYAFSLRLCPLLPSSSCHDIYRSQLPS

SEQ ID NO: 174441 - protein, 620 aa, Zea Mays
MEPHLPAHLTRLLKTQPLHALLSDASTYRAARHLFDAVPRPTAALCCAFVSVLSKLSLHQELIEAVSSLHRRGGAIPSGCIPLVLKSCALSAASCQGTQTHCHALVRGMLGDVFVQTALVDFYAKNGNMDSAVMAFEEMPIKDPIPMNCLITGYSRSGDVEEARRLFDSMPRKTSASWNSMIACYAHGGEFQEALTLFDQMLREGASPNAITITTVFSICAKTGDLETGRRAKAWVSEEDLQNVIVHTALMEMYVKCRAIDEARREFDRMPRRDVVAWSTMIAGYSHNGRPHESLELFERMKATNCKPNEVTLVGVLSACAQLGSDELGEQIGSYIESQTLPLTSYLGSALIDMYTKCGHVARARDVFHRMEQKVVIAWNSMIRGLALNGFAEDAIALYGEMVGDGVQPNEITFLALLTACTHAGLVDKGMAFFQEMKKNKQHASPQVEHCACIVDLLCKSGRLWEAYKFICDMEVEPNAVIWTTLLSACRAHADVELAKLAAGKLVVLEPNSSSIYVLLSNIYADAGLWGDVREIRDLMRSKNLQKLSAYSWIELDGEVHRFLVQDTYHPRSAEIYNVVDGLGLQLERTSPDHELISELGLPSTRRPEPRTPDSVPLKS

SEQ ID NO: 174442 - protein, 997 aa, Zea Mays
MVLRERRETSKAIFQRYPRPEKECQSFSLISHDRSLDIICKDKDEAEVWFAGLKTLISRCHQRKWRTESRSDILSSGATSPRTYTRRSSPLSSPFSSNDSIHKDGSDNYRLRTPYGSPPKNGLEKAFSDVMLYAVPPRGFFPSDSNAGSVHSMSSGQSDNTNGHSRGVPMDAFRVSYSSAVSSSSHGSGHDDGDALGDVFIWGEGTGEGILGGGGSRVGSSSGAKMDCLVPKPLEFAVRLDVQNISCGGRHAALVTKQAKLIDALSHMNIELVACGEYHTCAVTLSGDLYTWGDGTFKFGLLGHGNDVSHWVPKHVNGPLEGIHVSSISCGPWHTALVTSAGQLFTFGDGSFGVLGHGDRESISVPREVESLKGLRTVRAACGVWHTAAVVEVMSVNSNSSNCSSGKIFTWGDGDKGRLGHGDKEPKLVPTCVAALVEPNFCQVACGHCLTVALTTSGHVYTMGSAVYGQLGNAQADGMLPVRVEGKLYKNFVEEISCGAYHVAVLTSRTEVYTWGKGANGRLGHGDTEDKNTPTLVEALKDKQVRNVVCGINFTAAICIHKWVSGVDQSMCSGCRQPFNLRRKRHNCYNCALVFCHSCSSKKSLKASLAPNGNKPYRVCDTCYSKLTKGLETDMHFSAKRAATVPGFSDTIEEDLETRSNAQLSRLSSMESFKHLDSRYSKKNKKFEFNSTRVSPVPNGSSHWSGLNISRSFNPVFGSSKKFFSASVPGSRIVSRATSPISRRTSPPRSTTPTPTLGGLTSPRVPTDGKPTNDALSQEVLNLRSQVESLTRKSQLLELELERTTKQLKEAISIAGEETAKCKAAKEVIKSLTAQLKGMAERLPGGAAKNTKLPPLPGISIPSDISSLAMESVGSPSSSGEQIINGHNGLLASNGPSSVRNKTSHPEVGKNGSRPPDAESCHDAEWVEQDEPGVYITLTALPGGARDLKRVRFSRKRFSETQAEQWWQENRARVYQQYNVRVVDKSTASADNDIAAN

SEQ ID NO: 174443 - protein, 1087 aa, Zea Mays
MCNWDARKALLDFDWASHDNTHCDDQSVWRCTDCHVLDCEDHKIASISNKEKSFDLHEIFKTLPGVRMEKNMQVARITPDERALELGIWSVPDDVLHKVLILLKPRDLVRVAATCHHLRTLAATVMPCMKLKLFPHQEAAVEWMLKREQNVHVLAHPLYKDFCTEDGFPFYINVISAEISTGDAPTINDFCGGLFCDEPGLGKTVTTLSLILKTHGTMAYPPQGVDVSWCMHKPDKKCGYYELSPSFSSNRNSSSVSKKLLGEDVIADCPSPDDSVCSTRSSRKRGRLLSPDPTKVMLHAAIENSPSSSNSKVQPMPAMHILKFTKNSRQVRKNPMDAYSDVSVGNKRKIDTTSEVSETWVQCDACRKWRRVSDGTVLDSTTVWFCTMNPDPTRQKCTAPEESWDFKRKITYLPGFYKKNSLPGNEENVSFFTNILKDYVTMINSETKKALLWLAKLSPTKLLEMEFVGLTRPVLDTRATTGKGAHPYYKIFQAFGLVRKIEKATLIVVPANLIDHWTTQIQRHVSSDTLNVFVWGDHKKPSAHNLAWDYDIVITTFSRLSAEWGPQKRSPLKQIHWFRVILDEGHTLGSSLALTNKLQMAVALVASNRWILTGTPTPNTPTSQVAHLHLMLKFLHDETYGQNYQSWDSGIHRPFEAQMEEGRVRLVQLLQRTMISARKADLKTIPPCIKKITFLDFNEGHAKSYNELVVTIRRNILMADWNDPSHVESLLNPKQWKFRAATLKNVRLSCCVAGHIKVAEAGQDIQETMDELVQQGLDPSSDEYQLIRYSLLNGASCFRCSVWCRLPVITPCRHLLCLDCVALDSEKCTLPGCGYHYEMQSPETRARPENPNPKWPVPKDLIELQPSYKQDDWDPDWQSTSSSKVAYMIEKLRSLREAHMNHGNNITNSVGHSNTLSYQPQAMLDKVIIFSQFLEHIHVIEQQLTIAGIIYSGMYSPMPLASKRSALTKFQEDPTCMALVMDGTAALGLDLSFVTRVFLMEPIWDRSMEEQVISRAHRMGATRPIHVETLAMRGTIEEQMLKLLQDSNACRKIVDKRTGSTDNEGGRSHRSLHDFAESSYLAQLSSV

SEQ ID NO: 174444 - protein, 657 aa, Zea Mays
MAAAGERRKLCGYLRAVVSIPGGDVAAAASILPLSPCTLSACGAVALAPLPDDVRAQPRWPRSRAPGVVRLLRTLVANRCVEVEGTLLRVVTRRRPGEGEGEGDGAAVEARAVVLLDVYIPVAAWSGWQFPRSRSAAAAVFKHVRCNWDARKALLDFDWASHDNTHCDDQSVWRCTDCHVLDCEDHKIASISNKEKSFDLHEIFKTLPGVRMEKNMQVARITPDERALELGIWSVPDDVLHKVLILLKPRDLVRVAATCHHLRTLAATVMPCMKLKLFPHQEAAVEWMLKREQNVHVLAHPLYKDFCTEDGFPFYINVISAEISTGDAPTINDFCGGLFCDEPGLGKTVTTLSLILKTHGTMAYPPQGVDVSWCMHKPDKKCGYYELSPSFSSNRNSSSVSKKLLGEDVIADCPSPDDSVCSTRSSRKRGRLLSPDPTKVMLHAAIENSPSSSNSKVQPMPAMHILKFTKNSRQVRKNPMDAYSDVSVGNKRKIDTTSEVSETWVQCDACRKWRRVSDGTVLDSTTVWFCTMNPDPTRQKCTAPEESWDFKRKITYLPGFYKKNSLPGNEENVSFFTNILKDYVTMINSETKKALLWLAKLSPTKLLEMEFVGLTRPVLDTRATTGKGAHPYYKIFQAFGLVRKIEKDTTPCVLGYP

SEQ ID NO: 174445 - protein, 965 aa, Zea Mays
MCNWDARKALLDFDWASHDNTHCDDQSVWRCTDCHVLDCEDHKIASISNKEKSFDLHEIFKTLPGVRMEKNMQVARITPDERALELGIWSVPDDVLHKVLILLKPRDLVRVAATCHHLRTLAATVMPCMKLKLFPHQEAAVEWMLKREQNVHVLAHPLYKDFCTEDGFPFYINVISAEISTGDAPTINDFCGGLFCDEPGLGKTVTTLSLILKTHGTMAYPPQGVDVSWCMHKPDKKCGYYELSPSFSSNRNSSSVSKKLLGEDVIADCPSPDDSVCSTRSSRKRGRLLSPDPTKVMLHAAIENSPSSSNSKVQPMPAMHILKFTKNSRQVRKNPMDAYSDVSVGNKRKIDTTSEVSETWVQCDACRKWRRVSDGTVLDSTTVWFCTMNPDPTRQKCTAPEESWDFKRKITYLPGFYKKNSLPGNEENVSFFTNILKDYVTMINSETKKALLWLAKLSPTKLLEMEFVGLTRPVLDTRATTGKGAHPYYKIFQAFGLVRKIEKATLIVVPANLIDHWTTQIQRHVSSDTLNVFVWGDHKKPSAHNLAWDYDIVITTFSRLSAEWGPQKRSPLKQIHWFRVILDEGHTLGSSLALTNKLQMAVALVASNRWILTGTPTPNTPTSQVAHLHLMLKFLHDETYGQNYQSWDSGIHRPFEAQMEEGRVRLVQLLQRTMISARKADLKTIPPCIKKITFLDFNEGHAKSYNELVVTIRRNILMADWNDPSHVESLLNPKQWKFRAATLKNVRLSCCVAGHIKVAEAGQDIQETMDELVQQGLDPSSDEYQLIRYSLLNGASCFRCSVWCRLPVITPCRHLLCLDCVALDSEKCTLPGCGYHYEMQSPETRARPENPNPKWPVPKDLIELQPSYKQDDWDPDWQSTSSSKVAYMIEKLRSLREAHMNHGNNITNSVGHSNTLSYQPQAMLDKVIIFSQFLEHIHVIEQQLTIAGIIYSGMYSPMPLASKYL

SEQ ID NO: 174446 - protein, 148 aa, Zea Mays
MAAAGERRKLCGYLRAVVSIPGGDVAAAASILPLSPCTLSACGAVALAPLPDDVRAQPRWPRSRAPGVVRLLRTLVANRCVEVEGTLLRVVTRRRPGEGEGEGDGAAVEARAVVLLDVYIPVAAWSGWQFPRSRSAAAAVFKHVRQLE

SEQ ID NO: 174447 - protein, 786 aa, Zea Mays
MSTAKVLDPAFQGAGQKVGTEIWRIEDFKPVALPKSDYGKFYCGDSYIVLQTTCTKGGAYLYDIHFWIGKDSSQDEAGTAAIKTVELDAILGGRAIQHRELQGYESDKFLSYFKPCIIPLEGGFASGFKKPEEEKFETRLYICRGKRAIRVKEVPFARSSLNHDDVFVLDTENKIYQFNGANSNIQERAKALEVIQHLKEKYHGGVCDVAIVDDGKLQAESDSGEFWVLFGGFAPIGKKTVSDDDVVLETTAPKLYSINDGQLKLEETALTKAVLENTKCFLLDCGAEIYVWVGRVTQMEDRKSATKAVDEFLINQKRPKTTRVTQVIQGYESHAFKSKFESWPVGNAAGNPGTEEGRGKVAALLKQQRVDPKGAAKSTTPVNEEVPPLLDGGGKLEVWCVDGNTKTALPKEDIGKFYSGDCYIILYTHHSGDKKEEYYLSYWIGKDSLVDDQVSASQIINTMWNSLKGRPVLGRIYQGKEPPQFVALFQPMVILKGGIGSGYKKLIEEKGAMGETYTTEGIALIRVSETSIYNNKTLQVDAVATSLSSTESFVLQSGNAMFTWFGNSSTYEQQQWAAKVAEFLKPGVAVKHCKEGTESSAFWFALGGKQSYTNKNTPQDIITREPHLYAFSFKNGRLEVTEIFNFSQDDLLTEDMMVLDTHGEVFIWIGQYVESKEKQKAFDIGQKYVEHANSIEDLSPHVPLYKVMEGNEPCFFKTYFSWDNTKSLVHGNSFQKKLSLLFGLRSEGAPRSSGNGGPTQRASALAALSSAFNPSSQQRLMSTGLS

SEQ ID NO: 174448 - protein, 806 aa, Zea Mays
MTWVEIPRAEKKPLPTDDCIQIGWFPKDCMQIGQRLGYRRARRTVCRSDSGWGTGVQIGWFKKVLEKQSRESRAPSCRAGTDGRPGRKKRGRRAGRGVDDGWVDSVTLSKRFCRLGYRFGSLWIHAVLQTKHAIAEKHNFLIFEDRKFADIGNTVTMQYEGGIFRILDWADIVNAHIVPGPGIVDGLKLKGSPKGRGLLLLAEMSSAGNLAHGDYTAAAVKIAEQHSDFVMGFISVNPASWSVTPSSPAFIHATPGVQMAAGGDDLGQQYNNPESVINYRGSDIIIVGRGIIKASDPLKTACEYRRKMSSQELFSPVRAAQSATTHTPPTNTMDAAAKEALILDLHAVEAVKLGTFVLKSGITSPIYLDLRVLVSHPRLLASVASLLGALPATRPYDLLCGVPYTALPFAAALSVAASVPMLLSRYDTKRVEGAFRAAQTVLIVEDLVTSGASVLETVAPLRAEGLVVADAVVVIDREQGGRENLAASGVALHSLMTLTEMLAVLARHGKVGEEKIAEVRRFLQANRKVAVPGVPAGPPKPSATARRKSFAERAGLATNPMGRRLFEVMEAKQSNLCVAADVGTAKELLELADKVGPEICMLKTHVDILSDFTPDFGANLRTIAGKHNFLIFEDRKFADIGNTVTMQSEGGIFRILDWADIINAHIVPGPGIVDGLKLKGLPKGRGLLLLAEMSSAGNLAYGDYTAAAVKIAEQHPDFVIGFISVNPASWSPAPSSPAFIHATPGVQIAAGGDALGQQYNTPFSVINDRGSDIIIVGRGIIKASNPVETARQYRMEGWQAYQSGFS

SEQ ID NO: 174449 - protein, 690 aa, Zea Mays
MIAEKHNFLIFEDRKFADIGNTVTMQYEGGIFRILDWADIVNAHIVPGPGIVDGLKLKLMNHGTHTNCRVLALKGSPKGRGLLLLAEMSSAGNLAHGDYTAAAVKIAEQHSDFVMGFISVNPASWSVTPSSPAFIHATPGVQMAAGGDDLGQQYNNPESVINYRGSDIIIVGRGIIKASDPLKTACEYRRKMSSQELFSPVRAAQSATTHTPPTNTMDAAAKEALILDLHAVEAVKLGTFVLKSGITSPIYLDLRVLVSHPRLLASVASLLGALPATRPYDLLCGVPYTALPFAAALSVAASVPMLLSRYDTKRVEGAFRAAQTVLIVEDLVTSGASVLETVAPLRAEGLVVADAVVVIDREQGGRENLAASGVALHSLMTLTEMLAVLARHGKVGEEKIAEVRRFLQANRKVAVPGVPAGPPKPSATARRKSFAERAGLATNPMGRRLFEVMEAKQSNLCVAADVGTAKELLELADKVGPEICMLKTHVDILSDFTPDFGANLRTIAGKHNFLIFEDRKFADIGNTVTMQSEGGIFRILDWADIINAHIVPGPGIVDGLKLKGLPKGRGLLLLAEMSSAGNLAYGDYTAAAVKIAEQHPDFVIGFISVNPASWSPAPSSPAFIHATPGVQIAAGGDALGQQYNTPFSVINDRGSDIIIVGRGIIKASNPVETARQYRMEGWQAYQSGFS

SEQ ID NO: 174450 - protein, 56 aa, Zea Mays
MMPAKLLSSLVNSHLPRDDYRPPVNGTRGFGSCVLDASSYLKLNISISPIRFKEKT

SEQ ID NO: 174451 - protein, 75 aa, Zea Mays
MDGKNLTYSLCSGQFRCLQLMKTLEYLALLNQLKLCKHICRVKCYFHSNKNKRQVIVACIFSVEHVTLYADMLVK

SEQ ID NO: 174452 - protein, 91 aa, Zea Mays
MAPPHESLLSIFMEKSRLARVPFHPWRRCCKCPAINDPLPPTALTFHRQNCSSSIPPTALTLNPHLSDLVLITILPLARRLTFTRALAVPR

SEQ ID NO: 174453 - protein, 52 aa, Zea Mays
MMILASIYTLLKTAHDAIRSAAVNGGGGGGGGGGDGWSSRDSKGLGREPLIT

SEQ ID NO: 174454 - protein, 250 aa, Zea Mays
MASGSGSGSDFSVVVVGSDFAVDAGAALLAPADHEVWHDCLPVLAEADACFSDLEERQVVRIQGTDRAGRTIVRVVGKFFPVIDGERLKKYVFYKLRTELPVGPFCILYIHSTVQSDDNNPGMSILRTIYEELPPEYKERLQVFYFLHPGLRSRLAIATLGRLFLSGGLYWKIKYISRLEYLWGDIKKREVEIPDFVIEHDKVLEHRPLTDYGIEPDPLHLADVPAVGYSLGRYEDKWTPEDRWYSRNYM

SEQ ID NO: 174455 - protein, 394 aa, Zea Mays
MKVDLNMLLMLLWTANTRGGGAKIQPKEQQKQVRKVIRKVASNRAAASNWTMMASRQSENNAQEETSPLTTPNANIARIIPSLPLETRWPPFPLRRYANFWLPEVALKEGVPGVHSCFEPRPTDVFLASFPKSGTTWLKALAFATLKRSTHPPFDDDHPLRHCNPHDCVRFLELDFNQQKDELEALPSPRVLATHLPYSLLPGSITGDGERSGCRIVYVCREPKDVLVSSWLFTRKAAPACGVDARSFTIQEALELFCDGRCLGGPQWNHVLHYWKESVRRPDRVLFLRYEEVLIEPEAHVRKLANFMGCGFSEEEEERGVVSAIVELCSLGKLRDMEVNRNGSTLLGIKNESFFRKGVVGDWSKHMTQEMAQRLDKVVEDALQGTGFTFASTA

SEQ ID NO: 174456 - protein, 70 aa, Zea Mays
MASDNLSRSTSVRACLVSLANREYDSAPAEAFFFLYCATVRAAAFAKGNAASLPAQHQHGPAGIVFLDLF

SEQ ID NO: 174457 - protein, 311 aa, Zea Mays
MGVGTWLINHMKSFFEKSSQDLSPAKGKKAKGTKSYLPRKNTAAYAILITLHRAKTSGKDFMMKQELIDAAEASGLSRDAIGPNKSKAKQSYGKDWYTGWSCMKTLLSNRLVTKWSNPAKYMLTQEGEGTARDCLSRSGLDDSARPLTIIGAHNTSAMDPSVARHSPELVSDSSLTKKKSNCYRQVQATNYEGIICCDSDSEEPCGKDIPLKGMEPITSCGPPDISRPFQGTPKLQSSTMGSAKLAMPPRRANENFLEAYEVILILDDREKFGSRSRKVADNICSLSHFAVDVSWDQSLHSSISCPTFSLL

SEQ ID NO: 174458 - protein, 298 aa, Zea Mays
MEPITSCGPPDISRPFQGTPKLQSSTMGSAKLAMPPRRANENFLEAYEVILILDDREKFGSRSRKVADNICSLSHFAVDVRQLPVGDGIWIARHKEDHTEYVLDFIVERKEVMDLDGSIEDNRYRDQKLRMKKCGLRKLIYLVEGDLNRAPKRVKTACFTTEILDGFDVQRTTGFADTQKRYVDLTRSVIAYYDASFSIVGKASPVCPTYDDFKRKCYDLKKKTVSDIFGCQLMQVPQVTEEAAQAVVELYPTPLLLAKAYSILGGDTSAQEKMLKKKNEMVNAGASRNIFHLIWGDG

SEQ ID NO: 174459 - protein, 322 aa, Zea Mays
MRPLPKKPNAALPVPKQLKVHHPENESLSRFFLEKWRAMMQEPDGLSQNNYLAFANANRSLCSSKEPIRTLKDFSNVKGVGTWLINHMKSFFEKSSQDLSPAKGKKAKGTKSYLPRKNTAAYAILITLHRAKTSGKDFMMKQELIDAAEASGLSRDAIGPNKSKAKQSYGKDWYTGWSCMKTLLSNRLVTKWSNPAKYMLTQEGEGTARDCLSRSGLDDSARPLTIIGAHNTSAMDPSVARHSPELVSDSSLTKKKSNCYRQVQATNYEGIICCDSDSEEPCGKDIPLKEAWSLLLVVDHQIFLVHSKEHPNCNLLQWVLLN

SEQ ID NO: 174460 - protein, 218 aa, Zea Mays
MRPLPKKPNAALPVPKQLKVHHPENESLSRFFLEKWRAMMQEPDGLSQNNYLAFANANRSLCSSKEPIRTLKDFSNVKGVGTWLINHMKSFFEKSSQDLSPAKGKKAKGTKSYLPRKNTAAYAILITLHRAKTSGKDFMMKQELIDAAEASGLSRDAIGPNKSKAKQSYGKDWYTGWSCMKTLLSNRLVTKWSNPAKITKESFVAIQIQKSHVERTFP

SEQ ID NO: 174461 - protein, 532 aa, Zea Mays
MRPLPKKPNAALPVPKQLKVHHPENESLSRFFLEKWRAMMQEPDGLSQNNYLAFANANRSLCSSKEPIRTLKDFSNVKGVGTWLINHMKSFFEKSSQDLSPAKGKKAKGTKSYLPRKNTAAYAILITLHRAKTSGKDFMMKQELIDAAEASGLSRDAIGPNKSKAKQSYGKDWYTGWSCMKTLLSNRLVTKWSNPAKYMLTQEGEGTARDCLSRSGLDDSARPLTIIGAHNTSAMDPSVARHSPELVSDSSLTKKKSNCYRQVQATNYEGIICCDSDSEEPCGKDIPLKGMEPITSCGPPDISRPFQGTPKLQSSTMGSAKLAMPPRRANENFLEAYEVILILDDREKFGSRSRKVADNICSLSHFAVDVRQLPVGDGIWIARHKEDHTEYVLDFIVERKEVMDLDGSIEDNRYRDQKLRMKKCGLRKLIYLVEGDLNRAPKRVKTACFTTEILDGFDVQRTTGFADTQKRYVDLTRSVIAYYDASFSIVGKASPVCPTYDDFKRKCYDLKKKTVSDIFGCQLMQKKLHKLL

SEQ ID NO: 174462 - protein, 536 aa, Zea Mays
MRPLPKKPNAALPVPKQLKVHHPENESLSRFFLEKWRAMMQEPDGLSQNNYLAFANANRSLCSSKEPIRTLKDFSNVKGVGTWLINHMKSFFEKSSQDLSPAKGKKAKGTKSYLPRKNTAAYAILITLHRAKTSGKDFMMKQELIDAAEASGLSRDAIGPNKSKAKQSYGKDWYTGWSCMKTLLSNRLVTKWSNPAKYMLTQEGEGTARDCLSRSGLDDSARPLTIIGAHNTSAMDPSVARHSPELVSDSSLTKKKSNCYRQVQATNYEGIICCDSDSEEPCGKDIPLKGMEPITSCGPPDISRPFQGTPKLQSSTMVRQLPVGDGIWIARHKEDHTEYVLDFIVERKEVMDLDGSIEDNRYRDQKLRMKKCGLRKLIYLVEGDLNRAPKRVKTACFTTEILDGFDVQRTTGFADTQKRYVDLTRSVIAYYDASFSIVGKASPVCPTYDDFKRKCYDLKKKTVSDIFGCQLMQVPQVTEEAAQAVVELYPTPLLLAKAYSILGGDTSAQEKMLKKKNEMVNAGASRNIFHLIWGDG

SEQ ID NO: 174463 - protein, 562 aa, Zea Mays
MRPLPKKPNAALPVPKQLKVHHPENESLSRFFLEKWRAMMQEPDGLSQNNYLAFANANRSLCSSKEPIRTLKDFSNVKGVGTWLINHMKSFFEKSSQDLSPAKGKKAKGTKSYLPRKNTAAYAILITLHRAKTSGKDFMMKQELIDAAEASGLSRDAIGPNKSKAKQSYGKDWYTGWSCMKTLLSNRLVTKWSNPAKYMLTQEGEGTARDCLSRSGLDDSARPLTIIGAHNTSAMDPSVARHSPELVSDSSLTKKKSNCYRQVQATNYEGIICCDSDSEEPCGKDIPLKGMEPITSCGPPDISRPFQGTPKLQSSTMGSAKLAMPPRRANENFLEAYEVILILDDREKFGSRSRKVADNICSLSHFAVDVRQLPVGDGIWIARHKEDHTEYVLDFIVERKEVMDLDGSIEDNRYRDQKLRMKKCGLRKLIYLVEGDLNRAPKRVKTACFTTEILDGFDVQRTTGFADTQKRYVDLTRSVIAYYDASFSIVGKASPVCPTYDDFKRKCYDLKKKTVSDIFGCQLMQVPQVTEEAAQAVVELYPTPLLLAKAYSILGGDTSYLG

SEQ ID NO: 174464 - protein, 263 aa, Zea Mays
MIVRILGLYCSRKVASKKVADNIGSQFNVPVEVKRLPVGDGIWIARHKKNFTEYVLDFIVERKNVADLGSSIRDNRYKDQKTRLQRCGLRKLMYLVEGDPNTSKGSAASIKTACFTTEIFEGFDVLRTNGYTDTMRTYGYLTLSIMDYYSTNFCRLDKSACICPTYDEFERHCHCLQKRTVSQIFALQLMQVPQVTEKVALTVIEFYPTLFSLARAYSMLEGDIHAQEEMLKNKSKMINAGASRNIFRLVWGDGCQSSGLILD

SEQ ID NO: 174465 - protein, 439 aa, Zea Mays
MAAPAPALMQLKVRIPENEEVARCLHEKRLSMREQPAGFKEHLDRTFAKAYRNVCAANEPIRTLKEFSKINGVGPWLIRCMKGFFAESKQDSPAKGKKTRVPKCCVTKKKTAASASLGKGPPSNLNCQNAQFSSSQGTLELQPSGKTGSTDFNMLDKDVVSMNNCILAMPPRQSSEEFLEAYEVVLILDDRENFGYCSRKVASKKVADNIGSQFNVPVEVKRLPVGDGIWIARHKKNFTEYVLDFIVERKNVADLGSSIRDNRYKDQKTRLQRCGLRKLMYLVEGDPNTSKGSAASIKTACFTTEIFEGFDVLRTNGYTDTMRTYGYLTLSIMDYYSTNFCRLDKSACICPTYDEFERHCHCLQKRTVPQVTEKVALTVIEFYPTLFSLARAYSMLEGDIHAQEEMLKNKSKMINAGASRNIFRLVWGDGCQSSGLILD

SEQ ID NO: 174466 - protein, 425 aa, Zea Mays
MAAPAPALMQLKVRIPENEEVARCLHEKRLSMREQPAGFKEHLDRTFAKAYRNVCAANEPIRTLKEFSKINGVGPWLIRCMKGFFAESKQDSPAKGKKTRVPKCCVTKKKTAASASLGKGPPSNLNCQNAQFSSSQGTLELQPSGKTGSTDFNMLDKDVVSMNNCILAMPPRQSSEEFLEAYEVVLILDDRENFGYCSRKVASKKVADNIGSQFNVPVEVKRLPVGDGIWIARHKKNFTEYVLDFIVERKNVADLGSSIRDNRYKDQKTRLQRCGLRKLMYLVEGDPNTSKGSAASIKTACFTTEIFEGFDVLRTNGLDKSACICPTYDEFERHCHCLQKRTVSQIFALQLMQVPQVTEKVALTVIEFYPTLFSLARAYSMLEGDIHAQEEMLKNKSKMINAGASRNIFRLVWGDGCQSSGLILD

SEQ ID NO: 174467 - protein, 359 aa, Zea Mays
MSAPPMSPSGLSRSSPKSRPWLIRCMKGFFAESKQDSPAKGKKTRVPKCCVTKKKTAASASLGKGPPSNLNCQNAQFSSSQGTLELQPSGKTGSTDFNMLDKDVVSMNNCILAMPPRQSSEEFLEAYEVVLILDDRENFGYCSRKVASKKVADNIGSQFNVPVEVKRLPVGDGIWIARHKKNFTEYVLDFIVERKNVADLGSSIRDNRYKDQKTRLQRCGLRKLMYLVEGDPNTSKGSAASIKTACFTTEIFEGFDVLRTNGLDKSACICPTYDEFERHCHCLQKRTVPQVTEKVALTVIEFYPTLFSLARAYSMLEGDIHAQEEMLKNKSKMINAGASRNIFRLVWGDGCQSSGLILD

SEQ ID NO: 174468 - protein, 109 aa, Zea Mays
MLAKGELSPDMGDSIKGKGMIQGISAVGAFFELLSQPSLSVQHPEENKQVAPAELCPILKRLYRILIKRELPARDILQALRDETMNDPRERIEMAQSHAFYRPSLLGKP

SEQ ID NO: 174469 - protein, 255 aa, Zea Mays
MFGRATSGHFGAGVPTENILYLGGPNIASEIYNKEYANARICGSNKWRKPLAKFLRQPHFIVWDNSDLVTHEVMGGLKNVYAIGAGMVAALTNESATSKSVYFAHCTSEMIFITHLLTEQPEKLAGPLLADTYVTLLKGRNAWYGQMLAKGELSPDMGDSIKGKGMIQGISAVGAFFELLSQPSLSVQHPEENKQVAPAELCPILKRLYRILIKRELPARDILQALRDETMNDPRERIEMAQSHAFYRPSLLGKP

SEQ ID NO: 174470 - protein, 304 aa, Zea Mays
MVGSVHVNGSVHGGNGTATEERLDELRRLLGKSEGDLLKIVSVGAGAWGSVFAALLQDAYGHFRDKVQIRIWRRPGRTVDRSTAEHLFEVINSREDVLRRLIRRCAYLKYVEARLGDRTLYADEILKDGFCLNMIETPLCPLKVVTNLQEAVWDADIVVNGVPSTETREVFDEISEYWKERISVPVIISLAKGIEASLDPIPRIITPTQMISSATGVPTENILYLGGPNIASEIYNKEYANARICGSNKWRKPLAKFLRQPHFIVWDNSDLVTHEVMGGLKNVYAIGAGNTNFCLFLTDNIIVQ

SEQ ID NO: 174471 - protein, 910 aa, Zea Mays
MDWLQRFSPMHVDWANKWLVIPYNGSSVCLQGLQSSFPSGSVVQLLLSAEIQLNSVQEESQLEVHPKVQAVLQQFSDVFADPVGLPPSRQCDHAIPLVPGAHPFNVKPYRYPPALKDEIETQVRDMLSQGVIQKSHSLFASPVLLVKKKDQTWRFCIDYRYLNAITVKSSYPVPIFDQLMDELSSAQWFSKLDLKAGYHQICLVPGEEPKTAFQTHLGHFEFRVMAFGLTGAPNTFLGAMNDTLAPVLRRCALVFFDDILIYSPTFESHLQHLSEVLTLLKQDHWKIKLSKCAFAQTTIAYLGHIISAHGVATDPAKLQIIQQWSAPTNTKELRSFLGLAGFYRKFVRHFSIIAKPLTDLLKKNSLFVWTSDHQSAFETLMQALISAPVLALPDFNQPFCIYTDACSTGVGAVLMQKGHPLAFLSKALGPKNQGLSTYEKEYLAIVIAIAQWRSYLQLAEFHIYTDHQSLAQLNEQRLHTVWQQKVYTKLAGLQYKIVYKKGDNAAADALSRYSHQPDQLLHISHCTPTWVQEIVEGYQHDQQAQSLLSQLALDPSALAATYTLKDGLIRHKGRLWLGKNEVLQQKVIAAFHDSALGGHSGVPVTYRRVKQLFSWKGMKKTVHQFVQSCPICQQAKPDRAKYPGLLAPLPIPPHAWHSISMDFIEGLPKSGSWNCILVVVDRFSKYSHFLALAHPFTAAGVAKVFLDNIYKLHGMPASIVSDRDRIFTSQFWQQLFTLTRTQLCMSSAYHPQSDGQTERVNQCIETYLRCFVHACPKKCCHWLSVAEFWYNTNYHSAIGRSPFEVLYGHAARHFGIDSVSSVAVEDLRQWLTDREIISKLIHQHLTRAQSRMKKQADKKRSERSFQFARIKSSHFDSSALTQCCNGWAPWRTSFSYRRPLLYIQYFMFPN

SEQ ID NO: 174472 - protein, 251 aa, Zea Mays
MKTEADMWRPDLEKRVDDLELEVTRVNKFLERERRQPAFDKPGLFGPHASASVRPPAGFPHADGARGHRFEPPNREGEFGFPATQPHGLVKAGVPTENILYLGGPNIASEIYNKEYANARICGSNKWRKPLAKFLRQPHFIVWDNSDLVTHEVMGGLKNVYAIGAGMVAALTNESATSKSVYFAHCTSEMIFITHLLTEQPEKLAGPLLADTYVTLLKGRNAWYGQMLAKGELSPDMGDSIKGKGMIQVME

SEQ ID NO: 174473 - protein, 335 aa, Zea Mays
MKTEADMWRPDLEKRVDDLELEVTRVNKFLERERRQPAFDKPGLFGPHASASVRPPAGFPHADGARGHRFEPPNREGEFGFPATQPHGLVKAGVPTENILYLGGPNIASEIYNKEYANARICGSNKWRKPLAKFLRQPHFIVWDNSDLVTHEVMGGLKNVYAIGAGMVAALTNESATSKSVYFAHCTSEMIFITHLLTEQPEKLAGPLLADTYVTLLKGRNAWYGQMLAKGELSPDMGDSIKGKGMIQGISAVGAFFELLSQPSLSVQHPEENKQVAPAELCPILKRLYRILIKRELPARDILQALRDETMNDPRERIEMAQSHAFYRPSLLGKP

SEQ ID NO: 174474 - protein, 178 aa, Zea Mays
MKQSCSFLPVSESWSKSRCSESYRDGTTMFLGDLEKRIGEGTLRRVLGAPQAGNLGCPNESGMGGATWHAKNKFGDRCNATTLGLAARWRHAHADAAFFLTSGTGGPAFQSLDAARRQRRRPPAAGSSSTSSRTAAASSQGSTSSRSQGSPGILDAESPTTPVGHAIQDQARSAASLV

SEQ ID NO: 174475 - protein, 363 aa, Zea Mays
MLSLLHHTNLVNLIGYCADGDQRLLVYEFMPLGSLEDHLHDLPPDKEPLDWNTRMKIAAGAAKGLEHLHDKASPPVIYRDFKSSNILLGEGFHPKLSDFGLAKLGPVGDKTHVSTRVMGTYGYCAPEYAMTGQLTVKSDVYSFGVVFLELITGRKAIDNTKTQGEQNLVAWARPLFKDRRKFPKMADPMLQGRFPMRGLYQALAVAAMCLQEQAATRPHIGDVVTALSYLASQAYDPNAPVQHVRSNSSTPRARNPAGWNGDQRSVRSPNHHSPDPRRRDAAGASKYGAEVSRTSSTSDSGRRSGLDDMDLTGSQVGSPAQTGRRREAPRGTDRQRAVAEARTWGENSRERTNGHGSFDSTHE

SEQ ID NO: 174476 - protein, 359 aa, Zea Mays
MLSLLHHTNLVNLIGYCADGDQRLLVYEFMPLGSLEDHLHDKEPLDWNTRMKIAAGAAKGLEHLHDKASPPVIYRDFKSSNILLGEGFHPKLSDFGLAKLGPVGDKTHVSTRVMGTYGYCAPEYAMTGQLTVKSDVYSFGVVFLELITGRKAIDNTKTQGEQNLVAWARPLFKDRRKFPKMADPMLQGRFPMRGLYQALAVAAMCLQEQAATRPHIGDVVTALSYLASQAYDPNAPVQHVRSNSSTPRARNPAGWNGDQRSVRSPNHHSPDPRRRDAAGASKYGAEVSRTSSTSDSGRRSGLDDMDLTGSQVGSPAQTGRRREAPRGTDRQRAVAEARTWGENSRERTNGHGSFDSTHE

SEQ ID NO: 174477 - protein, 70 aa, Zea Mays
MCCAADMLSVPSRKQVVIVGQKGSEEFQDMVAATFSSYDPNRTVSEDCSVAKLFFLVSVPVLLANVPQIL

SEQ ID NO: 174478 - protein, 148 aa, Zea Mays
MSRLRSCAEPQGNRTEPPSDAVFETRLRQLSIALPLMCCAADMLSVPSRKQVVIVGQKGSEEFQDMVAATFSSYDPNRTVIQIDPRNTEEMEFWDGNNANIAQMARGSPPGKPAVAHVCQDFKCSPPVTSPGSLRELLNKTLAAASSA

SEQ ID NO: 174479 - protein, 191 aa, Zea Mays
MTYVSALHGGGGWPLSVFLSPDLKPLMGGTYFPPDDNYGRPGFKTVLRKVKEAWETKREALERTGNLVIEQLRDALSAKASSQDVPNDLAVVSVDQCVEKLASSYDPKFGGFGSAPKFPRPVEDYIMLYKFHKYMEAGKEIEALNIKKMVTHTLDCMARGGVHDHIGGGFHRYSVDECWHVPHFEKMISDQ

SEQ ID NO: 174480 - protein, 350 aa, Zea Mays
MSPAASAPVFSHLGPLIPPPTPMLSTLLRHRLTAAASSSSPTHSTPLRLRPLAAAMSSSASAPHGGRKPNRLAAEHSPYLLQHAHNPVDWYPWGEEAFQKARAKDVPIFLSSMNSPDTIVCHVMEVESFENEEVAKLLNDWFVSIKVDREERPDVDKVYMTYVSALHGGGGWPLSVFLSPDLKPLMGGTYFPPDDNYGRPGFKTVLRKVKEAWETKREALERTGNLVIEQLRDALSAKASSQDVPNDLAVVSVDQCVEKLASSYDPKFGGFGSAPKFPRPVEDYIMLYKFHKYMEAGKEIEALNIKKMVTHTLDCMARGGVHDHIGGGFHRYSVDECWHVPHFEKMISDQ

SEQ ID NO: 174481 - protein, 155 aa, Zea Mays
MATAAAARHQHQHQQRRGAQRGRRRGSGIRCSSPAQEFASLAAVFRRRLVVGATTAAAAAVGANFGGVTSFLLGLSPELGRSLRLDVLYPVGGFTRCLDSDNGFGTRHYNKLHTDATQRIEVLSVAFLNSSIHQVGLETRRYCTEKRRRQNCKDR

SEQ ID NO: 174482 - protein, 734 aa, Zea Mays
MLLTASAIETNKRSSVQTKSKQKRKVLLVEQPNKKATWKNANSVRNTSTNNSRPLSADDIQKAKMRAMFMQEKRGKIDINKLSDKPQAMDTKKAAGLVNSNPSAMPISPHTSAAQPVDPSPSTSKQSTDPQPDNTEISGGLKLNIGSKNNVIEKLDCKRVLWQIPPAVWIDPSWSVGAGDNSKELEVQTQRNRREKETFYTSQKDVPMNPKDPWDLEMDFDDSLTPEVPIDQVPDVDAMETESVGAAPSAVAPVKDKQIESASSTSGAVADDEEANTDYELLTVLLRNPELVFALTSNKGENMPNEQTIALLDTLKQTGLSLSELVNRLGNGAGLPKEPEPEPEPIPASLPSPTPPDRTSRAVWIPEHAMQVRAAPTLHLPSRGSTPPVANAVQQGFSNVVSSLPSQPYAPPVSVLPAQIQANAPPSLPLLAVSVNPPVQHVSPVNNLLNRASVHQHGQQQYALLSDPVATPLHQQAAGSKPAVAAHPSLPEPNASSHTAFPWQSNAADMTHAGRNATADPWAAARAANSYSTASASTVPSANQNAYGDQGKQGAYSSYGSSAASSRPVVPGHGHDRNGYSRSALVEYPWDGHHQRHSRSPDPGVVRDYDTDYGGAQGYSQQPLTQWSAGKVQQQGYNPEPSRQWSSSQAHQGGYAPAEPSRQWSSSQAHQSYAPELPRQWSSERRGYDDAEPSRTWSSGQQNPEAPRQWSRGKQDPYYSPSHSRRSYDQHRRR

SEQ ID NO: 174483 - protein, 1176 aa, Zea Mays
MELVLVKPAAGALVEVGSGSVAGAGSIPAMVAAQQEILHEQVDQLQRLVVAQCRLTGVNPLAQEMAAGALSIKIGKRPRDLLNPKAVKCMQSLFALKDILGKKETREISLLCGVTVTQVREFFTVQRSRVRKFVRLSQEKALRIETPKEQDNSYSINTEQIPPDIEAQAEVIEPLRTLEPVVLQSSLQPTCVPQISSQSMELQQSDLQHMEVFQNSLQQAEAQHNIAAPIMPSGAMVMQPTDAKISSDSVQKEVKQEGVHSGVASEDKKFLESIFALMQKEETFSGQVKLMEWILQINNVTVLSRFVTMGGLTIMSTWLSQAAIEEQTSVIHVIFKVLLHLPLHKALPVHMSVVLQTINKLRFYRTQDISSRARNLLSRLSKVLVRIQALKKPQKDLICKQRISEILRDESWKSEVDITQEEVLALTDGANESRKPEPRKTPMLLTASAIETNKRSSVQTKSKQKRKVLLVEQPNKKATWKNANSVRNTSTNNSRPLSADDIQKAKMRAMFMQEKRGKIDINKLSDKPQAMDTKKAAGLVNSNPSAMPISPHTSAAQPVDPSPSTSKQSTDPQPDNTEISGGLKLNIGSKNNVIEKLDCKRVLWQIPPAVWIDPSWSVGAGDNSKELEVQTQRNRREKETFYTSQKDVPMNPKDPWDLEMDFDDSLTPEVPIDQVPDVDAMETESVGAAPSAVAPVKDKQIESASSTSGAVADDEEANTDYELLTVLLRNPELVFALTSNKGENMPNEQTIALLDTLKQTGLSLSELVNRLGNGAGLPKEPEPEPEPIPASLPSPTPPDRTSRAVWIPEHAMQVRAAPTLHLPSRGSTPPVANAVQQGFSNVVSSLPSQPYAPPVSVLPAQIQANAPPSLPLLAVSVNPPVQHVSPVNNLLNRASVHQHGQQQYALLSDPVATPLHQQAAGSKPAVAAHPSLPEPNASSHTAFPWQSNAADMTHAGRNATADPWAAARAANSYSTASASTVPSANQNAYGDQGKQGAYSSYGSSAASSRPVVPGHGHDRNGYSRSALVEYPWDGHHQRHSRSPDPGVVRDYDTDYGGAQGYSQQPLTQWSAGKVQQQGYNPEPSRQWSSSQAHQGGYAPAEPSRQWSSSQAHQSYAPELPRQWSSERRGYDDAEPSRTWSSGQQNPEAPRQWSRGKQDPYYSPSHSRRSYDQHRRR

SEQ ID NO: 174484 - protein, 722 aa, Zea Mays
MVLMRAESKQKRKVLLVEQPNKKATWKNANSVRNTSTNNSRPLSADDIQKAKMRAMFMQEKRGKIDINKLSDKPQAMDTKKAAGLVNSNPSAMPISPHTSAAQPVDPSPSTSKQSTDPQPDNTEISGGLKLNIGSKNNVIEKLDCKRVLWQIPPAVWIDPSWSVGAGDNSKELEVQTQRNRREKETFYTSQKDVPMNPKDPWDLEMDFDDSLTPEVPIDQVPDVDAMETESVGAAPSAVAPVKDKQIESASSTSGAVADDEEANTDYELLTVLLRNPELVFALTSNKGENMPNEQTIALLDTLKQTGLSLSELVNRLGNGAGLPKEPEPEPEPIPASLPSPTPPDRTSRAVWIPEHAMQVRAAPTLHLPSRGSTPPVANAVQQGFSNVVSSLPSQPYAPPVSVLPAQIQANAPPSLPLLAVSVNPPVQHVSPVNNLLNRASVHQHGQQQYALLSDPVATPLHQQAAGSKPAVAAHPSLPEPNASSHTAFPWQSNAADMTHAGRNATADPWAAARAANSYSTASASTVPSANQNAYGDQGKQGAYSSYGSSAASSRPVVPGHGHDRNGYSRSALVEYPWDGHHQRHSRSPDPGVVRDYDTDYGGAQGYSQQPLTQWSAGKVQQQGYNPEPSRQWSSSQAHQGGYAPAEPSRQWSSSQAHQSYAPELPRQWSSERRGYDDAEPSRTWSSGQQNPEAPRQWSRGKQDPYYSPSHSRRSYDQHRRR

SEQ ID NO: 174485 - protein, 976 aa, Zea Mays
MELQQSDLQHMEVFQNSLQQAEAQHNIAAPIMPSGAMVMQPTDAKISSDSVQKEVKQEGVHSGVASEDKKFLESIFALMQKEETFSGQVKLMEWILQINNVTVLSRFVTMGGLTIMSTWLSQAAIEEQTSVIHVIFKVLLHLPLHKALPVHMSVVLQTINKLRFYRTQDISSRARNLLSRLSKVLVRIQALKKPQKDLICKQRISEILRDESWKSEVDITEEVLALTDGANESRKPEPRKTPMLLTASAIETNKRSSVQTKSKQKRKVLLVEQPNKKATWKNANSVRNTSTNNSRPLSADDIQKAKMRAMFMQEKRGKIDINKLSDKPQAMDTKKAAGLVNSNPSAMPISPHTSAAQPVDPSPSTSKQSTDPQPDNTEISGGLKLNIGSKNNVIEKLDCKRVLWQIPPAVWIDPSWSVGAGDNSKELEVQTQRNRREKETFYTSQKDVPMNPKDPWDLEMDFDDSLTPEVPIDQVPDVDAMETESVGAAPSAVAPVKDKQIESASSTSGAVADDEEANTDYELLTVLLRNPELVFALTSNKGENMPNEQTIALLDTLKQTGLSLSELVNRLGNGAGLPKEPEPEPEPIPASLPSPTPPDRTSRAVWIPEHAMQVRAAPTLHLPSRGSTPPVANAVQQGFSNVVSSLPSQPYAPPVSVLPAQIQANAPPSLPLLAVSVNPPVQHVSPVNNLLNRASVHQHGQQQYALLSDPVATPLHQQAAGSKPAVAAHPSLPEPNASSHTAFPWQSNAADMTHAGRNATADPWAAARAANSYSTASASTVPSANQNAYGDQGKQGAYSSYGSSAASSRPVVPGHGHDRNGYSRSALVEYPWDGHHQRHSRSPDPGVVRDYDTDYGGAQGYSQQPLTQWSAGKVQQQGYNPEPSRQWSSSQAHQGGYAPAEPSRQWSSSQAHQSYAPELPRQWSSERRGYDDAEPSRTWSSGQQNPEAPRQWSRGKQDPYYSPSHSRRSYDQHRRR

SEQ ID NO: 174486 - protein, 825 aa, Zea Mays
MSVVLQTINKLRFYRTQDISSRARNLLSRLSKVLVRIQALKKPQKDLICKQRISEILRDESWKSEVDITEEVLALTDGANESRKPEPRKTPMLLTASAIETNKRSSVQTKSKQKRKVLLVEQPNKKATWKNANSVRNTSTNNSRPLSADDIQKAKMRAMFMQEKRGKIDINKLSDKPQAMDTKKAAGLVNSNPSAMPISPHTSAAQPVDPSPSTSKQSTDPQPDNTEISGGLKLNIGSKNNVIEKLDCKRVLWQIPPAVWIDPSWSVGAGDNSKELEVQTQRNRREKETFYTSQKDVPMNPKDPWDLEMDFDDSLTPEVPIDQVPDVDAMETESVGAAPSAVAPVKDKQIESASSTSGAVADDEEANTDYELLTVLLRNPELVFALTSNKGENMPNEQTIALLDTLKQTGLSLSELVNRLGNGAGLPKEPEPEPEPIPASLPSPTPPDRTSRAVWIPEHAMQVRAAPTLHLPSRGSTPPVANAVQQGFSNVVSSLPSQPYAPPVSVLPAQIQANAPPSLPLLAVSVNPPVQHVSPVNNLLNRASVHQHGQQQYALLSDPVATPLHQQAAGSKPAVAAHPSLPEPNASSHTAFPWQSNAADMTHAGRNATADPWAAARAANSYSTASASTVPSANQNAYGDQGKQGAYSSYGSSAASSRPVVPGHGHDRNGYSRSALVEYPWDGHHQRHSRSPDPGVVRDYDTDYGGAQGYSQQPLTQWSAGKVQQQGYNPEPSRQWSSSQAHQGGYAPAEPSRQWSSSQAHQSYAPELPRQWSSERRGYDDAEPSRTWSSGQQNPEAPRQWSRGKQDPYYSPSHSRRSYDQHRRR

SEQ ID NO: 174487 - protein, 1086 aa, Zea Mays
MQSLFALKDILGKKETREISLLCGVTVTQVREFFTVQRSRVRKFVRLSQEKALRIETPKEQDNSYSINTEQIPPDIEAQAEVIEPLRTLEPVVLQSSLQPTCVPQISSQSMELQQSDLQHMEVFQNSLQQAEAQHNIAAPIMPSGAMVMQPTDAKISSDSVQKEVKQEGVHSGVASEDKKFLESIFALMQKEETFSGQVKLMEWILQINNVTVLSRFVTMGGLTIMSTWLSQAAIEEQTSVIHVIFKVLLHLPLHKALPVHMSVVLQTINKLRFYRTQDISSRARNLLSRLSKVLVRIQALKKPQKDLICKQRISEILRDESWKSEVDITEEVLALTDGANESRKPEPRKTPMLLTASAIETNKRSSVQTKSKQKRKVLLVEQPNKKATWKNANSVRNTSTNNSRPLSADDIQKAKMRAMFMQEKRGKIDINKLSDKPQAMDTKKAAGLVNSNPSAMPISPHTSAAQPVDPSPSTSKQSTDPQPDNTEISGGLKLNIGSKNNVIEKLDCKRVLWQIPPAVWIDPSWSVGAGDNSKELEVQTQRNRREKETFYTSQKDVPMNPKDPWDLEMDFDDSLTPEVPIDQVPDVDAMETESVGAAPSAVAPVKDKQIESASSTSGAVADDEEANTDYELLTVLLRNPELVFALTSNKGENMPNEQTIALLDTLKQTGLSLSELVNRLGNGAGLPKEPEPEPEPIPASLPSPTPPDRTSRAVWIPEHAMQVRAAPTLHLPSRGSTPPVANAVQQGFSNVVSSLPSQPYAPPVSVLPAQIQANAPPSLPLLAVSVNPPVQHVSPVNNLLNRASVHQHGQQQYALLSDPVATPLHQQAAGSKPAVAAHPSLPEPNASSHTAFPWQSNAADMTHAGRNATADPWAAARAANSYSTASASTVPSANQNAYGDQGKQGAYSSYGSSAASSRPVVPGHGHDRNGYSRSALVEYPWDGHHQRHSRSPDPGVVRDYDTDYGGAQGYSQQPLTQWSAGKVQQQGYNPEPSRQWSSSQAHQGGYAPAEPSRQWSSSQAHQSYAPELPRQWSSERRGYDDAEPSRTWSSGQQNPEAPRQWSRGKQDPYYSPSHSRRSYDQHRRR

SEQ ID NO: 174488 - protein, 1166 aa, Zea Mays
MELVLVKPAAGALVEVGSGSVAGAGSIPAMVAAQQEILHEQVDQLQRLVVAQCRLTGVNPLAQEMAAGALSIKIGKRPRDLLNPKAVKCMQSLFALKDILGKKETREISLLCGVTVTQVREFFTVQRSRVRKFVRLSQEKALRIETPKEQDNSYSINTEQIPPDIEAQAEVIEPLRTLEPVVLQSSLQPTCVPQISSQSMELQQSDLQHMEVFQNSLQQAEAQHNIAAPIMPSGAMVMQPTDAKISSDSVQKEVKQEGVHSGVASEDKKFLESIFALMQKEETFSGQVKLMEWILQINNVTVLSRFVTMGGLTIMSTWLSQAAIEEQTSVIHVIFKALPVHMSVVLQTINKLRFYRTQDISSRARNLLSRLSKVLVRIQALKKPQKDLICKQRISEILRDESWKSEVDITEEVLALTDGANESRKPEPRKTPMLLTASAIETNKRSSVQTKSKQKRKVLLVEQPNKKATWKNANSVRNTSTNNSRPLSADDIQKAKMRAMFMQEKRGKIDINKLSDKPQAMDTKKAAGLVNSNPSAMPISPHTSAAQPVDPSPSTSKQSTDPQPDNTEISGGLKLNIGSKNNVIEKLDCKRVLWQIPPAVWIDPSWSVGAGDNSKELEVQTQRNRREKETFYTSQKDVPMNPKDPWDLEMDFDDSLTPEVPIDQVPDVDAMETESVGAAPSAVAPVKDKQIESASSTSGAVADDEEANTDYELLTVLLRNPELVFALTSNKGENMPNEQTIALLDTLKQTGLSLSELVNRLGNGAGLPKEPEPEPEPIPASLPSPTPPDRTSRAVWIPEHAMQVRAAPTLHLPSRGSTPPVANAVQQGFSNVVSSLPSQPYAPPVSVLPAQIQANAPPSLPLLAVSVNPPVQHVSPVNNLLNRASVHQHGQQQYALLSDPVATPLHQQAAGSKPAVAAHPSLPEPNASSHTAFPWQSNAADMTHAGRNATADPWAAARAANSYSTASASTVPSANQNAYGDQGKQGAYSSYGSSAASSRPVVPGHGHDRNGYSRSALVEYPWDGHHQRHSRSPDPGVVRDYDTDYGGAQGYSQQPLTQWSAGKVQQQGYNPEPSRQWSSSQAHQGGYAPAEPSRQWSSSQAHQSYAPELPRQWSSERRGYDDAEPSRTWSSGQQNPEAPRQWSRGKQDPYYSPSHSRRSYDQHRRR

SEQ ID NO: 174489 - protein, 256 aa, Zea Mays
MNKGFWRGNVPALLMYMPYTAIQFTVLHKLKTFASGSSKTEDHLHLSPYLSYVSGALAGCAATIGSYPFDLLRTILASQGEPKIYPNMRSAFVDIIKTRGVQGLYSGLSPTLVEIIPYAGLQFGSYDTFKRSMMTWNRYKYSHLNFGSEDDSVSSFQLFLCGFAAGTFSKAACHPLDVVKKRFQIEGLKRHPRYGARIESSTYKGMYHALKEIVAKEGFGGLYKGLFPSLVKSAPAGAVTFVAYEYISDWLESILM

SEQ ID NO: 174490 - protein, 242 aa, Zea Mays
MYMPYTAIQFTVLHKLKTFASGSSKTEDHLHLSPYLSYVSGALAGCAATIGSYPFDLLRTILASQGEPKIYPNMRSAFVDIIKTRGVQGLYSGLSPTLVEIIPYAGLQFGSYDTFKRSMMTWNRYKYSHLNFGSEDDSVSSFQLFLCGFAAGTFSKAACHPLDVVKKRFQIEGLKRHPRYGARIESSTYKGMYHALKEIVAKEGFGGLYKGLFPSLVKSAPAGAVTFVAYEYISDWLESILM

SEQ ID NO: 174491 - protein, 244 aa, Zea Mays
MYMPYTAIQFTVLHKLKTFASGSSKTEDHLHLSPYLSYVSGALAGCAATIGSYPFDLLRTILASQGEPKIYPNMRSAFVDIIKTRGVQGLYSGLSPTLVEIIPYAGLQFGSYDTFKRSMMTWNRYKYSHLNFGSEDDSVSSFQLFLCGFAAGTFSKAACHPLDVVKKRFQIEGLKRHPRYGARIESSTYKGMYHALKEIVAKEGFGGLYKGLFPSLVKSAPAGAVTFVAYEYISDWIGSKAGVE

SEQ ID NO: 174492 - protein, 283 aa, Zea Mays
MGSGEEPSQMRRALVDSLAGAISGGISRTVTSPLDVIKIRFQVQLEPTTSWGILRRDIYGPSKYTGLLQATKDILREEGLPGFWRGNVPALLMYMPYTAIQFTVLHKLKTFASGSSKTEDHLHLSPYLSYVSGALAGCAATIGSYPFDLLRTILASQGEPKTWNRYKYSHLNFGSEDDSVSSFQLFLCGFAAGTFSKAACHPLDVVKKRFQIEGLKRHPRYGARIESSTYKGMYHALKEIVAKEGFGGLYKGLFPSLVKSAPAGAVTFVAYEYISDWLESILM

SEQ ID NO: 174493 - protein, 332 aa, Zea Mays
MGSGEEPSQMRRALVDSLAGAISGGISRTVTSPLDVIKIRFQLEPTTSWGILRRDIYGPSKYTGLLQATKDILREEGLPGFWRGNVPALLMYMPYTAIQFTVLHKLKTFASGSSKTEDHLHLSPYLSYVSGALAGCAATIGSYPFDLLRTILASQGEPKIYPNMRSAFVDIIKTRGVQGLYSGLSPTLVEIIPYAGLQFGSYDTFKRSMMTWNRYKYSHLNFGSEDDSVSSFQLFLCGFAAGTFSKAACHPLDVVKKRFQIEGLKRHPRYGARIESSTYKGMYHALKEIVAKEGFGGLYKGLFPSLVKSAPAGAVTFVAYEYISDWLESILM

SEQ ID NO: 174494 - protein, 213 aa, Zea Mays
MAPLKLYGMPLSPNVVRVATVLNEKGLDFEIVPVDLTTGAHKQPDFLALNPFGQIPALVDGDEVLFESRAINRYIASKYASEGTDLLPATASAAKLEVWLEVESHHFYPNASPRCSTCTRRTSPATSTSPGTSSRSPTPTTRPTCSTSARPPRPGSSPPAPTSRPGGRPSSPAPRSRRPSPPSPCPRRPPPRLDLALRCAVAWVADASEPRVE

SEQ ID NO: 174495 - protein, 552 aa, Zea Mays
MCEIQVSGNETNLPSADRSMRKGKTPMNESGEELLMDSELQNLKLHDNLGNEISHNIIAISDMNGEAPKRMEIDCSTGGPSGESTSYQFNENNWISSEQTANNYFSRTSSSVVVPTEWGRPNAPLWGGRVVGRRQIRYIRGSSCLSTDEYNAFMNIFERGSLLYCNMSFDALLSVRKQLEEFGFPCKAVNDSLWLQMLLCHRVQAIVADTCRNCCLMNSSCACKQAYVSSHTHYRQEHDRSSASDNIGNVYLADGQGDGNGVLGPVRVNVRGAVDGLAGIGRGNSNVPGAAWAPTRYVFSRVPYGLGSRNGQQFAIDESEPRIDRNGDISADGLTALVNLSQENNAAHLQDQSLFETGMQTRYRSVPSVSTPGGSSVQMQESKEHELGSDWETTKDATISLDMKTPLSHFPPFRFGVEFEDVHRLADGQVKHSTEVFYAGSLWKVSVQPFNDEDPHGRRTLGLFLHRRKAELLDPLRKAHLYVDPREKVTARYQLICPSKREVMIFGSLKQAGTLLPKAPKGWGWRTAILFDELADLLQGGALRIAAVVQLV

SEQ ID NO: 174496 - protein, 356 aa, Zea Mays
MLLCHRVQAIVADTCRNCCLMNSSCACKQAYVSSHTHYRQEHDRSSASDNIGNVYLADGQGDGNGVLGPVRVNVRGAVDGLAGIGRGNSNVPGAAWAPTRYVFSRVPYGLGSRNGQQFAIDESEPRIDRNGDISADGLTALVNLSQENNAAHLQDQSLFETGMQTRYRSVPSVSTPGGSSVQMQESKEHELGSDWETTKDATISLDMKTPLSHFPPFRFGVEFEDVHRLADGQVKHSTEVFYAGSLWKVSVQPFNDEDPHGRRTLGLFLHRRKAELLDPLRKAHLYVDPREKVTARYQLICPSKREVMIFGSLKQAGTLLPKAPKGWGWRTAILFDELADLLQGGALRIAAVVQLV

SEQ ID NO: 174497 - protein, 482 aa, Zea Mays
MEIDCSTGGPSGESTSYQFNENNWISSEQTANNYFSRTSSSVVVPTEWGRPNAPLWGGRVVGRRQIRYIRGSSCLSTDEYNAFMNIFERGSLLYCNMSFDALLSVRKQLEEFGFPCKAVNDSLWLQMLLCHRVQAIVADTCRNCCLMNSSCACKQAYVSSHTHYRQEHDRSSASDNIGNVYLADGQGDGNGVLGPVRVNVRGAVDGLAGIGRGNSNVPGAAWAPTRYVFSRVPYGLGSRNGQQFAIDESEPRIDRNGDISADGLTALVNLSQENNAAHLQDQSLFETGMQTRYRSVPSVSTPGGSSVQMQESKEHELGSDWETTKDATISLDMKTPLSHFPPFRFGVEFEDVHRLADGQVKHSTEVFYAGSLWKVSVQPFNDEDPHGRRTLGLFLHRRKAELLDPLRKAHLYVDPREKVTARYQLICPSKREVMIFGSLKQAGTLLPKAPKGWGWRTAILFDELADLLQGGALRIAAVVQLV

SEQ ID NO: 174498 - protein, 450 aa, Zea Mays
MAAPRQPHPPAAEEGAAPAGPLPAAAPGPRPYDVTVAATELRPVDCNLAALCDHVQAEGFGSGAFSDLVVEAMGATYRLHRLILSRSAYFRNMLHGPWRESGAPTVVLHIDDANVDSDAIAIALAYLYGQPPKLTDSNAFRVLAAASFLDLQDLCTICTDFIISELWTSNFLQYQLFAESQDYGSHGERVRNACWGYLCQSATMELREVLPKLSSQTLHALLTSDELWVPNEEKRFELALLTLLAKVAMCEIQVSGNETNLPSADRSMRKGKTPMNESGEELLMDSELQNLKLHDNLGNEISHNIIAISDMNGEAPKRMEIDCSTGGPSGESTSYQFNENNWISSEQTANNYFSRTSSSVVVPTEWGRPNAPLWGGRVVGRRQIRYIRGSSCLSTDEYNAFMNIFERGSLLYCNMSFDALLSVRKQLEEFGFPCKAVNDSLWLQELLPYE

SEQ ID NO: 174499 - protein, 383 aa, Zea Mays
MISGAFAIIAQSQVLGCFPRVRVTHTSTKFEGQVYIPEINYVLMVLCVAVTAIFQTTEKIGNAYGIAVVFVMFITTLLVTLVMVMIWKTSLLWIALFLVIIGGAELVYLSSAFYKFTQGGYLPLAFAGILMFIMATWHYVHVHRYNYELQNKVSSNYVAELSARRNLARLPGIGFLYSELVQGIPPILPHLIERVPSIHSVLVIISIKYLPISKIETSERFLFRYVEPRDYRLFRCVVRYGYNDKVEDPREFEGLVIEHLKQFIHQESFYSQGDNSTEEVEDANEPSVRVQGATLSDSSSDRSTAAPSNGCIYEIQTIQREMEDGVVHMLGEANVVAEPNADFFKKIIVDYAYNFMRKNFRQPEKITCVPHNRLLRVGMTYEI

SEQ ID NO: 174500 - protein, 573 aa, Zea Mays
METHRYSFAVLSAVGGIQQRATNLTQGQIVGISIAILIVLFLVQCFGTDKVGYTFAPIILAWFLLIAGIGVYNLIKHDVSVLKAFNPKYIVDYFKRNGKQGWISLGGVILCITGTEAMFADLGHFNVRAIQIGFSVVLFPSVLLAYIGQAAYLRVYPENVANTFYKSIPGPLYWPTFVVAVAAAIIASQAMISGAFAIIAQSQVLGCFPRVRVTHTSTKFEGQVYIPEINYVLMVLCVAVTAIFQTTEKIGNAYGIAVVFVMFITTLLVTLVMVMIWKTSLLWIALFLVIIGGAELVYLSSAFYKFTQGGYLPLAFAGILMFIMATWHYVHVHRYNYELQNKVSSNYVAELSARRNLARLPGIGFLYSELVQGIPPILPHLIERVPSIHSVLVIISIKYLPISKIETSERFLFRYVEPRDYRLFRCVVRYGYNDKVEDPREFEGLVIEHLKQFIHQESFYSQGDNSTEEVEDANEPSVRVQGATLSDSSSDRSTAAPSNGCIYEIQTIQREMEDGVVHMLGEANVVAEPNADFFKKIIVDYAYNFMRKNFRQPEKITCVPHNRLLRVGMTYEI

SEQ ID NO: 174501 - protein, 58 aa, Zea Mays
MPSSAMSSGLEPVLCAPRPRRVQQLHPCSADLILGAPPFPRNANSKEKRTGKRIETRV

SEQ ID NO: 174502 - protein, 71 aa, Zea Mays
MASDGDASPPRKRMLLELPCDEEGANVSQNVGVSASSATPAAARDSQEQGEIYDELVILCTCVLCDQLIIL

SEQ ID NO: 174503 - protein, 199 aa, Zea Mays
MPQHDSSATPPVEYHDSSATFETKKGTGKDSGKILDGRCPTPAHHYPLAFLSLGRNVKCSSSQQRGLEHSPVTTQQRSQHRGEIMSSLSSGISASPSAAPSTARRRHDAAPQQLRVKAAARPQLLHAGRRRSSVGRRPGGGAVVVRAGPGPLSEIEPDLEEDAIDVYRTNGISPVRRRRPSFPSFSSLLFSVVVPRLVS

SEQ ID NO: 174504 - protein, 221 aa, Zea Mays
MPQHDSSATPPVEYHDSSATFETKKGTGKDSGKILDGRCPTPAHHYPLAFLSLGRNVKCSSSQQRGLEHSPVTTQQRSQHRGEIMSSLSSGISASPSAAPSTARRRHDAAPQQLRVKAAARPQLLHAGRRRSSVGRRPGGGAVVVRAGPGPLSEIEPDLEEDAIDVYRTNGISPEDFEYGKYDGHHTYFEGQDKKGFWEDVSEWYQEAEPPQGFQGTTTTV

SEQ ID NO: 174505 - protein, 143 aa, Zea Mays
MFDNDREHAQIMARLVELEREEKEAGNTCEDDDDDGDDDGDAGTSEDGEENKEPGNALSDGNEDHSSGSGALFFGNGGNDRSNGNIKLKSALKKPGGDEMLKDISHTPSADTSHPVFGGQTSITNPDVRVHTKESCTILLIYV

SEQ ID NO: 174506 - protein, 302 aa, Zea Mays
MKATITDLEAEANFFESTATEASEGLVEIREEYDEDTETKTTRSEASIATGVMFDNDREHAQIMARLVELEREEKEAGNTCEDDDDDGDDDGDAGTSEDGEENKEPGNALSDGNEDHSSGSGALFFGNGGNDRSNGNIKLKSALKKPGGDEMLKDISHTPSADTSHPVFGGQTSITNPDVRVHTKAVSFEDDKFVVSSSKSPTLLVGSIQSDPGLKSSSDPTPSCDRKIISSGRKAFTGSIVEHDDDDLSTIQPSAGNSLAKPGTSASSRPMSKFKMQKGGRAPSPVRLFGGDTWDVQLDSV

SEQ ID NO: 174507 - protein, 186 aa, Zea Mays
MKATITDLEAEANFFESTATEASEGLVEIREEYDEDTETKTTRSEASIATGVMFDNDREHAQIMARLVELEREEKEAGNTCEDDDDDGDDDGDAGTSEDGEENKEPGNALSDGNEDHSSGSGALFFGNGGNDRSNGNIKLKSALKKPGGDEMLKDISHTPSADTSHPVFGGQTSITNPDVRVHTKG

SEQ ID NO: 174508 - protein, 195 aa, Zea Mays
MKATITDLEAEANFFESTATEASEGLVEIREEYDEDTETKTTRSEASIATGVMFDNDREHAQIMARLVELEREEKEAGNTCEDDDDDGDDDGDAGTSEDGEENKEPGNALSDGNEDHSSGSGALFFGNGGNDRSNGNIKLKSALKKPGGDEMLKDISHTPSADTSHPVFGGQTSITNPDVRVHTKESCTILLIYV

SEQ ID NO: 174509 - protein, 484 aa, Zea Mays
MKATITDLEAEANFFESTATEASEGLVEIREEYDEDTETKTTRSGKINQRKRLSLASLLFSTPLLRLNPRSGVTTAISHTSSSNPLTISHSYNLRSRSNSNNLVSDMPGSAEAETAASAQPSELAAITTALAEVQRQLGLFATQMASMSSRIAAVESTSGTSAMAPPPDCPYDMPGYDGLWLAYSSNQGFQATVANGDKIHCRQIANSIEASIATGVMFDNDREHAQIMARLVELEREEKEAGNTCEDDDDDGDDDGDAGTSEDGEENKEPGNALSDGNEDHSSGSGALFFGNGGNDRSNGNIKLKSALKKPGGDEMLKDISHTPSADTSHPVFGGQTSITNPDVRVHTKDGTEPEFCFSLGASSAFSVSFEDDKFVVSSSKSPTLLVGSIQSDPGLKSSSDPTPSCDRKIISSGRKAFTGSIVEHDDDDLSTIQPSAGNSLAKPGTSASSRPMSKFKMQKGGRAPSPVRLFGGDTWDVQLDSV

SEQ ID NO: 174510 - protein, 396 aa, Zea Mays
MAAPRKGTATPLGAVFSPEETKRAVARVAESIAGRRAELGHLLGFVADNAALVSLVNRLPVELSHEIMVLLGEGYYAERSAKQTTDILHRRGQELEAQVEAMKATITDLEAEANFFESTATEASEGLVEIREEYDEDTETKTTRSEASIATGVMFDNDREHAQIMARLVELEREEKEAGNTCEDDDDDGDDDGDAGTSEDGEENKEPGNALSDGNEDHSSGSGALFFGNGGNDRSNGNIKPGGDEMLKDISHTPSADTSHPVFGGQTSITNPDVRVHTKAVSFEDDKFVVSSSKSPTLLVGSIQSDPGLKSSSDPTPSCDRKIISSGRKAFTGSIVEHDDDDLSTIQPSAGNSLAKPGTSASSRPMSKFKMQKGGRAPSPVRLFGGDTWDVQLDSV

SEQ ID NO: 174511 - protein, 568 aa, Zea Mays
MAAPRKGTATPLGAVFSPEETKRAVARVAESIAGRRAELGHLLGFVADNAALVSLVNRLPVELSHEIMVLLGEGYYAERSAKQTTDILHRRGQELEAQVEAMKATITDLEAEANFFESTATEASEGLVEIREEYDEDTETKTTRSGKINQRKRLSLASLLFSTPLLRLNPRSGVTTAISHTSSSNPLTISHSYNLRSRSNSNNLVSDMPGSAEAETAASAQPSELAAITTALAEVQRQLGLFATQMASMSSRIAAVESTSGTSAMAPPPDCPYDMPGYDGLWLAYSSNQGFQATVANGDKIHCRQIANSIEASIATGVMFDNDREHAQIMARLVELEREEKEAGNTCEDDDDDGDDDGDAGTSEDGEENKEPGNALSDGNEDHSSGSGALFFGNGGNDRSNGNIKLKSALKKPGGDEMLKDISHTPSADTSHPVFGGQTSITNPDVRVHTKAVSFEDDKFVVSSSKSPTLLVGSIQSDPGLKSSSDPTPSCDRKIISSGRKAFTGSIVEHDDDDLSTIQPSAGNSLAKPGTSASSRPMSKFKMQKGGRAPSPVRLFGGDTWDVQLDSV

SEQ ID NO: 174512 - protein, 588 aa, Zea Mays
MAAPRKGTATPLGAVFSPEETKRAVARVAESIAGRRAELGHLLGFVADNAALVSLVNRLPVELSHEIMVPFGGAAFFPGRLIHTNELLVLLGEGYYAERSAKQTTDILHRRGQELEAQVEAMKATITDLEAEANFFESTATEASEGLVEIREEYDEDTETKTTRSGKINQRKRLSLASLLFSTPLLRLNPRSGVTTAISHTSSSNPLTISHSYNLRSRSNSNNLVSDMPGSAEAETAASAQPSELAAITTALAEVQRQLGLFATQMASMSSRIAAVESTSGTSAMAPPPDCPYDMPGYDGLWLAYSSNQGFQATVANGDKIHCRQIANSIEASIATGVMFDNDREHAQIMARLVELEREEKEAGNTCEDDDDDGDDDGDAGTSEDGEENKEPGNALSDGNEDHSSGSGALFFGNGGNDRSNGNIKLKSALKKPGGDEMLKDISHTPSADTSHPVFGGQTSITNPDVRVHTKAVSFEDDKFVVSSSKSPTLLVGSIQSDPGLKSSSDPTPSCDRKIISSGRKAFTGSIVEHDDDDLSTIQPSAGNSLAKPGTSASSRPMSKFKMQKGGRAPSPVRLFGGDTWDVQLDSV

SEQ ID NO: 174513 - protein, 646 aa, Zea Mays
MDASPLNPPPLVEEELVLRRSARCLNRPTRPSYAEQEPPKKPGGRGRSKRKRDEEKPELAPAQQGAKSPDRKDSKDEAGEKKPTPMIAALPVSCAGVAAEDDATGTGKSAKLRVKETLRAFNSHYLHFVQEEQKRAQAALQEKRPSKRPDLKAITKMQEMNAVLYPEKTIGHLPGIDVGDHFYSRAEMVVLGIHSHWLNGIDFMGLKYQGKEYSNLTFPLATCIVMSGVYEDDLDKADEIIYTGQGGNDLLGNHRQIGSQQLKRGNLALKNSRENGNPVRVVRGHLSKNSYTGKIYTYDGLYKVVDDWVQKGVQGHVVFKFKLKRLEGQPSLTTSEVRFTRAEAPTTISELPGLVCDDISGGQENIPIPATNLVDDPPVPPSGFKYLKSLQIPKDIKIPSSIIGCDCEGGCASNKKCLCAQRNGSDLPYVSYKNIGRLVEPKAVVFECGANCSCNHDCVNRTSQQGLQYRLEVFKTASKGWGVRTWDTILPGAPICEYTGVLRRTEDLDGSQNNYCFDIDCLQTMKGLDGREKRAGSEMHLPNLHPENDSDAQPAPEYCIDAHSIGNFARFINHSCQPNLFVQCVLSSHNDVKLAKVMLFAADTILPLQELSYDYGYRLDSVVGPDGKIVKLACHCGAPDCRKRLY

SEQ ID NO: 174514 - protein, 312 aa, Zea Mays
MPYESWWTPKVNSVAPVPNPIFMDASPLNPPPLVEEELVLRRSARCLNRPTRPSYAEQEPPKKPGGRGRSKRKRDEEKPELAPAQQGAKSPDRKDSKDEAGEKKPTPMIAALPVSCAGVAAEDDATGTGKSAKLRVKETLRAFNSHYLHFVQEEQKRAQAALQEINAKSGLKRQTKGGEKKRPSKRPDLKAITKMQEMNAVLYPEKTIGHLPGIDVGDHFYSRAEMVVLGIHSHWLNGIDFMGLKYQGKEYSNLTFPLATCIVMSGVYEDDLDKADEIIYTGQGGNDLLGNHRQIGSQQLKRGNLALKQGEW

SEQ ID NO: 174515 - protein, 311 aa, Zea Mays
MPYESWWTPKVNSVAPVPNPIFMDASPLNPPPLVEEELVLRRSARCLNRPTRPSYAEQEPPKKPGGRGRSKRKRDEEKPELAPAQQGAKSPDRKDSKDEAGEKKPTPMIAALPVSCAGVAAEDDATGTGKSAKLRVKETLRAFNSHYLHFVQEEQKRAQAALQEINAKSGLKRQTKGGEKKRPSKRPDLKAITKMQEMNAVLYPEKTIGHLPGIDVGDHFYSRAEMVVLGIHSHWLNGIDFMGLKYQGKEYSNLTFPLATCIVMSGVYEDDLDKADEIIYTGQGGNDLLGNHRQIGSQQLKRGNLALKGEW

SEQ ID NO: 174516 - protein, 406 aa, Zea Mays
MPYESWWTPKVNSVAPVPNPIFMDASPLNPPPLVEEELVLRRSARCLNRPTRPSYAEQEPPKKPGGRGRSKRKRDEEKPELAPAQQGAKSPDRKDSKDEAGEKKPTPMIAALPVSCAGVAAEDDATGTGKSAKLRVKETLRAFNSHYLHFVQEEQKRAQAALQEINAKSGLKRQTKGGEKKRPSKRPDLKAITKMQEMNAVLYPEKTIGHLPGIDVGDHFYSRAEMVVLGIHSHWLNGIDFMGLKYQGKEYSNLTFPLATCIVMSGVYEDDLDKADEIIYTGQGGNDLLGNHRQIGSQQLKRGNLALKNSRENGNPVRVVRGHLSKNSYTGKIYTYDGLYKVVDDWVQKGVQGHVVFKFKLKRLEGQPSLTTSEVYLNKYNKLSCCIDSAHRLLMIWMGGLRVKII

SEQ ID NO: 174517 - protein, 217 aa, Zea Mays
MANAGGGAAEEGEWLKVAQLRALVQEDHRAKEVDNLTLRRFLRARGHNVDKAAAMLLKFLRWRAEAAPGGGTVREEQVRGELEQDKIYMGGVDRTGRPIIVGLLAKHYSANRDMAEFKSFVVYFFDKICARIPRGQEKFLAIMDLKGWGYANCDVRAYIAAIEIMQNYYPERLGKALMINVPYIFLKVWKTMIYPFIDANTRDKIESIRLHREKRCL

SEQ ID NO: 174518 - protein, 123 aa, Zea Mays
MRVIPRGQEKFLAIMDLKGWGYANCDVRAYIAAIEIMQNYYPERLGKALMINVPYIFLKVWKTMIYPFIDANTRDKFVFVDDKSLRETLRREIDESQLPEFLGGKMPLVSLKDYAQQPQPVCE

SEQ ID NO: 174519 - protein, 213 aa, Zea Mays
MLLKFLRWRAEAAPGGGTVREEQVRGELEQDKIYMGGVDRTGRPIIVGLLAKHYSANRDMAEFKSTSTTWPFFLHQSKCVCFVVYFFDKICARIPRGQEKFLAIMDLKGWGYANCDVRAYIAAIEIMQNYYPERLGKALMINVPYIFLKVWKTMIYPFIDANTRDKFVFVDDKSLRETLRREIDESQLPEFLGGKMPLVSLKDYAQQPQPVCE

SEQ ID NO: 174520 - protein, 224 aa, Zea Mays
MSRQEVDNLTLRRFLRARGHNVDKAAAMLLKFLRWRAEAAPGGGTVREEQVRGELEQDKIYMGGVDRTGRPIIVGLLAKHYSANRDMAEFKSFVVYFFDKICARIPRGQEKFLAIMDLKGWGYANCDVRAYIAAIEIMQNYYPERLGKALMINVPYIFLKVWKTMIYPFIDANTRDKFVFVDDKSLRETLRREIDESQLPEFLGGKMPLVSLKDYAQQPQPVCE

SEQ ID NO: 174521 - protein, 248 aa, Zea Mays
MANAGGGAAEEGEWLKVAQLRALVQEDHRAKEVDNLTLRRFLRARGHNVDKAAAMLLKFLRWRAEAAPGGGTVREEQVRGELEQDKIYMGGVDRTGRPIIVGLLAKHYSANRDMAEFKSFVVYFFDKICARGQEKFLAIMDLKGWGYANCDVRAYIAAIEIMQNYYPERLGKALMINVPYIFLKVWKTMIYPFIDANTRDKFVFVDDKSLRETLRREIDESQLPEFLGGKMPLVSLKDYAQQPQPVCE

SEQ ID NO: 174522 - protein, 164 aa, Zea Mays
MANAGGGAAEEGEWLKVAQLRALVQEDHRAKEVDNLTLRRFLRARGHNVDKAAAMLLKFLRWRAEAAPGGGTVREEQVRGELEQDKIYMGGVDRTGRPIIVGLLAKHYSANRDMAEFKRSPEGRRSSSPSWISRAGATQTATSGPTSRPLRSCRTTTRSGWARR

SEQ ID NO: 174523 - protein, 267 aa, Zea Mays
MANAGGGAAEEGEWLKVAQLRALVQEDHRAKEVDNLTLRRFLRARGHNVDKAAAMLLKFLRWRAEAAPGGGTVREEQVRGELEQDKIYMGGVDRTGRPIIVGLLAKHYSANRDMAEFKSTSTTWPFFLHQSKCVCFVVYFFDKICARIPRGQEKFLAIMDLKGWGYANCDVRAYIAAIEIMQNYYPERLGKALMINVPYIFLKVWKTMIYPFIDANTRDKFVFVDDKSLRETLRREIDESQLPEFLGGKMPLVSLKDYAQQPQPVCE

SEQ ID NO: 174524 - protein, 60 aa, Zea Mays
MNKEHVTLTWLLFSQRHNEAVLHEYISRRSFRKMVNSCSDSLFKGIQQREGYANLAHNQL

SEQ ID NO: 174525 - protein, 127 aa, Zea Mays
MEGRRPGAPVAGLPIGFRFRPTDEELLLHYLRRKALACPLPAGVIPDADLARLHPWDLLPAAAPGELPRRRRGGRLGGLPHFQEGQAGPPRPPWWWRQGGTRRGARGGGEPVVLRHRRLRDPRPGRG

SEQ ID NO: 174526 - protein, 114 aa, Zea Mays
MSEASWDGCIVCPSTDSTFDLRTGEIKEWYPKNPVLRALTPALRKLFTYRVKTDEENIYISFSGADGAGSAEIIFSGKAQPGVTASDVNVEERSEKLVSLNLCTQLISPFYVFR

SEQ ID NO: 174527 - protein, 312 aa, Zea Mays
MTELECRVAACGRTMMDGMFRPAVHLQISKEFTGREPINVSASLPHARSCRFIANLWPWTFQHAPPPRHHHPAPLLLLKPTPSRSPPRHSPPVPMAAVTTATAAASSSSFLHRRSPACLRATLRAAPRHCRNSSSRLACRAAEVSGAESSSAAAEGAGGGGGASWVPVVPLAALPRGERRVIVQDGEEILLLWYKNQVFAIENRSPAEGAYTEGLLNAKLTQDGCIVCPSTDSTFDLRTGEIKEWYPKNPVLRALTPALRKLFTYRVKTDEENIYISFSGADGAGSAEIIFSGKAQPGVTASDVNVEEVSFF

SEQ ID NO: 174528 - protein, 236 aa, Zea Mays
MSGNSSGLCLSCGIRGRTCGGRLFVVKTDHYSLKCLLNQRLATIPQHHWVGKLLGFDFSVEYKSGATNTMVDALSRRDTEKDDTGLYRRSWRPASTSSAGSATPRPLTPPWPPSTTKSTQAHTLLHGQWPTTWSSTTGVCTSHRPRPFCRRLWQLSMKMDMRASSAPYNGSDATSIFPTCVVLCRTLCGHVPLASGTNLSTFTRQVSSCPYQSPPSSGQTLASTSLKHFPVSTGSR

SEQ ID NO: 174529 - protein, 121 aa, Zea Mays
MSMYIIIQTIFLYKFNRVYVFLLSQHNSLGSSGIPEPEPEIPGTQIFGIVKPIVISSIDSQNPKFKIPELLDLKFLGNPNAHPYSIAPLTLSSCRRHPSSGDHRILETLLRRSRPPGRTYF

SEQ ID NO: 174530 - protein, 73 aa, Zea Mays
MHGQPTSILKALVSTIVSRHLFTNNPSQLVQINPHAYRWPNGGPARARRPRATTLAQARHVGLLPGKPVSPFV

SEQ ID NO: 174531 - protein, 96 aa, Zea Mays
MTWFLTCLQEFAEFAISLDKQNNVPPEKSLKLPYKIDGDKVGSHTIVLSFNKNENWTKALKYMLCNLKWVLYWFIGNTSFAPPSVSLHTQSLKNKS

SEQ ID NO: 174532 - protein, 440 aa, Zea Mays
MGASKMDNSYVVLSRQNKSQGPRIPPRPPSAAAAHADPSQSTRAIEGSYIVLPPPAASIYRTSASEGGAQLTPSGVISSSPSLGNNSGFHSSVTVLKRAFEIASSQTQVEQPLCLECMRVLSDKMDKEIEDVNADIKAYEACLQRLEQEPYNILSETDFQKEKQKIEEEEKKLKAAIEEAEKQYSEVRSEMENLEIKSKQFEELEERYWHEFNSFQFQLTSHQEERDAVFAKIEVSQVHLELLKRTNVLNDAFYISHDGVIGTINNFRLGRLSNVEVEWDEINAAWGQAALLLHTMAQYFTPKFQYRIKIHPMGSYPRVTDIQNNTYELFGPVNLFWSTRFDKAMTWFLTCLQEFAEFAISLDKQNNVPPEKSLKLPYKIDGDKVGSHTIVLSFNKNENWTKALKYMLCNLKWVLYWFIGNTSFAPPSVSLHTQSLKNKS

SEQ ID NO: 174533 - protein, 447 aa, Zea Mays
MNKSCIQSSDSVKIIDMTLSYFCMYFCPKQCFEWWYLPDFEHGSIKDDYCGGSSGYNSELLKIMETNQSPPCKRPRRDRNREKAPSSNKIEVMEQEIWRDFPEDLFETVIARLPVAAIFRFRTVCRRWSSLLGSDSFSRQYSEAPHGLPWFYTITHENSNNNVAMYDPLLKKWHHQSVPLNHTKIVIPVASVGGLVCLLDLSHRNFYICNPLTQSLKEIPPRSVHGWSRVVVGMVLNGRSSSDGYKVMWLDIDGTCEVYDSTKNVWSCPGTFPPSIKLPLALNLRSQPVAVGSMIYFMCAEPDGVLSYDVSTGIWRQFAIPLPLHLTDHTLAEFQGRVMLVGLLCKNAATCICIWELQKMTLLWKEVDRMPNLWCLEFYGKHMKMKCLGNSGLLMLSLKAKHMNRLVTYNLLKREWQKVPDCMLPWSRKRQWITCGTAFDPVPCALV

SEQ ID NO: 174534 - protein, 325 aa, Zea Mays
MWYLPDFEHGSIKDDYCGGSSGYNSELLKIMETNQSPPCKRPRRDRNREKAPSSNKIEVMEQEIWRDFPEDLFETVIARLPVAAIFRFRTVCRRWSSLLGSDSFSRQYSEAPHGLPWFYTITHENSNNNVAMYDPLLKKWHHQSVPLNHTKIVIPVASVGGLVCLLDLSHRNFYICNPLTQSLKEIPPRSVHGWSRVVVGMVLNGRSSSDGYKVMWLDIDGTCEVYDSTKNVWSCPGTFPPSIKLPLALNLRSQPVAVGSMKMKCLGNSGLLMLSLKAKHMNRLVTYNLLKREWQKVPDCMLPWSRKRQWITCGTAFDPVPCALV

SEQ ID NO: 174535 - protein, 441 aa, Zea Mays
MLSEAREFEFLEKPTKCMIDGNTNPCNEAQDVKLHQIPTKSSEELSLLLHYVHTLFDGHASGLFSNFSLPLQNLGCGIQSNQMDVMKKAYKQLDPENVNIDGDHLLPKQYRNIIHTVAALGYDLALKPLLSSGVPINYRDANGWTALHWAARFGREDMVVALLTAGAAAGALSHPTSEDPAAKTPASIALAYGFKGLSAFLSEAQLTTHLDSIESKENGKLDSREEGICRAVDRISDKSSHVHGGTDDQLALKDSLGAVRNAVQAAGRIQAAFRIFSFKKKKEMALGNRNSCCLSISEAGAVSHDMLEKAVLSIQKNFRCWKKRKEFLKMRNNVVRIQARVRAHQERNKYKELISSVGILEKVMIRWYHKGVGLRGFNSGAMTIDEEVDEDVAKVFRKLRVETAIDEAVSRVSCIIGSPKAMHQYRRMLNRYQQTKDDQEK

SEQ ID NO: 174536 - protein, 786 aa, Zea Mays
MQQQQQGLDIGKLQEVVKTRWLKPQEVLKILQNHELFTISHKPPQKPQSGSWFLFNRRVLRYFRNDGFEWQKKRNGKTINEAHERLKVDNVDALNCYYARGDKNPTFQRRIYWMLDPAYEHIVLVHYRDVLEGSISVSARNDSSTLNQNGSASRAEVHSSPGWTSELIAHCTNSCSPGSAEEVSSQISASESDLIQHKAALRKLKMQLSLEDKEDCDVNAEDVPADNEPIILPVIQNEEPGTSRNHDDIFDVLDFSEDHINGTGTHPCHSAIDVLKNSDTWLEDDQLEAILHPACMTLTENQWFRIHEVSPESAFSYESTKVIIVGDFLCNPPHSSWQVLFGDVKSCSEAREFEFLEKPTKCMIDGNTNPCNEAQDVKLHQIPTKSSEELSLLLHYVHTLFDGHASGLFSNFSLPLQNLGCGIQSNQMDVMKKAYKQLDPENVNIDGDHLLPKQYRNIIHTVAALGYDLALKPLLSSGVPINYRDANGWTALHWAARFGREDMVVALLTAGAAAGALSHPTSEDPAAKTPASIALAYGFKGLSAFLSEAQLTTHLDSIESKENGKLDSREEGICRAVDRISDKSSHVHGGTDDQLALKDSLGAVRNAVQAAGRIQAAFRIFSFKKKKEMALGNRNSCCLSISEAGAVSHDMLEKAVLSIQKNFRCWKKRKEFLKMRNNVVRIQARVRAHQERNKYKELISSVGILEKVMIRWYHKGVGLRGFNSGAMTIDEEVDEDVAKVFRKLRVETAIDEAVSRVSCIIGSPKAMHQYRRMLNRYQQTKDDQEK

SEQ ID NO: 174537 - protein, 839 aa, Zea Mays
MQQQQQGLDIGKLQEVVKTRWLKPQEVLKILQNHELFTISHKPPQKPQSGSWFLFNRRVLRYFRNDGFEWQKKRNGKTINEAHERLKVDNVDALNCYYARGDKNPTFQRRIYWMLDPAYEHIVLVHYRDVLEGSISVSARNDSSTLNQNGSASRAEVHSSPGWTSELIAHCTNSCSPGSAEEVSSQISASESDLIQHKAALRKLKMQLSLEDKEDCDVNAEDVPADNEPIILPVIQNEEPGTSRNHDDIFDVLDFSEDHINGTGTHPCHSAIDVLKNSDTWLEDDQLEAILHPACMTLTENQWFRIHEVSPESAFSYESTKVIIVGDFLCNPPHSSWQVLFGDVKVCVEIIQQGVIRCHTPCLDAGKVRMCLLDGNGKSCSEAREFEFLEKPTKCMIDGNTNPCNEAQDVKLHQIPTKSSEELSLLLHYVHTLFDGHASGLFSNFSLPLQNLGCGIQSNQMDVMKKAYKQLDPENVVSSVMEVLLNDKFKQWLSSKCEQNIDGDHLLPKQYRNIIHTVAALGYDLALKPLLSSGVPINYRDANGWTALHWAARFGREDMVVALLTAGAAAGALSHPTSEDPAAKTPASIALAYGFKGLSAFLSEAQLTTHLDSIESKENGKLDSREEGICRAVDRISDKSSHVHGGTDDQLALKDSLGAVRNAVQAAGRIQAAFRIFSFKKKKEMALGNRNSCCLSISEAGAVSHDMLEKAVLSIQKNFRCWKKRKEFLKMRNNVVRIQARVRAHQERNKYKELISSVGILEKVMIRWYHKGVGLRGFNSGAMTIDEEVDEDVAKVFRKLRVETAIDEAVSRVSCIIGSPKAMHQYRRMLNRYQQTKEK

SEQ ID NO: 174538 - protein, 562 aa, Zea Mays
MQQQQQGLDIGKLQEVVKTRWLKPQEVLKILQNHELFTISHKPPQKPQSGSWFLFNRRVLRYFRNDGFEWQKKRNGKTINEAHERLKVDNVDALNCYYARGDKNPTFQRRIYWMLDPAYEHIVLVHYRDVLEGSISVSARNDSSTLNQNGSASRAEVHSSPGWTSELIAHCTNSCSPGSAEEVSSQISASESDLIQHKAALRKLKMQLSLEDKEDCDVNAEDVPADNEPIILPVIQNEEPGTSRNHDDIFDVLDFSEDHINGTGTHPCHSAIDVLKNSDTWLEDDQLEAILHPACMTLTENQWFRIHEVSPESAFSYESTKVIIVGDFLCNPPHSSWQVLFGDVKVCVEIIQQGVIRCHTPCLDAGKVRMCLLDGNGKSCSEAREFEFLEKPTKCMIDGNTNPCNEAQDVKLHQIPTKSSEELSLLLHYVHTLFDGHASGLFSNFSLPLQNLGCGIQSNQMDVMKKAYKQLDPENVVSSVMEVLLNDKFKQWLSSKCEQNIDGDHLLPKQYRNIIHTVAALGYDLALKPLLSSGVPINYRDANGWTALHWAARFGSIFYLKN

SEQ ID NO: 174539 - protein, 375 aa, Zea Mays
MMLLHGWKGRRRKEKQLPLPSRALKSIGEQLCLVLTILLRRFENGCLGHRCLLLSLRIQSRVVTVAPSDMVLTASKKMLELKVSSAVVAIENKPGGILTSRDILMRVIAQNLPPESTTVEKVMTQSPECATVDTPILDALHTMHDGKFLHLPVLDRDGNVVTVVDVLHITHAAIATVGNSGAAGSEATSAMMQRFWDSAMSIGPIDDDDDSRSEGSTRVVSEATDIGRPAFFPASGLSNTFGFKIQDKQGRMHRFNCETSGLAELITSILQRVGDDIDRKHLPQILYEDEDRDKVVLSSDSDLIAAVDHARKIGWKSIRLHLDYAGVGRRKGGGGPSDLEYAGKDAAWASAYSAVAAGAALVAGLGVMAYLKRSG

SEQ ID NO: 174540 - protein, 74 aa, Zea Mays
MVVPVQVQAARCCFTRQSVQPTNETVPLLAELKPRYVVAQSLFPSTVLAAYVCLDVPTCSDPRGAWVSRSSYLV

SEQ ID NO: 174541 - protein, 221 aa, Zea Mays
MVGGQDGGRRVPRPVLPGRPPQWRWRRRHRLPLPRQGAEALPVPDQPQQRRRRRRRGDRRGPGLPAIHHHHHGVLRERQQAEQRQLCSLSSVRQPDISTDGHDPYYRAVPRRGDAVRRQTPWQRQRQRRRRRRRLPHRDVVHEGGRQQAGVHSDGVVTRPRCGRFPCPGHHRSRNAAAAAAAAAVPPWLWLLPCERRRAGQQPRRRRRSRPSLLVVVDELS

SEQ ID NO: 174542 - protein, 232 aa, Zea Mays
MDWDAKMLPAWDLGTVVGPSSSGGGALDLKLGAPTSSRAVLTAAAGAAPALPSANPPPPPPPPSSSAPAKRPRPGLARQAVPACSVQGCDADLSRCRDYHRRHKVCEAHSKTPVVTVAGQQQRFCQQCSSVKPSASSRCMRCAPVLSGACPYNATRQVQWNWTSVQFRSMPWLPSLSVAGSLTHPDNNLLCSPVCVRASLSSLWCVACPCFPHPICFFPTQKASIKCISIVL

SEQ ID NO: 174543 - protein, 233 aa, Zea Mays
MVNASILIVSDFGRYTKELASLRKDVVAPYVHVVGSFLDDDPPDPFEARHTLLFFRGRTVRKDEGKIRSKLEKILKGKEGVRFEDSIATGDGINISTEGMRSSKFCLHPAGDTPSSCRLFDAIVSHCVPVIVSSRIELPFEDEIDYSEFSLFFSVEEALRPDYLLNELRQVPKRKWVDMWLKLKNVSHHYEFQYPPRKGDAVNMIWRQVRHKIPAVNLAIHRNRRLKIPDWWG

SEQ ID NO: 174544 - protein, 330 aa, Zea Mays
MGAPSSRALALGAAFLLLLVALPSAFLYLTSSAATRATLLDLKPFSARCAPAVAPLRVFMYDLPARFHVAMMGAAAGAGFPAWPPSAGGIRRQHSVEYWMMASLQDGGAGPERGREAVRVRDPDAADAFFVPFFSSLSFNVHGRNMTDPDTEADRLLQVELVDILWKSKYWQRSAGRDHVIPMHHPNAFRFLRAMVNASILIVSDFGRYTKELASLRKDVVAPYVHVVGSFLDDDPPDPFEARHTLLFFRGRTVRKDEGKIRSKLEKILKGKEGVRFEDSIATGDGINISTEVSSRIELPFEDEIDYISPQEGRRGEHDMEAGEAQDPRS

SEQ ID NO: 174545 - protein, 300 aa, Zea Mays
MGAPSSRALALGAAFLLLLVALPSAFLYLTSSAATRATLLDLKPFSARCAPAVAPLRVFMYDLPARFHVAMMGAAAGAGFPAWPPSAGGIRRQHSVEYWMMASLQDGGAGPERGREAVRVRDPDAADAFFVPFFSSLSFNVHGRNMTDPDTEADRLLQVELVDILWKSKYWQRSAGRDHVIPMHHPNAFRFLRAMVNASILIVSDFGRYTKELASLRKDVVAPYVHVVGSFLDDDPPDPFEARHTLLFFRGRTVRKDEGKIRSKLEKILKGKEGVRFEDSIATGDGINIVSHFSHLYSFS

SEQ ID NO: 174546 - protein, 316 aa, Zea Mays
MGAPSSRALALGAAFLLLLVALPSAFLYLTSSAATRATLLDLKPFSARCAPAVAPLRVFMYDLPARFHVAMMGAAAGAGFPAWPPSAGGIRRQHSVEYWMMASLQDGGAGPERGREAVRVRDPDAADAFFVPFFSSLSFNVHGRNMTDPDTEADRLLQVELVDILWKSKYWQRSAGRDHVIPMHHPNAFRFLRAMVNASILIVSDFGRYTKELASLRKDVVAPYVHVVGSFLDDDPPDPFEARHTLLFFRGRTVRKDEGKIRSKLEKILKGKEGVRFEDSIATGDGINILQKVCGHQSFVSTLLGTLLPHAACLMP

SEQ ID NO: 174547 - protein, 267 aa, Zea Mays
MNIENVAGDSWRATDTARPRHRGCKLAVPAIKNVPIQMLLKKSKPVPCARPHLSSRSRQRNFPSGRITNCSPSALLDLLRGRRPSRSGALTTRAREWRRREPSPSSIANSLADTNPPSQPFIATTTTTNQRACPPRGAVGVGGRHGGAEQPRAGAGRGLPAAPRRAALRLPLPHLLRGHPRHPPRPQALLRQVRARSRAAPRLHVRPACALPRRHDGGRRRRGVPRVAAVRGRDQAPAQRGVLDDGVAPGWGRGTGAGKGGRQGAGS

SEQ ID NO: 174548 - protein, 289 aa, Zea Mays
MTGGGSSTRRPAAVARSRGRPSEASEPDPGARRAAAAAAQRRGRGNPGPLRLMDVRPRTLAYFVVASFALVSVTFVVYTGGWWEEVEGEGAATLRKVMRSVTPLPAPRMMDLPQFQNNHKESLYWGTYRPNVYLGIRARTPLSLIAGLMWIGLKNGQYFLRHVCQDSDELRTFGWTAHNGRDYGRQVLVDHGLFLTTSFLKEKGESSGYGGDWAVRLDANNERSGLSDAEESTTHLFFYIADETGNPITMGSYEPSSRGSVLLASGLHEEIGGWELYLRSETLLKILQI

SEQ ID NO: 174549 - protein, 377 aa, Zea Mays
MVETGPFDWMLTMRGLSDAEESTTHLFFYIADETGNPITMGSYEPSSRGSVLLASGLHEEIGGWELYLRSEDNLEIHRAGFKSMSMHNLSDLVQQAVATNAMQSGNLNLPDITEDSSNIMVYQVSIKSPAQIDIVFLSGSASKSPVIEERISKLTGPMLSDRLETKQKEFEERYDQIFNVNNKVDSKELSVGRAALSSLLGGVGYFYGQSKIALPKGFTQKNGDKYISYWPAALYTAVPSRSFFPRGFLWDEGFHQLVIWRWDVHISMDIIGHWLDLLNSDGWIPREQILGAEALSKVPEEFVLQYPSNGNPPTLFLAIRDLASGIHAQQFSDEEAEKISSFLERAYIRLNAWFQWFNSTQSGKYEGTFYWHENESS

SEQ ID NO: 174550 - protein, 583 aa, Zea Mays
MTGGGSSTRRPAAVARSRGRPSEASEPDPGARRAAAAAAQRRGRGNPGPLRLMDVRPRTLAYFVVASFALVSVTFVVYTGGWWEEVEGEGAATLRKVMRSVTPLPAPRMMDLPQFQNNHKESLYWGTYRPNVYLGIRARTPLSLIAGLMWIGLKNGQYFLRHVCQDSDELRTFGWTAHNGRDYGRQVLVDHGLFLTTSFLKEKGESSGYGGDWAVRLDANNERSGLSDAEESTTHLFFYIADETGNPITMGSYEPSSRGSVLLASGLHEEIGGWELYLRSEDNLEIHRAGFKSMSMHNLSDLVQQAVATNAMQSGNLNLPDITEDSSNIMVYQVSIKSPAQIDIVFLSGSASKSPVIEERISKLTGPMLSDRLETKQKEFEERYDQIFNVNNKVDSKELSVGRAALSSLLGGVGYFYGQSKIALPKGFTQKNGDKYISYWPAALYTAVPSRSFFPRGFLWDEGFHQRWDVHISMDIIGHWLDLLNSDGWIPREQILGAEALSKVPEEFVLQYPSNGNPPTLFLAIRDLASGIHAQQFSDEEAEKISSFLERAYIRLNAWFQWFNSTQSGKYEGTFYWHENESS

SEQ ID NO: 174551 - protein, 565 aa, Zea Mays
MTGGGSSTRRPAAVARSRGRPSEASEPDPGARRAAAAAAQRRGRGNPGPLRLMDVRPRTLAYFVVASFALVSVTFVVYTGGWWEEVEGEGAATLRKVMRSVTPLPAPRMMDLPQFQNNHKESLYWGTYRPNVYLGIRARTPLSLIAGLMWIGLKNGQYFLRHVCQDSDELRTFGWTAHNEKGESSGYGGDWAVRLDANNERSGLSDAEESTTHLFFYIADETGNPITMGSYEPSSRGSVLLASGLHEEIGGWELYLRSEDNLEIHRAGFKSMSMHNLSDLVQQAVATNAMQSGNLNLPDITEDSSNIMVYQVSIKSPAQIDIVFLSGSASKSPVIEERISKLTGPMLSDRLETKQKEFEERYDQIFNVNNKVDSKELSVGRAALSSLLGGVGYFYGQSKIALPKGFTQKNGDKYISYWPAALYTAVPSRSFFPRGFLWDEGFHQLVIWRWDVHISMDIIGHWLDLLNSDGWIPREQILGAEALSKVPEEFVLQYPSNGNPPTLFLAIRDLASGIHAQQFSDEEAEKISSFLERAYIRLNAWFQWFNSTQSGKYEGTFYWHENESS

SEQ ID NO: 174552 - protein, 379 aa, Zea Mays
MVETGPFDWMLTMRGLSDAEESTTHLFFYIADETGNPITMGSYEPSSRGSVLLASGLHEEIGGWELYLRSEDNLEIHRAGFKSMSMHNLSDLVQQAVATNAMQSGNLNLPDITEDSSNIMVYQVSIKSPAQIDIVFLSGSASKSPVIEERISKLTGPMLSDRLETKQKEFEERYDQIFNVNNKVQVDSKELSVGRAALSSLLGGVGYFYGQSKIALPKGFTQKNGDKYISYWPAALYTAVPSRSFFPRGFLWDEGFHQLVIWRWDVHISMDIIGHWLDLLNSDGWIPREQILGAEALSKVPEEFVLQYPSNGNPPTLFLAIRDLASGIHAQQFSDEEAEKISSFLERAYIRLNAWFQWFNSTQSGKYEGTFYWHENESS

SEQ ID NO: 174553 - protein, 421 aa, Zea Mays
MCTSEFVQAHNGRDYGRQVLVDHGLFLTTSFLKEKGESSGYGGDWAVRLDANNERSGLSDAEESTTHLFFYIADETGNPITMGSYEPSSRGSVLLASGLHEEIGGWELYLRSEDNLEIHRAGFKSMSMHNLSDLVQQAVATNAMQSGNLNLPDITEDSSNIMVYQVSIKSPAQIDIVFLSGSASKSPVIEERISKLTGPMLSDRLETKQKEFEERYDQIFNVNNKVQVDSKELSVGRAALSSLLGGVGYFYGQSKIALPKGFTQKNGDKYISYWPAALYTAVPSRSFFPRGFLWDEGFHQLVIWRWDVHISMDIIGHWLDLLNSDGWIPREQILGAEALSKVPEEFVLQYPSNGNPPTLFLAIRDLASGIHAQQFSDEEAEKISSFLERAYIRLNAWFQWFNSTQSGKYEGTFYWHENESS

SEQ ID NO: 174554 - protein, 554 aa, Zea Mays
MTGGGSSTRRPAAVARSRGRPSEASEPDPGARRAAAAAAQRRGRGNPGPLRLMDVRPRTLAYFVVASFALVSVTFVVYTGGWWEEVEGEGAATLRKVMRSVTPLPAPRMMDLPQFQNNHKESLYWGTYRPNVYLGIRARTPLSLIAGLMWIGLKNGQYFLRHVCQDSDELRTFGWTAHNGRDYGRQVLVDHGLFLTTSFLKEKGESSGYGGDWAVRLDANNERGSVLLASGLHEEIGGWELYLRSEDNLEIHRAGFKSMSMHNLSDLVQQAVATNAMQSGNLNLPDITEDSSNIMVYQVSIKSPAQIDIVFLSGSASKSPVIEERISKLTGPMLSDRLETKQKEFEERYDQIFNVNNKVQVDSKELSVGRAALSSLLGGVGYFYGQSKIALPKGFTQKNGDKYISYWPAALYTAVPSRSFFPRGFLWDEGFHQLVIWRWDVHISMDIIGHWLDLLNSDGWIPREQILGAEALSKVPEEFVLQYPSNGNPPTLFLAIRDLASGIHAQQFSDEEAEKISSFLERAYIRLNAWFQWFNSTQSGKYEGTFYWHENESS

SEQ ID NO: 174555 - protein, 575 aa, Zea Mays
MTGGGSSTRRPAAVARSRGRPSEASEPDPGARRAAAAAAQRRGRGNPGPLRLMDVRPRTLAYFVVASFALVSVTFVVYTGGWWEEVEGEGAATLRKVMRSVTPLPAPRMMDLPQFQNNHKESLYWGTYRPNVYLGIRARTPLSLIAGLMWIGLKNGQYFLRHVCQDSDELRTFGWTAHNGRDYGRQVLVDHGLFLTTSFLKEKGESSGYGGDWAVRLDANNERSGLSDAEESTTHLFFYIADETGNPITMGSYEPSSRGSVLLASGLHEEIGGWELYLRSEDNLEIHRAGFKSMSMHNLSDLVQQAVATNAMQSGNLNLPDITEDSSNIMVYQVSIKSPAQIDIVFLSGSASKSPVIEERISKLTGPMLSDRLETKQKEFEERYDQIFNVNNKVQVDSKELSVGRAALSSLLGGVGYFYGQSKIALPKGFTQKNGDKYISYWPAALYTAVPSRSFFPRGFLWDEGFHQLVIWRWDVHISMDIIGHWLDLLNSDGWIPREQILGAEALSKVPEEFVLQYPSNGNPPTLFLAIRDLASGIHAQQFSDEEAEKISSFLERAYIRLNAWFQWFNSTQSG

SEQ ID NO: 174556 - protein, 369 aa, Zea Mays
MGLQKAYLRRIAFFVFEMWLATVFALLILFALASIGRSSRMLEKSYYTETEVASRGDSVTSQDPAESEFADLARLLPKVATDDRTVIITSVNEAFARPDSLLGLFRESFQAGEGIGHLLNNVLVVAVDAKAFSHCRAVHPHCYLLEVKTIDLSSANNYMSEAYIELVWTKLSLLQRILELGYNFLFTDVDIVWFRNPFRHISVFADMTTSSDVFYGDADGLDNWPNTGFFYVKATSRTVEMLRRWRAARARFPANHEQAIFNDIKHELARDLGARVQFLDTARFGSFCRIFHIDMAAACTMHANCCVGLGNKLHDLRDVLRQWKNYTGLTPQAKKSQKFIWKDPAKCGTPDKRKRTHESEKCTTSASIV

SEQ ID NO: 174557 - protein, 95 aa, Zea Mays
MAAVVPTIQVHSTLKAVSVWRLSFGSLDGTMQLWHLEYRSLVFHKVPFISCAHCWRLRDRDQDCTHHKPISLFFAVYTWVVFVPVVSARRVFFEV

SEQ ID NO: 174558 - protein, 169 aa, Zea Mays
MEPRSPVNWSINFGSHHRGRGGDQQEWHALLRPASSQPTTAWGMKLYNKNYLLLSTYMISIKYKNVYYNFMPGQAQLLQTWMNKNVIRLLPQAIHKTGTDKRKPHLLLILNWKHYTTSEIKAKVATFGFGGPTEVLLVATYAFKLYASACLNIRRIGLVKKGEKVVKLL

SEQ ID NO: 174559 - protein, 82 aa, Zea Mays
MVDTPKVNTFKVPPEPVKEVPKEPKLSCPICMNEITEAASTVCGHIFCQPCIKAAIKAQKKCPTCRRKLTPRQQHRVYLPSP

SEQ ID NO: 174560 - protein, 234 aa, Zea Mays
MNSHGAGSHSRLLDLNYPPAEGAGEGASRFSSIPVSHREGSSSMPVQHIQASSSTPPATGEPRIGMRSCPIDVEAIDDDAVIYSSRPLPRARQQLTTTESITIIIDDDSETNLETAGDALDEHVNLLLSLGIERSHEPTSATNTFPGISMVDTPKVNTFKWIQVPPEPVKEVPKEPKLSCPICMNEITEAASTVCGHIFCQPCIKAAIKAQKKCPTCRRKLTPRQQHRVYLPSP

SEQ ID NO: 174561 - protein, 362 aa, Zea Mays
MSMPQSFLLLPSFLPPPPLVRLASRPPSSPSLTALRFHRVDAKLSPPLLAASHSPPGGFRGYCDSGGSDGGSGGDGGRGMDSPGPGDGWWWERWLQALHPEFFLLFLLLQSGAASALAEALSTSGDDAGDVWEVRGGKRTRLMPDPTWTSYLIAGDDGTKREDGDEKVGSISKDLAALRRQLGRSWRRYAEVAVHLLLPDGYPHSVSSDYLNYSLWRGVQGVASQISGVLSTQALLYAVGLGKGAIPTAAAVNWVLKDGLGYLSKIMLSKFGRHFDVNPKGWRLFADFLENMAYGLEILTPVFPHLFVPIGAAAGAGRSAASLIQSATRSCFYAGFAVQRNFAEVIAKGEAQGMAWCLVNIC

SEQ ID NO: 174562 - protein, 240 aa, Zea Mays
MVSKFVGIGLGIALANHIGSSVPLALISFAGITAVHMYCNLKSYQSIQLRTLNPYRASLVFSEYLLSGQVPSVKEVNDEEPLFFNLSLGASRQSKILSAEAKDAADRICRRLQMGSKLSEIIESKEDACALFDLYKNEQYLLMDYKGKFCIVLKEGSSPEDMLKSLFHVNYLYWLERYMGFKPSNVASECRPGGRLEVSLDYAQREFSHVKHDGSDGGWVMDGLIARPLPVRIRIGDGTS

SEQ ID NO: 174563 - protein, 1328 aa, Zea Mays
MMLQRCMHKQHVIRTRMLFHTNALKLDRLQFELLAMGPHCSFILILLLCFTPSSALTGHNDINTLFKLRDMVTEGKGFLRDWFDSEKAPCSWSGITCVEHAVVDIDLSSVPIYAPFPLCVGSFQSLARLNFSGCGFSGELPDALGSLHNLEYLDLSHNQLTGALPVSLYGLKSLKEVVLDNNFFSGQLSPAIAQLEYLKKFSVSSNSISGAIPPELGSLQNLEFLDLHMNALNGSIPSALGNLSQLLHLDASQNNICGSIFPGITAMANLVTVDLSSNALVGPLPREIGQLRNAQLIILGHNGFNGSIPEEIGELKLLEELDVPGCKLTGIPWTVGDLRSLRKLDISGNDFNTELPASIGKLGNLTRLYARSAGLTGNIPRELGNCKKLVFVDLNGNSFSGPIPGELAGLEAIVTLDVQGNNLSGPIPEWIRNWTNLRSIYLAQNMFDGPLPVLPLQHLVIFSAETNMLSGSIPDEICQAKSLQSLLLHNNNLTGNIMEAFKGCKNLTELNLQGNHLHGEIPHYLSELPLVTVELAQNNFTGKLPEKLWESSTILEITLSYNQLTGPIPESIGRLSSLQRLQIDSNYLEGPIPRSIGSLRNLTNLSLWGNRLSGNIPLELFNCRNLVTLDLSSNNLSGHIPSAISHLTFLNSLNLSNNQLSSAIPAEICVGFGSAAHPDSEFIQHHGLLDLSYNRLTGHIPAAIKNCVMVTVLNLQGNMLSGAIPPELSELPNVTSIYLSHNTLVGPILPWSVPSVQLQGLFLSNNHLSGSIPAEIGQILPKIEKLDLSSNALTGTLPDSLLCINYLTYLDISNNSLSGQIPLSCPKEKEASSSLILFNGSSNHFSGNLDESISNFTQLSFLDIHNNSLTGSLPFSLSDLSYLNYLDLSSNDFNGPAPCGICNIVGLTFADFSGNHIGMSGLVDCAAEGFCTGKGFDRKALNSSDRVRRAAIICVSILTVVIVLVFLVVYLKRRLLRSRPLALVPVSKAKATIEPTSSDELLGKKFREPLSINLATFEHALLRVTADDIQKATENFSKVHIIGDGGFGTVYRAALPEGRRVAIKRLHGGHQFQGDREFLAEMETIGKVKHPNLVPLLGYCVCGDERFLIYEYMENGSLEMWLRNRADAIETLGWPDRLKICIGSARGLSFLHHGFVPHIIHRDMKSSNILLDENFEPRVSDFGLARIISACETHVSTDIAGTFGYIPPEYALTMKSSTKGDVYSFGVVMLELLTGRPPTGQEEGEGGGNLVGWVRWMMAHGKEGELFDPCLPVSSVWRVQMAHVLAIARDCTVDEPWKRPTMLEVVKGLKMAETIECGPLVVTVTKDM

SEQ ID NO: 174564 - protein, 115 aa, Zea Mays
MYYDRKTLEGQNVNHLPPTSITPLVLLEKNFRIETRNETKVFFLKKSGIQPCNRLTHKLLSDLKASIVSVIFSHALLLGSKQRHIAKVCTENVDRLNCANMHIQRVQRVSIQVYC

SEQ ID NO: 174565 - protein, 123 aa, Zea Mays
MANGCSTTTTSSLLLFFLLSYLLIGHALCSQGHNGRTSGADYVVQYLHQELPGKHIVLQETVKGLNKGILPKYARRMLIGSIAPICTYNECRGCRFKCTAEQVPVDANDPMNSAYHYKCVCHR

SEQ ID NO: 174566 - protein, 732 aa, Zea Mays
MASAQAPSSAAAPSRKDHLEAGKKRLEQFRKKKAAKKANAAGAEQAKVPAPDVEPNQASTSSVPWAVYENGPESASSGAEFLSNAPVNVYTSVGVSSVRPQQDAVTDGGSKFYGNLSFSDLVNGHHENWRGDEARKRDEHSPDKDVQSTSKLSAFGNSSLTLPSTDNMPSWGRISLSSQVHDTKQSSSYSSSTLFGKSENAYSQDYSTKSDTSSQLRDTSKDSSQVEQSLYASTRDYGNAFNSSRTIVTVEHDTNVGITRTSADSAPGVNFERQDPFLSSGYPTTYTRSRPSFLDSIGVQRVPPTTQASYREPAKANQLSHNSNYQSSFVKQSNQQPTSSNAADISFASESQEYSHEKGSYGSSNHPDFSLPKEERSIQHGKQTFQNFATHGKDDDFATLEQLIEDLTKEKFSLQRSLQKSQELAETLATDNSALTDKFNQQAHVISQLTSDMERLQEEIQAQLLALESVRTEYANAQLECSAADERAKVLAAEVILLEDKALRLRSSELKLEKEVEGLHSEISAYRRKVSSLEKERQHLQSTVEALQEEKKLLYSKLRNIPVNERATTVEKPSVDKKDASTVTEDLDTGEISSSETLTSTVDILEDAGTSVLRSNIVSDFPSSEQVSSSIPDDQLRMIDNINSLMSELAVEREELLRALRIESSNCSKLKELNKDLTQKLEVQTQRLELLTSQRMANENALAKPIDTRPINEATMYADEGDETFGGAFSIM

SEQ ID NO: 174567 - protein, 741 aa, Zea Mays
MASAQAPSSAAAPSRKDHLEAGKKRLEQFRKKKAAKKANAAGAEQAKVPAPDVEPNQASTSSVPWAVYENGPESASSGAEFLSNAPVNVYTSVGVSSVRPQQDAVTDGGSKFYGNLSFSDLVNGHHENWRGDEARKRDEHSPDKDVQSTSKLSAFGNSSLTLPSTDNMPSWGRISLSSQVHDTKQSSSYSSSTLFGKSENAYSQDYSTKSDTSSQLRDTSKDSSQVEQSLYASTRDYGNAFNSSRTIVTVEHDTNVGITRTSADSAPGVNFERQDPFLSSGYPTTYTRSRPSFLDSIGVQRVPPTTQASYREPAKANQLSHNSNYQSSFVKQSNQQPTSSNAADISFASESQEYSHEKGSYGSSNHPDFSLPKEERSIQHGKQTFQNFATHGKDDDFATLEQLIEDLTKEKFSLQRSLQKSQELAETLATDNSALTDKFNQQAHVISQLTSDMERLQEEIQAQLLALESVRTEYANAQLECSAADERAKVLAAEVILLEDKALRLRSSELKLEKEVEGLHSEISAYRRKVSSLEKERQHLQSTVEALQEEKKLLYSKLRNIPVNERATTVEKPSVDKKDASTVTEDLDTGEISSSETLTSTVDILEDAGTSVLRSNIVSDFPSSEQVSSSIPDDQLRMIDNINSLMSELAVEREELLRALRIESSNCSKLKELNKDLTQKLEVQTQRLELLTSQRMANENALAKPIDTRPINEATMYADEGDEVSVLHQVFSWNLVVDPTT

SEQ ID NO: 174568 - protein, 522 aa, Zea Mays
MQPNMSHQQIRKNLYYISIALEALAGIVSLADAAVDPSMMGVVKNDVVKLFDTIKSYNDGTFYFDEKHVDATEYKGPIITSASVVRGVTSFAAVVSGKLNIPAEKILGLAKFFLGIGLPGSAKDCFNQIESLSFLENNRVFVPLILSLSSKVFSLTSKDQLKVEVTSVFGSAAPSLKVNLVQVLGSDSKVITSENKELQYDLDNNVHYLDIAPLKIDVGKYSIVFEISLQEPEQETVYATGGRNTESVIVTGLIKVDKAEIGISDNDAGAVESVQKLDLLKDTKVSLSANHLQKLCLSFQLTTPLGHTFKPHQVFLKLRHESKVEHLFVVPGSARQFKIVLDFLGLVEKFYYLSGRYDLELTVGDAVMENSFLRPLGHLELDLPDAPEKAPRPPAQAVDPFSKFGPKAEISHIFRAPEKRPPKELSLAFTGLTLLPFIGFLIGLVRLGVNLKNFPSLPGPAAFASLFHAGIGAVLMLYVLFWIKLDLFTTLKYLGFLGIFLVFVGHRALSYLSSVSTKQKTA

SEQ ID NO: 174569 - protein, 579 aa, Zea Mays
MPQSPKPYTSLSATVIAIAMAGRRPAPVAILLLLAAAFAPISSAVRPVSDAHRSAAVELFAPSADGSFGDLESTYEAVRTFQILGLENYKSLSGKACKFAAENLASPGSTTKDLFHAVRISGALGCAVDAGVYDGVVARLKAVIQDTNSLLELYYPVGGLLGIKEQGHNVVLSDAEGTFHATKALSQSDGRWRYDTDSAESSTFAAGIALEALAGIVSLADAAVDPSMMGVVKNDVVKLFDTIKSYNDGTFYFDEKHVDATEYKGPIITSASVVRGVTSFAAVVSGKLNIPAEKILGLAKFFLGIGLPGSAKDCFNQIESLSFLENNRVFVPLILSLSSKVFSLTSKDQLKVEVTSVFGSAAPSLKVNLVQVLGSDSKVITSENKELQYDLDNNVHYLDIAPLKIDVGKYSIVFEISLQEPEQETVYATGGRNTESVIVTGLIKVDKAEIGISDNDAGAVESVQKLDLLKDTKVSLSANHLQKLCLSFQLTTPLGHTFKPHQVFLKLRHESKVEHLFVVPGSARQFKIVLVSISTLELASLVLWMLIIHCGNVANTLDQALNYLEKLHLYTNKVFEPGR

SEQ ID NO: 174570 - protein, 387 aa, Zea Mays
MPQSPKPYTSLSATVIAIAMAGRRPAPVAILLLLAAAFAPISSAVRPVSDAHRSAAVELFAPSADGSFGDLESTYEAVRTFQILGLENYKSLSGKACKFAAENLASPGSTTKDLFHAVRISGALGCAVDAGVYDGVVARLKAVIQDTNSLLELYYPVGGLLGIKEQGHNVVLSDAEGTFHATKALSQSDGRWRYDTDSAESSTFAAGIALEALAGIVSLADAAVDPSMMGVVKNDVVKLFDTIKSYNDGTFYFDEKHVDATEYKGPIITSASVVRGVTSFAAVVSGKLNIPAEKILGLAKFFLGIGLPGSAKDCFNQIESLSFLENNRVFVPLILSLSSKVFSLTSKDQLKVEVTSVFGSAAPSLKVNLVQVLGSDSKVITRTSIRP

SEQ ID NO: 174571 - protein, 61 aa, Zea Mays
MLTHTYSTVWMIRGFAFIIYMGHLYIWAMVVVIQIYMARELFNLLRKSSEEKQLPGFRVLN

SEQ ID NO: 174572 - protein, 74 aa, Zea Mays
MFRLPSLLSRLKLWISFQDHAECTVSIYPLKSIFWRTEAIQVEGAGTDSCSPWYSRPVIACMAAGRTLGSRRIE

SEQ ID NO: 174573 - protein, 333 aa, Zea Mays
MARQLVSVVYGGGGAAAAAGEGGVAGVAGGGGVDRLPCSGSASDPSGHAVLRPALSFVGVRYPLLSGPTASNPSSEVAFMPLRSEVPVDAAPAPTPVPEPVGRLTGTGVVLRSPDVAGQRAQGLLRHRRGRCSSRRQQPSWRYLIPILYVSVELVKALQAHIINWDIHMFDEEIGNTTQVVALIASSTPGDEEAAATTAPRSWLARYKLVIVARDKTGETEFAMFGRITQHVSISCGKWLQRTLRWVVEEEESEGGRRGCLAEARGEGERHLQGHNLGETATTSVPHDRHQDLKLAIDDFDEELIDPELRFSFQRNNKPLRHRHQTSCHAAPR

SEQ ID NO: 174574 - protein, 282 aa, Zea Mays
MGKRKRSSCQRDNHNDSLASKIMRTRIPDLPEDIWSHVHSLMPMRDAGRAACLSRAFLRSWRRHPNLIFNKDTIGMKKNSYGENFHHKISRILRNHSGISLKTFKLDYSGMCGFDGTSYLDSWLQAALNPGIEEVTLWLFHTRRIYEFPCSLLSDGVRNSLRYLKLRCCALRPTVELAPMRSLTSLHLSFVSIKWNGLKRLLSNSLALEELELVCCDKIVCLKIPSALQRLNSLNIFGCSALKVLESKAPNLSSLSLSDFGGGLVFSLVKTLQMKKLITESC

SEQ ID NO: 174575 - protein, 237 aa, Zea Mays
MLFHYDGRTTEWDEFEWSKRAVHVSVTKQTKWWYAKRFLHPDIVARYDYIFIWDEDLGVEHFNAEAYIKLVRKHGLEISQPGLEPDKGLTWQMTKRRGDQEVHKVTEERPGWCSDPHLPPCAAFVEIMATVFSRDAWRCVWHMIQNDLVHGWGLDFALRKCVEPAHEKIGVVDSQWIVHQVIPSLGNQGKAENGKAPWEGVRARCRKEWGMFQTRLTDAEKAYYLEHGITPPKSTVA

SEQ ID NO: 174576 - protein, 287 aa, Zea Mays
MAKPGILGRSSAQRSNEGMRIIFSAVIGVMLGYLFGISFPTVNITKLHFPSSIISYIEDRNSGITTQTLLNHAWTSAATHKKNNSASNSDEIPKIYVPTNPKGAERLPPGIVVSETDLYLRRLWGEPSEDLTTKPRYLVTFTVGYSQKANIDAAVKKFSDNFTIMLFHYDGRTTEWDEFEWSKRAVHVSVTKQTKWWYAKRFLHPDIVARYDYIFIWDEDLGVEHFNAEAYIKLVRKHGLEISQPGLEPDKGLTWQMTKRRGDQEVHKVTEERPGWCSDPHLPPCVC

SEQ ID NO: 174577 - protein, 195 aa, Zea Mays
MAKPGILGRSAQRSNEGMRIIFSAVIGVMLGYLFGISFPTVNITKLHFPSSIISYIEDRNSGITTQTLLNHAWTSAATHKKNNSASNSDEIPKIYVPTNPKGAERLPPGIVVSETDLYLRRLWGEPSEDLTTKPRYLVTFTVGYSQKANIDAAVKKFSDNFTIMLFHYDGRTTEWDEFEWSKRAVHVSVTKQTKW

SEQ ID NO: 174578 - protein, 287 aa, Zea Mays
MAKPGILGRSSAQRSNEGMRIIFSAVIGVMLGYLFGISFPTVNITKLHFPSSIISYIEDRNSGITTQTLLNHAWTSAATHKKNNSASNSDEIPKIYVPTNPKGAERLPPGIVVSETDLYLRRLWGEPSEDLTTKPRYLVTFTVGYSQKANIDAAVKKFSDNFTIMLFHYDGRTTEWDEFEWSKRAVHVSVTKQTKWWYAKRFLHPDIVARYDYIFIWDEDLGVEHFNAEAYIKLVRKHGLEISQPGLEPDKGLTWQMTKRRGDQEVHKVTEERPGWCSDPHLPPCAA

SEQ ID NO: 174579 - protein, 129 aa, Zea Mays
MAKPGILGRSSAQRSNEGMRIIFSAVIGVMLGYLFGISFPTVNITKLHFPSSIISYIEDRNSGITTQTLLNHAWTSAATHKKNNSASNSDEIPKIYVPTNPKGAERLPPGIVVSETDLYLRRLWGEPSE

SEQ ID NO: 174580 - protein, 347 aa, Zea Mays
MRCINAQRLTCNELKKRLETYYGVDEEAELPSVAKAVLERNLTGAHSETDDDLIEELRSKPLPEVHDRDFESDFEEMHDTDEELNDLYNTREYVEKKIKSDEFFNMDDTKWDAMIKEATDKGHLTNMKECEEILEDMLYWDKLLPDEIKQKVETKFNELGDMCERGEMEPEQAYEMFKEFEDKMVAECTELIESKMPTDADELTESGGKKVELDDLPGEGPVLRWESRIVFVPSGDAYHPKNRKVKLSVTVKELGLSRHAFRRLREVVGKRYNSGKDELTIISERFEHREENRKDCLRTLYTLIKDAMKADKLVEDARNSYVKGRLKANPQFMERLKRKTDKLMAAA

SEQ ID NO: 174581 - protein, 272 aa, Zea Mays
MRRLLGHLHPHAQSLFASLPRKPSIATKLPFLLSRRLLSDAASPPAPSLPPPPPPSADVTNTELKKRLETYYGVDEEAELPSVAKAVLERNLTGAHSETDDDLIEELRSKPLPEVHDRDFESDFEEMHDTDEELNDLYNTREYVEKKIKSDEFFNMDDTKWDAMIKEATDKGHLTNMKECEEILEDMLYWDKLLPDEIKQKVETKFNELGDMCERGEMEPEQAYEMFKEFEDKMVAECTELIESKMPTDADELTESGVEMHIIPKTEKSSSV

SEQ ID NO: 174582 - protein, 421 aa, Zea Mays
MKLTCLSAAAGGGGGYHSPASHLLELEGVRFLLDCPIDLSALAAFAPVPLAGDAGGLIRAVPRYWLPAAVKEGGVDAVLVSSATGMLGLPFLTGLPGFTNTKVYVTEVAARIGKPMMEELVEMHREFVRYYGPDTDASPKWMEGEELNELMSMSQKAVIEGRENDLTSLVPLYSPGNVEECMHKVQSVKYGEEVCFNGIFMLKASSSGLELGNSTWTIQSPRASITYLPSSVFVSAHALDFDYSSLKENDVILFSDFSSLNDTDEDNEKLNEHSMDETDSSLCRYSVFRDDGADADERVPFVCNNDDITEEIERISFICSCIFGAVKSGGSVLIPIGRLGVILLLLELISEMLHSSSLKVPIFVISETAEEIFAFTNTLPEWLCKSRQEKLFAGEALFGHVELLKEGKLFLFPHLHSKGLL

SEQ ID NO: 174583 - protein, 88 aa, Zea Mays
MFLSRHSGIGRTVFERHANATSHLGDFCQTSFHWVQNTHVSTSLHEFPPHCSNPLLFPQPMAMMYKITQPATVPKVVSQNFLFAARVS

SEQ ID NO: 174584 - protein, 152 aa, Zea Mays
MRRRKWRRKRAEQRVYMELSEAMDCLDHICTEGCTEVGPAGRAPAPAPCARYATCRGLQLLIRHFSQCHRKSCARCQRMWQLLRLHSALCDRTDRCNTPLCMRFKQQEQDKAAAKGGDDGDKWGLLVKKVKTARVFSSLANRKQMSTTTTQC

SEQ ID NO: 174585 - protein, 98 aa, Zea Mays
MEEHAVQVLVLAHAYQVPWLKRACEGAIGARLTADSVVDVLQLAGLCDAPRLHLRCARLLAKEFAAVERTEAWRFLQENDPWQELHVLQRLHEADMEV

SEQ ID NO: 174586 - protein, 664 aa, Zea Mays
MNVNSIISDAVPLNAHSALDLLASAYGDPSDSNEDVMNQKIQVPNASNELINHAIESQPITSSNGDCDGTKVSLSSKECQQGPLSQGSKCIGNSNTLNGPKGVHTRNKDLLKMVLSEGFQPKYIYSETHKKVQCEPSSSNKTSMETPCSTNYHVSHNSATICMNSKRGSTTMVNNLATSVVKPDKDSSRMHVFCLEHAIEVEKQLQAIGGADIFLLCHPGYFFKEATIADRETIQEVVQDEEAIPTNSDWAVKLGINLYYSANLAKSPLYNKQVPYNRVIYEAFGYGSPSDSPVKLRTYSRRQGRTKKILLAGRWCGKVWMSNQVHPYLADRIKIHEPEETDKTFPSDQKSNAEPVEDSSREAASTRKSSSRAIEGKTSKREKESLEKANAKNPKFTEEDNSKSLEGTAEASTRKIKSRSVLEKTIKKEKEHVEKAKTKKLKHTEKVSEALKGPSEASFPAPAGMVVRSSSRIANRKSKMEEEDNGSANPPKPKAEGDKDNPAGRSRAKSPRQKTKADTKKKTKETRAEKRRAPSPASQKDEEEQAYDAEGCSITKQRLSLRKKGAKTEEKQQTEESRYRGRAPPSSPERKEEYASDIEGCSMSFGTKQALSLHKNDICPEKGCCRKFFSHKYLLQHRKVHADDRPRNARGRAAAWRSSGHGLG

SEQ ID NO: 174587 - protein, 136 aa, Zea Mays
MPVLPREPEEGPVQRPVGAHRRRRRDRHGDAGEGEREALPQLHRQPAPDRPRQHAAGLLRLPSLARLLPPPPTLKLWKRKGVWEEDAAYKRQGLPAADHPLRIELAKRSRCRPTDDTLVGMPRRCAGFIAWWRCSL

SEQ ID NO: 174588 - protein, 60 aa, Zea Mays
MSAESVGNYGVRILFDDLHKTGIFTWDYLHHLGSNKFSLMRNYIRTLRKHGLSRDPQRRK

SEQ ID NO: 174589 - protein, 62 aa, Zea Mays
MAAALGAVLRRLHTAAAQPPRLTKFALHPPKFNFSEYTAQQLIAKSDQWAVKRLYLDDDMLG

SEQ ID NO: 174590 - protein, 468 aa, Zea Mays
MEMEAVESHGGAGRRTPKRDRGISWACVFILASNCFQFIAYFAVSTNLVNYLKDRLHQGSKAAANGVTNWMGTSAITPLVAAFLADAFLGRYWTIALFLVISVLAYVVLTVSAAAALESAAFYAGLYLLALGGALQPVLSSFGADQFDEEERGRQSSFFNWFYLSINVGSLVGGTVLVWVQSSVSWGLGYGIPALFSALAVAAFLAGTATYRRHQPPAGSPLTRVAQVVVAACRKCGVQVPEDASTLHECEDVGGMSAIQGSRRLAHTDQFRFLDKAASVEPSDDKSRPASAWRLCTVTQVEELKCVLRLLPVWASGIVFAAAYTQMTTTFVLQGDTLDPYVGGFRVPAAVLSVFDTLSVMLWVPLYDRLVVPLARRATGHDRGFTQLARMGVGLVVLTAAMLAAGALEVARRRVIARHDMYDTNTGAGGDGEYLPLSFFWLLAMLCAGNFGVYLLIARWYTYKKTVD

SEQ ID NO: 174591 - protein, 659 aa, Zea Mays
MEPRRRERRVIAIAGAAALVAVGLNIAFSAVVAHRRRKRRELPGFTAQVNLSAAAIKRTTDRIISKSRETYDSVAAVPLDKVSFANVIAPLAELDALQFPLVQACVLPRMVSPSEDVRKASAEAEKLLDSHFVLCRQREDVYRVIKAFTVKGERIGPEATRFLQFLVKEFERNGVKLSQSKRKEMEKLKSHIDALNLKYLQNLNDFTKFLLLGEDELAGMPFEFLKDLEKADGKFKVPLTSYHVTPVLEHCKVGSTRKQIAVAYGQKGGKDNVAILENLVQLRHKFAKLLGYTNYADFAIEPRMPKTSRKILEFLEEMSEQLSDVANRELNILKDLKIKEEGNAQFGMEDLLYYIKRAEEFKVDLDVGEIKQYFPVGLVISGMLKIFQDLFALRFDEIKDVDVWHDTVRVFSVWDASSSDLLGYFFLDIFSREGKYAHTCVVTLQNGCLCSNGTRKVPAAVILSQCPKEFDGNSALLRFPEVVRLFHEFSHVVHHVSNRATFSRFSGLRLEGDFAEIPSLLLENWCYESISLKMMSGFHQDITKSISSEACQSLKRRRDLFAGLKMKQEILLCLVDQIIHSSENVDIDDLIKDLHPKVMLGIPLLEGTSPASSFPRIAFGYDAVCYSYIWSEMTCSISMLDCGSEIRCWLQEAQKIPWR

SEQ ID NO: 174592 - protein, 392 aa, Zea Mays
MPKTSRKILEFLEEMSEQLSDVANRELNILKDLKIKEEGNAQFGMEDLLYYIKRAEEFKVDLDVGEIKQYFPVGLVISGMLKIFQDLFALRFDEIKDVDVWHDTVRVFSVWDASSSDLLGYFFLDIFSREGKYAHTCVVTLQNGCLCSNGTRKVPAAVILSQCPKEFDGNSALLRFPEVVRLFHEFSHVVHHVSNRATFSRFSGLRLEGDFAEIPSLLLENWCYESISLKMMSGFHQDITKSISSEACQSLKRRRDLFAGLKMKQEILLCLVDQIIHSSENVDIDDLIKDLHPKVMLGIPLLEGTSPASSFPRIAFGYDAVCYSYIWSEVFAADLFVSKFKDDLLNQHAGLRFRNKVLAPGGSKDPLEIITDYLGREPSLQPFIQSRTRNSL

SEQ ID NO: 174593 - protein, 206 aa, Zea Mays
MLLQFLSTARLALPGSRLLLLMDKKVQLRHKFAKLLGYTNYADFAIEPRMPKTSRKILEFLEEMSEQLSDVANRELNILKDLKIKEEGNAQFGMEDLLYYIKRAEEFKVDLDVGEIKQYFPVGLVISGMLKIFQDLFALRFDEIKDVDVWHDTVRVFSVWDASSSDLLGYFFLDIFSRFVLKACDRSLNDFQGFMIWKTCLIGYKC

SEQ ID NO: 174594 - protein, 584 aa, Zea Mays
MEPRRRERRVIAIAGAAALVAVGLNIAFSAVVAHRRRKRRELPGFTAQVNLSAAAIKRTTDRIISKSRETYDSVAAVPLDKVSFANVIAPLAELDALQFPLVQACVLPRMVSPSEDVRKASAEAEKLLDSHFVLCRQREDVYRVIKAFTVKGERIGPEATRFLQFLVKEFERNGVKLSQSKRKEMEKLKSHIDALNLKYLQNLNDFTKFLLLGEDELAGMPFEFLKDLEKADGKFKVPLTSYHVTPVLEHCKVGSTRKQIAVAYGQKGGKDNVAILENLVQLRHKFAKLLGYTNYADFAIEPRMPKTSRKILEFLEEMSEQLSDVANRELNILKDLKIKEEGNAQFGMEDLLYYIKRAEEFKVDLDVGEIKQYFPVGLVISGMLKIFQDLFALRFDEIKDVDVWHDTVRVFSVWDASSSDLLGYFFLDIFSREGKYAHTCVVTLQNGCLCSNGTRKVPAAVILSQCPKEFDGNSALLRFPEVVRLFHEFSHVVHHVSNRATFSRFSGLRLEGDFAEIPSLLLENWCYESISLKMMSGFHQDITKSISSEACQSLKRRRDLFAGLKMKQEILLCESFCYLSNEVE

SEQ ID NO: 174595 - protein, 448 aa, Zea Mays
MLLQFLSTARKQIAVAYGQKGGKDNVAILENLVQLRHKFAKLLGYTNYADFAIEPRMPKTSRKILEFLEEMSEQLSDVANRELNILKDLKIKEEGNAQFGMEDLLYYIKRAEEFKVDLDVGEIKQYFPVGLVISGMLKIFQDLFALRFDEIKDVDVWHDTVRVFSVWDASSSDLLGYFFLDIFSREGKYAHTCVVTLQNGCLCSNGTRKVPAAVILSQCPKEFDGNSALLRFPEVVRLFHEFSHVVHHVSNRATFSRFSGLRLEGDFAEIPSLLLENWCYESISLKMMSGFHQDITKSISSEACQSLKRRRDLFAGLKMKQEILLCLVDQIIHSSENVDIDDLIKDLHPKVMLGIPLLEGTSPASSFPRIAFGYDAVCYSYIWSEVFAADLFVSKFKDDLLNQHAGLRFRNKVLAPGGSKDPLEIITDYLGREPSLQPFIQSRTRNSL

SEQ ID NO: 174596 - protein, 318 aa, Zea Mays
MEDLLYYIKRAEEFKVDLDVGEIKQYFPVGLVISGMLKIFQDLFALRFDEIKDVDVWHDTVRVFSVWDASSSDLLGYFFLDIFSREGKYAHTCVVTLQNGCLCSNGTRKVPAAVILSQCPKEFDGNSALLRFPEVVRLFHEFSHVVHHVSNRATFSRFSGLRLEGDFAEIPSLLLENWCYESISLKMMSGFHQDITKSISSEACQSLKRRRDLFAGLKMKQEILLCLVDQIIHSSENVDIDDLIKDLHPKVMLGIPLLEGTSPASSFPRIAFGYDAVCYSYIWSEVWAIQILSHISSIIYLEIVGKKLFYLNYVGVCC

SEQ ID NO: 174597 - protein, 526 aa, Zea Mays
MCLAIVLFAICIKMILQIDLTIVLLNCLIMVEQVKEFERNGVKLSQSKRKEMEKLKSHIDALNLKYLQNLNDFTKFLLLGEDELAGMPFEFLKDLEKADGKFKVPLTSYHVTPVLEHCKVGSTRKQIAVAYGQKGGKDNVAILENLVQLRHKFAKLLGYTNYADFAIEPRMPKTSRKILEFLEEMSEQLSDVANRELNILKDLKIKEEGNAQFGMEDLLYYIKRAEEFKVDLDVGEIKQYFPVGLVISGMLKIFQDLFALRFDEIKDVDVWHDTVRVFSVWDASSSDLLGYFFLDIFSREGKYAHTCVVTLQNGCLCSNGTRKVPAAVILSQCPKEFDGNSALLRFPEVVRLFHEFSHVVHHVSNRATFSRFSGLRLEGDFAEIPSLLLENWCYESISLKMMSGFHQDITKSISSEACQSLKRRRDLFAGLKMKQEILLCLVDQIIHSSENVDIDDLIKDLHPKVMLGIPLLEGTSPASSFPRIAFGYDAVCYSYIWSEMTCSISMLDCGSEIRCWLQEAQKIPWR

SEQ ID NO: 174598 - protein, 325 aa, Zea Mays
MLSAATKLTMDGTSFDLTEHEGSNLSPFLLKLFNEWDDRKTRGLFHHDISSCETKVLPGVHNFVATLIEGRDQKKRPTEFTMNQVLQPFVSEKFNFTKVSPLEVSPIGYCHVLLTPKIQDCLPQRIDQESFLIAMYVAREARTPFFRVGYNSLGGFATINHLHFQAYYLKVQYPVEKAITEKLKTLGNSVSIFHLVDYPVNGFVFEGGASLEDLSDVVSKVCIFLQENNRPFNVLISESGKRIFLLPQCYAEKQLLGKASQEFLDMRINPAIWELSGHLVLKRRKDYEEASEANICRFLVEAALSETEFQELNLCVLDFLTSSLG

SEQ ID NO: 174599 - protein, 276 aa, Zea Mays
MNSVIRLRSSAVKALSKGTSPNSAKVGKLVGGIMSAQTDDKDALDHCASADALQTVSEAELSNDQAHGRNPVHTIKGGLFLFGQAISCLINTPKHRVNSTAAINYELGRSRITTVSDGRKSVVASCGFMDVSHRGEGNPHINSHFLEDGLFECGGGHISPHSNDGPGLTSASDGCIITISSSEGQSPEVYLPGLVVHVVPVKKGASPLQNTIVTRQKNKSYKALIARRRDFMDLVVTHHMFLDHLPWRCHYAMQKVIETRKRDQLASDLSTAEEAV

SEQ ID NO: 174600 - protein, 517 aa, Zea Mays
MAAGVLSTVRWSTACAVLLNAIAASTGAAVAAVAFGRCGGGAIGPAAAAASAALAARLLASAVAGFAQGAAASAIAAGAIGAHVDSERDLRQLSRLRYKRWLWWTRFGMIITVLQFVLAIYLMCIILRDVLAGGSPTQCFSGQNQKSDGRRILLIAFLVTMWVSTIVQCATGSDVLRWRSFYASHDFAWRAHYREVFDHGIREVLCCLGRVKYSSVLEDDDICIVAKLLGDLMAYRASGTGHLELVAGLSLLQKSKSSTIISKELVEAPQNLIQEALLFHPFAEAAYTGPLLDFGRNPLMFPCVWLNRQGVLTPWTRARRPVLEGDNWWRGHAAAFLKYANVAPEVLRKGRVNQTKRETAYFVVVLHYLSTVVIAVRGTETPEDVITDGLCKECSLNIDDLDGLINSDHLSPQVKNAVLSSPHYGHAGIVESARELYTELEGHPIHEDKSGTMKTGFLSSLLGDGCECHGYNIQIVGHSLGGSVAALLGIKVSLFFSMYREIVLSHLMRFDVFSYNI

SEQ ID NO: 174601 - protein, 704 aa, Zea Mays
MIITVLQFVLAIYLMCIILRDVLAGGSPTQCFSGQNQKSDGRRILLIAFLVTMWVSTIVQCATGSDVLRWRSFYASHDFAWRAHYREVFDHGIREVLCCLGRVKYSSVLEDDDICIVAKLLGDLMAYRASGTGHLELVAGLSLLQKSKSSTIISKELVEAPQNLIQEALLFHPFAEAAYTGPLLDFGRNPLMFPCVWLNRQGVLTPWTRARRPVLEGDNWWRGHAAAFLKYANVAPEVLRKGRVNQTKRETAYFVVVLHYLSTVVIAVRGTETPEDVITDGLCKECSLNIDDLDGLINSDHLSPQVKNAVLSSPHYGHAGIVESARELYTELEGHPIHEDKSGTMKTGFLSSLLGDGCECHGYNIQIVGHSLGGSVAALLGIKLYGRFPKLHVYAYGAAPCVDYVVADACSLFVTSIVHNDEFSARLSMNSVIRLRSSAVKALSKGTSPNSAKVGKLVGGIMSAQTDDKDALDHCASADALQTVSEAELSNDQAHGRNPVHTIKGGLFLFGQAISCLINTPKHRVNSTAAINYELGRSRITTVSDGRKSVVASCGFMDVSHRGEGNPHINSHFLEDGLFECGGGHISPHSNDGPGLTSASDGCIITISSSEGQSPEVYLPGLVVHVVPVKKGASPLQNTIVTRQKNKSYKALIARRRDFMDLVVTHHMFLDHLPWRCHYAMQKVIETRKRDQLASDLSTAEEAV

SEQ ID NO: 174602 - protein, 398 aa, Zea Mays
MAAGVLSTVRWSTACAVLLNAIAASTGAAVAAVAFGRCGGGAIGPAAAAASAALAARLLASAVAGFAQGAAASAIAAGAIGAHVDSERDLRQLSRLRYKRWLWWTRFGMIITVLQFVLAIYLMCIILRDVLAGGSPTQCFSGQNQKSDGRRILLIAFLVTMWVSTIVQCATGSDVLRWRSFYASHDFAWRAHYREVFDHGIREVLCCLGRVKYSSVLEDDDICIVAKLLGDLMAYRASGTGHLELVAGLSLLQKSKSSTIISKELVEAPQNLIQEALLFHPFAEAAYTGPLLDFGRNPLMFPCVWLNRQGVLTPWTRARRPVLEGDNWWRGHAAAFLKYANVAPEVLRKGRVNQTKRETAYFVVVLHYLSTVVIAVRGTETPEDVITDGLFLIICLLK

SEQ ID NO: 174603 - protein, 640 aa, Zea Mays
MALVDKIWNDHYSATICVGNLFDVYHLKGCLGWRVSNTVLFRSVLEDDDICIVAKLLGDLMAYRASGTGHLELVAGLSLLQKSKSSTIISKELVEAPQNLIQEALLFHPFAEAAYTGPLLDFGRNPLMFPCVWLNRQGVLTPWTRARRPVLEGDNWWRGHAAAFLKYANVAPEVLRKGRVNQTKRETAYFVVVLHYLSTVVIAVRGTETPEDVITDGLCKECSLNIDDLDGLINSDHLSPQVKNAVLSSPHYGHAGIVESARELYTELEGHPIHEDKSGTMKTGFLSSLLGDGCECHGYNIQIVGHSLGGSVAALLGIKLYGRFPKLHVYAYGAAPCVDYVVADACSLFVTSIVHNDEFSARLSMNSVIRLRSSAVKALSKGTSPNSAKVGKLVGGIMSAQTDDKDALDHCASADALQTVSEAELSNDQAHGRNPVHTIKGGLFLFGQAISCLINTPKHRVNSTAAINYELGRSRITTVSDGRKSVVASCGFMDVSHRGEGNPHINSHFLEDGLFECGGGHISPHSNDGPGLTSASDGCIITISSSEGQSPEVYLPGLVVHVVPVKKGASPLQNTIVTRQKNKSYKALIARRRDFMDLVVTHHMFLDHLPWRCHYAMQKVIETRKRDQLASDLSTAEEAV

SEQ ID NO: 174604 - protein, 517 aa, Zea Mays
MRQRRLNKGWGGGSGGGGALRREGEMKTRSSARGEPRRLGNAALLALMLCSVVALSLIRGRFAPIVTTAGDAIKSEDDAAAAALSVSKAAVNVDTGDSADEAAAEAAAEEKEKEEVQPKPADSSGSGSGGSAAKPVCYETSRRSDTCEAAGDVRVVGSTQTVYVDSLDREWKTKPYCRKHDNFALAHVKEWSLKPLPSGAAPQCTVNSSATAFVLSTGGFTGNPFHDYTDVLIPAFITAHPLRGEVQFLVSSYKSWWMNRYIQIFQQMSRHEVVDIDADDEVRCYRSVVVGATFHRELGVDASKSPPGYSTADFRKMLRDAFGLERATATPSGDRWDIRRRPRLLIISRRPSRGRAFMNERAMADMAASLGFDVRIGEPDTSTDTSKFARLVNSCDVMVGVHGAGLTNMVFLPAGAVVVQVVPYGRLEWLARNTFAEPSAGMEVHYLEYVVQLDETTLSEQYPSDHPVLRDPMAIHKQGWNALKTTYLDKQNVRPHLGRLKNTFLQALKMLPHGRDD

SEQ ID NO: 174605 - protein, 303 aa, Zea Mays
MKTRSSARGEPRRLGNAALLALMLCSVVALSLIRGRFAPIGDAIKSEDDAAAAALSVSKAAVNVDTGDSADEAAAEAAAEEKEKEEVQPKPADSSGSGSGGSAAKPVCYETSRRSDTCEAAGDVRVVGSTQTVYVDSLDREWKTKPYCRKHDNFALAHVKEWSLKPLPSGAAPQCTVNSSATAFVLSTGGFTGNPFHDYTDVLIPAFITAHPLRGEVQFLVSSYKSWWMNRYLEYVVQLDETTLSEQYPSDHPVLRDPMAIHKQGWNALKTTYLDKQNVRPHLGRLKNTFLQALKMLPHGRDD

SEQ ID NO: 174606 - protein, 478 aa, Zea Mays
MRLFWRSCSAPSSRSPSSGGDSPQLSLPQEMPSNPRTTLRRLRSVSARRPSTLTPATAPTRPPPKLLLVEEKEKEEVQPKPADSSGSGSGGSAAKPVCYETSRRSDTCEAAGDVRVVGSTQTVYVDSLDREWKTKPYCRKHDNFALAHVKEWSLKPLPSGAAPQCTVNSSATAFVLSTGGFTGNPFHDYTDVLIPAFITAHPLRGEVQFLVSSYKSWWMNRYIQIFQQMSRHEVVDIDADDEVRCYRSVVVGATFHRELGVDASKSPPGYSTADFRKMLRDAFGLERATATPSGDRWDIRRRPRLLIISRRPSRGRAFMNERAMADMAASLGFDVRIGEPDTSTDTSKFARLVNSCDVMVGVHGAGLTNMVFLPAGAVVVQVVPYGRLEWLARNTFAEPSAGMEVHYLEYVVQLDETTLSEQYPSDHPVLRDPMAIHKQGWNALKTTYLDKQNVRPHLGRLKNTFLQALKMLPHGRDD

SEQ ID NO: 174607 - protein, 260 aa, Zea Mays
MNRYIQIFQQMSRHEVVDIDADDEVRCYRSVVVGATFHRELGVDASKSPPGYSTADFRKMLRDAFGLERATATPSGDRWDIRRRPRLLIISRRPSRGRAFMNERAMADMAASLGFDVRIGEPDTSTDTSKFARLVNSCDVMVGVHGAGLTNMVFLPAGAVVVQVVPYGRLEWLARNTFAEPSAGMEVHYLEYVVQLDETTLSEQYPSDHPVLRDPMAIHKQGWNALKTTYLDKQNVRPHLGRLKNTFLQALKMLPHGRDD

SEQ ID NO: 174608 - protein, 55 aa, Zea Mays
MWEPPERATAHWVCPFVNSIFISLTIFTIPSAAGLWCLHSSNNYLSLTFVKHLAK

SEQ ID NO: 174609 - protein, 244 aa, Zea Mays
MNARLADVCIGTSAAPTVLPAHYFETVDHRTGASRSFNVIDGGLAANNPTLVAMGEITEQMRQKSKEFPETKPLDYHRYLVVSLGTGLPEQDIKFDACRVAKWGIFGWLGRRENTVPLLQMFMHASSDMTDSYVADLFKAIGCSDQLLLRVQDRNIPIAAVAADLSTEKNLRGLVKIAENLLHKPLGEDDYKTDDRVETTPRDGRAILTYAGMLARFAKLLSDERKLRLQNMGHCMPVIANREA

SEQ ID NO: 174610 - protein, 228 aa, Zea Mays
MENNYACPPPSKGNLITVLSIDGGGVKGVIPATFLAFLESKLQELDGSSARIANYFDVIAGTSTGGLIAAMLAAPSLSNAKQPCYEAKDIVPFYLEHSPRIFPCRTGILGWFFKILQTVKVMIGPKYDGKYLHKVTSDLLGGTRVEETLTNVVIPTFDVKCVKPTIFSTFKARSSALMNARLADVCIGTSAAPTVLPAHYFETVDHRTGASRSFNVIDGGLAANNPNR

SEQ ID NO: 174611 - protein, 191 aa, Zea Mays
MGEITEQMRQKSKEFPETKPLDYHRYLVVSLGTGLPEQDIKFDACRVAKWGIFGWLGRRENTVPLLQMFMHASSDMTDSYVADLFKAIGCSDQLLLRVQDRNIPIAAVAADLSTEKNLRGLVKIAENLLHKPLGEDDYKTDDRVETTPRDGRAILTYAGMLARFAKLLSDERKLRLQNMGHCMPVIANREA

SEQ ID NO: 174612 - protein, 320 aa, Zea Mays
MQTRTGILGWFFKILQTVKVMIGPKYDGKYLHKVTSDLLGGTRVEETLTNVVIPTFDVKCVKPTIFSTFKARSSALMNARLADVCIGTSAAPTVLPAHYFETVDHRTGASRSFNVIDGGLAANNPTLVAMGEITEQMRQKSKEFPETKPLDYHRYLVVSLGTGLPEQDIKFDACRVAKWGIFGWLGRRENTVPLLQMFMHASSDMTDSYVADLFKAIGCSDQLLLRVQDRNIPIAAVAADLSTEKNLRGLVKIAENLLHKPLGEDDYKTDDRVETTPRDGRAILTYAGMLARFAKLLSDERKLRLQNMGHCMPVIANREA

SEQ ID NO: 174613 - protein, 476 aa, Zea Mays
MGSTGREPEVTRADFPDGFVFGVATSAYQIEGARREGGKGDSIWDVFTDDKDRSNGEIAVDHYHRYKEDIELMASLGFSAYRFSISWARIFPDGLGGNVNDQGVAFYNDLINFMISKGIEPYATLYHWDLPNNLQKTLGGWISDKIVEYFALYAEACFANFGDRVKHWITINEPLQTAINGYGIGIFAPGGCQGETARCYLAAHHQILAHAAAVDVYRRKFKVAQGGEVGLVVDCEWAEPFSENVEDQIAAQRRLDFQLGWYLDPIYFGDYPESMRQRLGSDLPTFSEKDKEFMRNKIDFVGVNHYTSRLIAHLQNPNDVYFYQVQQMERIEKWNSGEKIGERAASEWLFIVPWGLHKSLNYIAKKYNNPAIYVTENGMDEEDDQSATLDQVLNDTTRVGYFKGYLNSVAQAIKDGADVRGYFAWSFLDNFEWAMGYTKRFGIVYVDYKNGLSRHPKASALWFSRLLRGEAGTGTS

SEQ ID NO: 174614 - protein, 323 aa, Zea Mays
MIGSACFPNGEKVGRILIYLCEGKKVKMAHSLYLAVKEKKIPVPKLALDFLVGALARNDETIGTALELLEEYQGESLKHAGKSFATVVHALCRLNKMEDANNLLMRMVQLEEYKGESLKNAGKTFATVIHGLCRKKKLEDAKALLMRMVNVGPAPGNAVFNFVITALSKQGEMEDAKGLMRMMESQGISPDIYTYSVLMSGYAKGGMIDEAHDLLREAKKIHPKLNRVAYHILIRGYCKMEDFEKANECLKEMKKDGLQPNVDEYDKLIQSLCLKAMDWRRAEKLLEEMEDSGLCLRGISRSLITAVKELEGEEMQSKASQEA

SEQ ID NO: 174615 - protein, 63 aa, Zea Mays
MLRMPQRRSLHRLLMWICMLPIFLLGSISSGIGTKSWECANFVLNLFCILLQFVTGTLPVTAA

SEQ ID NO: 174616 - protein, 144 aa, Zea Mays
MATTPPGFTGNLKKALAGLRRISLDGLRWRVFDAKGQVLGRLASQIAVVLQGKDKPTYAPHVENGDMCIVLNAKDISVTGRKMTDKIYYWHTGYVGHLKERRLKDQMEKDPTEVIRKAVLRMLPRNKLRDRRGGGSAAGGDRLL

SEQ ID NO: 174617 - protein, 503 aa, Zea Mays
MVQLFLQVPAECGSVNTVVVEGRRSLFHNVESIIKSLTKSAGRYEARLWLCATVSLVHSLSDCGQRDLFLDLLERKNSRRDVAARLLRMIFDKKPRMVGSILARKGHILEDFFRGNPNRIMQWFGHFAVTGESTHRKGAKALSQFAFVNRDRCWEELEWKGKHGQSPAVVATKPHYFRDLDVLETVENFLEYVPDFWSSDELANSIKDGEILQIDEEYFVDQFLYLMYEENSKDAWHVVEDFLMDEQFSSLCQHLLIHLDEERLLGFLNSLGKLINPTMQCKELTFPCCWLEVLLSGHYDHISLDDLVFLNCVIAKGRQLWRLMNDEEQHEEWGQMEELLKGGNHLTDADHFALMKELVETELPGVLKWVGIQSWIIFCELSKECKSGDSCESFFSHNKIEFHKADDYSLVRNYGFSISHMPDIDVEDLTRSSHKRRKRNRRKRHRYESDEDKFDELLELGSSDGKNGVESQRGSWRLSTDGFSASWDITYQITFLLVISQFG

SEQ ID NO: 174618 - protein, 51 aa, Zea Mays
MRRQRGFGVNVRAFFFIFVALFHNVMQVILILVTYILGMCPCVATKQGSDA

SEQ ID NO: 174619 - protein, 195 aa, Zea Mays
MPSPRRKGYRCWDPIDRRIRVSRDVTFDESRPFFPTDLSSSSSSSESVDFVRLVPSVTSTATSTPPPPSPLSRPPILFHYTRHPRPPPSPPSSSSSSPLLGVPPSRYDLRDRRTLCRPTRLGFVASASILFKPTSYRDALSRPEWQLAMAEEIAALERTSTWDLVPLLPSASPITRKWVYKIKTRSDGSIECYKA

SEQ ID NO: 174620 - protein, 687 aa, Zea Mays
MESGAMVLGVVRPEESPDRNGGGPRDDLGPSQMQVDGPVVLNQSAELVSDDSMAVDDVPVQQPSGQPVEATQQSPATLIDTIMEVQKQLKRKRASNSPVIDAADKDALVAGCRQELEGLFQYYKEVSDRKMQLDGGNLSFNGMVGCLLEESSLGLTRLVDEIYQQLKGLEGVSVASVRSSVLLAGQRMMYGNSSLDADVLEDESESALWCWEIRDLRLLPVKVRSILSTRRSVRKKIHERITAIYSTLSVLENSGAYIQVNDLKKASLKLNKSLNLEGIRSMVERATQKNTERGVKDAVSAVKELMQETDKNDQNVRRLEDTSVSEPQNGNSLGNEKEIQKAQKQVEKEIKRQEKEEAQMRKLQKKQQEEALREQKRHEKEEAEAKKQQKKQEDEALKEQKRREKEEAEAKKQQKKQEEEVLKEQKRREKEEAEMKKQQKKQQDEAEKEQKRLEKEAAQLKKQLVIQKQASMMERFFKSKKDNGKHQKPGENNSAEDPCNDNKETIPATTSKIDSSLYQQEGWVLDDLRRLQVTGWKKLSSYNRSSRWGTRCKPKMEAFKELKLQKSSDDMVDEILSTPNEDGGRNPIQENEHDKLESDIDMIQASEMQCHGASNPKPLQTRLIRMKLLQFDKSNRPAYYGSWRKKSAAISPRCPFKMDPDLDYEVDSDDEWEEVFADILASFFLYW

SEQ ID NO: 174621 - protein, 85 aa, Zea Mays
MAMESQAEALGQLATDDLEGKFALLETSSVDDDLSQLKKELSGSSLKGELPPGRTAVSNSGAGRPFPDLEIESELNELRRKAKEY

SEQ ID NO: 174622 - protein, 289 aa, Zea Mays
MEIRAPPTSLRLAPPPAAASFRRTPLRTSFLRGSVSLKVVQVRQSNVNRFKCNSIRSNLFDRLTRVVRSYANAVLSSFEDPEKILDQAVLEMNDDLTKMRQATAQVLASQKRLENKYKAAEQASADWYRRAQLALQKGDEDLAREALKRRKSYADNASSLRSQLDQQKGVVENLISNTRLLESKIAEAKQKKDTLKARAQSAKTATKVSEMLGNVNTSSALSAFEKMEEKVMAMESQAEALGQLATDDLEGKFALLETSSVDDDLSQLKKELSGSSLVCILIWVIKLEF

SEQ ID NO: 174623 - protein, 207 aa, Zea Mays
MEIRAPPTSLRLAPPPAAASFRRTPLRTSFLRGSVSLKVVQVRQSNVNRFKCNSIRSNLFDRLTRVVRSYANAVLSSFEDPEKILDQAVLEMNDDLTKMRQATAQVLASQKRLENKYKAAEQASADWYRRAQLALQKGDEDLAREALKRRKSYADNASSLRSQLDQQKGVVENLISNTRLLESKIAEAKQKKDTLKARAQSARLLQK

SEQ ID NO: 174624 - protein, 77 aa, Zea Mays
MQRPFADNEPPRGVSRCLSPDEDAAFKNKNNREHFFVNREYFETREGFRRGRKDMAAEETFDRLLLNELCGNMLCSR

SEQ ID NO: 174625 - protein, 260 aa, Zea Mays
MKEHALHLLVLSHVFSVPSLKTVCVDQLERGFLATDNVVDMLQLARLCDAPRLALACARMVIGDFKTISLTDGWKVMRRTNPSMEQELLESLVEADTRRQERAKRMEEKKVYLQLYEAMEALVHICRDGCRTIGPRDQALKGSLAAACKFRACKGIELLVRHFSACGVRVPGGCANCRRMWQLLELHSRMCFLPDTCKVPLCRHFKEKMRNLGRKEETKWNLLVCKVLERGGTMGFMPGRRKNFINPKASWVLPRGSSCI

SEQ ID NO: 174626 - protein, 463 aa, Zea Mays
MVTWTTTSSLPDNQPRAEPTGSPQLTVAPQPSCTNVPWDVGGLQGSNWNPRRGPSLPQSRCPPVPTRSAHARTPTYPLRLHKILLDPHRKVPAEELGGRKAKPTCSRAGGDSGMERERQAVARNRKVVLRGYIDRAPREEDMELVDGGAVELRVPEGGGGPAVLVKNLYLSCDPYMRGRMRDFRNSYIPPFKPGSPIEGFGVGRVVDSTHPGFSAGDVVSGMTGWEDYSLITKPEQLRKIQQSDIPLSYHLGLLGMPGFTAYVGFYEICSPKKGEFVFVSAASGAVGQIVGQLAKLHGCYVVGSAGTDQKVELLKEKFGFDAAFNYKEEPDLTAALKRHFPEGIDIYFENVGGPMLDAVLLNMRVHGRIAVCGMVSQHGVTAPAGIHNLFSLISKRIEMKGFIQSDYVHLFPQFVDDITRHYRDGKIVYVEDMSVGLESGPASFVGLFSGKNVGKQVVCVSRD

SEQ ID NO: 174627 - protein, 889 aa, Zea Mays
MKISELSPEYRQPPPPPQSALLTDLNRVVADVEALDASDSSSPEKLAADLRCLLTNLASAASSSSSGLNGAFRLKVWNLAFRLWNACVDRANHFAARGAEAAVAETEIRQAAPELLLVAGLPEGVPNAAAKAASLFHRTGLFWLDLGRADLASACFEKATPLVCAADTEEDRDILLDLNLARARAASSEGKQALAVALLSRSKPLAAASSVGVKALAEGYLLLGKAALATKSPDPAIDASSLLTEALDLCERAAASPCCTTPTSPRSSPATPNLQVIKDQCLRCLAAERLQANDYEGTLRCIMVSRASPGLGKEHSSIAFMALRACLSSGKLLEAERELDRLMANAEAPEFVCVSAAELYVASVGLDAALKVLVALAARCRASASAVAVRVLKTVVQGAGGEAGHARAIAELVSDERVVALFNGPANAHERGTMHALLWTCGTVHFHAKNYEISADLIERSMLYVSRDEESRSRRANCFRVLCLCHMALRHLDRAQEFIIEAEKVEPSIHCAFLKFKILLQKKEEEDAIKLMKAMMGYVDFNPQFLILSIHEAIGCKSFCLYSAGKPMPMSEATVLRNLITLLLREPGSEAEILKYSRRAKLRMGELGLEAFFGKETVLKEDNMLLADDLNKSQLSDSDLKRGIEMLRRAGKLLPLTLSSALVTSDQLENNLPFLHTFSFYQLLSRLDTNAHPQQLQLAKNFAASKACTPGHLLILGDMASKGNQPNLEAAEFLLKASISTALASHSPNYGVISAALRKLVCLAGLHDFSGSMSDAAYDVFRQAYQIVVGLKDGEYPFEEGRWLSITAWNKSYLPVRLGQHSVARKWMKMGLDLARHFDRMKLYISGMEECFENFRKLTGKEPDECSQQDGEPSTGMSGTGSMSQPVLV

SEQ ID NO: 174628 - protein, 621 aa, Zea Mays
MKISELSPEYRQPPPPPQSALLTDLNRVVADVEALDASDSSSPEKLAADLRCLLTNLASAASSSSSGLNGAFRLKVWNLAFRLWNACVDRANHFAARGAEAAVAETEIRQAAPELLLVAGLPEGVPNAAAKAASLFHRTGLFWLDLGRADLASACFEKATPLVCAADTEEDRDILLDLNLARARAASSEGKQALAVALLSRSKPLAAASSVGVKALAEGYLLLGKAALATKSPDPAIDASSLLTEALDLCERAAASPCCTTPTSPRSSPATPNLQVIKDQCLRCLAAERLQANDYEGTLRCIMVSRASPGLGKEHSSIAFMALRACLSSGKLLEAERELDRLMANAEAPEFVCVSAAELYVASVGLDAALKVLVALAARCRASASAVAVRVLKTVVQGAGGEAGHARAIAELVSDERVVALFNGPANAHERGTMHALLWTCGTVHFHAKNYEISADLIERSMLYVSRDEESRSRRANCFRVLCLCHMALRHLDRAQEFIIEAEKVEPSIHCAFLKFKILLQKKEEEDAIKLMKAMMGYVDFNPQFLILSIHEAIGCKSFCLYSAGKPMPMSEATVLRNLITLLLREPGSEAEILKYSRRAKLRMGELGLEAFFGKETYAPG

SEQ ID NO: 174629 - protein, 260 aa, Zea Mays
MASSVPAPSGSVITVASSSSSAAAAAVCGTGSPCAACKFLRRKCQPDCVFAPYFPPDNPQKFVHVHRVFGASNVTKLLNELHPFQREDAVNSLAYEADMRLRDPVYGCVGVISILQHNLRQLQQDLARAKYELSKYQAAAAASASTAPTGPQAMAEFIGNAMPNGAHNFINIGHSAALGSLGGSASVFGQEQFGNAQMLSRSYDGGEPIARLGINGGGYEFGYSTAMGGSGAVSGLGTLGISPFLKSGTAGGDEKPNGGY

SEQ ID NO: 174630 - protein, 87 aa, Zea Mays
MMNMQQIITKLTTQCSEKAFELELKLADNRVLQEQLLQKEAKIEKMKYEHLTREAALTKNELLEEEYKKKLDEANKELSLENDLAGM

SEQ ID NO: 174631 - protein, 314 aa, Zea Mays
MFPDSVFPVLLQAAVHVKEKKIHKAEDVLSQYAEKRPENSKGLLLALAQIAANANHFQLAADSLSRIPDIQHMPATVATLVALKERLGDSNAAASVLDSAINWWKNSMTEDNKLDILTREAAAFKLSHGRDEEACLLYEELVKSHGSIEALAGLVMTSARTNLEKAEQYEKKLKPLPGLKGVNVESLEKTSGARHVEGPQDMKVDVPEEVKKQKAKKRKRKPRYPKGFDPANPGPPPDPERWLPRRERSSYRPKRKDKRAQVRGAQGAVSRETSATNVGASSKGSQTTNSSKTPAVNAEQPKTSNKSRKKKSRH

SEQ ID NO: 174632 - protein, 117 aa, Zea Mays
MMQHDYIIVLEDAAVHGAAVLGVPVKATIKEANSDSFVIKTLDRKTLWEMQTPQVMKPNLLKDGFELVKRDNHEVTDDVSIVEYLKHPVYITEGSYTNIKVTTPEDLLLAERLMNEK

SEQ ID NO: 174633 - protein, 179 aa, Zea Mays
MELHLCLRLHVRLTPAAKPPPAPAVLPVPASRRLRMGGSYGVALRRHTRRSNRAIHTSLADGEQGVAVDAVKERSVSVILLSGGQGKRMGASMPKQYLPLLGLPIALHSLKTFCQLKEVKEVVVVCDPDYIDVFEGSIKNLQLPLKFARPGKERQDSVFNGLQRSCVLFVCRKLMGIRN

SEQ ID NO: 174634 - protein, 162 aa, Zea Mays
MELHLCLRLHVRLTPAAKPPPAPAVLPVPASRRLRMGGSYGVALRRHTRRSNRAIHTSLADGEQGVAVDAVKERSVSVILLSGGQGKRMGASMPKQYLPLLGLPIALHRKSKKSWWCVIQTTLMYLKVLLRTCNYLLNLHAREKRDRTPFLMDFRKLMGIRN

SEQ ID NO: 174635 - protein, 295 aa, Zea Mays
MELHLCLRLHVRLTPAAKPPPAPAVLPVPASRRLRMGGSYGVALRRHTRRSNRAIHTSLADGEQGVAVDAVKERSVSVILLSGGQGKRMGASMPKQYLPLLGLPIALHSLKTFCQLKEVKEVVVVCDPDYIDVFEGSIKNLQLPLKFARPGKERQDSVFNGLQEIDGDSELVCVHDSARPLVSSEDVLEDAAVHGAAVLGVPVKATIKEANSDSFVIKTLDRKTLWEMQTPQVMKPNLLKDGFELVKRDNHEVTDDVSIVEYLKHPVYITEGSYTNIKVTTPEDLLLAERLMNEK

SEQ ID NO: 174636 - protein, 114 aa, Zea Mays
MELHLCLRLHVRLTPAAKPPPAPAVLPVPASRRLRMGGSYGVALRRHTRRSNRAIHTSLADGEQGVAVDAVKERSVSVILLSGGQGKRMGASMPKQYLPLLGLPIALHRLLSLA

SEQ ID NO: 174637 - protein, 336 aa, Zea Mays
MVIIALVPQDGAGRVGKMLFARQGKKFDYDLKQLRFSSDLLLEIGAGIELTTAAFPQFFLPMACVANVVKNVAAVTSTSTRTPIYKAYARGENIGDVTAKGESVGNIADLLGTGLSIFISKRNPSLVTSFAFLSCGYLLSSYQEVRSVVLNTLNRARFTVAVDSFIKTGHIPSLKEGNSQETIFNPPWRHEPVAIGSRFGEAFQEPASFLAIRPLFEDERYMVTYNPTKDKVYALLKDQAKSDDIIKAAFHAHVLLHFINASHARRLKQKQKQANPDRSEYLYSRNMDFLAHIAESCKIVSSSYGTFKKKAREQGWIMSESLLNPGKARLCAAKPQ

SEQ ID NO: 174638 - protein, 230 aa, Zea Mays
MQKILRASSMAPNHNFVDPERIEHGSPLRLPGHPVNGQPMDLEGWSGIQTEASQHMGVLQASSMGWNGAPVLAATPVVKKVMRLDVPVDKYPNYNFVGRLLGPRGNSLKRVEASTQCRVYIRGRGSVKDSVKEDKLRDKPGYEHLNEQLHVLVEAEFPADMVDVRLNQAVSILEDLLKPIDESMDYYKKQQLRELAILNGTLREESPSPHLSPSVSPFNSTGMKRAKTGR

SEQ ID NO: 174639 - protein, 140 aa, Zea Mays
MAPNHNFVDPERIEHGSPLRLPGHPVNGQPMDLEGWSGIQTEASQHMGVLQASSMGWNGAPVLAATPVVKKVMRLDVPVDKYPNYNFVGRLLGPRGNSLKRVEASTQCRVYIRGRGSVKDSVKSFQQIWLMCVLIKLCPS

SEQ ID NO: 174640 - protein, 218 aa, Zea Mays
MAPNHNFVDPERIEHGSPLRLPGHPVNGQPMDLEGWSGIQTEHMGVLQASSMGWNGAPVLAATPVVKKVMRLDVPVDKYPNYNFVGRLLGPRGNSLKRVEASTQCRVYIRGRGSVKDSVKEDKLRDKPGYEHLNEQLHVLVEAEFPADMVDVRLNQAVSILEDLLKPIDESMDYYKKQQLRELAILNGTLREESPSPHLSPSVSPFNSTGMKRAKTGR

SEQ ID NO: 174641 - protein, 264 aa, Zea Mays
MGRGKIEIKRIENTTSRQVTFCKRRNGLLKKAYELSILCDAEIALIVFSTRGRLYEYSSNSVRSTIERYKKASASTSGTAPVTDVNSLQEAAKLRQQIQTLQNSNRHLMGESTGNMTAKELKGLESRLERGIGRIRSKKHELLLAEIEYMQKREADLHNENMFLRAKVAEAERALEQEAAEDQTMMVPAAVRGATTELKALPASFDASGYYQYQQHQHVVAAASAASSSQYAEQPQGQQEYHHQTALHLGYHVKIDSAADKGFL

SEQ ID NO: 174642 - protein, 231 aa, Zea Mays
MSEEQHTATSYSPSLKGNHAAPEASPCSCSIFFLTPARSITLTASPDHIILLVSPQPSSISLSSTLPSIDPSYCVRMGRGKIEIKRIENTTSRQVTFCKRRNGLLKKAYELSILCDAEIALIVFSTRGRLYEYSSNSVRSTIERYKKASASTSGTAPVTDVNSLQYFQQEAAKLRQQIQTLQNSNSMSCCSRRSNICRRGKQICTMKTCSCGPRLRRLSELWSRRRQKTRR

SEQ ID NO: 174643 - protein, 385 aa, Zea Mays
MSAAARAPPPPRALYAPSRRVPFGAVILSAPRPGARVRAARPREGNVHNHCLLTSSSLNSSSLLCPPCNCAQMALADTRIAYQPEVDKHAGVLAYELVQGNLVQWNSFMDKSIPDPPTAVLLHGILGSRKNWGSFAKRLAQEFPMWQFLLVDLRCHGDSTSIKKSGPHTVASTALDVLKLIMQLRLTPRVLVGHSFGGKVALSMVEQAAKPLARPVRVWVLDATPGKVRAGGDGEDHPAELIEFLRRMPEQVSSKQEVVDALVKGQFSMDVARWVATNLRRTSPLGQRPSSSFSWTFDLNGISEMYKSYEDTNLWRIVENVPRGVHINFLKAERSLHRWALEDLQRIYTAEELAADEGGGVEMHVLEDAGHWVFWHPPFFSFFLQ

SEQ ID NO: 174644 - protein, 264 aa, Zea Mays
MSAAARAPPPPRALYAPSRRVPFGAVILSAPRPGARVRAARPREGNVHNHCLLTSSSLNSSSLLCPPCNCAQMALADTRIAYQPEVDKHAGVLAYELVQGNLWNSFMDKSIPDPPTAVLLHGILGSRKNWGSFAKRLAQEFPMWQFLLVDLRCHGDSTSIKKSGPHTVASTALDVLKLVCSFLRQLFMSSLFGFSFFSIFIFINRTRSVACLKMNSICVQRACTISAYSSYCKSSFMHLETSLTLHVRLHASASYDKMHYLRFL

SEQ ID NO: 174645 - protein, 266 aa, Zea Mays
MSAAARAPPPPRALYAPSRRVPFGAVILSAPRPGARVRAARPREGNVHNHCLLTSSSLNSSSLLCPPCNCAQMALADTRIAYQPEVDKHAGVLAYELVQGNLVQWNSFMDKSIPDPPTAVLLHGILGSRKNWGSFAKRLAQEFPMWQFLLVDLRCHGDSTSIKKSGPHTVASTALDVLKLVCSFLRQLFMSSLFGFSFFSIFIFINRTRSVACLKMNSICVQRACTISAYSSYCKSSFMHLETSLTLHVRLHASASYDKMHYLRFL

SEQ ID NO: 174646 - protein, 663 aa, Zea Mays
MGIIKEASRDIAGKFTPKSETLTKIQVSLSLSTNQELLMEAVALAKIRTRVDAEDSSELDGINHISELVNHMLEKHVEEKQMHSINGVPIPADFCCPLSLELMSDPVIVASGQTYERVFIRKWLDLGYNVCPKTRQTLGHSNLIPNYTVKQLIENWSEVHGVVLPDPVKLLSLNFSVSLKPINGRTSDKSPFSENSSRENKFGSPDHISSDDSCHPNLLHENFDSDDQISKASSSEDTDDSETGPPKLLVASTEANKLMCNASIDGSDAIKQSRKDGFHASDVEPRLQRNSISGDIGTSASSSSNHLEVVEKDKEEQVSSNSIASETTRNGRTVTCSKPNFQPRLGGVRSRNHLVWQQRSDKAVSLDSRSDFAIVDNKVRKLIEDLKNERTDPERAAIGELLVLSRHNMESRISIANHGAIPFLVNLLYSADPSMQENAVTVILNLSLDDNNKITIASADAIKPLIHVLETGNPEARANSAATLFSLSVNEENKAKIGRSGAIKPLVDLLRDGSAQGKKDAATALFNLSIFHENKARVVEAGAVKPLVELMDPAAGMVDKAVAVLAILATVQEGRNGIAQAGGIPVLVEVVELGSARAKENAAAALLQLCTNNSRFCSLVLQEGAMPPLVALSQSGTARAREKAQVLLSYFRNQRQVGKVTRR

SEQ ID NO: 174647 - protein, 711 aa, Zea Mays
MLVESLITKMQNYVLEVCQVVNSEVTPPETNRISVYLEKIKQFQCDKIMGIIKEASRDIAGKFTPKSETLTKIQVSLSLSTNQELLMEAVALAKIRTRVDAEDSSELDGINHISELVNHMLEKHVEEKQMHSINGVPIPADFCCPLSLELMSDPVIVASGQTYERVFIRKWLDLGYNVCPKTRQTLGHSNLIPNYTVKQLIENWSEVHGVVLPDPVKLLSLNFSVSLKPINGRTSDKSPFSENSSRENKFGSPDHISSDDSCHPNLLHENFDSDDQISKASSSEDTDDSETGPPKLLVASTEANKLMCNASIDGSDAIKQSRKDGFHASDVEPRLQRNSISGDIGTSASSSSNHLEVVEKDKEEQVSSNSIASETTRNGRTVTCSKPNFQPRLGGVRSRNHLVWQQRSDKAVSLDSRSDFAIVDNKVRKLIEDLKNERTDPERAAIGELLVLSRHNMESRISIANHGAIPFLVNLLYSADPSMQENAVTVILNLSLDDNNKITIASADAIKPLIHVLETGNPEARANSAATLFSLSVNEENKAKIGRSGAIKPLVDLLRDGSAQGKKDAATALFNLSIFHENKARVVEAGAVKPLVELMDPAAGMVDKAVAVLAILATVQEGRNGIAQAGGIPVLVEVVELGSARAKENAAAALLQLCTNNSRFCSLVLQEGAMPPLVALSQSGTARAREKAQVLLSYFRNQRQVGKVTRR

SEQ ID NO: 174648 - protein, 265 aa, Zea Mays
MSGAGPDLQLPPGFRFHPTDEELVMHYLCRRCAGLPIAVPIIAEIDLYKFDPWQLPRMALYGEKEWYFFSPRDRKYPNGSRPNRAAGAGYWKATGADKPVGTPKPLAIKKALVFYAGKAPKGEKTNWIMHEYRLADVDRSARKKNSLRLDDWVLCRIYNKKGGGLEKAAAPAAGGDHKPVFATAAVSSPPEQKPFVAAAGGLPPAFPELLACDREVQSQPKISEWERTFASDPVNPAGSMLDPVVGHAGGDPLLQDILMYWGKPF

SEQ ID NO: 174649 - protein, 161 aa, Zea Mays
MWTCPDEIPAVDANLVSGDRRAPVAGAGWATHKSSAWHLAATAERRCAPGVAWRSASAPTAADPRAPGLRPFGALPASTRKLFFLPQDANPVASRVIFATPSCPDRRGALPRSTKSMARHEDADAEQSLPSASALSRRRIAGWEIRNQPGTSGTYIMRMKS

SEQ ID NO: 174650 - protein, 165 aa, Zea Mays
MWTCPDEIPAVDANLVSGDRRAPVAGAGWATHKSSAWHLAATAERRCAPGVAWRSASAPTAADPRAPGLRPFGALPASTRKLFFLPQDANPVASRVIFATPSCPDRRGALPRSTKSMARHEDADAEQSLPSASALSRRRIAGWEIRNQPDCSLLRLNPTSSSNVN

SEQ ID NO: 174651 - protein, 786 aa, Zea Mays
MEDPVAVPSSSLTDPAAAAAARVPGAVAAAPGVTSAPSALAPTQPPATAAAVSEAATPCQRQLFTVELRPGETTIVSWKKLLKEAGHTAAAPPVAVEPAFAAHAGPSGPAHPAENDPKDPTQPNRFNAVIEKIERLYMGKHSSDEEDLNDVPDDDQYDTEDSFIDDAELDEYFEVDNLKTKHDGYFVNKGKLEQIEPGTAANVAPKKRRRKDASSSYLESNHLGPIDYFDIGDVPEKSSARGTVQTGKQLVSSNVSSYGQYHEDNRVVKNKISGPGGAPKRKSSEFSGDAAARAKIIKDVSHAPLELRDMEKHKAAALPVDYAHKSKISETFDYAYPAYRDKGTSGQLDFQQRKISRENQGPSNRTYRKEKHGTNEYPGIAMATAVYSTQTMHPVVGREGSGTKPKGTRLERAIRDLQKIVAEYRPPTIDINEVDPNGQVAVKRRLPPEIKQKLAKANNGKIQEHELMNRLMGIVGHLVQRRTLKRNMKEMVESGISAKLEKADRFQRVKLEINEMIKERMATKSKVNEQDGSADDFQVANDERRALKTKYTMDTALEDKMCDLYDMYVEPDKALARIVSFIICMLVKGMDEDKGPQSRKLYVELAELWPHGCMDNVGIKDAIYRSKERRRLLYSQQKVRSEERMKRKRLAATAKLPDGLAVAMQSGVAPQVAQPPITNPITYHTADYGQNPGLKYFDRARETSSSAIPDDGNRIAGEVKKKKRKPEYDPVDTQANLPRAPMPHGSEKQKPSKPADEASAGSLPSMATTQTVLGLPSVLGHNQQPS

SEQ ID NO: 174652 - protein, 801 aa, Zea Mays
MEDPVAVPSSSLTDPAAAAAARVPGAVAAAPGVTSAPSALAPTQPPATAAAVSEAATPCQRQLFTVELRPGETTIVSWKKLLKEAGHTAAAPPVAVEPAFAAHAGPSGPAHPAENDPKDPTQPNRFNAVIEKIERLYMGKHSSDEEDLNDVPDDDQYDTEDSFIDDAELDEYFEVDNLKTKHDGYFVNKGKLEQIEPGTAANVAPKKRRRKDASSSYLESNHLGPIDYFDIGDVPEKSSARGTVQTGKQLVSSNVSSYGQYHEDNRVVKNKISGPGGAPKRKSSEFSGDAAARAKIIKDVSHAPLELRDMEKHKAAALPVDYAHKSKISETFDYAYPAYRDKGTSGQLDFQQRKISRENQGPSNRTYRKEKHGTNEYPGIAMATAVYSTQTMHPVVGREGSGTKPKGTRLERAIRDLQKIVAEYRPPTIDINEVDPNGQVAVKRRLPPEIKQKLAKVAKANNGKIQEHELMNRLMGIVGHLVQRRTLKGWQRVRYYPHMSIPVILIFTRAREHTCGLRRNMKEMVESGISAKLEKADRFQRVKLEINEMIKERMATKSKVNEQDGSADDFQVANDERRALKTKYTMDTALEDKMCDLYDMYVEGMDEDKGPQSRKLYVELAELWPHGCMDNVGIKDAIYRSKERRRLLYSQQKVRSEERMKRKRLAATAKLPDGLAVAMQSGVAPQVAQPPITNPITYHTADYGQNPGLKYFDRARETSSSAIPDDGNRIAGEVKKKKRKPEYDPVDTQANLPRAPMPHGSEKQKPSKPADEASAGSLPSMATTQTVLGLPSVLGHNQQPS

SEQ ID NO: 174653 - protein, 432 aa, Zea Mays
MEDPVAVPSSSLTDPAAAAAARVPGAVAAAPGVTSAPSALAPTQPPATAAAVSEAATPCQRQLFTVELRPGETTIVSWKKLLKEAGHTAAAPPVAVEPAFAAHAGPSGPAHPAENDPKDPTQPNRFNAVIEKIERLYMGKHSSDEEDLNDVPDDDQYDTEDSFIDDAELDEYFEVDNLKTKHDGYFVNKGKLEQIEPGTAANVAPKKRRRKDASSSYLESNHLGPIDYFDIGDVPEKSSARGTVQTGKQLVSSNVSSYGQYHEDNRVVKNKISGPGGAPKRKSSEFSGDAAARAKIIKDVSHAPLELRDMEKHKAAALPVDYAHKSKISETFDYAYPAYRDKGTSGQLDFQQRKISRENQGPSNRTYRKEKHGTNEYPGIAMATAVYSTQTMHPVVGREGSGTKPKGTRLERAIRDLQKIVAEYHQQLILMR

SEQ ID NO: 174654 - protein, 790 aa, Zea Mays
MEDPVAVPSSSLTDPAAAAAARVPGAVAAAPGVTSAPSALAPTQPPATAAAVSEAATPCQRQLFTVELRPGETTIVSWKKLLKEAGHTAAAPPVAVEPAFAAHAGPSGPGKHSSDEEDLNDVPDDDQYDTEDSFIDDAELDEYFEVDNLKTKHDGYFVNKGKLEQIEPGTAANVAPKKRRRKDASSSYLESNHLGPIDYFDIGDVPEKSSARGTVQTGKQLVSSNVSSYGQYHEDNRVVKNKISGPGGAPKRKSSEFSGDAAARAKIIKDVSHAPLELRDMEKHKAAALPVDYAHKSKISETFDYAYPAYRDKGTSGQLDFQQRKISRENQGPSNRTYRKEKHGTNEYPGIAMATAVYSTQTMHPVVGREGSGTKPKGTRLERAIRDLQKIVAEYRPPTIDINEVDPNGQVAVKRRLPPEIKQKLAKVAKANNGKIQEHELMNRLMGIVGHLVQRRTLKGWQRVRYYPHMSIPVILIFTRAREHTCGLRRNMKEMVESGISAKLEKADRFQRVKLEINEMIKERMATKSKVNEQDGSADDFQVANDERRALKTKYTMDTALEDKMCDLYDMYVEPDKALARIVSFIICMLVKGMDEDKGPQSRKLYVELAELWPHGCMDNVGIKDAIYRSKERRRLLYSQQKVRSEERMKRKRLAATAKLPDGLAVAMQSGVAPQVAQPPITNPITYHTADYGQNPGLKYFDRARETSSSAIPDDGNRIAGEVKKKKRKPEYDPVDTQANLPRAPMPHGSEKQKPSKPADEASAGSLPSMATTQTVLGLPSVLGHNQQPS

SEQ ID NO: 174655 - protein, 360 aa, Zea Mays
MATEASTSAAGGIWVEGMSADNIKGLVLALSSSFFIGASFIVKKKGLKKAGASGVRAGVGGYSYLYEPLWWAGMITMIVGEVANFAAYAFAPAILVTPLGALSIIISAALADIMLKEKLHIFGILGCVLCVVGSTTIVLHAPQERTIESVAEVWDLATEPAFLSYAAIVLAATFVLIYYFIPRYGQTHIMVYIGVCSLVGSLSVMSVKALGIALKLTFSGMNQLIYPQTWLFTIVVVACIVTQMNYLNKALDTFNTAVVSPIYYTMFTSLTILASVIMFKDWDRQNPTQIVTEMCGFVTILSGTFLLHKTKDMVDGLPPTLPVRIPKHEDDGAEGIPLRSAEGIPLRSPRATARSLIQLT

SEQ ID NO: 174656 - protein, 575 aa, Zea Mays
MGEGSSTPLASPCTSHFATFPSWGVGSSWRWRWEGRWWWMIPSAPSLSPRAVMFLFEGQFGTILHTGDCRLTPDCVQNLPMKYITKKGNENICRLDFVFLDCTFSKCFLKLPSKDSAIRQVISCIWKHLHAPFVFLACDLLGHEDILVEVSRTFGTKIYVDRKLDCFKALSLTAPEIITDDSSSRFQMVGFHQLHDRASKELAEARANLQPEPLFIRPSTQWYATCARSPKPSLTEAEQDELGIWHVCFSIHSSRDELEQALQLLQPHWVISTTPPCFAIELSYVKKHCFKTRLTADDPLWKIFRDPLGKSVSSPCSVLATQTDENNSNFVVDDDHSSSSSDGCTYLNVISTLELKFVPPQPPEEPDITLFGRARFASQAIDFMKEDYIALEEARACAPTDSVHGSSEEVETYSGMDFGVKQPPASQQDLMEVGDDVSFKKVGDDVDSCKHEVTSTQLEGFRVKSLPTVQSNMLVVSDQLERSEVVGESKLLKSTEDLNLTIVRSAERTDCQKEPLCYIGSSKCLNASLKRFYRSRNIPVPRPLPSLVKLMESTKRVKIQPNTNYTLLNSRHSLP

SEQ ID NO: 174657 - protein, 558 aa, Zea Mays
MGEGSSTPLASPCTSHFATFPSWGVGSSWRWRWEGRWWWMIPSAPSLSPRDCRLTPDCVQNLPMKYITKKGNENICRLDFVFLDCTFSKCFLKLPSKDSAIRQVISCIWKHLHAPFVFLACDLLGHEDILVEVSRTFGTKIYVDRKLDCFKALSLTAPEIITDDSSSRFQMVGFHQLHDRASKELAEARANLQPEPLFIRPSTQWYATCARSPKPSLTEAEQDELGIWHVCFSIHSSRDELEQALQLLQPHWVISTTPPCFAIELSYVKKHCFKTRLTADDPLWKIFRDPLGKSVSSPCSVLATQTDENNSNFVVDDDHSSSSSDGCTYLNVISTLELKFVPPQPPEEPDITLFGRARFASQAIDFMKEDYIALEEARACAPTDSVHGSSEEVETYSGMDFGVKQPPASQQDLMEVGDDVSFKKVGDDVDSCKHEVTSTQLEGFRVKSLPTVQSNMLVVSDQLERSEVVGESKLLKSTEDLNLTIVRSAERTDCQKEPLCYIGSSKCLNASLKRFYRSRNIPVPRPLPSLVKLMESTKRVKIQPNTNYTLLNSRHSLP

SEQ ID NO: 174658 - protein, 619 aa, Zea Mays
MGERSGTQAELEHHGLLRSHGDEQMGAGRRKVLDDGATGKELETGHTADELEGCELGALADEHVQETSAGREHRERAGPERAEFHGAVAMANARALKRAQQGEKRDEGGARKPRTSWRTFRILPPVPPADTSLPRPLEEMLLRHRHHLLSRPRRSFPLAALGCVAMSTSSSPSSSTSTSAAADYHCRTKHSPTAGYARGPGRLDWANQPNPFLRFSPAPPLPLPNPPPLAPVPYPALFHSPPPPPQPLTLDSLSALLFHSLALSAWKSAGLSTWSLRVNPSSGNLHPTEAHLVFPHPREVDRLAIAHYAPRDHLLEARATAPIRDCSAILSAPGMAILALSSVFWREAWKYGERALRYCNHDVGHALAAVALAAATLGWDARLLDGLSDEDLGRLVGVEKGSPAAVPEGLLNKVVKGKARWVERQHPDCAVLLFPVGSEPEVDYGRISEELKVFDGLEWVGKANALSNDHVVWDVIYRTAEQVKKHGPAPGERFFVMPWQKSPALSKGLYKELTVQEVVRQRRSAVDMDGVHVMGRDTFYQMLMHCLPSGEVGSGERQGEQSALPFRVLPWEAEVHAALFVHRVSGLHRGIYFLADERRLPEVCYADIMLSGNCLAWMF

SEQ ID NO: 174659 - protein, 184 aa, Zea Mays
MGLRLCQTGPQGALFISQCPQRCHLSVSIPRRCRGVAASTATVGGREMNAPIQVAVAASGARQAKTTEPPWYCRGLVGTSSFLPLRCSRDHGEARTGQGRMGSPTTAPSPHSWRFSLIRGPQPQHNYCRREEAGGRRELGGGEAPPEFAYPHQRLRFLSVLAFWSCATMIAMEILSCQSVTKYV

SEQ ID NO: 174660 - protein, 226 aa, Zea Mays
MKELCFVVSLLMSSMTFINQRCLRDLSFRPHGCESRDMTVFKDDDGMAYLFYSSRDNTELHVSPLTEDYLQITAAMKRILIRRHREAPAVFKHQGTYYMITSGCSGWAPNRALAHAAESIMGPWETLGNPCVGGNRFYRLTTFLSQSTFVLPLPGLSGAFIFMADRWSPSNLRDSRYVWLPLFVGGLADEPLDYSFGFPLWSRVSIYWHKKWRLPEDWKIANTANT

SEQ ID NO: 174661 - protein, 354 aa, Zea Mays
MTAVDPTKGGNDSMYFYPGRVWLDTDGNTIQAHGGGIMYDHKTARFYWYGENKDGPTYQARPKGTQRVDIIGVSCYSSKDLWSWTHEGIVLRGEPSNVIHDLYKSKVLERPKVIYNDRTEKYIMWMHIDDANYTKASVGVAVSSSPTGPFTYLYSFRPHGCESRDMTVFKDDDGMAYLFYSSRDNTELHVSPLTEDYLQITAAMKRILIRRHREAPAVFKHQGTYYMITSGCSGWAPNRALAHAAESIMGPWETLGNPCVGGNRFYRLTTFLSQSTFVLPLPGLSGAFIFMADRWSPSNLRDSRYVWLPLFVGGLADEPLDYSFGFPLWSRVSIYWHKKWRLPEDWKIANTANT

SEQ ID NO: 174662 - protein, 80 aa, Zea Mays
MVLGRPTEVMLFTNHDLFFLAYFELTSSVAHGYVYYHVSLAHGYVYYYVSVLFCLLLCITGPWICLRVSFFLEELINKKQ

SEQ ID NO: 174663 - protein, 201 aa, Zea Mays
MSASAAAAASSSYSSRDKTRREPAPQGYPERGVEDSSSNTIAGQGGVHPGDGDGRGAREERGGVASGRSPPQKAFVVVGINTAFTSRKRRDSLRDTWVPRGHKLRKLEREKGVVIRFVIGHSGTPGGGALDRALDAEEAESRDFLRLDHAEGYHELSSKTRSYFTTAVATWDADFYVKVDDDIHLNLGAYTVGVLLHAVSL

SEQ ID NO: 174664 - protein, 226 aa, Zea Mays
MSASAAAAASSSYSSRDKTRREPAPQGYPERGVEDSSSNTIAGQGGVHPGDGDGRGAREERGGVASGRSPPQKAFVVVGINTAFTSRKRRDSLRDTWVPRGHKLRKLEREKGVVIRFVIGHSGTPGGGALDRALDAEEAESRDFLRLDHAEGYHELSSKTRSYFTTAVATWDADFYVKVDDDIHLNLGMLTSRLAKHRTRRRLYEVWACPVTERSEVPRARVLEVR

SEQ ID NO: 174665 - protein, 177 aa, Zea Mays
MMNTLGVDNEAKQTIEVLQAELKKTKERLQAVEELKGQTDPGTVVDANIAEKLAQLKNQIATLEKREERYKAVFAERISVFRKACCSLFGYKIVMNDQQQSNGIPVTRFILQSVYAQSDDEKLEFDYESGSTNIVVNDYTSQQEIARQVDIYIRRTNSIPAFTANLTMESFNKRSIC

SEQ ID NO: 174666 - protein, 647 aa, Zea Mays
MISCLIKVKSEFMVALDTAEKQVQEYQTKLVALEDQLSKSEDERMQFLDKLNYVEQELAATKGRESALQERLLKELGEYQERYRGQVMKINELEVQLNKEIDSRISAESSVSSAKALIKDLEGDLHRLSESSEREKKTLKKELSYVKEDLSLSASKNNAELEKTILRAENYESEAKLLNEQLTNLKKQLDECLSEKNEMELKLLNSSALPNQHAPTEEQKLIKLLQEELRNYEKEVHEAKRLKSSHMNVELLKEKLLEEQGRRERAELELSKLQEIGARAHKLELELASCTALLSNIPDVSSYADIPQKIADLQKQALTYLNEVGEVTSRLKELEVALEYADLSKQQAEGEAALAKERAASATREVKRLELMLTAISEERDKLRKEHATESDQSGMEKTIRELESIIHELKELISHKDTELNIMNERLNLETRKVKSLEREGDQLRSQVALLESKLGHGDYSASSTKVLRMMNTLGVDNEAKQTIEVLQAELKKTKERLQAVEELKGQTDPGTVVDANIAEKLAQLKNQIATLEKREERYKAVFAERISVFRKACCSLFGYKIVMNDQQQSNGIPVTRFILQSVYAQSDDEKLEFDYESGSTNIVVNDYTSQQEIARQVDIYIRRTNSIPAFTANLTMESFNKRSIC

SEQ ID NO: 174667 - protein, 703 aa, Zea Mays
MILRTPPQRKRRAGSGAGDDADLGLVKSVGVASATGRSPVSDRRLALYDRPTALALADAPGEPFDDMVCTYHCRQMVKSEFMVALDTAEKQVQEYQTKLVALEDQLSKSEDERMQFLDKLNYVEQELAATKGRESALQERLLKELGEYQERYRGQVMKINELEVQLNKEIDSRISAESSVSSAKALIKDLEGDLHRLSESSEREKKTLKKELSYVKEDLSLSASKNNAELEKTILRAENYESEAKLLNEQLTNLKKQLDECLSEKNEMELKLLNSSALPNQHAPTEEQKLIKLLQEELRNYEKEVHEAKRLKSSHMNVELLKEKLLEEQGRRERAELELSKLQEIGARAHKLELELASCTALLSNIPDVSSYADIPQKIADLQKQALTYLNEVGEVTSRLKELEVALEYADLSKQQAEGEAALAKERAASATREVKRLELMLTAISEERDKLRKEHATESDQSGMEKTIRELESIIHELKELISHKDTELNIMNERLNLETRKVKSLEREGDQLRSQVALLESKLGHGDYSASSTKVLRMMNTLGVDNEAKQTIEVLQAELKKTKERLQAVEELKGQTDPGTVVDANIAEKLAQLKNQIATLEKREERYKAVFAERISVFRKACCSLFGYKIVMNDQQQSNGIPVTRFILQSVYAQSDDEKLEFDYESGSTNIVVDIYIRRTNSIPAFTANLTMESFNKRSIC

SEQ ID NO: 174668 - protein, 708 aa, Zea Mays
MILRTPPQRKRRAGSGAGDDADLGLVKSVGVASATGRSPVSDRRLALYDRPTALALADAPGEPFDDMVCTYHCRQMVKSEFMVALDTAEKQVQEYQTKLVALEDQLSKSEDERMQFLDKLNYVEQELAATKGRESALQERLLKELGEYQERYRGQVQLNKEIDSRISAESSVSSAKALIKDLEGDLHRLSESSEREKKTLKKELSYVKEDLSLSASKNNAELEKTILRAENYESEAKLLNEQLTNLKKQLDECLSEKNEMELKLLNSSALPNQHAPTEEQKLIKLLQEELRNYEKEVHEAKRLKSSHMNVELLKEKLLEEQGRRERAELELSKLQEIGARAHKLELELASCTALLSNIPDVSSYADIPQKIADLQKQALTYLNEVGEVTSRLKELEVALEYADLSKQQAEGEAALAKERAASATREVKRLELMLTAISEERDKLRKEHATESDQSGMEKTIRELESIIHELKELISHKDTELNIMNERLNLETRKVKSLEREGDQLRSQVALLESKLGHGDYSASSTKVLRMMNTLGVDNEAKQTIEVLQAELKKTKERLQAVEELKGQTDPGTVVDANIAEKLAQLKNQIATLEKREERYKAVFAERISVFRKACCSLFGYKIVMNDQQQSNGIPVTRFILQSVYAQSDDEKLEFDYESGSTNIVVNDYTSQQEIARQVDIYIRRTNSIPAFTANLTMESFNKRSIC

SEQ ID NO: 174669 - protein, 111 aa, Zea Mays
MVTGTSPFYPYFQFGQSGNTTTNYTSGQGYNLQQYPQMFHFSTVSSTAAAVTGFAQQYGGPLSLAASPQAQAGMTMALTAPTLPTPTQAAHPYRLIPSHFAVSAAPEQPLA

SEQ ID NO: 174670 - protein, 156 aa, Zea Mays
MMAALSYAHSREQYSPYTPDYGYPTNFYNIYGGAQYPFYGGATAGMVTGTSPFYPYFQFGQSGNTTTNYTSGQGYNLQQYPQMFHFSTVSSTAAAVTGFAQQYGGPLSLAASPQAQAGMTMALTAPTLPTPTQAAHPYRLIPSHFAVSAAPEQPLA

SEQ ID NO: 174671 - protein, 151 aa, Zea Mays
MKSFNQQAGIQGGLGAAFPSHATFPHYAIPQGLPFHVYGYSPYTPDYGYPTNFYNIYGGAQYPFYGGATAGMVTGTSPFYPYFQFGQSGNTTTNYTSGQGYNLQQYPQMFHFSTVSSTAAAVTGFAQQYGGPLSLAASPQAQAVCIPIKQA

SEQ ID NO: 174672 - protein, 75 aa, Zea Mays
MLMCTHPCSTHQPPPPLPQVVRIATTAQKKMKPWKETSRSSKITTSSRRGLAATPSRLPVKAACIYVSFSHFDYY

SEQ ID NO: 174673 - protein, 128 aa, Zea Mays
MDTIEKVVRRKEEAVGEEGDMERPTLLSEALRMPQPTAFVSVQLSDGQPTPSNVSKKKMDGGEVLFLYGVGEVAVTIGRNSLSPQPLHPGSSIVIVVIESDRGDDDGLSEALMLGVGCKSVFDPSKEV

SEQ ID NO: 174674 - protein, 238 aa, Zea Mays
MAADVGVVMVSAWSVSFQIALKGATAEGTVITKALGSAGRVLDGPQAELVPGAAATRLAVETKHVKLVEAALNCLHDVTRSTSARPLPGQNFRSRNNCVDPPNTAAAVNAYADLNHSWMDTIEKVVRRKEEAVGEEGDMERPTLLSEALRMPQPTAFVSVQLSDGQPTPSNVSKKKMDGGEVLFLYGVGEVAVTIGRNSLSPQPLHPGSSIVIVVIESDRGDDDGLSEALMLGVGCKI

SEQ ID NO: 174675 - protein, 373 aa, Zea Mays
MDGEMDEDALTEILARLPCRSLARFQCVSTSWRRIISSDYLRRRLPLITSGVLYHDDTCRGGADGGRRQQVYTYACASGGGATATATATAEAPDMGFFPRHDTSTIIDGCNGLLLYYASRPTAAFHVVNPTTRRWAELPAPRARTLLSVLAFDPCASPRYRVVCFTGWLPRGATLEVFDSERGAWTDHEVDFGLDTDAMSATMHYSGGALHVLAYSGHVVRVDLDTMASAATELPAPVSCRARAGHCRGRLRFASSDGARLRIWELRDATGGEWALKHEIGVADVVPGAASQPITFLFMAFHPEREVVYLWSPWKLLAFDMVQRRVEEEWAFGSEKEGTHLIQGSSIVIVVIESDRGDDDGLSEALMLGVGCK

SEQ ID NO: 174676 - protein, 204 aa, Zea Mays
MQSMGKGLAWLNGNAIGRYWPRTSSINDRCTPSCNYRGTFIPDKCRTGCGQPTQRWYHIPRSWFHPSGNILVVFEEKGGDPTKITFSRRAVTSVCSFVSEHFPSIDLESWDESAMTEGTPPAKAQLFCPEGKSISSVKFASLGNPSGTCRSYQMGRCHHPNSLSVVEKACLNTNSCTVSLTDESFGKDLCPGVTKTLAIEADCS

SEQ ID NO: 174677 - protein, 366 aa, Zea Mays
MAAAAASFSALPFLLLLLLVPSLDGASNVTYDHRSLIISGRRRLVISTSIHYPRSVPEMWPKLVAEAKDGGADCIETYVFWNGHEIAPGQYYFEDRFDLVRFVKVVRDAGLLLILRIGPYVAAEWNYGGVPVWLHYVPGTVFRTNNEPFKNHVKSFTTYIVDMMKKEQLFASQGGNIILAQIENEYGDYYEQAYGAGGKPYAMWAASMALAQNTGVPWIMCQESDAPDPVINSCNGFYCDGFQPNSPTKPKIWTENWPGWFQTFGESNPHRPPEDVAFAVARFFEKGGSVQNYYVYHGGTNFGRTTGGPFITTSYDYDAPIDEYGLRRFPKWAHLRDLHKSIRLCEHTLLYGNTTFLSLGPKQEAI

SEQ ID NO: 174678 - protein, 463 aa, Zea Mays
MEIQRFFLWVLNKRQYDLPAWSVSILPDCRNVVFNTAKVQSQTSMVTMVPESLQASKPERWSIFRERTGIWGKNDFVRNGFVDHINTTKDSTDYLWYTTSFSVDGSYSSKGSHAVLNIDSNGHGVHAFLNNVLIGSAYGNGSQSRFSVKLPINLRTGKNELALLSMTVGLQNAGFAYEWIGAGFTNVNISGVRTGTIDLSSNNWAYKIGLEGEYYNLFKPDQTNNQRWIPQSEPPKNQPLTWYKVNVDVPQGDDPVGIDMQSMGKGLAWLNGNAIGRYWPRTSSINDRCTPSCNYRGTFIPDKCRTGCGQPTQRWYHIPRSWFHPSGNILVVFEEKGGDPTKITFSRRAVTSVCSFVSEHFPSIDLESWDESAMTEGTPPAKAQLFCPEGKSISSVKFASLGNPSGTCRSYQMGRCHHPNSLSVVEKACLNTNSCTVSLTDESFGKDLCPGVTKTLAIEADCS

SEQ ID NO: 174679 - protein, 629 aa, Zea Mays
MEIIMNKRMELAANHTPCGQLVWLLLKTLVSLGLCAKSLMLLIPWFQTFGESNPHRPPEDVAFAVARFFEKGGSVQNYYVYHGGTNFGRTTGGPFITTSYDYDAPIDEYGLRRFPKWAHLRDLHKSIRLCEHTLLYGNTTFLSLGPKQEADIYSDQSGGCVAFLANIDSANDKVVTFRNRQYDLPAWSVSILPDCRNVVFNTAKVQSQTSMVTMVPESLQASKPERWSIFRERTGIWGKNDFVRNGFVDHINTTKDSTDYLWYTTSFSVDGSYSSKGSHAVLNIDSNGHGVHAFLNNVLIGSAYGNGSQSRFSVKLPINLRTGKNELALLSMTVGLQNAGFAYEWIGAGFTNVNISGVRTGTIDLSSNNWAYKIGLEGEYYNLFKPDQTNNQRWIPQSEPPKNQPLTWYKVNVDVPQGDDPVGIDMQSMGKGLAWLNGNAIGRYWPRTSSINDRCTPSCNYRGTFIPDKCRTGCGQPTQRWYHIPRSWFHPSGNILVVFEEKGGDPTKITFSRRAVTSVCSFVSEHFPSIDLESWDESAMTEGTPPAKAQLFCPEGKSISSVKFASLGNPSGTCRSYQMGRCHHPNSLSVVEKACLNTNSCTVSLTDESFGKDLCPGVTKTLAIEADCS

SEQ ID NO: 174680 - protein, 481 aa, Zea Mays
MAAAAASFSALPFLLLLLLVPSLDGASNVTYDHRSLIISGRRRLVISTSIHYPRSVPEMWPKLVAEAKDGGADCIETYVFWNGHEIAPGQYYFEDRFDLVRFVKVVRDAGLLLILRIGPYVAAEWNYGGVPVWLHYVPGTVFRTNNEPFKNHVKSFTTYIVDMMKKEQLFASQGGNIILAQIENEYGDYYEQAYGAGGKPYAMWAASMALAQNTGVPWIMCQESDAPDPVINSCNGFYCDGFQPNSPTKPKIWTENWPGWFQTFGESNPHRPPEDVAFAVARFFEKGGSVQNYYVYHGGTNFGRTTGGPFITTSYDYDAPIDEYGLRRFPKWAHLRDLHKSIRLCEHTLLYGNTTFLSLGPKQEADIYSDQSGGCVAFLANIDSANDKVVTFRNRQYDLPAWSVSILPDCRNVVFNTAKVQSQTSMVTMVPESLQASKPERWSIFRERTGIWGKNDFVRNGFVDHINTTKDSTDYLWYTTR

SEQ ID NO: 174681 - protein, 218 aa, Zea Mays
MASSAGNRFLRQLSASNGDEAVCGGLQMDQQEYGGAGVGRRGSRRWSKKRAAAAAAARGYGAGSGNGVKQPASAAGKRVMVVVDESSGANHAMMWALTHVADKGDFLTLLHVLPRSGSGRGEEASSLANSLGTLCKASRPEVEVEALVIQGPKLGTVLSQCRPSPCWLSCFLRSSGEEFVEQCINQAECLTLAVRKQSKGVGGYLISTRWQKNFWLLA

SEQ ID NO: 174682 - protein, 470 aa, Zea Mays
MIHLGDTMLDKVHLTAKLITKEKEHDLLNYQDHDVKSALSSLGEAADQFETIANVNCSEKLNTIPFMNDEQPAASNVLHHVVIPSDDEGKWFWNQFNQLEMEYKKELEGGSLYKFYLINKYTPCSSPLAQLKHQMDLGHFIAGHGGNIFSISEEEASSIIAYALIISEQQGFYYEAASSNLDKNASMLPSMSSPNESFENNHKFSRFAPTEELTSGFYDSFLSALKDLHHEIDLNNEKIALRSKYTVICIYAKQFHDLRKMCCPSELAYISSISRCKNWNAQGGKSKVFFAKSMDDRFIIKQIKKTEFDSFLKFGLEYFKHFGASQVSSNPTCLAKILGIYQVKETRNGKETRVNFMVMENLLFGHNILRRYDLKGALFSRYIPDSENSEKNMNVMDYSLLVGVDKEKKELVFGIIDYLRQYTWDKQLESWVKTSLVVPKNLSPTVILPREYKMRFRAFMSQYFLSVPDA

SEQ ID NO: 174683 - protein, 705 aa, Zea Mays
MNNTPTCDDQYPNQEKLIHTEKSVPLHLHDSKTMASEDSAGEEHIDSKGIQSYSSLPVSDPSTNFMQDMPSPDCAESKISGGFDGSTFTDTSKEVQKKELSSDNFQGTFDVICAESGAALNTQDILVSMSSQHIRNQAVCEQSHLSRITYYGYFDTSLGRYLQDTLLNEKHSCLSCGESPESHMYSYTHHNGTLTVLVKRLPLELTLSGETQGRIWMWTRCLRCNAKPTHRVIISSSARNLSFGKFLELSFSTHSATKKLPTCGHLLHRDCLRFFGFGSRVAMFIYSSVEIYSACKPPLSLEFNNRNKNDWLDIEVKNPIAYLHANIILFFKVLLKWKQLFTTIENVIQDLRSRYSSQAMGEDTNVSVDEDEGLLLEVSRMLTQEKNKVEVSLREFSRIAIPESFAHGILGLNWLYQQLLLGFYIWDLRLLHILQYTKVNTASSDNSIHESTAKNEPKSSAKKLNTIPFMNDEQPAASNVLHHVVIPSDDEGKWFWNQFNQLEMEYKKELEGGSLYKFYLINKYTPCSSPLAQLKHQMDLGHFIAGHGGNIFSISEEEASSIIAYALIISEQQGFYYEAASSNLDKNASMLPSMSSPNESFENNHKFSRFAPTEELTSGFYDSFLSALKDLHHEIDLNNEKIALRSKYTVICIYAKQFHDLRKMCCPSELAYISSISRCKNWNAQGGKSFKQPYLSCENSRNISG

SEQ ID NO: 174684 - protein, 302 aa, Zea Mays
MIHLGDTMLDKVHLTAKLITKEKEHDLLNYQDHDVKSALSSLGEAADQFETIANVNCSEKLNTIPFMNDEQPAASNVLHHVVIPSDDEGKWFWNQFNQLEMEYKKELEGGSLYKFYLINKYTPCSSPLAQLKHQMDLGHFIAGHGGNIFSISEEEASSIIAYALIISEQQGFYYEAASSNLDKNASMLPSMSSPNESFENNHKFSRFAPTEELTSGFYDSFLSALKDLHHEIDLNNEKIALRSKYTVICIYAKQFHDLRKMCCPSELAYISSISRCKNWNAQGGKSFKQPYLSCENSRNISG

SEQ ID NO: 174685 - protein, 1421 aa, Zea Mays
MSKMCHACASEETTMNEANIDLACSTSCCKMCDYGEGSSIVTSEINWLAMDSSPYSTPYGTPVFSRENSFSSFASCFSSLGDSLTDSDSEEEIELQDTGQFYHDTILIKDFMEQEESFVRVEECQFKDIADDCAIFSIPINQYISSAEQQLERHEDSNKGNFDTINISLDSDISYEQRKDILSDDKHVRTKCAVPVEDIDHKESGAIVVEQITSLPMPGGDIFPLNEQVMDGLSSTLENTIVYNNILNTEPEMKHGTHFENENECLYPLALPSFEADPLIWLPPEPENNEDDFDTVSNDDDESGNNSTGWGRSSFKVNLAERNKESRDDQLQKVMSEVMNGQFKILVSRFLAAEGLSLSDGGTDKNWLDIVASLSWDAALRVKPEANSGNAMDPGSYVKVKCLASGSYQQSEVINGLVFKKSAAHKQMRANVKHPKLLLLQGALGHSSTGLSSINSMKQENDQLERTLYEVIVKCQLDVILVEKAVSRNVNEYIQKQGVTVVSDMNTHRLERIARCIGSPILSLQSVLMKPSLIKQCESLHFEKFVEEHNITGEDGKKSCKTFLFLEGFPRPLGCTILLKGATREELKKIKRVLHFTVFAAYHLILETSFFADQKLFTTDKTTTGKEKCFKTNQQLLGSCYDNSKNSDTMNNTPTCDDQYPNQEKLIHTEKSVPLHLHDSKTMASEDSAGEEHIDSKGIQSYSSLPVSDPSTNFMQDMPSPDCAESKISGGFDGSTFTDTSKEVQKKELSSDNFQGTFDVICAESGAALNTQDILVSMSSQHIRNQAVCEQSHLSRITYYGYFDTSLGRYLQDTLLNEKHSCLSCGESPESHMYSYTHHNGTLTVLVKRLPLELTLSGETQGRIWMWTRCLRCNAKPTHRVIISSSARNLSFGKFLELSFSTHSATKKLPTCGHLLHRDCLRFFGFGSRVAMFIYSSVEIYSACKPPLSLEFNNRNKNDWLDIEVKNVLLKWKQLFTTIENVIQDLRSRYSSQAMGEDTNVSVDEDEGLLLEVSRMLTQEKNKVEVSLREFSRIAIPESFAHGILGLNWLYQQLLLGFYIWDLRLLHILQYTKVNTASSDNSIHESTAKNEPKSSAKKLNTIPFMNDEQPAASNVLHHVVIPSDDEGKWFWNQFNQLEMEYKKELEGGSLYKFYLINKYTPCSSPLAQLKHQMDLGHFIAGHGGNIFSISEEEASSIIAYALIISEQQGFYYEAASSNLDKNASMLPSMSSPNESFENNHKFSRFAPTEELTSGFYDSFLSALKDLHHEIDLNNEKIALRSKYTVICIYAKQFHDLRKMCCPSELAYISSISRCKNWNAQGGKSKVFFAKSMDDRFIIKQIKKTEFDSFLKFGLEYFKHFGASQVSSNPTCLAKILGIYQKILKRYCWIKILLKTCVPCQSTFKEKLKTSWNALFGTTHLS

SEQ ID NO: 174686 - protein, 716 aa, Zea Mays
MRANVKHPKLLLLQGALGHSSTGLSSINSMKQENDQLERTLYEVIVKCQLDVILVEKAVSRNVNEYIQKQGVTVVSDMNTHRLERIARCIGSPILSLQSVLMKPSLIKQCESLHFEKFVEEHNITGEDGKKSCKTFLFLEGFPRPLGCTILLKGATREELKKIKRVLHFTVFAAYHLILETSFFADQKLFTTDKTTTGKEKCFKTNQQLLGSCYDNSKNSDTMNNTPTCDDQYPNQEKLIHTEKSVPLHLHDSKTMASEDSAGEEHIDSKGIQSYSSLPVSDPSTNFMQDMPSPDCAESKISGGFDGSTFTDTSKEVQKKELSSDNFQGTFDVICAESGAALNTQDILVSMSSQHIRNQAVCEQSHLSRITYYGYFDTSLGRYLQDTLLNEKHSCLSCGESPESHMYSYTHHNGTLTVLVKRLPLELTLSGETQGRIWMWTRCLRCNAKPTHRVIISSSARNLSFGKFLELSFSTHSATKKLPTCGHLLHRDCLRFFGFGSRVAMFIYSSVEIYSACKPPLSLEFNNRNKNDWLDIEVKNPIAYLHANIILFFKVLLKWKQLFTTIENVIQDLRSRYSSQAMGEDTNVSVDEDEGLLLEVSRMLTQEKNKVEVSLREFSRIAIPESFAHGILGLNWLYQQLLLGFYIWDLRLLHILQYTKVNTASSDNSIHESTAKNEPKSSASIAIQDTPSLKEIGTERKEATINSSGNFDDPFG

SEQ ID NO: 174687 - protein, 624 aa, Zea Mays
MRANVKHPKLLLLQGALGHSSTGLSSINSMKQENDQLERTLYEVIVKCQLDVILVEKAVSRNVNEYIQKQGVTVVSDMNTHRLERIARCIGSPILSLQSVLMKPSLIKQCESLHFEKFVEEHNITGEDGKKSCKTFLFLEGFPRPLGCTILLKGATREELKKIKRVLHFTVFAAYHLILETSFFADQKLFTTDKTTTGKEKCFKTNQQLLGSCYDNSKNSDTMNNTPTCDDQYPNQEKLIHTEKSVPLHLHDSKTMASEDSAGEEHIDSKGIQSYSSLPVSDPSTNFMQDMPSPDCAESKISGGFDGSTFTDTSKEVQKKELSSDNFQGTFDVICAESGAALNTQDILVSMSSQHIRNQAVCEQSHLSRITYYGYFDTSLGRYLQDTLLNEKHSCLSCGESPESHMYSYTHHNGTLTVLVKRLPLELTLSGETQGRIWMWTRCLRCNAKPTHRVIISSSARNLSFGKFLELSFSTHSATKKLPTCGHLLHRDCLRFFGFGSRVAMFIYSSVEIYSACKPPLSLEFNNRNKNDWLDIEVKNPIAYLHANIILFFKVLLKWKQLFTTIENVIQDLRSRYSSQAMGEDTNVSVDEDEGLLLEVSRMLTQEKNKVEVIVLHQFYSSMY

SEQ ID NO: 174688 - protein, 1158 aa, Zea Mays
MSKMCHACASEETTMNEANIDLACSTSCCKMCDYGEGSSIVTSEINWLAMDSSPYSTPYGTPVFSRENSFSSFASCFSSLGDSLTDSDSEEEIELQDTGQFYHDTILIKDFMEQEESFVRVEECQFKDIADDCAIFSIPINQYISSAEQQLERHEDSNKGNFDTINISLDSDISYEQRKDILSDDKHVRTKCAVPVEDIDHKESGAIVVEQITSLPMPGGDIFPLNEQVMDGLSSTLENTIVYNNILNTEPEMKHGTHFENENECLYPLALPSFEADPLIWLPPEPENNEDDFDTVSNDDDESGNNSTGWGRSSFKVNLAERNKESRDDQLQKVMSEVMNGQFKILVSRFLAAEGLSLSDGGTDKNWLDIVASLSWDAALRVKPEANSGNAMDPGSYVKVKCLASGSYQQSEVINGLVFKKSAAHKQMRANVKHPKLLLLQGALGHSSTGLSSINSMKQENDQLERTLYEVIVKCQLDVILVEKAVSRNVNEYIQKQGVTVSVLMKPSLIKQCESLHFEKFVEEHNITGEDGKKSCKTFLFLEGFPRPLGCTIPQQISAIPNVCTLPLLECMQEIVKGPERFLVVCLSASIPTPHIHAIRPAPMRILLKGATREELKKIKRVLHFTVFAAYHLILETSFFADQKLFTTDKTTTGKEKCFKTNQQLLGSCYDNSKNSDTMNNTPTCDDQYPNQEKLIHTEKSVPLHLHDSKTMASEDSAGEEHIDSKGIQSYSSLPVSDPSTNFMQDMPSPDCAESKISGGFDGSTFTDTSKEVQKKELSSDNFQGTFDVICAESGAALNTQDILVSMSSQHIRNQAVCEQSHLSRITYYGYFDTSLGRYLQDTLLNEKHSCLSCGESPESHMYSYTHHNGTLTVLVKRLPLELTLSGETQGRIWMWTRCLRCNAKPTHRVIISSSARNLSFGKFLELSFSTHSATKKLPTCGHLLHRDCLRFFGFGSRVAMFIYSSVEIYSACKPPLSLEFNNRNKNDWLDIEVKNVLLKWKQLFTTIENVIQDLRSRYSSQAMGEDTNVSVDEDEGLLLEVSRMLTQEKNKVEVSLREFSRIAIPESFAHGILGLNWLYQQLLLGFYIWDLRLLHILQYTKVNTASSDNSIHESTAKNEPKSSASIAIQDTPSLKEIGTERKEATINSSGNFDDPFG

SEQ ID NO: 174689 - protein, 712 aa, Zea Mays
MFSFRILPAEMRANVKHPKLLLLQGALGHSSTGLSSINSMKQENDQLERTLYEVIVKCQLDVILVEKAVSRNVNEYIQKQGVTVVSDMNTHRLERIARCIGSPILSLQSVLMKPSLIKQCESLHFEKFVEEHNITGEDGKKSCKTFLFLEGFPRPLGCTILLKGATREELKKIKRVLHFTVFAAYHLILETSFFADQKLFTTDKTTTGKEKCFKTNQQLLGSCYDNSKNSDTMNNTPTCDDQYPNQEKLIHTEKSVPLHLHDSKTMASEDSAGEEHIDSKGIQSYSSLPVSDPSTNFMQDMPSPDCAESKISGGFDGSTFTDTSKEVQKKELSSDNFQGTFDVICAESGAALNTQDILVSMSSQHIRNQAVCEQSHLSRITYYGYFDTSLGRYLQDTLLNEKHSCLSCGESPESHMYSYTHHNGTLTVLVKRLPLELTLSGETQGRIWMWTRCLRCNAKPTHRVIISSSARNLSFGKFLELSFSTHSATKKLPTCGHLLHRDCLRFFGFGSRVAMFIYSSVEIYSACKPPLSLEFNNRNKNDWLDIEVKNVLLKWKQLFTTIENVIQDLRSRYSSQAMGEDTNVSVDEDEGLLLEVSRMLTQEKNKVEVSLREFSRIAIPESFAHGILGLNWLYQQLLLGFYIWDLRLLHILQYTKVNTASSDNSIHESTAKNEPKSSASIAIQDTPSLKEIGTERKEATINSSGNFDDPFG

SEQ ID NO: 174690 - protein, 714 aa, Zea Mays
MDPGSYVKVKCLASGSYQQSEVINGLVFKKSAAHKQMRANVKHPKLLLLQGALGHSSTGLSSINSMKQENDQLERTLYEVIVKCQLDVILVEKAVSRNVNEYIQKQGVTVSVLMKPSLIKQCESLHFEKFVEEHNITGEDGKKSCKTFLFLEGFPRPLGCTILLKGATREELKKIKRVLHFTVFAAYHLILETSFFADQKLFTTDKTTTGKEKCFKTNQQLLGSCYDNSKNSDTMNNTPTCDDQYPNQEKLIHTEKSVPLHLHDSKTMASEDSAGEEHIDSKGIQSYSSLPVSDPSTNFMQDMPSPDCAESKISGGFDGSTFTDTSKEVQKKELSSDNFQGTFDVICAESGAALNTQDILVSMSSQHIRNQAVCEQSHLSRITYYGYFDTSLGRYLQDTLLNEKHSCLSCGESPESHMYSYTHHNGTLTVLVKRLPLELTLSGETQGRIWMWTRCLRCNAKPTHRVIISSSARNLSFGKFLELSFSTHSATKKLPTCGHLLHRDCLRFFGFGSRVAMFIYSSVEIYSACKPPLSLEFNNRNKNDWLDIEVKNVLLKWKQLFTTIENVIQDLRSRYSSQAMGEDTNVSVDEDEGLLLEVSRMLTQEKNKVEVSLREFSRIAIPESFAHGILGLNWLYQQLLLGFYIWDLRLLHILQYTKVNTASSDNSIHESTAKNEPKSSASIAIQDTPSLKEIGTERKEATINSSGNFDDPFG

SEQ ID NO: 174691 - protein, 728 aa, Zea Mays
MDPGSYVKVKCLASGSYQQSEVINGLVFKKSAAHKQMRANVKHPKLLLLQGALGHSSTGLSSINSMKQENDQLERTLYEVIVKCQLDVILVEKAVSRNVNEYIQKQGVTVSVLMKPSLIKQCESLHFEKFVEEHNITGEDGKKSCKTFLFLEGFPRPLGCTILLKGATREELKKIKRVLHFTVFAAYHLILETSFFADQKLFTTDKTTTGKEKCFKTNQQLLGSCYDNSKNSDTMNNTPTCDDQYPNQEKLIHTEKSVPLHLHDSKTMASEDSAGEEHIDSKGIQSYSSLPVSDPSTNFMQDMPSPDCAESKISGGFDGSTFTDTSKEVQKKELSSDNFQGTFDVICAESGAALNTQDILVSMSSQHIRNQAVCEQSHLSRITYYGYFDTSLGRYLQDTLLNEKHSCLSCGESPESHMYSYTHHNGTLTVLVKRLPLELTLSGETQGRIWMWTRCLRCNAKPTHRVIISSSARNLSFGKFLELSFSTHSATKKLPTCGHLLHRDCLRFFGFGSRVAMFIYSSVEIYSACKPPLSLEFNNRNKNDWLDIEVKNPIAYLHANIILFFKVLLKWKQLFTTIENVIQDLRSRYSSQAMGEDTNVSVDEDEGLLLEVSRMLTQEKNKVEVSLREFSRIAIPESFAHGILGLNWLYQQLLLGFYIWDLRLLHILQYTKVNTASSDNSIHESTAKNEPKSSASIAIQDTPSLKEIGTERKEATINSSGNFDDPFG

SEQ ID NO: 174692 - protein, 662 aa, Zea Mays
MSKMCHACASEETTMNEANIDLACSTSCCKMCDYGEGSSIVTSEINWLAMDSSPYSTPYGTPVFSRENSFSSFASCFSSLGDSLTDSDSEEEIELQDTGQFYHDTILIKDFMEQEESFVRVEECQFKDIADDCAIFSIPINQYISSAEQQLERHEDSNKGNFDTINISLDSDISYEQRKDILSDDKHVRTKCAVPVEDIDHKESGAIVVEQITSLPMPGGDIFPLNEQVMDGLSSTLENTIVYNNILNTEPEMKHGTHFENENECLYPLALPSFEADPLIWLPPEPENNEDDFDTVSNDDDESGNNSTGWGRSSFKVNLAERNKESRDDQLQKVMSEVMNGQFKILVSRFLAAEGLSLSDGGTDKNWLDIVASLSWDAALRVKPEANSGNAMDPGSYVKVKCLASGSYQQSEVINGLVFKKSAAHKQMRANVKHPKLLLLQGALGHSSTGLSSINSMKQENDQLERTLYEVIVKCQLDVILVEKAVSRNVNEYIQKQGVTVVSDMNTHRLERIARCIGSPILSLQSVLMKPSLIKQCESLHFEKFVEEHNITGEDGKKSCKTFLFLEGFPRPLGCTILLKGATREELKKIKRVLHFTVFAAYHLILETSFFADQKLFTTDKTTTGKEKCFKTNQQLLGSCYDNSKNSDTMNNTPTCDDQFCW

SEQ ID NO: 174693 - protein, 1522 aa, Zea Mays
MSKMCHACASEETTMNEANIDLACSTSCCKMCDYGEGSSIVTSEINWLAMDSSPYSTPYGTPVFSRENSFSSFASCFSSLGDSLTDSDSEEEIELQDTGQFYHDTILIKDFMEQEESFVRVEECQFKDIADDCAIFSIPINQYISSAEQQLERHEDSNKGNFDTINISLDSDISYEQRKDILSDDKHVRTKCAVPVEDIDHKESGAIVVEQITSLPMPGGDIFPLNEQVMDGLSSTLENTIVYNNILNTEPEMKHGTHFENENECLYPLALPSFEADPLIWLPPEPENNEDDFDTVSNDDDESGNNSTGWGRSSFKVNLAERNKESRDDQLQKVMSEVMNGQFKILVSRFLAAEGLSLSDGGTDKNWLDIVASLSWDAALRVKPEANSGNAMDPGSYVKVKCLASGSYQQSEVINGLVFKKSAAHKQMRANVKHPKLLLLQGALGHSSTGLSSINSMKQENDQLERTLYEVIVKCQLDVILVEKAVSRNVNEYIQKQGVTVSVLMKPSLIKQCESLHFEKFVEEHNITGEDGKKSCKTFLFLEGFPRPLGCTILLKGATREELKKIKRVLHFTVFAAYHLILETSFFADQKLFTTDKTTTGKEKCFKTNQQLLGSCYDNSKNSDTMNNTPTCDDQYPNQEKLIHTEKSVPLHLHDSKTMASEDSAGEEHIDSKGIQSYSSLPVSDPSTNFMQDMPSPDCAESKISGGFDGSTFTDTSKEVQKKELSSDNFQGTFDVICAESGAALNTQDILVSMSSQHIRNQAVCEQSHLSRITYYGYFDTSLGRYLQDTLLNEKHSCLSCGESPESHMYSYTHHNGTLTVLVKRLPLELTLSGETQGRIWMWTRCLRCNAKPTHRVIISSSARNLSFGKFLELSFSTHSATKKLPTCGHLLHRDCLRFFGFGSRVAMFIYSSVEIYSACKPPLSLEFNNRNKNDWLDIEVKNVLLKWKQLFTTIENVIQDLRSRYSSQAMGEDTNVSVDEDEGLLLEVSRMLTQEKNKVEVSLREFSRIAIPESFAHGILGLNWLYQQLLLGFYIWDLRLLHILQYTKVNTASSDNSIHESTAKNEPKSSAKKLNTIPFMNDEQPAASNVLHHVVIPSDDEGKWFWNQFNQLEMEYKKELEGGSLYKFYLINKYTPCSSPLAQLKHQMDLGHFIAGHGGNIFSISEEEASSIIAYALIISEQQGFYYEAASSNLDKNASMLPSMSSPNESFENNHKFSRFAPTEELTSGFYDSFLSALKDLHHEIDLNNEKIALRSKYTVICIYAKQFHDLRKMCCPSELAYISSISRCKNWNAQGGKSKVFFAKSMDDRFIIKQIKKTEFDSFLKFGLEYFKHFGASQVSSNPTCLAKILGIYQVKETRNGKETRVNFMVMENLLFGHNILRRYDLKGALFSRYIPDSENSEKVLLDQNFIEDMRTMPIYIQGKTKNLMERAIWNDTSFLSNMNVMDYSLLVGVDKEKKELVFGIIDYLRQYTWDKQLESWVKTSLVVPKNLSPTVILPREYKMRFRAFMSQYFLSVPDA

SEQ ID NO: 174694 - protein, 602 aa, Zea Mays
MSKMCHACASEETTMNEANIDLACSTSCCKMCDYGEGSSIVTSEINWLAMDSSPYSTPYGTPVFSRENSFSSFASCFSSLGDSLTDSDSEEEIELQDTGQFYHDTILIKDFMEQEESFVRVEECQFKDIADDCAIFSIPINQYISSAEQQLERHEDSNKGNFDTINISLDSDISYEQRKDILSDDKHVRTKCAVPVEDIDHKESGAIVVEQITSLPMPGGDIFPLNEQVMDGLSSTLENTIVYNNILNTEPEMKHGTHFENENECLYPLALPSFEADPLIWLPPEPENNEDDFDTVSNDDDESGNNSTGWGRSSFKVNLAERNKESRDDQLQKVMSEVMNGQFKILVSRFLAAEGLSLSDGGTDKNWLDIVASLSWDAALRVKPEANSGNAMDPGSYVKVKCLASGSYQQSEVINGLVFKKSAAHKQMRANVKHPKLLLLQGALGHSSTGLSSINSMKQENDQLERTLYEVIVKCQLDVILVEKAVSRNVNEYIQKQGVTVVSDMNTHRLERIARCIGSPILSLQSVLMKPSLIKQCESLHFEKFVEEHNITGEDGKKSCKTFLFLEGFPRPLGCTGWFCILTWRASTYFLLLLMVITLQGL

SEQ ID NO: 174695 - protein, 159 aa, Zea Mays
MMSPFLTQRTKSKFVFASPAKSAATLFRYIAPEQVPVQFGGLFKEDDPEFTTSDTVSELTIKPSSKETVEIPVTENSTIVWELRVLSWEVSYGAEFTPDAEGGYTVIVQKTRKVPANEEPIMKGSFKAGEPGKLVLTVNNPASKKKTLLYRSKVKSTSE

SEQ ID NO: 174696 - protein, 196 aa, Zea Mays
MCFIAVDAVELVEREEGERVAANGPPHTLEVHPVGYQLAFARRVDAVEAGPDDWGAGDAHVHLARAGIAEQAHNLARGGAAHERVVDDDHALAGNDAAHGREFELDGKVTDCLRWLYEAAAAVVPPDKTLLELESRRLREAERRIEPRVRHGDDDVRGRGGRLLGERAAVRGAALVDGVPKHDGVGKGEVDVLEHA

SEQ ID NO: 174697 - protein, 518 aa, Zea Mays
MESGGAGELLSGPAGSPVTSKPGGGRGGWRAALFIIVMGFFERIGFVGVSANLITYLTGPLGMSTAAAAAGVNAWSGTVQVLPLVGALVADSRLGRYRAILAACVLYLLSLGMLTASSMMLTASSPPSPSPARLTLFYVALYLLALAQGFFGPCGEAFGADQFTPSDIDDLSAPTLRSSYFNWFHFSMSWGYAIATAGLSYVQDNAGWTLGFGACWTAMVLCLVVFLLGTRTYRAAKQPIDGVQAWVARVFRRSGTTPTDERLLLAPQPEGEGGLIAKLLPIWLTSLVFAAIYSQTSTLFTKQASTLDRHLGTETGLVVPPAALQCLIDVTFIVMIPLYDRVIVPLARRLTGHASGITMLQRIGASMATSCVAMAVAALVEVRRLRVARDAGLVDRPDVALPMSLWWMIPQYVLMGLAAVLGMVGLEEFFYDQMPDALRSVGLALCLSIFGVGSYASSMLVSVIDWATRVKGESWFSDNLNRAHLDYFYWLLAGLAALEVAVFLHFANRYVYTKKAEL

SEQ ID NO: 174698 - protein, 427 aa, Zea Mays
MGMLTVSALPAFHHDGCSSYASASRPLACSPPPVQVGVFYVSLYLVALAEAGHKPCAQAFGADQFDQNDPKESASRSSFFNWWYFGMCSGTAVTTMVSSYIQDNVGWGLGFGVPCLVMLFALLMFLLGTRNYRYYTYTESSPFARLATAFVALIKGSKSRQHDGTLASDDAGHREEVKGVLRLFPIWATCIIYAVIFSQSSTFFTKQAATLDRRVGSTLRVPPAALQTFISVTIMAFIPVYDRAFVPLARRLTRLSSGITMLQRIGTGLVLALVAMVVAALVEMRRLAVARDAGLVDQPKAALPMSLWWMVPQYVLFGLSDVFAMIGLQEFFYDQVPDALRSLGLAFFLSIFGVGHLFSSFIISAIDGATKKSGASWFSNNLNRAHLDYFYWLLAGLCAVELAAFIIVSRVYVYKKRMSHDNNAAAM

SEQ ID NO: 174699 - protein, 399 aa, Zea Mays
MASKGWNVVVSNHRGLGGVSITSDCFYNGGWTEDVREVITHLHHRYPKTTLFCIGTSIGANIVVKYLGEEGENTPIAGAVSICSPWDLLIGDRFISRKLVQRIYDKALAIGLKGYAKLHQPVLARLANWEGIKKSRSIREFDHHATCVVSRYETVDTYYRRCSSASYVGNVSVPLLCINALDDPLCTREAIPWDECRANKNIVLATTPNGGHLAFFQGLTARRLWWVGATSEFLSALHDSSYMHRQKANDHVLLSSLESSIDKSPYVNLMEDGMVAAVTKDGPSNDGSPLNHAADEQLSNEAGGGQQNVVSALNHNENSIGVGNDSPAEPVKQQGDDIHSNKLHEIIAPVKRSMSQLTRYQGRSVWLLAYIAFVTSWPLLGSLAFITFRKKSRNPLRAK

SEQ ID NO: 174700 - protein, 309 aa, Zea Mays
MSEAVAAGESPVELLLRAAAMVPAERYALAAIIVVSVFLYRFLELHVIGDILRGFRGGRVELTFHPASEIYHRVASKCRLLHGRYLATPWLASPHLQTLFLGIYGTPPSFTYKRQLYTVRDGGTIALDWLFASDLEVADGFISKDASTPLVVVVPGLTSDSAAAYVKHLVYSMASKGWNVVVSNHRGLGGVSITSDCFYNGGWTEDVREVITHLHHRYPKTTLFCIGTSIGANIVVKYLGEEGENTPIAGAVSICSPWDLLIGDRFISRKLVQRIYDKALAIGLKGYAKLHQPVLARLANWEVTIYPRV

SEQ ID NO: 174701 - protein, 374 aa, Zea Mays
MSEAVAAGESPVELLLRAAAMVPAERYALAAIIVVSVFLYRFLELHVIGDILRGFRGGRVELTFHPASEIYHRVASKCRLLHGRYLATPWLASPHLQTLFLGIYGTPPSFTYKRQLYTVRDGGTIALDWLFASDLEVADGFISKDASTPLVVVVPGLTSDSAAAYVKHLVYSMASKGWNVVVSNHRGLGGVSITSDCFYNGGWTEDVREVITHLHHRYPKTTLFCIGTSIGANIVVKYLGEEGENTPIAGAVSICSPWDLLIGDRFISRKLVQRIYDKALAIGLKGYAKLHQPVLARLANWEGIKKSRSIREFDHHATCVVSRYETVDTYYRRCSSASYVGNVSVPLLCINALDDPLCTREAIPWDEWPIRTLF

SEQ ID NO: 174702 - protein, 168 aa, Zea Mays
MAGEAGKDPQAWLAANETASAFLSRSLSSRPPITLPPPLHRAPLRPGNVVEIAGPSNSGKSHLLLMAAVQCILPKEWEGIYFGGLGRAVMYLDLDCRFDVLRLAQILRNRIAEGCRLAHLRNGDPENDVTKDEFQCSLQNTLFSDCMQRFLYARCCKSPEFIDALKVF

SEQ ID NO: 174703 - protein, 354 aa, Zea Mays
MDKYEAVRDIGSGNFGVARLMRNRETRELVAVKCIERGHRIDENVYREIINHRSLRHPNIIRFKEVILTPTHLMIVMEFAAGGELFDRICDRGRFSEDELICGVSYCHYMQICHRDLKLENVLLDGSPAPRLKICDFGYSKSSVLHSRPKSAVGTPAYIAPEVLSRREYDGKLADVWSCGVTLYVMLVGAYPFEDPDDPKNIRNTIQQIMQVQYKIPDHVHISTECQQLIARIFVANPMRRITMKEIKSHPWFLKNLPRELTETAQGMYYRRDNRVPSYSDQTSEEIMKIVQDARTMPKSSRSGYGWSSEYSDEEEEKEEEHRPEEHEEEEDEYDRRVKEVHASGELRMDALHI

SEQ ID NO: 174704 - protein, 346 aa, Zea Mays
MDKYEAVRDIGSGNFGVARLMRNRETRELVAVKCIERGHRIDENVYREIINHRSLRHPNIIRFKEVILTPTHLMIVMEFAAGGELFDRICDRGRFSEDEARYFFQQLICGVSYCHYMQICHRDLKLENVLLDGSPAPRLKICDFGYSKSSVLHSRPKSAVGTPAYIAPEVLSRREYDGKLADVWSCGVTLYVMLVGAYPFEDPDDPKNIRNTIQQIMQVQYKIPDHVHISTECQQLIARIFVANPMRNLPRELTETAQGMYYRRDNRVPSYSDQTSEEIMKIVQDARTMPKSSRSGYGWSSEYSDEEEEKEEEHRPEEHEEEEDEYDRRVKEVHASGELRMDALHI

SEQ ID NO: 174705 - protein, 92 aa, Zea Mays
MRPTVPEEAQRRRTRSAFRGGRRYFGCVLGVRESPCGEDASWRPWPRLCLFPGRQHRSSRVGFPRSAFCQHRRIGFPLLPHLRFRCTPYFYM

SEQ ID NO: 174706 - protein, 174 aa, Zea Mays
MFEHEELFGGSWIGAYSALCFSCGYFAYDQLDMLRYRLYSGWLPGILMHHLILLICFTLALYRNVTINYLNLSLLHSIFLHVRKVRRMVGFRDFDRTVVKLEWVLNWTTFVTARVICHILITYKLISDAHKFGKGIELPLALLGMAGMNLLNIFLGLDLLKAFTRERNKQNHQD

SEQ ID NO: 174707 - protein, 90 aa, Zea Mays
MRPTVPEEAQRRRTRSAFRGGRRYFGCVLGVRESPCGEDASWRPWPRLCLFPGRQHRSSRVGFPRSAFCQHRRIGFPLLPHLRFRYLCSC

SEQ ID NO: 174708 - protein, 433 aa, Zea Mays
MQPSMEFGHYVRLATHVNFRTFVKSAGIDFYPLGGDPRVMAQYMTKNKGFFLAAPTEIAIQRKQLKEIIFSLLPACTEPDLDTGTPFRAQAIIANPPAYGHLHIAEALGAPLHIFFTFPWTPTNEFPHPLARMPQSATYRLSYLILDLIVWWGSRGFINDFRKKLNLPPIAYFSTYHGSISHLPTGYMWSPQLMPKPKDWGPLVDVVGYCFLNLGTKYQPPPQLSQWLQQGPKPIYIGFGSMPLDDEKKVTAIILDALRETGQRGIISRGWGALGSFSEVPVDVFILEDCPHDWLFPRCAAVVHHGGAGTTAAGLIAGCPTTVVPFFGDQFFWGERVHARGVGPAPISIAELTVEALSNAIIFMLDPEVKSRTMELAIAIGNEDGVAAAVDAFHRHLPSELPLSPPAHVEEERTDFFQWFSRGLEKCCFPFSF

SEQ ID NO: 174709 - protein, 516 aa, Zea Mays
MLSENEKIKITERLVKIQNDGTVEVDVTRSALVASELSEIDAFGCVPHDIEEVTPGITKSVPKLKIAILVVGTRGDVQPFIALAKRLQEFGHYVRLATHVNFRTFVKSAGIDFYPLGGDPRVMAQYMTKNKGFFLAAPTEIAIQRKQLKEIIFSLLPACTEPDLDTGTPFRAQAIIANPPAYGHLHIAEALGAPLHIFFTFPWTPTNEFPHPLARMPQSATYRLSYLILDLIVWWGSRGFINDFRKKLNLPPIAYFSTYHGSISHLPTGYMWSPQLMPKPKDWGPLVDVVGYCFLNLGTKYQPPPQLSQWLQQGPKPIYIGFGSMPLDDEKKVTAIILDALRETGQRGIISRGWGALGSFSEVPVDVFILEDCPHDWLFPRCAAVVHHGGAGTTAAGLIAGCPTTVVPFFGDQFFWGERVHARGVGPAPISIAELTVEALSNAIIFMLDPEVKSRTMELAIAIGNEDGVAAAVDAFHRHLPSELPLSPPAHVEEERTDFFQWFSRGLEKCCFPFSF

SEQ ID NO: 174710 - protein, 295 aa, Zea Mays
MNSHIHWHECLKVQLIGGFINDFRKKLNLPPIAYFSTYHGSISHLPTGYMWSPQLMPKPKDWGPLVDVVGYCFLNLGTKYQPPPQLSQWLQQGPKPIYIGFGSMPLDDEKKVTAIILDALRETGQRGIISRGWGALGSFSEVPVDVFILEDCPHDWLFPRCAAVVHHGGAGTTAAGLIAGCPTTVVPFFGDQFFWGERVHARGVGPAPISIAELTVEALSNAIIFMLDPEVKSRTMELAIAIGNEDGVAAAVDAFHRHLPSELPLSPPAHVEEERTDFFQWFSRGLEKCCFPFSF

SEQ ID NO: 174711 - protein, 560 aa, Zea Mays
MNTMPSVFGHSKSTATTSGTIKGQDNVFVRSYSDRLLKCDLTLDMLSENEKIKITERLVKIQNDGTVEVDVTRSALVASELSEIDAFGCVPHDIEEVTPGITKSVPKLKIAILVVGTRGDVQPFIALAKRLQEFGHYVRLATHVNFRTFVKSAGIDFYPLGGDPRVMAQYMTKNKGFFLAAPTEIAIQRKQLKEIIFSLLPACTEPDLDTGTPFRAQAIIANPPAYGHLHIAEALGAPLHIFFTFPWTPTNEFPHPLARMPQSATYRLSYLILDLIVWWGSRGFINDFRKKLNLPPIAYFSTYHGSISHLPTGYMWSPQLMPKPKDWGPLVDVVGYCFLNLGTKYQPPPQLSQWLQQGPKPIYIGFGSMPLDDEKKVTAIILDALRETGQRGIISRGWGALGSFSEVPVDVFILEDCPHDWLFPRCAAVVHHGGAGTTAAGLIAGCPTTVVPFFGDQFFWGERVHARGVGPAPISIAELTVEALSNAIIFMLDPEVKSRTMELAIAIGNEDGVAAAVDAFHRHLPSELPLSPPAHVEEERTDFFQWFSRGLEKCCFPFSF

SEQ ID NO: 174712 - protein, 556 aa, Zea Mays
MGINGEEWEETVLGDGVGRRKGGAEASGLVASSSFAEGMGEFVLRSMDARFSGSVDDDEYVSSRQPVFGHSKSTATTSGTIKGQDNVFVRSYSDRLLKCDLTLDMLSENEKIKITERLVKIQNDGTVEEFGHYVRLATHVNFRTFVKSAGIDFYPLGGDPRVMAQYMTKNKGFFLAAPTEIAIQRKQLKEIIFSLLPACTEPDLDTGTPFRAQAIIANPPAYGHLHIAEALGAPLHIFFTFPWTPTNEFPHPLARMPQSATYRLSYLILDLIVWWGSRGFINDFRKKLNLPPIAYFSTYHGSISHLPTGYMWSPQLMPKPKDWGPLVDVVGYCFLNLGTKYQPPPQLSQWLQQGPKPIYIGFGSMPLDDEKKVTAIILDALRETGQRGIISRGWGALGSFSEVPVDVFILEDCPHDWLFPRCAAVVHHGGAGTTAAGLIAGCPTTVVPFFGDQFFWGERVHARGVGPAPISIAELTVEALSNAIIFMLDPEVKSRTMELAIAIGNEDGVAAAVDAFHRHLPSELPLSPPAHVEEERTDFFQWFSRGLEKCCFPFSF

SEQ ID NO: 174713 - protein, 246 aa, Zea Mays
MWSPQLMPKPKDWGPLVDVVGYCFLNLGTKYQPPPQLSQWLQQGPKPIYIGFGSMPLDDEKKVTAIILDALRETGQRGIISRGWGALGSFSEVPVDVFILEDCPHDWLFPRCAAVVHHGGAGTTAAGLIAGCPTTVVPFFGDQFFWGERVHARGVGPAPISIAELTVEALSNAIIFMLDPEVKSRTMELAIAIGNEDGVAAAVDAFHRHLPSELPLSPPAHVEEERTDFFQWFSRGLEKCCFPFSF

SEQ ID NO: 174714 - protein, 518 aa, Zea Mays
MNMSRLGSQIKITERLVKIQNDGTVEVDVTRSALVASELSEIDAFGCVPHDIEEVTPGITKSVPKLKIAILVVGTRGDVQPFIALAKRLQEFGHYVRLATHVNFRTFVKSAGIDFYPLGGDPRVMAQYMTKNKGFFLAAPTEIAIQRKQLKEIIFSLLPACTEPDLDTGTPFRAQAIIANPPAYGHLHIAEALGAPLHIFFTFPWTPTNEFPHPLARMPQSATYRLSYLILDLIVWWGSRGFINDFRKKLNLPPIAYFSTYHGSISHLPTGYMWSPQLMPKPKDWGPLVDVVGYCFLNLGTKYQPPPQLSQWLQQGPKPIYIGFGSMPLDDEKKVTAIILDALRETGQRGIISRGWGALGSFSEVPVDVFILEDCPHDWLFPRCAAVVHHGGAGTTAAGLIAGCPTTVVPFFGDQFFWGERVHARGVGPAPISIAELTVEALSNAIIFMLDPEVKSRTMELAIAIGNEDGVAAAVDAFHRHLPSELPLSPPAHVEEERTDFFQWFSRGLEKCCFPFSF

SEQ ID NO: 174715 - protein, 498 aa, Zea Mays
MGINGEEWEETVLGDGVGRRKGGAEASGLVASSSFAEGMGEFVLRSMDARFSGSVDDDEYVSSRQPVFGHSKSTATTSGTIKGQDNVFVRSYSDRLLKCDLTLDMLSENEKIKITERLVKIQNDGTVEVDVTRSALVASELSEIDAFGCVPHDIEEVTPGITKSVPKLKIAILVVGTRGDVQPFIALAKRLQEFGHYVRLATHVNFRTFVKSAGIDFYPLGGDPRVMAQYMTKNKGFFLAAPTEIAIQRKQLKEIIFSLLPACTEPDLDTGTPFRAQAIIANPPAYGHLHIAEALGAPLHIFFTFPWTPTNEFPHPLARMPQSATYRLSYLILDLIVWWGSRGFINDFRKKLNLPPIAYFSTYHGSISHLPTGYMWSPQLMPKPKDWGPLVDVVGYCFLNLGTKYQPPPQLSQWLQQGPKPIYIGFGSMPLDDEKKVTAIILDALRETGQRGIISRGWGALGSFSEVPVDVFILEDCPHDWLFPRCAAVEEQRGRANL

SEQ ID NO: 174716 - protein, 396 aa, Zea Mays
MGINGEEWEETVLGDGVGRRKGGAEASGLVASSSFAEGMGEFVLRSMDARFSGSVDDDEYVSSRQPVFGHSKSTATTSGTIKGQDNVFVRSYSDRLLKCDLTLDMLSENEKIKITERLVKIQNDGTVEVDVTRSALVASELSEIDAFGCVPHDIEEVTPGITKSVPKLKIAILVVGTRGDVQPFIALAKRLQEFGHYVRLATHVNFRTFVKSAGIDFYPLGGDPRVMAQYMTKNKGFFLAAPTEIAIQRKQLKEIIFSLLPACTEPDLDTGTPFRAQAIIANPPAYGHLHIAEALGAPLHIFFTFPWTPTNEFPHPLARMPQSATYRLSYLILDLIVWWGSRGFINDFRKKLNLPPIAYFSTYHGSISHLPTGYMWSPQLMPKPKGHKIFLVHMQS

SEQ ID NO: 174717 - protein, 199 aa, Zea Mays
MQQSMVAVARQLCKTIDIYDQDIHVRSLRTLWYPSSFSFVQYSPHVNESSSLLATAEGSQLSIWDLRMNNNGGCVHRITGSVGDIIYSTCSSPSGLIASGGTDRAVTIYDPRRWSALSRWVGCSKFEITGLAFSSVDESFIYVQGVDYEITCGHWKQSERAFSFRGDSNWLGFSKCANNDVIAGWCESGSIFIADARQL

SEQ ID NO: 174718 - protein, 277 aa, Zea Mays
MHSSSVVDRCPHRSEIQSVALAEGEDDCLILGTVDSYGHLIVSRLDIVADDIDRTSYSVPPRDCGVGEGSWAGVCFSPMQQSMVAVARQLCKTIDIYDQDIHVRSLRTLWYPSSFSFVQYSPHVNESSSLLATAEGSQLSIWDLRMNNNGGCVHRITGSVGDIIYSTCSSPSGLIASGGTDRAVTIYDPRRWSALSRWVGCSKFEITGLAFSSVDESFIYVQGVDYEITCGHWKQSERAFSFRGDSNWLGFSKCANNDVIAGWCESGSIFIADARQL

SEQ ID NO: 174719 - protein, 190 aa, Zea Mays
MRSTVLVARSLQKASVPPALLSDPTPGSLQPTRLAAHVNGAGSSCSVYLASGCRVYRIEIRLDASVMLSKGKESLLIPDNAQVISSSVVDRCPHRSEIQSVALAEGEDDCLILGTVDSYGHLIVSRLDIVADDIDRTSYSVPPRDCGVGEGSWAGVCFSPMQQSMVAVARQLCKTIDIYDQDIHVRSLRT

SEQ ID NO: 174720 - protein, 156 aa, Zea Mays
MSMAPAPRALFTSPLAAASTGSRWKIRLDASVMLSKGKESLLIPDNAQVISSSVVDRCPHRSEIQSVALAEGEDDCLILGTVDSYGHLIVSRLDIVADDIDRTSYSVPPRDCGVGEGSWAGVCFSPMQQSMVAVARQLCKTIDIYDQDIHVRSLRT

SEQ ID NO: 174721 - protein, 293 aa, Zea Mays
MLSKGKESLLIPDNAQVISSSVVDRCPHRSEIQSVALAEGEDDCLILGTVDSYGHLIVSRLDIVADDIDRTSYSVPPRDCGVGEGSWAGVCFSPMQQSMVAVARQLCKTIDIYDQDIHVRSLRTLWYPSSFSFVQYSPHVNESSSLLATAEGSQLSIWDLRMNNNGGCVHRITGSVGDIIYSTCSSPSGLIASGGTDRAVTIYDPRRWSALSRWVGCSKFEITGLAFSSVDESFIYVQGVDYEITCGHWKQSERAFSFRGDSNWLGFSKCANNDVIAGWCESGSIFIADARQL

SEQ ID NO: 174722 - protein, 183 aa, Zea Mays
MLAAGYCMYGSSCTLVLSTGTGVNGFTLDPSLGEFILTHPDIKIPKKGKIYSVNEGNAKNWDAPVAKFVEKCKYPKDGSPPRSLRYIGSMVADVHRTLLYGGVFLYPADEKNPNGKLRILYEVFPMSFLMEQAGGQSFTGKERVPDIPRKLRRRGGDQSVVRRAGEVELGFILSEGVNRLFLA

SEQ ID NO: 174723 - protein, 272 aa, Zea Mays
MAVCWAVKMGPVSDSSSHVGCDRIQQKSRRGKGRLLYIPSRLQSASIYPAVSGRRVRVDLSVEGMKITALLVLKPSTSGAGSSSSGGQSGPEAVVLANATDVSHFGYFQRSAAREFIVFVARTVAQRTQPGQRQSVQHEEYKVHSHNRNGLCAVAFMDDHYPVRSAFSLLNQVLDEYQKAFGDSWKSATADGTQQWAFLTDALARFQDPAEADKLMKIQRDLDETKIILHKTIDSVLARGERLDSLVEKSSDLSAASQSQYSVVLHPILMNL

SEQ ID NO: 174724 - protein, 222 aa, Zea Mays
MAVCWAVKMGPVSDSSSHVGCDRIQQKSRRGKGRLLYIPSRLQSASIYPAVSGRRVRVDLSVEGMKITALLVLKPSTSGAGSSSSGGQSGPEAVVLANATDVSHFGYFQRSAAREFIVFVARTVAQRTQPGQRQSVQHEEYKVHSHNRNGLCAVAFMDDHYPVRSAFSLLNQVLDEYQKAFGDSWKSATADGTQQWAFLTDALARFQINGLIPIICLFLVSS

SEQ ID NO: 174725 - protein, 63 aa, Zea Mays
MFVCPPSQIDTWVVIQLLLFHGSMILNISSWFYLFPICTDWEIKNSKVFQLVLLGVSSTAGHQ

SEQ ID NO: 174726 - protein, 60 aa, Zea Mays
MGSRERPEGSSSSYLSPANRNRIWFMLISVERNNPGRDPLASELYGRCAICMKTRRWRRC

SEQ ID NO: 174727 - protein, 250 aa, Zea Mays
MGWGISRLIGLKAAVLLSVACFFQGLGVILISFPLIYASVIAILVSIASHPSIDLPLLLGKASDGSFPLWSWIIFSPFLLFIHLFVLIRRFVKNEPLYTEVADGVFVGGWPSSVEHLPPGDPAIIDCTCELPKSSTISNNAYLCVATWDTRAPQPSQIESAVRWAVRQRSQNKPVYVHCAYGHGRSVCVMCALLVALGLAEDWKAAEQMIHEKRPSISMNTLHRKSLEEWSKHLLPSKRSGEADLVLSGK

SEQ ID NO: 174728 - protein, 70 aa, Zea Mays
MLFFSFLVSSYFMRLFAMSYLVVLICNKIIRSKNAMYKLNSICITFRQYKGHHICCVDSLIIVSDFKEIF

SEQ ID NO: 174729 - protein, 134 aa, Zea Mays
MGWGISRLIGLKAAVLLSVACFFQGLGVILISFPLIYASVIAILVSIASHPSIDLPLLLGKASDGSFPLWSWIIFSPFLLFIHLFVLIRRFVKNEPLYTEVADGVFVGGWPSSVEHLPPGLLNHHKLSLPCDGL

SEQ ID NO: 174730 - protein, 61 aa, Zea Mays
MGILSVEPNGLRKLRVVPMEGLGRKRALRRRGGCGHRAGNGCPRKAAVETRGRDPAVGAEA

SEQ ID NO: 174731 - protein, 119 aa, Zea Mays
MYSEPGDCNSKMQRSIASVLPYAQLSQPPSATRSKVAEKNRVEPTTICVTSLCFSKSIPDCGSSDSLASYDACSTSIAQPSLATLVHVPPHLIQSDRIRRDDIKVFRGLNTLVVPCSII

SEQ ID NO: 174732 - protein, 261 aa, Zea Mays
MQIIGLLIRAKFSRNTNEGDGTQVDAHNDTTQDDALEVTKHSDAHKIATHASLVLPSQSRRHSGTAACSADAEGRMWLEEVRRRERGELRARRFEAAARACRTASLALSNRKEFVTPHHGAVNSLQVDLTEGRYLLSGASDGSAAVFDVWNATEYETGFIAKHRNILLVDKQHQNGHKFAISAAVWYPVDTGLFVTASFDQFVKVWDTNSTQVVMEFKMPGKVYTAAMSPIATTHVLIATGSADVQMVSCLWSGLPQVSGF

SEQ ID NO: 174733 - protein, 419 aa, Zea Mays
MWLEEVRRRERGELRARRFEAAARACRTASLALSNRKEFVTPHHGAVNSLQVDLTEGRYLLSGASDGSAAVFDVWNATEYETGFIAKHRNILLVDKQHQNGHKFAISAAVWYPVDTGLFVTASFDQFVKVWDTNSTQVVMEFKMPGKVYTAAMSPIATTHVLIATGSADVQWSASSEWILMSGGCDGAIRFWDIRRAGCFRVLDQSRSQLGKRPLVKSALYKDHTDSLGPSPSARRRTGISKKSSSALRKIQNPTHGHMQQRLHPGLSSSQNRATAHYGAVTGLRTTADGMYLLSSGSDSRLRLWDIDSGCNTLVNFEAMRLQTGKPLQLAVTEDPSLVFVPCMASIKAYNLWSGKTFQTFRGHYELVSCCYYSEQDQELYTGSNDRQILVWSPSTPAFTKMEDDDKILSAADEDNWSD

SEQ ID NO: 174734 - protein, 282 aa, Zea Mays
MEFKMPGKVYTAAMSPIATTHVLIATGSADVQVRLCDIASGAFTHTLSGHRDGIMSLEWSASSEWILMSGGCDGAIRFWDIRRAGCFRVLDQSRSQLGKRPLVKSALYKDHTDSLGPSPSARRRTGISKKSSSALRKIQNPTHGHMQQRLHPGLSSSQNRATAHYGAVTGLRTTADGMYLLSSGSDSRLRLWDIDSGCNTLVNFEAMRLQTGKPLQLAVTEDPSLVFVPCMASIKAYNLWSGKTFQTFRGHYELVSCCYYSEQDQEDDDKILSAADEDNWSD

SEQ ID NO: 174735 - protein, 306 aa, Zea Mays
MEFKMPGKVYTAAMSPIATTHVLIATGSADVQVRLCDIASGAFTHTLSGHRDGIMSLEWSASSEWILMSGGCDGAIRFWDIRRAGCFRVLDQSRSQLGKRPLVKSALYKDHTDSLGPSPSARRRTGISKKSSSALRKIQNPTHGHMQQRLHPGLSSSQNRATAHYGAVTGLRTTADGMYLLSSGSDSRLRLWDIDSGCNTLVNFEAMRLQTGKPLQLAVTEDPSLVFVPCMASIKAYNLWSGKTFQTFRGHYELVSCCYYSEQDQELYTGSNDRQILVWSPSTPAFTKMEDDDKILSAADEDNWSD

SEQ ID NO: 174736 - protein, 278 aa, Zea Mays
MSLEWSASSEWILMSGGCDGAIRFWDIRRAGCFRVLDQSRSQLGKRPLVKSALYKDHTDSLGPSPSARRRTGISKKSSSALRKIQNPTHGHMQQRLHPGLSSSQNRATAHYGAVTGLRTTADGMYLLSSGSDSRLRLWDIDSGCNTLVNFEAMRLQTGKPLQLAVTEDPSLVFVPCMASIKAYNLWSGKTFQTFRGHYELVSCCYYSEQDQELYTGSNDRQILVWSPSTPAFTKMLMRITGATEKPWSREECVLYLLTSMLLMLTNNMSRLLGLVSSP

SEQ ID NO: 174737 - protein, 306 aa, Zea Mays
MEFKMPGKVYTAAMSPIATTHVLIATGSADVQWSASSEWILMSGGCDGAIRFWDIRRAGCFRVLDQSRSQLGKRPLVKSALYKDHTDSLGPSPSARRRTGISKKSSSALRKIQNPTHGHMQQRLHPGLSSSQNRATAHYGAVTGLRTTADGMYLLSSGSDSRLRLWDIDSGCNTLVNFEAMRLQTGKPLQLAVTEDPSLVFVPCMASIKAYNLWSGKTFQTFRGHYELVSCCYYSEQDQELYTGSNDRQILVWSPSTPAFTKMLMRITGATEKPWSREECVLYLLTSMLLMLTNNMSRLLGLVSSP

SEQ ID NO: 174738 - protein, 520 aa, Zea Mays
MQIIGLLIRAKFSRNTNEGDGTQVDAHNDTTQDDALEVTKHSDAHKIATHASLVLPSQSRRHSGTAACSADAEGRMWLEEVRRRERGELRARRFEAAARACRTASLALSNRKEFVTPHHGAVNSLQVDLTEGRYLLSGASDGSAAVFDVWNATEYETGFIAKHRNILLVDKQHQNGHKFAISAAVWYPVDTGLFVTASFDQFVKVWDTNSTQVVMEFKMPGKVYTAAMSPIATTHVLIATGSADVQVRLCDIASGAFTHTLSGHRDGIMSLEWSASSEWILMSGGCDGAIRFWDIRRAGCFRVLDQSRSQLGKRPLVKSALYKDHTDSLGPSPSARRRTGISKKSSSALRKIQNPTHGHMQQRLHPGLSSSQNRATAHYGAVTGLRTTADGMYLLSSGSDSRLRLWDIDSGCNTLVNFEAMRLQTGKPLQLAVTEDPSLVFVPCMASIKAYNLWSGKTFQTFRGHYELVSCCYYSEQDQELYTGSNDRQILVWSPSTPAFTKMEDDDKILSAADEDNWSD

SEQ ID NO: 174739 - protein, 494 aa, Zea Mays
MQIIGLLIRAKFSRNTNEGDGTQVDAHNDTTQDDALEVTKHSDAHKIATHASLVLPSQSRRHSGTAACSADAEGRMWLEEVRRRERGELRARRFEAAARACRTASLALSNRKEFVTPHHGAVNSLQVDLTEGRYLLSGASDGSAAVFDVWNATEYETGFIAKHRNILLVDKQHQNGHKFAISAAVWYPVDTGLFVTASFDQFVKVWDTNSTQVVMEFKMPGKVYTAAMSPIATTHVLIATGSADVQWSASSEWILMSGGCDGAIRFWDIRRAGCFRVLDQSRSQLGKRPLVKSALYKDHTDSLGPSPSARRRTGISKKSSSALRKIQNPTHGHMQQRLHPGLSSSQNRATAHYGAVTGLRTTADGMYLLSSGSDSRLRLWDIDSGCNTLVNFEAMRLQTGKPLQLAVTEDPSLVFVPCMASIKAYNLWSGKTFQTFRGHYELVSCCYYSEQDQELYTGSNDRQILVWSPSTPAFTKMEDDDKILSAADEDNWSD

SEQ ID NO: 174740 - protein, 81 aa, Zea Mays
MDFSRSSIRFCALIMVCSLVRLRRPRSSQLIIVSSKSNYYRRMWKSTIYKKKFFTLSNNSQQKWIYPLRRKLIVHIRRLLI

SEQ ID NO: 174741 - protein, 51 aa, Zea Mays
MIVSFISTLSHSELKILINVGQMLTRGKVQKEKGNHPIGEPLAIYVLCLGG

SEQ ID NO: 174742 - protein, 242 aa, Zea Mays
MELWDPTLAKGIKIFLATSTPLFGHVATNYTVNYQKAAIQLSCSGNGYGMHAGPSPPRRAEASKFDDDVSPRYTHGYQGGGRGGARFREGPPPYGRGRSYGRGYGAPHGKDLINIDGEYVHRNDPNLSPREVVEISILLGELTVTTATSSAIQHVKHMNLGAALPSGVTPALHEGLQGWLVHLVIEPLQERWPGTDPHLMVGEQVIPGHMQVDPLQNVQDGLQIHQLREEWASVVSVTQGTV

SEQ ID NO: 174743 - protein, 84 aa, Zea Mays
MSTVPTDPPLHEQVHATREHTTPFRRSFARRVRATLAISPLPVRDCLFMYGIAGFKLTLSHIQGMWLVKIVLDHTGLHTHPILN

SEQ ID NO: 174744 - protein, 76 aa, Zea Mays
MPYLIPSEVVELLLHRHHPIRILECFLYPVWLNRGNKRVMLTKMCNPRSSGYPLMNVTEDGVDGVISLDCLVDSWV

SEQ ID NO: 174745 - protein, 57 aa, Zea Mays
MIEFSNMCMVLSDQGFMKLGQSKEDKLRRVTLHIDSSDITFAFKGNRFFQKCLEQRC

SEQ ID NO: 174746 - protein, 228 aa, Zea Mays
MLCKSPEEVIAERHNNKASQSTLEHCTKKGKEAQQIVDDHVADFFYENNMLESIGQYGPGYRGPSYHDIRVPWLERAVERTSSMTAKHEESWKEYGCSLMSDSWTDVRGRHLINFLANSPAGTHFLCSIDASSEIANANMLADLLENQIDKIGRENVVQVVTDNGQTSKLLGGFLWRGFHICFGHRVLPIVWICCWRTLGRLSTSTLASTKQRGCVGSYTNMGGCTTL

SEQ ID NO: 174747 - protein, 480 aa, Zea Mays
MAMAAPAFLLPSLFPKPTLLAASLHSSFPRGLSLRCSPNGAAVPEFPEPASRRGRKKSPSPSAPKPRATRRRTKKADRDPDSEGEEEPVKRTNRRTRKSKGEAKQEEVAQAANHGTGDTIQKANEEEDAVEVGSDDDDFANEWPPLVCCFGAPRWEFVPTVRVSDRQMHPDMYSTWRHLQWEPPEFARAPGSAASNVAIALTRLGGRAAVLGKVGDDDFGRELVYRMNCERVQTRAIKFDDKAVTATARMKVSFRDREDGKGGTKLVAETVKSAAEDSLRRTEINVDVLKEARMFHFNSEVLLNPSMHDTLFRAIELSKKFGSKVFFDLNLPLPLWTSKDKTKEVINRAWKEAEIIEVSRDELEFLLDHEYYEYKRNTPPQYYLEGFHFTRNWPQYYHYSPEEIAPIWHDGSGDAIVAAAIRKLTTCPEMYEDQDTLERQLRFAVAAGIISQWTIGAVRGFPTESATQNLKEEVYVPSMW

SEQ ID NO: 174748 - protein, 228 aa, Zea Mays
MALPELGQEKGYLSESLFTFIFISFFLWSFHPFVYHSKRFYTVLLWRRVLAFLVASQFLRIMTFYSTQLPGPNYHCREGSKLATLPPPNNALEVLLINFPRGVLFGCGDLIFSSHMIFTLVFVRTYHKYGSNRYTVNLVVFFVDKKLPEMPDRTNGLSLLPVNTKDKDGRMKEELHKLEKDGRMMDEFHKLLNGNTVDATDWRQRVQINGKHGEDTNHTVSDATPTGT

SEQ ID NO: 174749 - protein, 137 aa, Zea Mays
MALPELGQEKGYLSESLFTFIFISFFLWSFHPFVYHSKRFYTVLLWRRVLAFLVASQFLRIMTFYSTQLPGPNYHCREGSKLATLPPPNNALEVLLINFPRGVLFGCGDLIFSSHMIFTLVFVRTYHKYGSNSKHKG

SEQ ID NO: 174750 - protein, 66 aa, Zea Mays
MCTHPCFTTKHQVVRIVTTAQEKTKSWKETSRSSKTTTNSRCGLAATPSQLPVKALSLLRFASTLI

SEQ ID NO: 174751 - protein, 50 aa, Zea Mays
MTNLRSIQSRHVTINILNVCQLLRIKLVLCHSRYVSFIMILYTHENITLS

SEQ ID NO: 174752 - protein, 281 aa, Zea Mays
MLPGRTAPTARRRRSARRRRRRWRRPRPTTGTCSKRRPARWPACAQLAASWWQRTRAHIKDTPSRRWRRSSLRRPRLRRPRVPTSLRLSRRTRWNIAGFRLLFNALKQQQLLKHMRERELAVATAAAWGTSVAGSHRAAGYRAPAPHVLSSSAWPTLQKQQQQQQQRAASPAGMRAVFVAPPGAKRECAGTGVFIPRQAGAPAEPKKRPAACAPVLLPARVVQALNLNVEDLGARPIYPGGFVLDHDALVSRSNALLASRASQQLHGASSREVNLPQEWTY

SEQ ID NO: 174753 - protein, 178 aa, Zea Mays
MGKIRSCTALFTKGRAGAHKLARQVMVNRNGLLPKVIPRTQRTVNIHHLMIRHVLGHLCIMVVEIISTAALQPRKRQNPPLTTKGTRKIQSQILMATGGKAHFITKRTWWPLLGEQGNRAALKCKRNQGKTLRFYSSQVKALCRCSMSSFTLEATCTVVLKTPLKILLFRSFQMFQIV

SEQ ID NO: 174754 - protein, 180 aa, Zea Mays
MPKTWQAMERLYGSGKARAVGVSNFSTRKLADLLAVARVTPAVDQVECHPGWQQARLRAFCCSSGVHFSAYAPLGRMKAVASDPVVASVAESLGKTPAQVALRWGIQQGQSVLPKSANESRLKENIDLFGWSIPDELCAKFSEIEQVPLQFLQRWIIMRGGELINQVKVLWSDMDEELAT

SEQ ID NO: 174755 - protein, 173 aa, Zea Mays
MPKTWQAMERLYGSGKARAVGVSNFSTRKLADLLAVARVTPAVDQVECHPGWQQARLRAFCCSSGVHFSAYAPLGRMKAVASDPVVASVAESLGKTPAQVALRWGIQQGQSVLPKSANESRLKENIDLFGWSIPDELCAKFSEIEQVKQIRNDAFVHPQSIYKTIDELWDGEI

SEQ ID NO: 174756 - protein, 304 aa, Zea Mays
MATYFTLNTGARIPSVGLGTYKAGPGVVADAITAAVKAGYRHIDCAPLYKNEKEIGVALNKLFDDGVVKREDLFITSKIWCSDLAPEDVPLAIDITLNDLQLDYLDLYLIHWPFQIKRGSELSPENFVHLDMPKTWQAMERLYGSGKARAVGVSNFSTRKLADLLAVARVTPAVDQVECHPGWQQARLRAFCCSSGVHFSAYAPLGRMKAVASDPVVASVAESLGKTPAQVALRWGIQQGQSVLPKSANESRLKENIDLFGWSIPDELCAKFSEIEQVKQIRNDAFVHPQSIYKTIDELWDGEI

SEQ ID NO: 174757 - protein, 135 aa, Zea Mays
MEKLYDAGKARAIGQTKLHSFCQSTAYSPLGSPGTTWMNGNVLKEPIIISIAEKLGKTSAQVALRWNIQMGHSVLPKSTNEERIKQNLDVYDWSIPDDLLAKFSEIKQARLLRGNFIVNPESVYKTHEELWDGEL

SEQ ID NO: 174758 - protein, 144 aa, Zea Mays
MEKLYDAGKARAIGVSNFSSKKLGDLLAVARVPPAVDQVECHPGWQQTKLHSFCQSTAYSPLGSPGTTWMNGNVLKEPIIISIAEKLGKTSAQVALRWNIQMGHSVLPKSTNEERIKQNLDVYDWSIPDDLLAKFSEIKQVSVS

SEQ ID NO: 174759 - protein, 366 aa, Zea Mays
MKALILVGGFGTRLRPLTLSFPKPLVDFANKPMILHQIEALKEVGVTEVVLAINYRPEVMINFLKDFEDKLGITITCSQETEPLGTAGPLALARDKLADGSGQPFFVLNSDVISEYPFAELIKFHKCHGGEATIMVTKVDEPSKYGVVVMEEATGRVERFVEKPKIFVGNKINAGIYLLNPSVLDRIELRPTSIEKEVFPQIAADQQLYAMVLPGFWMDVGQPRDYITGLRLYLDSIRKKSAAKLATGAHVVGNVLVHESAKIGEGCLIGPDVAIGPGCVVEDGVRLSRCTVMRGVRIKKHACISNSIIGWHSTVGQWARIENMTILGEDVHVCDEVYSNGGVVLPHKEIKSSILKPEIVMLVVSN

SEQ ID NO: 174760 - protein, 120 aa, Zea Mays
MGQSYVTAGKHEVITLMLSCFPAPCEKVQDLLLKIEYYTSQETPEAFPLPRGVAIVRADAGWAHCVAITDEGDVYTWGWKECVPTGRVIGDQSSVGTKEKDERQMAMATDQDITKATPLQ

SEQ ID NO: 174761 - protein, 197 aa, Zea Mays
MGQSYVTAGKHEVITLMLSCFPAPCEKVQDLLLKIEYYTSQETPEAFPLPRGVAIVRADAGWAHCVAITDEGDVYTWGWKECVPTGRVIGDQSSVGTKEKDERQMAMATDQVSPRSQVSRTSSGAASGPSESRGTDDSTKRRRLSSAKHGPESSTSSDESLSAPPCVVTFNTGVKIVSVAAGGRHTLALSGNLHLSL

SEQ ID NO: 174762 - protein, 276 aa, Zea Mays
MGQSYVTAGKHEVITLMLSCFPAPCEKVQDLLLKIEYYTSQETPEAFPLPRGVAIVRADAGWAHCVAITDEGDVYTWGWKECVPTGRVIGDQSSVGTKEKDERQMAMATDQGVSPRSQVSRTSSGAASGPSESRGTDDSTKRRRLSSAKHGPESSTSSDESLSAPPCVVTFNTGVKIVSVAAGGRHTLALSDLGQVWGWGYGGEGQLGLGSRIRTVSSPHPVPCIESALYSKDRPSAMKGNKAAEGHVSKVLGNCVRAIACGGRHSAAVTGHLYIF

SEQ ID NO: 174763 - protein, 145 aa, Zea Mays
MKGNKAAEGHVSKVLGNCVRAIACGGRHSAAVTDSGALLTFGWGLYGQCGQGNTDDVLSPTCVSSILGSKMQDVAAGLWHTVCTSVDGDVYSFGGNQFGQLGTGSDQAETVPKLVDATSLENKNARSVSCGARHSAIITGNFKLF

SEQ ID NO: 174764 - protein, 124 aa, Zea Mays
MQDVAAGLWHTVCTSVDGDVYSFGGNQFGQLGTGSDQAETVPKLVDATSLENKNARSVSCGARHSAIITDEGEVFCWGWNKYGQLGLGDSMDRNVPCSVPVDAYHPLNVSCGWWHTLVLADSPT

SEQ ID NO: 174765 - protein, 114 aa, Zea Mays
MKDSGALLTFGWGLYGQCGQGNTDDVLSPTCVSSILGSKMQDVAAGLWHTVCTSVDGDVYSFGGNQFGQLGTGSDQAETVPKLVDATSLENKNARSVSCGARHSAIITGNFKLF

SEQ ID NO: 174766 - protein, 351 aa, Zea Mays
MGQSYVTAGKHEVITLMLSCFPAPCEKVQDLLLKIEYYTSQETPEAFPLPRGVAIVRADAGWAHCVAITDEGDVYTWGWKECVPTGRVIGDQSSVGTKEKDERQMAMATDQGVSPRSQVSRTSSGAASGPSESRGTDDSTKRRRLSSAKHGPESSTSSDESLSAPPCVVTFNTGVKIVSVAAGGRHTLALSDLGQVWGWGYGGEGQLGLGSRIRTVSSPHPVPCIESALYSKDRPSAMKDSGALLTFGWGLYGQCGQGNTDDVLSPTCVSSILGSKMQDVAAGLWHTVCTSVDGDVYSFGGNQFGQLGTGSDQAETVPKLVDATSLENKNARSVSCGARHSAIITGNFKLF

SEQ ID NO: 174767 - protein, 303 aa, Zea Mays
MGQSYVTAGKHEVITLMLSCFPAPCEKVQDLLLKIEYYTSQETPEAFPLPRGVAIVRADAGWAHCVAITDEGDVYTWGWKECVPTGRVIGDQSSVGTKEKDERQMAMATDQGVSPRSQVSRTSSGAASGPSESRGTDDSTKRRRLSSAKHGPESSTSSDESLSAPPCVVTFNTGVKIVSVAAGGRHTLALSDSGALLTFGWGLYGQCGQGNTDDVLSPTCVSSILGSKMQDVAAGLWHTVCTSVDGDVYSFGGNQFGQLGTGSDQAETVPKLVDATSLENKNARSVSCGARHSAIITGNFKLF

SEQ ID NO: 174768 - protein, 351 aa, Zea Mays
MGQSYVTAGKHEETPEAFPLPRGVAIVRADAGWAHCVAITDEGDVYTWGWKECVPTGRVIGDQSSVGTKEKDERQMAMATDQGVSPRSQVSRTSSGAASGPSESRGTDDSTKRRRLSSAKHGPESSTSSDESLSAPPCVVTFNTGVKIVSVAAGGRHTLALSDLGQVWGWGYGGEGQLGLGSRIRTVSSPHPVPCIESALYSKDRPSAMKGNKAAEGHVSKVLGNCVRAIACGGRHSAAVTDSGALLTFGWGLYGQCGQGNTDDVLSPTCVSSILGSKMQDVAAGLWHTVCTSVDGDVYSFGGNQFGQLGTGSDQAETVPKLVDATSLENKNARSVSCGARHSAIITGYEF

SEQ ID NO: 174769 - protein, 490 aa, Zea Mays
MTELGHGSNVRGIETIATYDSETREFIINTPCESAQKYWIGGAANHATHTIVFCQLHINGRNEGVHAFVAQIRDEDGTVLPNIHIADCGHKIGLNGVDNGRIWFQNIRVPRENLLNLVADVLPDGRYVSMIDNPDQRFAAFLSPLTLGRVNIAVNSVYISKVSLAIAVRYSLSRRAFSIAPDAPEMLLLDYPSHQRRLLPLLAKVCLMSSAGNFMKNMYVKRTPEMSKDIHIYSSALKATLTWQNMITIQECREACGGQGLKTENRIGIFKSEFDVQSTFEGDNNVLMQQVSKALYAEFLGAQKKQQPFKGLGLEHLNGSSPVIPDKLTSSILRSSKFQMDLFCLRERDLLKQFVEEVSLHLAQGESREKALMLSYQVAEDLARAFTERTILQIFLEDEMNVPSGSLKEVLGLLRSLYVMVNIDESTSFLRYGHLSRDNVALVRKEVLKLCSELRPHALAVVSSFGIPDAFLSPLAFDWIEANALSTGSH

SEQ ID NO: 174770 - protein, 375 aa, Zea Mays
MALIMGGFDGRYVSMIDNPDQRFAAFLSPLTLGRVNIAVNSVYISKVSLAIAVRYSLSRRAFSIAPDAPEMLLLDYPSHQRRLLPLLAKVCLMSSAGNFMKNMYVKRTPEMSKDIHIYSSALKATLTWQNMITIQECREACGGQGLKTENRIGIFKSEFDVQSTFEGDNNVLMQQVSKALYAEFLGAQKKQQPFKGLGLEHLNGSSPVIPDKLTSSILRSSKFQMDLFCLRERDLLKQFVEEVSLHLAQGESREKALMLSYQVAEDLARAFTERTILQIFLEDEMNVPSGSLKEVLGLLRSLYVMVNIDESTSFLRYGHLSRDNVALVRKEVLKLCSELRPHALAVVSSFGIPDAFLSPLAFDWIEANALSTGSH

SEQ ID NO: 174771 - protein, 285 aa, Zea Mays
MVDSVHDNIVLNKCIKDILALIKPVEDDRSKRLSTIQELENCIHSLASLSGAAVKPFGSFVSDLYSKSGDLDLSVQFGNGSNHPINKKKKQNALRDVRKALLSRGVTGYMQMQFIPHARVPVLQYVSKQFGISCDISIGNFAGRIKSKIFYWVNTVDERFGDMVLLIKEWAKAQNINDPKSGTLNSYSLCLLVLYHFQTSEPPILPPLNEIYEGNIAGDVTEAALFDEQHLDEVCAANIERFRLQNKGRRNETSTCRLLGTFFQKIMSYLLTRARLSESRTTQVG

SEQ ID NO: 174772 - protein, 538 aa, Zea Mays
MVDSVHDNIVLNKCIKDILALIKPVEDDRSKRLSTIQELENCIHSLASLSGAAVKPFGSFVSDLYSKSGDLDLSVQFGNGSNHPINKKKKQNALRDVRKALLSRGVTGYMQMQFIPHARVPVLQYVSKQFGISCDISIGNFAGRIKSKIFYWVNTVDERFGDMVLLIKEWAKAQNINDPKSGTLNSYSLCLLVLYHFQTSEPPILPPLNEIYEGNIAGDVTEAALFDEQHLDEVCAANIERFRLQNKGRRNETSTCRLLGTFFQKFAHINALTDNVISTYSGQIERIQNNPSWMRKSYHLFVEDPVERPDNAARAVSMKGLDLIAIAFNDACHKFKSLEHIDRNELLALLCTPVVRLKLGVRVRENSYPKSPRNNVHSRIRGQMWRDRGQAPSARGFTGTRSVHENPLANTTAHETAVQYHNHVQPTTVRQTAIRNQVTNTAVHQTAPYQNHTARQVYPTWSQTAEPYQNHNQQVYNAGFQTDGPHQNQQRRKGYPSNHQNNRLSATAARYEPVRGQFNNGSTWDSRSQAPGSAALRR

SEQ ID NO: 174773 - protein, 267 aa, Zea Mays
MCQDNMHEVVADEHTKAASGEETAWKGVMERSFSRLDEQAASWATSRSRDEPACRCEQQMPLRCDHVGSTAVVAVVSPSHVVVANAGDSRAVLSRGGVPVPLSVDHKPDRPDELARIEAAGGRVIYWDGARVLGVLAMSRAIGDRYLKPFVSSEPEVTVTERTDDDECLILASDGLWDVVTNEMACEVVRACFRSNGPPAPAARPNGVALPAAGAGAEDGSAVVKGVGKEDSDKACSDAAMLLAKLALARRSADNVSVVVVDLRRGI

SEQ ID NO: 174774 - protein, 74 aa, Zea Mays
MGTKPRDGDGAAGRHAGLQSGRQYALPVHRGRCQQVRVQRGGLSRSAARSSRRSTQDPAKVEQLREELRRNPLR

SEQ ID NO: 174775 - protein, 302 aa, Zea Mays
MKDDDDDGGAGSGARGRVLESEHGLPTRGPAHDPTAPVPLSSSSSTQRRDRPAHDPTAPAPSSSSSSIRRRDMKDDDDGGAGSGACGRVLEWEHGLPTAEELTPVSHPLIPPALAAAFGIDVPRTAFPSSAFDSPALARKPPNTRLSLGCYGEDDDEKEEEGKSEVAAYTTGACGGGKSEDAASASGACRGGRAEKKARIAWTPELHNRFVAAVEHLGDKGAVPKAIVRLMNVEGLTRENVASHLQKYRIYLKQQARSPAGPQPPPAYSPSDSRPQQPSDTSTRSTCDIEKLERDKEARKDK

SEQ ID NO: 174776 - protein, 437 aa, Zea Mays
MMDKVLLCNGETCSKGVKELREALQHDVAKNSHGVHGKGSGHGKGRGKKQPKKEVVDLETLLVHCAQSVATDDRRGATELLKQIRQHASPNGDGDQRLAHCFANGLEARLAGNGSQIYKSLIMTRFPCTDVLKAYQLYLAACPFKKISHFFANQTIMNAVEKAKKVHIVDYGIYYGFQWPCLIQRLSTRPGGPPRLRITAIDTPHPGFRPAERIEETGRYLKDYAETFNVPFEFRAIPSRFEAVQIEDLHIAKDELLIVNSMFKFKTLMDESVVAESPRNMVLSTIRKMNPHLFIHGIINGSYNAPFFASRFREALYHYSAIFDMLETNIPRDNEQRLLIESALFGREAINVISCEGLERMERPETYKQWQVRYQRAGFRQLPINQDIMKRAREKVRCYHKDFLIDEDNRWLLQGWKGRIVLALSTWKPDHRSSTAL

SEQ ID NO: 174777 - protein, 82 aa, Zea Mays
MDHDNFSSDDFLGEATIDVTDIVSLGAERGTYHLNAAKHNVVLADKTYHGEIKVAITFTSTQTQVQEDGGAIGGWRHSSFNQ

SEQ ID NO: 174778 - protein, 70 aa, Zea Mays
MRSAIDVTDIVSLGAERGTYHLNAAKHNVVLADKTYHGEIKVAITFTSTQTQVQEDGGAIGGWRHSSFNQ

SEQ ID NO: 174779 - protein, 322 aa, Zea Mays
MKPVATDGHLDLNQMPSIGSKDSSGRAYHSIVSPLSQAYNLDSSCLSLSIPTMQPLTSHEMSSLIDGSAVTLVVQCLESDSVRDKDQEIDSVQEKGVEVSSTPDPVGVELESAPAKRGAELSSKNELHSTLGPLCYQILNMEDVIPISTPLCSEHNGAHQTSQQCMSPNGYTSLSPTIGKVSSQLTVDSILRMAADSFPCTPSILRKRKRNKATPGSGNELKTGGVNNDSFYTPNGTNGKDTTPRSFKTAASFSSLGSVDGLLTSVRSFDSSPPYQKRSKRMAIIKSVEKQLDFSADGLDTSGSEIMNSPCHNSQGVDSNRM

SEQ ID NO: 174780 - protein, 320 aa, Zea Mays
MGFALFAEMRRDGVEPNLYTYNCLIGEWCRTGEFKSARLLFDEMPVKGVVHNVVSYNILIAGLCRHSKLKDAVQLFEAMRREGIRPSIVTFNLLIDGYGKAGKMANALHFFNQMKAAGLPPSVVTYNELICGFCRVRDIARAVRAFLDMKERGLAPTKVTYTILIAAFAKENEMDRAFMMLSEMEKAGLEVDVQSYGVLLHALCMEGKMMHARKLFQSMDLKGVKPNSVLYDMMIYGYGREGSSYKALRLIMEMRKNGLIPNVASYCLTIRLLCNEGKCQEAEALIDDMEHAGLQTSETICRILLDAKARLHGSTDDSFT

SEQ ID NO: 174781 - protein, 81 aa, Zea Mays
MIVDLPPEASIWSPGTCLGTGVLQSVMIKQILDQLPQKMAKAHEKELASASSSLPSPTSYDHLFTPLGALNTRCQRVRLHL

SEQ ID NO: 174782 - protein, 69 aa, Zea Mays
MKEEKKEIHSSISHLISGRTQRCGTAVPSCLLFFSNPCHSGLTRGRGRSFPFPAAAATCYCLRSVWVTH

SEQ ID NO: 174783 - protein, 609 aa, Zea Mays
MAKGEGPAIGIDLGTTYSCVGVWQHDRVEIIANDQGNRTTPSYVAFTDTERLIGDAAKNQVAMNPTNTVFDAKRLIGRRFSDPSVQSDMKLWPFKVIPGPGDKPMIVVSYKGEEKQFAAEEISSMVLIKMKEIAEAYLGSTIKNAVVTVPAYFNDSQRQATKDAGVIAGLNVMRIINEPTAAAIAYGLDKKASSSGEKNVLIFDLGGGTFDVSLLTIEEGIFEVKATAGDTHLGGEDFDNRMVNHFVQEFKRKHKKDISGNPRALRRLRTACERAKRTLSSTAQTTIEIDSLFEGIDFYSTITRARFEELNMDLFRKCMEPVEKCLRDAKMDKSSVHDVVLVGGSTRIPKVQQLLQDFFNGKELCKSINPDEAVAYGAAVQAAILSGEGNEKVFSTYSDNQPGVLIQVYEGERARTKDNNLLGKFELSGIPPAPRGVPQITVTFDIDANGILNVSAEDKTTGQKNKITITNDKGRLSKEEIEKMVQEAEKYKAEDEEVKKKVDAKNTLENYAYNMRNTIKDDKIASKLSADDKKKIEDAVDSATSWLDSNQLAEVDEFEDKMKELEGICNPIIAKMYQGAGAGMGDAAGMDEDAPSGGSGAGPKIEEVD

SEQ ID NO: 174784 - protein, 170 aa, Zea Mays
MRTASCAVGIGLPVYSTFRAIEKKDEQEKERMLLYWAAYGSFSIAEVFADKLLSSVPLYYHVKFAILVWLQFPSNSGSKHVYKRYLRPFFLKHQAKIDRFLNILSKELTKFVSSHEDEIRFIENMAIRGATTANHIVNGLDQPEETQAVNTIEGPNTTVTEEAGVSGTET

SEQ ID NO: 174785 - protein, 102 aa, Zea Mays
MPGRSTICAVGIGLPVYSTFRAIEKKDEQEKERMLLYWAAYGSFSIAEVFADKLLSSVPLYYHVKFAILVWLQFPSNSVSFPCPFHPPSKFHILFNFTILPL

SEQ ID NO: 174786 - protein, 154 aa, Zea Mays
MSPPLRSRSILTAHRCRSSKRHHLRVLCLDLRAHLHRGAPPPRAPTASPPTRRLPRLAAGLCLLLQRHSAPPVWAIFVALVDRATAVAESNLTRKYFATAVMDLQQRFTSEFVAGISRDAPDPSSISRASKKSFQPYIFWSSVLHFKQKMSRPG

SEQ ID NO: 174787 - protein, 126 aa, Zea Mays
MTEFGQQMRHVRRILCTKLSERHQYIETYTSPSIDLLQIEGPSVVRYHLIQSDCRFKPVRKMWHGSGLANFKMEGVRCGHSGPLRRDPRSFHSPFGAKSHSRAHRTRACGPIKVRLSNRERSVKTG

SEQ ID NO: 174788 - protein, 380 aa, Zea Mays
MDDDASSSPAASYIRLHLIEKCICYKLNKEECMETLEKHAKIMPVVTSTVWKELEKENREFFETYKKDRGGGGGGPRNLQEAAAAGHHPPPRLQVQQSCCSQEPALEQKKHPPSDGVQEHNRVVVEKEKRKQDPPSASASADGQEQRVVEKKEKRKDPPSDGQERRVMAKENSRKDPSASSKRSEQGQRLELSLARSAVPLLWLRSNVVDAGDLRTIEDSRSTGAAVPRAGGGSDGRCCAACVWALHTWRPGEYSPGLACLKDTTRLVEVVVVTVRRKRPFLSRWSVSRLDVRTCSALAIRRTDRTAGRRGQGQQSTRDFFLPQAQPPSFWRRALLSRTSTVAGKFPGVRVTSCLVGAACNSARSTQPVQEARPGSLLSC

SEQ ID NO: 174789 - protein, 382 aa, Zea Mays
MDDDASSSPAASYIRLVQHLIEKCICYKLNKEECMETLEKHAKIMPVVTSTVWKELEKENREFFETYKKDRGGGGGGPRNLQEAAAAGHHPPPRLQVQQSCCSQEPALEQKKHPPSDGVQEHNRVVVEKEKRKQDPPSASASADGQEQRVVEKKEKRKDPPSDGQERRVMAKENSRKDPSASSKRSEQGQRLELSLARSAVPLLWLRSNVVDAGDLRTIEDSRSTGAAVPRAGGGSDGRCCAACVWALHTWRPGEYSPGLACLKDTTRLVEVVVVTVRRKRPFLSRWSVSRLDVRTCSALAIRRTDRTAGRRGQGQQSTRDFFLPQAQPPSFWRRALLSRTSTVAGKFPGVRVTSCLVGAACNSARSTQPVQEARPGSLLSC

SEQ ID NO: 174790 - protein, 246 aa, Zea Mays
MQPCAVPLVYSSSLSTFPHTHQATTRSPTTHAPPPARSPAMKQLHKSSPTHAPSPAHAPAPKAAKTARPGPRSWIGYVLREQRLLFVLLGALIASTFFLLRPYLSLSPSSHLPDARPLFSFATRSGVPAGFRPPQRRVVVTGGAGFVGSHLVDRLLEQGDSVIVVDNFFTGRKENVAHHLRNPRFELLRHDVVEPILLEVDRIYHLACPASPVHYKYNPIKTIDKCHGNFEYVGSGEANWCKVFVD

SEQ ID NO: 174791 - protein, 271 aa, Zea Mays
MQPCAVPLVYSSSLSTFPHTHQATTRSPTTHAPPPARSPAMKQLHKSSPTHAPSPAHAPAPKAAKTARPGPRSWIGYVLREQRLLFVLLGALIASTFFLLRPYLSLSPSSHLPDARPLFSFATRSGVPAGFRPPQRRVVVTGGAGFVGSHLVDRLLEQGDSVIVVDNFFTGRKENVAHHLRNPRFELLRHDVVEPILLEVDRIYHLACPASPVHYKYNPIKTIISFTTGSRRLILLTLKATRSDPIVFFSFLYFWWRVAGGGWRGGWVSVR

SEQ ID NO: 174792 - protein, 269 aa, Zea Mays
MKHSILNTEKLHKYPDTAARLVRAGYGVYGIDHEGHGRSSGSRCYVPNFGNIVADCSSHFTSICEKPQNRGKRRFLYGISMGGSVALLLHRKAPGYWDGAILLAPMCKISDDMRPHPIVVSALTMVCAVAPGWKVIPTPDIIDKVCKDPEMRKEVRSNPYIYRGKLPLKTCHELLMVSLDIEKNLDQVTMPFLVLHGGDDVVTDPSVSKLLFEKAPSKDKTFKLYPGMWHALTAELPDDVERVYADIITWLEERAVICAASVSSATPRV

SEQ ID NO: 174793 - protein, 318 aa, Zea Mays
MDRQSEDVNYEEEFVVNPRGNKLFVCSWTPQQDRQPKALIFICHGIAAECSISMRDTAARLVRAGYGVYGIDHEGHGRSSGSRCYVPNFGNIVADCSSHFTSICEKPQNRGKRRFLYGISMGGSVALLLHRKAPGYWDGAILLAPMCKVWGQSKIEMISDDMRPHPIVVSALTMVCAVAPGWKVIPTPDIIDKVCKDPEMRKEVRSNPYIYRGKLPLKTCHELLMVSLDIEKNLDQVTMPFLVLHGGDDVVTDPSVSKLLFEKAPSKDKTFKLYPGMWHALTAELPDDVERVYADIITWLEERAVICAASVSSATPRV

SEQ ID NO: 174794 - protein, 189 aa, Zea Mays
MGGSVALLLHRKAPGYWDGAILLAPMCKISDDMRPHPIVVSALTMVCAVAPGWKVIPTPDIIDKVCKDPEMRKEVRSNPYIYRGKLPLKTCHELLMVSLDIEKNLDQVTMPFLVLHGGDDVVTDPSVSKLLFEKAPSKDKTFKLYPGMWHALTAELPDDVERVYADIITWLEERAVICAASVSSATPRV

SEQ ID NO: 174795 - protein, 101 aa, Zea Mays
MCFVQLIMPADSSRLAVTYLGELGLLQFKDRFQGHTYRFLGTSEMDPDSEPDSNRTRHDDFNFSEVFVYQMIHSIEFVLGVVSNTASYLRLWALRFASCVL

SEQ ID NO: 174796 - protein, 63 aa, Zea Mays
MFFCQRKAVGEIPTTRKIFYYDKRETMYKPSITLDKNLEEKHKKDGEGVSGFIKRQATEKQTN

SEQ ID NO: 174797 - protein, 126 aa, Zea Mays
MPWLITFLYEKMTSMMGCYKFITELSECLKRNRQMNLPILRVFFKTTMSAADRENKPTVSIRVPGPGPKPRVCVSSIRCACFAVGCSDTGGSRTGTAILIHQFGSNARTSFNYFRDLLAIQYLWTI

SEQ ID NO: 174798 - protein, 190 aa, Zea Mays
MIIDFDVHHGNGTSDSFYDDPDIFFLSTHQLGSYPGTGKINEVGQGDGEGTTLNLPLPGGAGDYAMRCAFDEVIAPSAHRFKPDIILVSAGYDAHALDPLAGLQFTTGTFYMLASSIKQVTKELCGGRCVFFLEGGYNLQSLSSSVADTFRAFLDEPSLAAQFDDPAILFEEPTRKIKEAIEKAKSIHSL

SEQ ID NO: 174799 - protein, 191 aa, Zea Mays
MDVCLKIIKNDKDFFDQSLDEIKLLKFVNKYDPLDEHHVLRLYDYFYHQEHLFIVTELLRANLYEFQKYNQESGGEVYFTLPRIQVIARQCLEALVYLHRLRIIHCDLKPENILIKSYSRCEIKVIDLGSSCFLTDNLCLYVQSRSYRAPEVILGLPYDQRIDIWSLGCILSELYTGEVSMFYLIEMLGGL

SEQ ID NO: 174800 - protein, 127 aa, Zea Mays
MFNILLLLKLRKMPRQILILLSLIFTENMRTGFEENKDFPIVLNSVVAGRYYITEYLGSAAFSKVVQAHDLRTGMDVCLKIIKNDKDFFDQSLDEIKLLKFVNKYDPLDEHHVLRLYDYFYHQVYAS

SEQ ID NO: 174801 - protein, 495 aa, Zea Mays
MAAPGLDKVMAFLTDHGFAGAASALRDDVLERTAAGDESHDAALDPHLPPLRMPASAGGAGAGAGAGAGAGTPTPASPGSSSGSASSSAFVSLRSTPSGLLNPYGLWSPRHSQSDASSSEMEFGTARQYDTTDLFFQEDWLYDDHLFPSKLDDEDDEGKEEDKFVLDAHDGSEQVEIGKLGAGHNHRHEHIGGDRCEGCAEVYICSSPLCGCCGGGLKNDGLDVARSSSSTVYGRYKIMDDQTEILDDCAQDAFQLKQSRDIMFECGMTRDPGRGYDDSGLSVVEKELQILSSFDTVVNHGTYDFTENGELNGSCDKNLKSSIHKEYPKGHRIQPFPESGDLDEADEFRHVGSLNTDVQHSTALKAEEDAETNIDLALSDFHREYEVFELRIIHRKNRTGFEENKDFPIVLNSVVAGRYYITEYLGSAAFSKVVQAHDLRTGMDVCLKIIKNDKDFFDQSLDEIKLLKFVNKYDPLDEHHVLRLYDYFYHQVTRS

SEQ ID NO: 174802 - protein, 403 aa, Zea Mays
MAAPGLDKVMAFLTDHGFAGAASALRDDVLERTAAGDESHDAALDPHLPPLRMPASAGGAGAGAGAGAGAGTPTPASPGSSSGSASSSAFVSLRSTPSGLLNPYGLWSPRHSQSDASSSEMEFGTARQYDTTDLFFQEDWLYDDHLFPSKLDDEDDEGKEEDKFVLDAHDGSEQVEIGKLGAGHNHRHEHIGGDRCEGCAEVYICSSPLCGCCGGGLKNDGLDVARSSSSTVYGRYKIMDDQTEILDDCAQDAFQLKQSRDIMFECGMTRDPGRGYDDSGLSVVEKELQILSSFDTVVNHGTYDFTENGELNGSCDKNLKSSIHKEYPKGHRIQPFPESGDLDEADEFRHVGSLNTDVQHSTALKAEEDAETNIDLALSDFHREYEACNAGLDLKKTKISPSS

SEQ ID NO: 174803 - protein, 540 aa, Zea Mays
MAAPGLDKVMAFLTDHGFAGAASALRDDVLERTAAGDESHDAALDPHLPPLRMPASAGGAGAGAGAGAGAGTPTPASPGSSSGSASSSAFVSLRSTPSGLLNPYGLWSPRHSQSDASSSEMEFGTARQYDTTDLFFQEDWLYDDHLFPSKLDDEDDEGKEEDKFVLDAHDGSEQVEIGKLGAGHNHRHEHIGGDRCEGCAEVYICSSPLCGCCGGGLKNDGLDVARSSSSTVYGRYKIMDDQTEILDDCAQDAFQLKQSRDIMFECGMTRDPGRGYDDSGLSVVEKELQILSSFDTVVNHGTYDFTENGELNGSCDKNLKSSIHKEYPKGHRIQPFPESGDLDEADEFRHVGSLNTDVQHSTALKAEEDAETNIDLALSDFHREYEVFELRIIHRKNRTGFEENKDFPIVLNSVVAGRYYITEYLGSAAFSKVVQAHDLRTGMDVCLKIIKNDKDFFDQSLDEIKLLKFVNKYDPLDEHHVLRLYDYFYHQEHLFIVTELLRANLYEFQKYNQESGGEVYFTLPRIQLGNVWRPWFTCTV

SEQ ID NO: 174804 - protein, 389 aa, Zea Mays
MAAPGLDKVMAFLTDHGFAGAASALRDDVLERTAAGDESHDAALDPHLPPLRMPASAGGAGAGAGAGAGAGTPTPASPGSSSGSASSSAFVSLRSTPSGLLNPYGLWSPRHSQSDASSSEMEFGTARQYDTTDLFFQEDWLYDDHLFPSKLDDEDDEGKEEDKFVLDAHDGSEQVEIGKLGAGHNHRHEHIGGDRCEGCAEVYICSSPLCGCCGGGLKNDGLDVARSSSSTVYGRYKIMDDQTEILDDCAQDAFQLKQSRDIMFECGMTRDPGRGYDDSGLSVVEKELQILSSFDTVVNHGTYDFTENGELNGSCDKNLKSSIHKEYPKGHRIQPFPESGDLDEADEFRHVGSLNTDVQHSTALKAEEDAETNIDLALSDFHREYEDWI

SEQ ID NO: 174805 - protein, 230 aa, Zea Mays
MMSGRSGGRDAEGEWEVRPGGMLVQRRDGEAAGPVIRIRVSHGANFREVVVPAQATFGELKRILVQTTGLEPERQRLFFRGKEKSDREFLHTAGVKDGAKLLLLEKPAPANIEQKVEPVIMDESMMKACAAVARVRVEVDKLSAKLLKLDGIEAEGEARAQRKAEVRRVQSLVETLDKLKARNANPFSDHNKAVSVTTQWETFENGMGSLSAPPPRVSSTQANTDWEQFD

SEQ ID NO: 174806 - protein, 261 aa, Zea Mays
MLRLPTLTALKPSTPAISLNRVGCSHGRRRRKLIFVSSAPPPSSSSSRPPKPTSNPEPPKPTHEARNRNPDGSTEAGFPTTKPRKPRRGRRSESAAVEDFVRNRLEQVFASIQERNPDVLEGKGDILKPKADVERLPDDEGEGEGGEQKPVVEEEDPSWPLDADVGWGIRASEYFDKHSIRNVTVDGVEIDWEGDVDEGWVKEINCLEWESFAFHPSPLVVLVFERYNRAADNWKFLQELEKAAKVYWNAKDRLPPRSKLI

SEQ ID NO: 174807 - protein, 565 aa, Zea Mays
MAIYSFLSVRKRPVVVVAAVTLFIVVSSLFLLFSPAPTALPFFSSSSSHLSSQASIAAVSSNAFPPETPTSVVSNWVSSNTSADRVSADASPPVVGTAIASDAVSNSTADPPRPDTTAAAGDAKADVSQPDHGMPPAATEASGSAGNGETAAGVSSERDEEGQGGGGAVEELPSWELCKVGKGVAAADYIPCLDNVKAVKALKSLRHMEHRERHCPTDPRPRCLVPLPERYRRPVPWPRSRDMIWYNNVPHPKLVEYKKDQNWVRKSGNYFVFPGGGTQFKNGVASYIKFIEQILPNIQWGIHTRTVLDVGCGVASFGGYLLDRNVITMSVAPKDEHEAQIQFALERGIPAFLAVIGTQKLPFPDNSFDVIHCARCRVHWYADGGKPLLELNRVLRPGGYYIWSATPVYRKNPRDIDDWNAVVALTKSICWRTVVRSRDINKIGVVIYQKPTSNSCSLERKNNEPPLCSESDGSRFPWYKPLDSCLFPAVPSSGEGNSWAVSWPERLNIKHSATSNNSSIQFPQEKIDSDTSYWKDLVSEIYLNEFAVNWSSVRNVMDMNAGFGG

SEQ ID NO: 174808 - protein, 435 aa, Zea Mays
MAIYSFLSVRKRPVVVVAAVTLFIVVSSLFLLFSPAPTALPFFSSSSSHLSSQASIAAVSSNAFPPETPTSVVSNWVSSNTSADRVSADASPPVVGTAIASDAVSNSTADPPRPDTTAAAGDAKADVSQPDHGMPPAATEASGSAGNGETAAGVSSERDEEGQGGGGAVEELPSWELCKVGKGVAAADYIPCLDNVKAVKALKSLRHMEHRERHCPTDPRPRCLVPLPERYRRPVPWPRSRDMIWYNNVPHPKLVEYKKDQNWVRKSGNYFVFPGGGTQFKNGVASYIKFIEQILPNIQWGIHTRTVLDVGCGVASFGGYLLDRNVITMSVAPKDEHEAQIQFALERGIPAFLAVIGTQKLPFPDNSFDVIHCARCRVHWYADGGKPLLELNRVLRPGGYYIWSATPVYRKNPRDIDDWNAVVALTKSICWRTVV

SEQ ID NO: 174809 - protein, 391 aa, Zea Mays
MAWLHTLNSLNSFGGYLLDRNVITMSVAPKDEHEAQIQFALERGIPAFLAVIGTQKLPFPDNSFDVIHCARCRVHWYADGGKPLLELNRVLRPGGYYIWSATPVYRKNPRDIDDWNAVVALTKSICWRTVVRSRDINKIGVVIYQKPTSNSCSLERKNNEPPLCSESDGSRFPWYKPLDSCLFPAVPSSGEGNSWAVSWPERLNIKHSATSNNSSIQFPQEKIDSDTSYWKDLVSEIYLNEFAVNWSSVRNVMDMNAGFGGFAASIINRPLWVMNVVPVDQPDTLHIIFNRGLIGVYHDWCESFNTYPRTYDLIHMSYLLGPLTKRCHIIEVAAEIDRILRPGRWFVLQDTIDMIRKMDPVLRSLHYKTTIVKHQFLLATKGFWRPGSIGS

SEQ ID NO: 174810 - protein, 482 aa, Zea Mays
MAIYSFLSVRKRPVVVVAAVTLFIVVSSLFLLFSPAPTALPFFSSSSSHLSSQASIAAVSSNAFPPETPTSVVSNWVSSNTSADRVSADASPPVVGTAIASDAVSNSTADPPRPDTTAAAGDAKADVSQPDHGMPPAATEASGSAGNGETAAGVSSERDEEGQGGGGAVEELPSWELCKVGKGVAAADYIPCLDNVKAVKALKSLRHMEHRERHCPTDPRPRCLVPLPERYRRPVPWPRSRDMIWYNNVPHPKLVEYKKDQNWVRKSGNYFVFPGGGTQFKNGVASYIKFIEQILPNIQWGIHTRTVLDVGCGVASFGGYLLDRNVITMSVAPKDEHEAQIQFALERGIPAFLAVIGTQKLPFPDNSFDVIHCARCRVHWYADGGKPLLELNRVLRPGGYYIWSATPVYRKNPRDIDDWNAVVALTKSICWRTVVRSRDINKIGVVIYQKPTSNSCSLERKNNEPPLCSESDGSRFPCSEFR

SEQ ID NO: 174811 - protein, 695 aa, Zea Mays
MAIYSFLSVRKRPVVVVAAVTLFIVVSSLFLLFSPAPTALPFFSSSSSHLSSQASIAAVSSNAFPPETPTSVVSNWVSSNTSADRVSADASPPVVGTAIASDAVSNSTADPPRPDTTAAAGDAKADVSQPDHGMPPAATEASGSAGNGETAAGVSSERDEEGQGGGGAVEELPSWELCKVGKGVAAADYIPCLDNVKAVKALKSLRHMEHRERHCPTDPRPRCLVPLPERYRRPVPWPRSRDMIWYNNVPHPKLVEYKKDQNWVRKSGNYFVFPGGGTQFKNGVASYIKFIEQILPNIQWGIHTRTVLDVGCGVASFGGYLLDRNVITMSVAPKDEHEAQIQFALERGIPAFLAVIGTQKLPFPDNSFDVIHCARCRVHWYADGGKPLLELNRVLRPGGYYIWSATPVYRKNPRDIDDWNAVVALTKSICWRTVVRSRDINKIGVVIYQKPTSNSCSLERKNNEPPLCSESDGSRFPWYKPLDSCLFPAVPSSGEGNSWAVSWPERLNIKHSATSNNSSIQFPQEKIDSDTSYWKDLVSEIYLNEFAVNWSSVRNVMDMNAGFGGFAASIINRPLWVMNVVPVDQPDTLHIIFNRGLIGVYHDWCESFNTYPRTYDLIHMSYLLGPLTKRCHIIEVAAEIDRILRPGRWFVLQDTIDMIRKMDPVLRSLHYKTTIVKHQFLLATKGFWRPGSIGS

SEQ ID NO: 174812 - protein, 386 aa, Zea Mays
MDAGSSQAAYGGPFHQAASSDAAAMAPHVPASGGYSHQAQQSQRRSSDDGYNWRKYGQKQVKGSENPRSYYKCTFPSCPTKKKVERSLDGQITEIVYKGTHNHAKPQNTRRNSSSAAAAQLLQGGDASEHSFGGMSGTPAATPENSSASFGDDEVGVGSPRAGNAGGDEFDEDEPDSKRWRKDGGDGEGISMAGNRTVREPRVVVQTMSDIDILDDGYRWRKYGQKVVKGNPNPRSYYKCTTVGCPVRKHVERASHDLRAVITTYEGKHNHDVPAARGSAALYRPAPPPADTAGHHYLAAARPGVAYQTGQQYGFGDQLGSFGLSGAPAQSGGGGFAFSSGFDNPMGSYMSQHQQQQRQNDAMHASRAKEEPREDMFFPTSLLYTD

SEQ ID NO: 174813 - protein, 111 aa, Zea Mays
MGPPDSPYAGGVFLVNIHFPPDYPFKPPKVSFKTKVFHPNINSNGSICLDILKEQWSPALTISKVLLSICSLLTDPNPDDPLVPEIAHMYKTDRPKYEATARSWTQKYAMG

SEQ ID NO: 174814 - protein, 55 aa, Zea Mays
MVVGKYPGKNHSFNHPDLSICEFNKKRTDLRNTPLSFEVRSQYYVILYSKKQVKE

SEQ ID NO: 174815 - protein, 231 aa, Zea Mays
MNCTIRCSNKHQNYHSITRKRNTEILAEGICFVFRNYPRPTLHILQLSVHDAPTEAKGHHHSFPNSAGCSSPSLHAGRAPIQIQGRNMASKRILKELKDLQKDPPTSCSAGPAGEDMFHWQATIMGPPDSPYAGGVFLVNIHFPPDYPFKPPKTKVFHPNINSNGSICLDILKEQWSPALTISKVLLSICSLLTDPNPDDPLVPEIAHMYKTDRPKYEATARSWTQKYAMG

SEQ ID NO: 174816 - protein, 50 aa, Zea Mays
MRRLARKNSPMAVYLGYFVYCLRPLLVQRCLSSSILSSLIIYKVMTPQNI

SEQ ID NO: 174817 - protein, 247 aa, Zea Mays
MLAPPPGQTFDGSEEDGIPIKASGENTVPQVGKYPMNTNSSTVPENEPLLSAGEVQKERATSVGTKIMGYVKCVVKFLKDKQLLQPPIIASAFAIAIGVIPFLKNFVLTDDAPLFFFTDSCLILGEAMIPCILLAVGGNLVDGPGEGSKRLGVRTTVAIIFARLVLVPLAGVGITMLVDKLGFIPEGDRMFKFVLLLQHSMPTSVLSGAVANLRGCGKESAAILFWVHIFAVFSMAGWIIFYLSLLF

SEQ ID NO: 174818 - protein, 349 aa, Zea Mays
MLCCGVPKPPYSQESAYTRMGRIPHRLCYLLARSSKNMQWYINPSIPEAETLMSSARGDHKPVKWNATVTSSQLISPVAEDQKVSYIKYLHPFENKGKEFLVTVTIRKIDNKWWYNSCRKCACTAVTHGDSYKCTNCDCANIAMPVQRYKILVTAGDETADTDFILFGRMAQRIVKRPCDMLIANTPSGFIPDAITKLLERTFIWNVSFSGHTINSGNVCFQVNATIKELGNQNVDISTSTAGTHQSSLMFSQGASSSMEDTPHKTDTLSSPLTPLTPQGSIATTKYLETVEAGDAERVTTQTSTTRKRSCSSPGKSVAKKLFVADDEEESISQSSGGGVGGPSDDKNN

SEQ ID NO: 174819 - protein, 427 aa, Zea Mays
MGDVLIPSLRCGNLSVTICVRVSRFWDFSDPQDDARLLHCDMVLLDEEGNSIHATIYPPFIEKFRPLIKEGSVYNMTYFRVRASNNLYKPVPNDIMITFTNWTKLEQVIEIPPAFPTLTYSLTHIDQIHSRIDHKDYYTDAIGIVTSVSNVSPHRSKGQQASSLKRNISICSASRGASVNVVLWGAQATLFPGERIYEDGQNSPQIVLFVGTLVKKYADGLCLTGSSPCKWYINPSIPEAETLMSSARGDHKPVKWNATVTSSQLISPVAEDQKVSYIKYLHPFENKGKEFLVTVTIRKIDNKWWYNSCRKCACTAVTHGDSYKCTNCDCANIAMPVQRYKILVTAGDETADTDFILFGRMAQRIVKRPCDMLIANTPSGFIPDAITKLLERTFIWNGHTSLRLCSHKVQAAAWKTLLTRQTPCLHL

SEQ ID NO: 174820 - protein, 482 aa, Zea Mays
MGNSEVGHNALGAGRIFAQGAKLVDQALASGKIYDGDGFNYIKESFENGTLHLIGLLSDGGVHSRLDQLQLLLKGVSERGAKKIRVHILTDGRDVLDGSSVGFVETLENDLLELRGKGIDAQIASGGGRMYVTMDRYENDWDVVKRGWDAQVLGEAPYKFKSALEAVKTLRAQPNANDQYLPPFVIVDDSGKAVGPVLDGDAVVTINFRADRMVMLAKALEYADFNNFDRVRVPKIRYAGMLQYDGELKLPSRYLVSPPEIDRTSGEYLVKNGIRTFACSETVKFGHVTFFWNGNRSGYFDETKEEYVEVPSDSGITFNVAPKMKALQIAEKARDALLSGKFDQVRVNLPNGDMVGHTGDIEATVVACKAADEAVKIILNAVEQVGGIYLVTADHGNAEDMVKRNKSGKPLLDKNGGIQILTSHTLQPVPVAIGGPGLHPGVKFRNDIQIPGLANVAATVMNLHGFEAPADYEQTLIEVADN

SEQ ID NO: 174821 - protein, 365 aa, Zea Mays
MGRVFFRSPLFADLRNNEHFQLLEASLSTELGLQPGSVFLSDIHFTSDDYLQVQVRLFPSTGTSFNLSEITRIGFDLSNQTYKPPQGFGPYYFVADPYVHFAGADDGGKSQVSTGAVAGIAVACGLILIAVTSGAIFALLQKRRSRELSGQTNPFASWGIAKKDSGGAPQLKGARFFSFDELKNCTNNFAENNEIGSGGYGKVYKAILVGGTNVAIKRAEYGSKQGAVEFKNEIELLSRVHHKNLVSLIGFCYEQGEQMLVYEYVSNGTLRHNLQARGIYLDWKKRLRIALGSARGLAYLHELADPPIIHRDVKSTNILLDGNFKPKVADFGLSKLVADTEKGHISTQVKGTLVGSLVTVPHQLS

SEQ ID NO: 174822 - protein, 514 aa, Zea Mays
MIFQAPAFSDVISPTMFQIVESTLMQNLSLAPRSVAISNVQFSQGNPLTFIVSIFPASGTSFNRSEVIRIISPLVNQTYKAPPNFGPYSFIANTYFTVPSNKKPSMGKAAIIGISIGGVVLILGLVAVATYALRQKRIAKEAVERTTNPFASWGAGGTDNGDAPQLKGARYFPFEELKKCTNNFSETQEIGSGGYGKVYKGRLANGQIAAIKRAQQGSMQGAAEFKNEIELLSRVHHKNLVSLVGFCYEQGEQMLVYEYIPYGTLRENLMGKRGVNLDWKNRLRIAIGSAKGLAYLHELADPPIIHRDIKSTNILLDESLNAKVADFGLSKLVSDTQKGHVSTQVKGTLGYLDPEYYMTQQLSEKSDVYSFGVVLLELVTASQPIEKGRYIVREIRTAIDQYDQEYYGLKGLIDPKIRDSAKLIGFRRFIQLAMECVEESAVDRPTMNDVVKELEIIIQNEGAQLLNSASLSVEQFGNEKRRDPYAEHLPMNDESSSSTFDYNSGYSYSAVQPK

SEQ ID NO: 174823 - protein, 941 aa, Zea Mays
MAAMQQLLLLFLLLVYLRPSFGQTNPQDVAALQALMNNWQNEPPSWTGSTDPCTSWVGISCSNGRVTEMRLTGMNLQGTLSNTIGQLSALKYLDLSNNQNLGGPLTPNIGNLKQLTVLILLGCTFTGNIPKEIGNLSQLTFLALNSNKFTGGIPPTLGLLSNLFWLDMSANQLSGQIPVSPGLDQLVNTRHFHFSENQLTGPMSESLFSDKMNLIHVIFNNNNFTGPIPASLGQVKSLQIIRLDHNIVTIVASRLDHNQFSGPVPNSITTLSNLMEVSIANNLLNGTVPDLTNLTQLDYVFMDHGELNGTIPSAMFSLPNLQQVSLARNSFSGKLNMTGNISSQLQVVNLTSNQIIEANVTGYSNTLILTENPVCLDNTSLCKLKQKQQASYATNLGPCAAIPCPFDQSASPVTSQNCACTSPIQGLMIFQAPAFSDVISPTMFQIVESTLMQNLSLAPRSVAISNVQFSQGNPLTFIVSIFPASGTSFNRSEVIRIISPLVNQTYKAPPNFGPYSFIANTYFTVPSNKKPSMGKAAIIGISIGGVVLILGLVAVATYALRQKRIAKEAVERTTNPFASWGAGGTDNGDAPQLKGARYFPFEELKKCTNNFSETQEIGSGGYGKVYKGRLANGQIAAIKRAQQGSMQGAAEFKNEIELLSRVHHKNLVSLVGFCYEQGEQMLVYEYIPYGTLRENLMGKRGVNLDWKNRLRIAIGSAKGLAYLHELADPPIIHRDIKSTNILLDESLNAKVADFGLSKLVSDTQKGHVSTQVKGTLGYLDPEYYMTQQLSEKSDVYSFGVVLLELVTASQPIEKGRYIVREIRTAIDQYDQEYYGLKGLIDPKIRDSAKLIGFRRFIQLAMECVEESAVDRPTMNDVVKELEIIIQNEGAQLLNSASLSVEQFGNEKRRDPYAEHLPMNDESSSSTFDYNSGYSYSAVQPK

SEQ ID NO: 174824 - protein, 63 aa, Zea Mays
MLAENRGMIACIPVRQYTTTALTVMRLRCTIFICDDKRAIGNRNHGKQYPKIVFCIVKFCSQA

SEQ ID NO: 174825 - protein, 294 aa, Zea Mays
MGHKSSASKHCSDIAAPASGGRRKPPPIIYDANEVKQWVEARKKNYPTSVNVNKKLSEMKSDNENKDKDAQLRRQELKEVIAKQQELGFDPPELPPGYLSEIGDQCIENKNNRKTQFRDSHFGNRFNNNKRSRYERGGFQSKRSKVWNCTPHADHGMVKSREPTLLQKLLSSDIKRDRHRLLHVFRFMTLNNFFKDWPDRPLQFPSVKMNQIEIGSNISTDDLENAGMSKDSILGVNENGDWKELSSIDEEDTDSANHNDEDVDDDSVDSSIEDGAEEDGYEEQFNEPEDDTAV

SEQ ID NO: 174826 - protein, 727 aa, Zea Mays
MGSRREEERNEKIIRGLMKLPPNRKCINCNSVGPQYVCTNFWTFICLSCSGIHREFTHRVKSVSMSKFTTQEVQALEQGGNQRARDIYLKDWDWQRMRLPINTNPDRIREFIRAVYVDKKYAGGSSNKPATESESMKSNDHDMRRPSSYHSYSQSPPYDFQYEDRRYGKQVNTLARRPSDRALFDGKLGNLLFSPGRLRDQMNEDRFANESSGSRFSDFSASSTGDFRNDVLSPSSQETGYSSPSVHHSRNVSADNPQTQKCPNAASQIDFNGVRRPQRTTSSGSFGSFDGSSVSNKSIESGYPPDAPTEKSVHCAVNHQTVPSPEACSTQQYASPSDNHNLIPHKPADLGSQIVATRKPVQHSCAQIENVVPMHAPVQPTTSTPLGLFDQSTVQHPVTSAAPIDLFAGFNEQLPASHNTDGVSSHSVVAKEPAHNVVQKGIMPSAEALATSHAVHQDLFSLSILQEPATPLPSQPIDLFAGFDQHLPHLSTVQKIPSAVPFPANDGWAFFDVQHGLLTSVSNVQGQVPAAFSPSDGIAKGIDQLTLPTSPPNVIGSQNSPAMMDNWSLNAEEVKIPVLNENSQSWNAFGESTQSASNDLFTFNTMSQVEAHQFSMPSGPYVESRIPQGGMVSHPEKSTNPFDMAFESDVDANDMFMDLTSLQETLPDHHTLTDYSGSLTEPWISQNSTMSYIPSGPQGGLSYVAGQDSHMLSSTHQGAFPPRNPFE

SEQ ID NO: 174827 - protein, 694 aa, Zea Mays
MGSRREEERNEKIIRGLMKLPPNRKCINCNSVGPQYVCTNFWTFICLSCSGIHREFTHRVKSVSMSKFTTQEVQALEQGGNQRARDIYLKDWDWQRMRLPINTNPDRIREFIRAVYVDKKYAGGSSNKPATESESMKSNDHDMRRPSSYHSYSQSPPYDFQYEDRRYGKQVNTLARRPSDRALFDGKLGNLLFSPGRLRDQMNEDRFANESSGSRFSDFSASSTGDFRNDVLSPSSQETGYSSPSVHHSRNVSADNPQTQKCPNAASQIDFNGVRRPQRTTSSGSFGSFDGSSVSNKSIESGYPPDAPTEKSVHCAVNHQTVPSPEACSTQQYASPSDNHNLIPHKPADLGSQIVATRKPVQHSCAQIENVVPMHAPVQPTTSTPLGLFDQSTVQHPVTSAAPIDLFAGFNEQLPASHNTDGVSSHSVVAKEPAHNVVQKGIMPSAEALATSHAVHQDLFSLSILQEPATPLPSQPIDLFAGFDQHLPHLSTVQKIPSAVPFPANDGWAFFDVQHGLLTSVSNVQGQVPAAFSPSDGIAKGIDQLTLPTSPPNVIGSQNSPAMMDNWSLNAEEVKIPVLNENSQSWNAFGESTQSASNDLFTFNTMSQVEAHQFSMPSGPYVESRIPQLGMSLKGQLLGMCFLASIFHMLRWLDHRLHHSSPIWVAWSLILKNQQIHLTWHLNPTLTPMTCSWI

SEQ ID NO: 174828 - protein, 164 aa, Zea Mays
MRILMVGLDAAGKTTILYKLKLGEIVTTIPTIGFNVETVEYKNISFTVWDVGGQDKIRPLWRHYFQNTQGLIFVVDSNDRERVVEARDELHRMLNEDELRDAVLLVFANKQDLPNAMNAAEITDKLGLHSLRQRHWYIQSTCATSGEGLYEGLDWLSNNIANKS

SEQ ID NO: 174829 - protein, 60 aa, Zea Mays
MGRRWEDEQVSSLAIRGERRVGEEMTDAHRNLEAFRSVYNLHPRRDFSTDSFKISERAIV

SEQ ID NO: 174830 - protein, 761 aa, Zea Mays
MALEAKQAALCFKEVLRLSIRKSYRFVSEHPILFGLGVFLYLFYRSSPRLFVFLLSSSPVNICTALLLGILLSYGEVNLPEASKDHRDTTEVSTSMVGNSSSDVHFEANQRPSVLEFRENASNFKERETKQKVSFRERASEHVDLDDYIPLLKRAGEEDERGDRGNISRTLTPFPSMVNIRQESVIGEDLTFTKKRQSEGSFFMQDRADCQTSLFDEACLCGLNDKDIPFGLFSSSENVNKNDEMEEKFNQQRVFADSTATKERDSSEAMPTEELAGTSKQAASVPIDQWENNGRLNVDTSNVFEDNLLDSSLGSPWARVSSHDGSSGFDSDQAESSPDASMTDIAPVLDEIDPLLRADSNHPDPVPNDDSDTDSHVSEDHQIDDDSNDEGDDIDAKDNVEGEKENDGKEAAFLWTADDEKNLMDLGYSEIERNRRLEILMARRRSWKNMAFEIDNNLIDVHSSGSGTSLDDLSRFRAQVPPIAVPRRNPFDLPYDSEEAAIPGSAPSILHARKNPFDLPLEQSNDSVVVHAHDILNSGEPATSRRDMIFRRHESFNFGRMDVIQEKRFSRLKPYFVPETVEWNASNFERQFNDKSESKMSSVTKSDIASSVADQEDHKDQDEKDLADVGSECSDGINSIDVELDHSDIDDREIALQQFVFERAQEREAHLVSTKGKGREEDYAPESAGSSTMPFHAVPDLLSWEDGDGHPWRENLILGIFQSTLILKLHQAQTQPYLVQTMQLRKVEMLIACHIQTMKCL

SEQ ID NO: 174831 - protein, 162 aa, Zea Mays
MAGKLFQGPNQKLPVMKKPISVKELADRVASYVHLCTLYWWLRPFGCGVILGGYDRDGPQLYMIEPSGVSYKYFGAALGKGRQAAKTEIEKLKLSELTCREGIVEVAKIIYAVHDEAKDKAFELELSWICEESKRQHQKVPNDLLEHAKAAAQTALEEMDAD

SEQ ID NO: 174832 - protein, 78 aa, Zea Mays
MRFGPVHFSLFAPVVCKLIQLTYTTPLAQSFPSSAYFLCHRLPLRPWFPKQARFHGDRRAEGAAQRPPLLHDHLGSGV

SEQ ID NO: 174833 - protein, 324 aa, Zea Mays
MLLLRRLVRAGRSWGTEARGLASGAPREAADAVVVGAGVVGLAAARALAMAGREVVVVEAAPSFGTGTSSRNSEVIHAGIYYPPRSLKADAENLGTTISYNTSVISGHVGSNGLELHVCESKELQNYHVGSHVNAQLVLLPKLVINSAGLSAVLLAKQFHGLDQEFVPTPHYARGCYFTLSQTKSPFSRLIYPLPEDGGIGVHVTLDLNGLVRFGPDVEWISDGGKDHVSCFLNKFDYSVNPNRCSVFYPVVRKYFPNLKDGSLEPGYSGIRPKLSGPGQPPSDFVIQGWDVHGVPGLVNLFGIESPGLTSSLAIAEHIVSKYL

SEQ ID NO: 174834 - protein, 387 aa, Zea Mays
MATQALAPSLRLLLLLPLLAAAAAAAALSHPAHEFCAVGGDASGCGGGGDGTRILIKGGTVVNAHLAEEADVYIEDGVVVAVRPDIPVDVDNVRVIDATGKYVMPGGIDPHTHLEMEFMGTVTIDDFFSGHAAALAGGTTMHIDFVIPVDGNLTAGLESYKHKAAKAAMDYGFHMAITKWNDEVAREMEVMVKEHGINSFKFFMAYKGSLMVTDDLLLQGLRKCKSLGALAMVHAENGDAVAEGQQRMIDLGITGPEGHALSRPPILEGEATARAIRLAKFINTPLYVVHVMSIDAMDEIAKAKREGQRVIGEPVVSGLVLDDSWLWDPDFTIASKYVMSPPIREAGHGKALQAALSSGILQVLITAHSTPHRKLLVLMIFGRFPMV

SEQ ID NO: 174835 - protein, 353 aa, Zea Mays
MATQALAPSLRLLLLLPLLAAAAAAAALSHPAHEFCAVGGDASGCGGGGDGTRILIKGGTVVNAHLAEEADVYIEDGVVVAVRPDIPVDVDNVRVIDATGKYVMPGGIDPHTHLEMEFMGTVTIDDFFSGHAAALAGGTTMHIDFVIPVDGNLTAGLESYKHKAAKAAMDYGFHMAITKWNDEVAREMEVMVKEHGINSFKFFMAYKGSLMVTDDLLLQGLRKCKSLGALAMVHAENGDAVAEGQQRMIDLGITGPEGHALSRPPILEGEATARAIRLAKFINTPLYVVHVMSIDAMDEIAKAKREGQRVIGEPVVSGLVLDDSWLWDPDFTIASKYVMSPPIREAGHESFWF

SEQ ID NO: 174836 - protein, 420 aa, Zea Mays
MAAAAGGTGGCGCHIVAVPFPGRGHVNAMMNLSRLLAARGAAVTFVVTEEWLGLIRSSSAAAAAEPAGIRIRTIPNVIPSEHGRAANHSGFLDAVATEMEAPFDRLLDGLEGPPPAALVADAYVPWVVGVGNRRGVPVWSLFPMSAAFFFAYYHFDRLPAWLTNSEHAPESGETIGNSDQRLGHYIAGQASSSIRLSDLEPLIHNKRTVKHILTTISSIRNAQSLLFTTMYELEASVIDSLSFVSVSASQLEEIALGLIASEVRFLWILREQSPRVQELFSGINNGMILPWCEQLEVLCHHSVGGFMTHCGMNSTLEGVFAGVPMLALPLFFDQPIDGRLIVEEWKIGLAVRDWASKGGLIGREDIARAVKKLMSSDETGTKALRERALELKEASRRAVNEGGSSYCNLSSLMETVCTPK

SEQ ID NO: 174837 - protein, 452 aa, Zea Mays
MATAAAARHVVAVPYPGRGHVNPMLVVCRLLAAADAALSVTVVVTEEWHALLAAAGVPGTLPDRVRLATIPNVIPSERVRGADFAGFVEAVHIKMVAPVERLLDRLSLERKPDAIVADTFLAWGVGVGSARGIPVCSLWTQPATFFLALWHLDRWPPVDGHQGEEGLSCRSLDQYLPFPALAPVKCSDMKTLRSMVLPMKRLAQVFSNLRKAQCVLFTSFYELETGAIDGTSQVVPCPIYAVGPSIPYMPLEGDSGEFHHEEDYFGWLDAQPRSSVLYVSFGTHVSMPSSQLEEVALGLHESTVRFFWVARDRASTATLEQISAGGKGLVVPWCDQLKVLCHPSVGGFLSHCGWNSTLEAVFAGVPMLAFPVAWDQLVIGHLVADEWKIGVDLRERRREDGVVGRAAICDTVTKLMDLTDDDSLEMRRRAAELREASRRAVQEVSGGQNCCS

SEQ ID NO: 174838 - protein, 54 aa, Zea Mays
MARKIRELQWHVLEEWKGCREATLAERTAPAGASAAAARETEATGAATGAGAIA

SEQ ID NO: 174839 - protein, 126 aa, Zea Mays
MTVSSLRSYLSLRVKSASTKCCWAPRCLRALACSSMIFTVRRSRRSPWALKACSSTGASQRSHGMCCAMERDAPILMPLWTIPLNSRPCSSSSPAASTNRFPKASRVMLLKATIERWFFTTNGFPA

SEQ ID NO: 174840 - protein, 261 aa, Zea Mays
MACSAHLVSQSLYSSHRASPGGPRNLRSQGRPPARASPSARPGSRVSGCRGVSLRVAASFEQGRRQVEVSYDPQARFNQIADQIDKDAGMTRLNLFSPCKINVFLRITGKRPDGFHDLASLFHVISLGDTIKFSLSPSKSRDRLSTNVPGVPVDESNLIIKALNLYRQKTGTNNFFWIHLDKKVPTGAGLGGGSSNAATALWAANQFAGCIASEKDLQEWSGEIGSDIPFFFSRGAAYCTDCPRYPKSLAGKFTNGSYKAT

SEQ ID NO: 174841 - protein, 411 aa, Zea Mays
MACSAHLVSQSLYSSHRASPGGPRNLRSQGRPPARASPSARPGSRVSGCRGVSLRVAASFEQGRRQVEVSYDPQARFNQIADQIDKDAGMTRLNLFSPCKINVFLRITGKRPDGFHDLASLFHVISLGDTIKFSLSPSKSRDRLSTNVPGVPVDESNLIIKALNLYRQKTGTNNFFWIHLDKKVPTGAGLGGGSSNAATALWAANQFAGCIASEKDLQEWSGEIGSDIPFFFSRGAAYCTGRGEIVQDIPNPLPENLPMVLIKPPEACSTAEVYKRFRLEQTSQADPMTLLEEITQNGISQDVCVNDLEPPAFEVLPSLKRLKKRIIAAGRDDYSAVFMSGSGSTIVGIGSPDPPAFVYDDEDYKDVFVSEACLLTRDENEWYREPISANATSGKEGFDQRLDMVGKNTTV

SEQ ID NO: 174842 - protein, 413 aa, Zea Mays
MACSAHLVSQSLYSSHRASPGGPRNLRSQGRPPARASPSARPGSRVSGCRGVSLRVAASFEQGRRQVEVSYDPQARFNQIADQIDKDAGMTRLNLFSPCKINVFLRITGKRPDGFHDLASLFHVISLGDTIKFSLSPSKSRDRLSTNVPGVPVDESNLIIKALNLYRQKTGTNNFFWIHLDKKVPTGAGLGGGSSNAATALWAANQFAGCIASEKDLQEWSGEIGSDIPFFFSRGAAYCTGRGEIVQDIPNPLPENLPMVLIKPPEACSTAEVYKRFRLEQTSQADPMTLLEEITQNGISQDVCVNDLEPPAFEVLPSLKRLKKRIIAAGRDDYSAVFMSGSGSTIVGIGSPDPPAFVYDDEDYKDVFVSEACLLTRDENEWYREPISANATSGKEDTGFDQRLDMVGKNTTV

SEQ ID NO: 174843 - protein, 315 aa, Zea Mays
MTRLNLFSPCKINVFLRITGKRPDGFHDLASLFHVISLGDTIKFSLSPSKSRDRLSTNVPGVPVDESNLIIKALNLYRQKTGTNNFFWIHLDKKVPTGAGLGGGSSNAATALWAANQFAGCIASEKDLQEWSGEIGSDIPFFFSRGAAYCTGRGEIVQDIPNPLPENLPMVLIKPPEACSTAEVYKRFRLEQTSQADPMTLLEEITQNGISQDVCVNDLEPPAFEVLPSLKRLKKRIIAAGRDDYSAVFMSGSGSTIVGIGSPDPPAFVYDDEDYKDVFVSEACLLTRDENEWYREPISANATSGKEGLQASVAD

SEQ ID NO: 174844 - protein, 328 aa, Zea Mays
MNKMSNRATHWCYACRRPIRLRGQDIACPNCNDGFIQEISEMGGILNTYGLIEPDFEERRARRFGMMDAMSSLMRQRMEEMGRDGLFDIRGRQGTGTEYGRRPTAVPTLVFGGIPSPGVDSGDVNVVLRGGRRVGAAQPNFSSLVVGPSLEALFEQLLLQNNRQGPAPAPQSAIDSMPVVKINRRHLDDDPQCAVCKDKFEVGAEAREMPCKHLYHTDCIIPWLVQHNSCPVCRHPLPSQRSGSTSSARPSAYYNEAADPPGVTRADLEPAPRDGGRESQERRRSFSFLWPFGPSSSRSSSYQYEQNVDEPAVYDPNQIAYSEWHYDH

SEQ ID NO: 174845 - protein, 50 aa, Zea Mays
MTNGLDYLQSYPLYAFFIVLLKRLSPLYLILLLLYTYQKPYIEIVAIHEQ

SEQ ID NO: 174846 - protein, 186 aa, Zea Mays
MLKEQTGKDDIDVGSIRMTLFNIFGDDASPKIKKFMKVMLGKFHQGQSGEQGSGGGGVFGMVGALAQEFLKAKLEGKEEEAFKPALEQEVHSVDEVYAGSKAWAPNNGILISGCQTNQTSADATTPQGVSFGALSNAIQTILADKHGKVTNKDLVMKARELLSKQGYTQQPGLYCSDEHVHVAFIC

SEQ ID NO: 174847 - protein, 59 aa, Zea Mays
MVDARCRRRRCSLPRRARRSYPPRRSSSAGVDRDSFPNLEESRIKRWRPSDLALRVLQD

SEQ ID NO: 174848 - protein, 271 aa, Zea Mays
MQVSLTRRSQRQRPHRRGKVAAPFGAARSHSRTRTTFSRAPPHQAGRQVPVRRQCSPSLHLVLVAKTKHHARCCNPTSPPSSRSQMDPTLRAVLSRGGGGSGGARGGGGGGAHYRGVRKRPWGRYATEIRDPWKKTRVWLGTFDTPVEAALAYDCAARTLRGAKAKTNFPADHAAQAQQQRQRLRLAPLLRQPPPRHVSFGGVDVHVDCPTPWHSVCLQTTQTAAAAAAPLPTTAPMPLASEPPSTALALELGTGRSRAGLPFDLNEAPSC

SEQ ID NO: 174849 - protein, 70 aa, Zea Mays
MAEAEKATAEAAKRAAVTLRSDHLLNETCDEEDVDTFSECDTVMIMRRRPFGINHSLQLSLITVRSGAST

SEQ ID NO: 174850 - protein, 50 aa, Zea Mays
MGTSYRSAACCCAYISLSRGPSCMWEAWRSSLQMRLTSLLTISSFRLFSC

SEQ ID NO: 174851 - protein, 54 aa, Zea Mays
MGTSYRSAACCCAYISLSRGPSCMWEAWRSSLQMRGRSLQTGAKDVSAGQEKMV

SEQ ID NO: 174852 - protein, 645 aa, Zea Mays
MLDNGNFILRSITNQAKIIWQSFDSPTDTWFPGINITLGAKLLTSWKSYDDPAVGDYSFGPGITNASQLIIWWKGIQFWTSLRWNGDTNSLIPELTSLGIIPVLFQCDNLTCTYTANPRDTMTKIVLDPNGSLNIAQFSPVTESWTLLWRQPPSCEVSNICGVFGICNNNMSPICHCPLGFEQQAGDTRKGCTRQIQLQCNGDRFVNMSNMRFPDSRVKLSVMGDGKCQLECMKNCSCTAYTYSVLDGCSLWYGNLTNMQDGYKSGAGTLYLRVANSSGHKLLWIAGVLPSIGFLIFCLILFIWISRSKNKGKGKQDGHHSIMTSDAIKLWEENMLGEGGFGPVYKGHLPDGQEIAVKRLAANSGQGLTEFKNEVLLIAKLQHSNLVRLLGCCIEEEEMLLVYEYMPNKSLDFFLFEKSRRALLDWEMRMNIIEGVAQGLIYLHKHSRLRVIHRDLKASNILLDTDMNPKISDFGMARIFDPKGTQANTKRVVGTYGYMAPEYAMAGNFSTKSDVFSYGVLLLEIISGMRNAGPRRHGNSVSLLGYAWELWNEGRCHELIDKPLRGRCPENVALRCIHVSLLCVQEQAADRPSMTEVISMITNGSATLPDPKQPGFLSMLVPNETDVAEETCSLNGLSVTILDGR

SEQ ID NO: 174853 - protein, 444 aa, Zea Mays
MFIPKVLPAGTPHHAFSLPTPNAAIAGTISLIWENSERYISLIWENSESLWYGNLTNMQDGYKSGAGTLYLRVANSSGHKLLWIAGVLPSIGFLIFCLILFIWISRSKNKGKGKQDGHHSIMTSDAIKLWEENMLGEGGFGPVYKGHLPDGQEIAVKRLAANSGQGLTEFKNEVLLIAKLQHSNLVRLLGCCIEEEEMLLVYEYMPNKSLDFFLFEKSRRALLDWEMRMNIIEGVAQGLIYLHKHSRLRVIHRDLKASNILLDTDMNPKISDFGMARIFDPKGTQANTKRVVGTYGYMAPEYAMAGNFSTKSDVFSYGVLLLEIISGMRNAGPRRHGNSVSLLGYAWELWNEGRCHELIDKPLRGRCPENVALRCIHVSLLCVQEQAADRPSMTEVISMITNGSATLPDPKQPGFLSMLVPNETDVAEETCSLNGLSVTILDGR

SEQ ID NO: 174854 - protein, 323 aa, Zea Mays
MTSDAIKLWEENMLGEGGFGPVYKGHLPDGQEIAVKRLAANSGQGLTEFKNEVLLIAKLQHSNLVRLLGCCIEEEEMLLVYEYMPNKSLDFFLFEKSRRALLDWEMRMNIIEGVAQGLIYLHKHSRLRVIHRDLKASNILLDTDMNPKISDFGMARIFDPKGTQANTKRVVGTYGYMAPEYAMAGNFSTKSDVFSYGVLLLEIISGMRNAGPRRHGNSVSLLGYAWELWNEGRCHELIDKPLRGRCPENVALRCIHVSLLCVQEQAADRPSMTEVISMITNGSATLPDPKQPGFLSMLVPNETDVAEETCSLNGLSVTILDGR

SEQ ID NO: 174855 - protein, 577 aa, Zea Mays
MFGKISFCRECTLVNLLILSVIASRCLSAPTERLGSIFQNQSILDGQTLVSMSRIFVLGFFSPGASSKRYVGIWHNDVSERRVVWVANRNDPLQDTSGILKFDNSSNLIVLDGRGNSFTVAYGRGVQDVEAAMLDNGNFILRSITNQAKIIWQSFDSPTDTWFPGINITLGAKLLTSWKSYDDPAVGDYSFGPGITNASQLIIWWKGIQFWTSLRWNGDTNSLIPELTSLGIIPVLFQCDNLTCTYTANPRDTMTKIVLDPNGSLNIAQFSPVTESWTLLWRQPPSCEVSNICGVFGICNNNMSPICHCPLGFEQQAGDTRKGCTRQIQLQCNGDRFVNMSNMRFPDSRVKLSVMGDGKCQLECMKNCSCTAYTYSVLDGCSLWYGNLTNMQDGYKSGAGTLYLRVANSSGHKLLWIAGVLPSIGFLIFCLILFIWISRSKNKGKGKQDGHHSIMTSDAIKLWEGEKTSTYFAVFSFSQIRNGTDKFSTENMLGEGGFGPVYKGHLPDGQEIAVKRLAANSGQGLTEFKNEVLLIAKLQHSNLVRLLGCCIEEEEMLLVYEYMPNKSLDFFLFEELC

SEQ ID NO: 174856 - protein, 218 aa, Zea Mays
MRMNIIEGVAQGLIYLHKHSRLRVIHRDLKASNILLDTDMNPKISDFGMARIFDPKGTQANTKRVVGTYGYMAPEYAMAGNFSTKSDVFSYGVLLLEIISGMRNAGPRRHGNSVSLLGYAWELWNEGRCHELIDKPLRGRCPENVALRCIHVSLLCVQEQAADRPSMTEVISMITNGSATLPDPKQPGFLSMLVPNETDVAEETCSLNGLSVTILDGR

SEQ ID NO: 174857 - protein, 247 aa, Zea Mays
MLLVYEYMPNKSLDFFLFEKSRRALLDWEMRMNIIEGVAQGLIYLHKHSRLRVIHRDLKASNILLDTDMNPKISDFGMARIFDPKGTQANTKRVVGTYGYMAPEYAMAGNFSTKSDVFSYGVLLLEIISGMRNAGPRRHGNSVSLLGYAWELWNEGRCHELIDKPLRGRCPENVALRCIHVSLLCVQEQAADRPSMTEVISMITNGSATLPDPKQPGFLSMLVPNETDVAEETCSLNGLSVTILDGR

SEQ ID NO: 174858 - protein, 387 aa, Zea Mays
MQDGYKSGAGTLYLRVANSSGHKLLWIAGVLPSIGFLIFCLILFIWISRSKNKGKGKQDGHHSIMTSDAIKLWEENMLGEGGFGPVYKGHLPDGQEIAVKRLAANSGQGLTEFKNEVLLIAKLQHSNLVRLLGCCIEEEEMLLVYEYMPNKSLDFFLFEKSRRALLDWEMRMNIIEGVAQGLIYLHKHSRLRVIHRDLKASNILLDTDMNPKISDFGMARIFDPKGTQANTKRVVGTYGYMAPEYAMAGNFSTKSDVFSYGVLLLEIISGMRNAGPRRHGNSVSLLGYAWELWNEGRCHELIDKPLRGRCPENVALRCIHVSLLCVQEQAADRPSMTEVISMITNGSATLPDPKQPGFLSMLVPNETDVAEETCSLNGLSVTILDGR

SEQ ID NO: 174859 - protein, 534 aa, Zea Mays
MFGKISFCRECTLVNLLILSVIASRCLSAPTERLGSIFQNQSILDGQTLVSMSRIFVLGFFSPGASSKRYVGIWHNDVSERRVVWVANRNDPLQDTSGILKFDNSSNLIVLDGRGNSFTVAYGRGVQDVEAAMLDNGNFILRSITNQAKIIWQSFDSPTDTWFPGINITLGAKLLTSWKSYDDPAVGDYSFGPGITNASQLIIWWKGIQFWTSLRWNGDTNSLIPELTSLGIIPVLFQCDNLTCTYTANPRDTMTKIVLDPNGSLNIAQFSPVTESWTLLWRQPPSCEVSNICGVFGICNNNMSPICHCPLGFEQQAGDTRKGCTRQIQLQCNGDRFVNMSNMRFPDSRVKLSVMGDGKCQLECMKNCSCTAYTYSVLDGCSLWYGNLTNMQDGYKSGAGTLYLRVANSSGKGKQDGHHSIMTSDAIKLWEGEKTSTYFAVFSFSQIRNGTDKFSTENMLGEGGFGPVYKGHLPDGQEIAVKRLAANSGQGLTEFKNEVLLIAKLQHSNLVRLLGCCIEEEEMLLVYEYMPNKS

SEQ ID NO: 174860 - protein, 124 aa, Zea Mays
MGPMAKLDTSYMSIMQEDEFHKLADETIHDLLETLEEYGDSIQMDGFDIDYGVLTLRLGDLGTYVVNKQSPNRQIWLSSPVSGPSRFDWDAATNGWIYKRTGSNLVQLLEKEIGELCGTPVQLS

SEQ ID NO: 174861 - protein, 112 aa, Zea Mays
MQEDEFHKLADETIHDLLETLEEYGDSIQMDGFDIDYGNQVLTLRLGDLGTYVVNKQSPNRQIWLSSPVSGPSRFDWDAATNGWIYKRTGSNLVQLLEKEIGELCGTPVQLS

SEQ ID NO: 174862 - protein, 60 aa, Zea Mays
MLALMKINGNVQHCYHILWICLWHTSKCMQRMRQVRRCNWITRRIFWALHSHDNVPAEFL

SEQ ID NO: 174863 - protein, 64 aa, Zea Mays
MPALLPSSLTLSPFLKPPSPTRSPTASPQPPPRVPSHPTRPPIPAASASAASLPVRTSPVSRTS

SEQ ID NO: 174864 - protein, 180 aa, Zea Mays
MRQRQTGRVADALSLLDDMLLCGYQPNVVRYIVLQEAMCKNSGFEQAMAVLDELLAKGCTPNIVMYNVITNDVFREGCVDDAREILNRLSSYGYGFQTNTVSYTTLLKGLCASKRWDDILEFFVEMMEKNCMPNEVTFDMLIIFFCRVGSYGCNPDTISYTTVLKGWCHAERWNDANELL

SEQ ID NO: 174865 - protein, 185 aa, Zea Mays
MPIIHHDISNEIPIHLQRMQYLAFSSLLGLTACLFWNIIATTAAWIKSEGVMIWLLAIIYFISGVPGAYVLWYRPLYNAMRTESALKFGWFFLFYLLHILFCVWSAVAPPFPFKGKSLAGILPAIDIIGRSAIVGIFYFIGFGMFCLESLLSIVVIQQVYMYFRGSGKAAEMKREAARGAMRNAF

SEQ ID NO: 174866 - protein, 174 aa, Zea Mays
MLRECLISSSMRLGVPFIAPRQLGAVESIPGRQFLPSVAWRTGQSGASPDTVRCIFLSFFGEANHWRFRVVGASDTVRCTPDSPVPPSDRWLCHASRADYAADCWLTGQSGAPPDSPVIYSRTPPTKPESSQFARASLAHRTLSGAPPDSPVHPDCAESWLLSQVFSKLVFSCF

SEQ ID NO: 174867 - protein, 199 aa, Zea Mays
MSPSEYLIKRVIMLENDLKCYYQTEGLNQKNENSSVIQYIQVHQDDAILNIKLELFSLIAKQPAFNQLRTVEQLGYITSLSLRSDYGVLALQVVIQSTVKDPSYLDVRVDEFFKMFESKIYELSDKDFKRNVKSLIDSKLEKFKNLWEESHFYWGEIEAGTLKFDRVESEVSVLLSATMRVKEIVSSIKQADCSLLVNR

SEQ ID NO: 174868 - protein, 769 aa, Zea Mays
MAGGCISFNFILFSSQLQKHFASKDHPYHKFSTGSWETLETKPKARGLDIRLELLKFYKNYSANVMHLVVYGKENLDCIQGLVERMFSDIKNTDQRSLKCPSHPLSEEHLQLLVKALPIVEGDYLRIIWPITPSIQFYKEAPCHYLSHLIGHEGEGSIFHIIKELGWAMNLMAGECSDSNEYSFFSVSMRLTDAGHERMEDIVGLIFKYLHLLKEDGVHEWIFNELAAINEMEFHYQDKVRPINYVMRTVSTMRLFPPEEWLVGAALPSKYASQRINMILNQLIPETVRIFWESKKFEGSTSSAEPWYNTPFSVENVTPSVIQEWIEKAPTEKLHLPKPNIFIPKDLSLKEVHEKVTFPTVLRKSPLSQLWYKPDMLFSTPKVHIIIDFHCPLSSHSPEAVVATELFVDLLVDYLNAYAYDAQIAGLFYSIYVTSAGFQVSLGGYNDKMRVLLNAILVQIVKFEVKPNRFSALKETSVKDYQNFNFRQPYSQASYYVSLILGDKKWPVAEKLEALSKLESDYFAKFVPHLLSKTFLECYVQGNIEPSEAKSIVEEIENTIFTTPNSLFKSMSPSEYLIKRVIMLENDLKCYYQTEGLNQKNENSSVIQYIQVHQDDAILNIKLELFSLIAKQPAFNQLRTVEQLGYITSLSLRSDYGVLALQVVIQSTVKDPSYLDVRVDEFFKMFESKIYELSDKDFKRNVKSLIDSKLEKFKNLWEESHFYWGEIEAGTLKFDRVESEVSVLLSATMRVKEIVSSIKQADCSLLVNR

SEQ ID NO: 174869 - protein, 476 aa, Zea Mays
MAAAAVAAAGSSNVEFIRARSDKREYRRVVLANALEILLISDPDTDKAAACMEVEVGSFSDPEGLEGLAHFLEHMLFYASEKYPGEHEYTKYIIEHGGSYNAYTSSETTNFFFDVNVDNFEEALDRFAQFFIKPLMSQDAVLREIKAVDSEHKKNLLSDGWRMYQLQKHFASKDHPYHKFSTGSWETLETKPKARGLDIRLELLKFYKNYSANVMHLVVYGKENLDCIQGLVERMFSDIKNTDQRSLKCPSHPLSEEHLQLLVKALPIVEGDYLRIIWPITPSIQFYKEAPCHYLSHLIGHEGEGSIFHIIKELGWAMNLMAGECSDSNEYSFFSVSMRLTDAGHERMEDIVGLIFKYLHLLKEDGVHEWIFNELAAINEMEFHYQDKVRPINYVMRTVSTMRLFPPEEWLVGAALPSKYASQRINMILNQLIPETVRNGLKKLLLKNSIFQNLIFSYQRIYLLKKCMKRLLFQQC

SEQ ID NO: 174870 - protein, 525 aa, Zea Mays
MAAAAVAAAGSSNVEFIRARSDKREYRRVVLANALEILLISDPDTDKAAACMEVEVGSFSDPEGLEGLAHFLEHMLFYASEKYPGEHEYTKYIIEHGGSYNAYTSSETTNFFFDVNVDNFEEALDRFAQFFIKPLMSQDAVLREIKAVDSEHKKNLLSDGWRMYQLQKHFASKDHPYHKFSTGSWETLETKPKARGLDIRLELLKFYKNYSANVMHLVVYGKENLDCIQGLVERMFSDIKNTDQRSLKCPSHPLSEEHLQLLVKALPIVEGDYLRIIWPITPSIQFYKEAPCHYLSHLIGHEGEGSIFHIIKELGWAMNLMAGECSDSNEYSFFSVSMRLTDAGHERMEDIVGLIFKYLHLLKEDGVHEWIFNELAAINEMEFHYQDKVRPINYVMRTVSTMREWIEKAPTEKLHLPKPNIFIPKDLSLKEVHEKVTFPTVLRKSPLSQLWYKPDMLFSTPKVHIIIDFHCPLSSHSPEAVVATELFVDLLVDYLNAYAYDAQIAGLFYSIYVTSAGFQVVTMTR

SEQ ID NO: 174871 - protein, 942 aa, Zea Mays
MAAAAVAAAGSSNVEFIRARSDKREYRRVVLANALEILLISDPDTDKAAACMEVEVGSFSDPEGLEGLAHFLEHMLFYASEKYPGEHEYTKYIIEHGGSYNAYTSSETTNFFFDVNVDNFEEALDRFAQFFIKPLMSQDAVLREIKAVDSEHKKNLLSDGWRMYQLQKHFASKDHPYHKFSTGSWETLETKPKARGLDIRLELLKFYKNYSANVMHLVVYGKENLDCIQGLVERMFSDIKNTDQRSLKCPSHPLSEEHLQLLVKALPIVEGDYLRIIWPITPSIQFYKEAPCHYLSHLIGHEGEGSIFHIIKELERMEDIVGLIFKYLHLLKEDGVHEWIFNELAAINEMEFHYQDKVRPINYVMRTVSTMRLFPPEEWLVGAALPSKYASQRINMILNQLIPETVRIFWESKKFEGSTSSAEPWYNTPFSVENVTPSVIQEWIEKAPTEKLHLPKPNIFIPKDLSLKEVHEKVTFPTVLRKSPLSQLWYKPDMLFSTPKVHIIIDFHCPLSSHSPEAVVATELFVDLLVDYLNAYAYDAQIAGLFYSIYVTSAGFQVSLGGYNDKMRVLLNAILVQIVKFEVKPNRFSALKETSVKDYQNFNFRQPYSQASYYVSLILGDKKWPVAEKLEALSKLESDYFAKFVPHLLSKTFLECYVQGNIEPSEAKSIVEEIENTIFTTPNSLFKSMSPSEYLIKRVIMLENDLKCYYQTEGLNQKNENSSVIQYIQVHQDDAILNIKLELFSLIAKQPAFNQLRTVEQLGYITSLSLRSDYGVLALQVVIQSTVKDPSYLDVRVDEFFKMFESKIYELSDKDFKRNVKSLIDSKLEKFKNLWEESHFYWGEIEAGTLKFDRVESEVAMLRELKKEEFIEYFNQYIKVDAPQRRTLSVQVFGGNHLVEFKKAINEANPPKMYRITDIFGFKRSRPLYSSLKGGPGRITMD

SEQ ID NO: 174872 - protein, 570 aa, Zea Mays
MAAAAVAAAGSSNVEFIRARSDKREYRRVVLANALEILLISDPDTDKAAACMEVEVGSFSDPEGLEGLAHFLEHMLFYASEKYPGEHEYTKYIIEHGGSYNAYTSSETTNFFFDVNVDNFEEALDRFAQFFIKPLMSQDAVLREIKAVDSEHKKNLLSDGWRMYQLQKHFASKDHPYHKFSTGSWETLETKPKARGLDIRLELLKFYKNYSANVMHLVVYGKENLDCIQGLVERMFSDIKNTDQRSLKCPSHPLSEEHLQLLVKALPIVEGDYLRIIWPITPSIQFYKEAPCHYLSHLIGHEGEGSIFHIIKELGWAMNLMAGECSDSNEYSFFSVSMRLTDAGHERMEDIVGLIFKYLHLLKEDGVHEWIFNELAAINEMEFHYQDKVRPINYVMRTVSTMRLFPPEEWLVGAALPSKYASQRINMILNQLIPETVRIFWESKKFEGSTSSAEPWYNTPFSVENVTPSVIQEWIEKAPTEKLHLPKPNIFIPKDLSLKEVHEKVTFPTVLRKSPLSQLCHSPEAVVATELFVDLLVDYLNAYAYDAQIAGLFYSIYVTSAGFQVVTMTR

SEQ ID NO: 174873 - protein, 594 aa, Zea Mays
MAAAAVAAAGSSNVEFIRARSDKREYRRVVLANALEILLISDPDTDKAAACMEVEVGSFSDPEGLEGLAHFLEHMLFYASEKYPGEHEYTKYIIEHGGSYNAYTSSETTNFFFDVNVDNFEEALDRFAQFFIKPLMSQDAVLREIKAVDSEHKKNLLSDGWRMYQLQKHFASKDHPYHKFSTGSWETLETKPKARGLDIRLELLKFYKNYSANVMHLVVYGKENLDCIQGLVERMFSDIKNTDQRSLKCPSHPLSEEHLQLLVKALPIVEGDYLRIIWPITPSIQFYKEAPCHYLSHLIGHEGEGSIFHIIKELGWAMNLMAGECSDSNEYSFFSVSMRLTDAGHERMEDIVGLIFKYLHLLKEDGVHEWIFNELAAINEMEFHYQDKVRPINYVMRTVSTMRLFPPEEWLVGAALPSKYASQRINMILNQLIPETVRIFWESKKFEGSTSSAEPWYNTPFSVENVTPSVIQEWIEKAPTEKLHLPKPNIFIPKDLSLKEVHEKVTFPTVLRKSPLSQLWYKPDMLFSTPKVHIIIDFHCPLSSHSPEAVVATELFVDLLVDYLNAYAYDAQIAGLFYSIYVTSAGFQVVTMTR

SEQ ID NO: 174874 - protein, 949 aa, Zea Mays
MAAAAVAAAGSSNVEFIRARSDKREYRRVVLANALEILLISDPDTDKAAACMEVEVGSFSDPEGLEGLAHFLEHMLFYASEKYPGEHEYTKYIIEHGGSYNAYTSSETTNFFFDVNVDNFEEALDRFAQFFIKPLMSQDAVLREIKAVDSEHKKNLLSDGWRMYQLQKHFASKDHPYHKFSTGSWETLETKPKARGLDIRLELLKFYKNYSANVMHLVVYGKENLDCIQGLVERMFSDIKNTDQRSLKCPSHPLSEEHLQLLVKALPIVEGDYLRIIWPITPSIQFYKEAPCHYLSHLIGHEGEGSIFHIIKELGWAMNLMAGECSDSNEYSFFSVSMRLTDAGHERMEDIVGLIFKYLHLLKEDGVHEWIFNELAAINEMEFHYQDKVRPINYVMRTVSTMRLFPPEEWLVGAALPSKYASQRINMILNQLIPETVRIFWESKKFEGSTSSAEPWYNTPFSVENVTPSVIQEWIEKAPTEKLHLPKPNIFIPKDLSLKEVHEKVTFPTVLRKSPLSQLCHSPEAVVATELFVDLLVDYLNAYAYDAQIAGLFYSIYVTSAGFQVSLGGYNDKMRVLLNAILVQIVKFEVKPNRFSALKETSVKDYQNFNFRQPYSQASYYVSLILGDKKWPVAEKLEALSKLESDYFAKFVPHLLSKTFLECYVQGNIEPSEAKSIVEEIENTIFTTPNSLFKSMSPSEYLIKRVIMLENDLKCYYQTEGLNQKNENSSVIQYIQVHQDDAILNIKLELFSLIAKQPAFNQLRTVEQLGYITSLSLRSDYGVLALQVVIQSTVKDPSYLDVRVDEFFKMFESKIYELSDKDFKRNVKSLIDSKLEKFKNLWEESHFYWGEIEAGTLKFDRVESEVAMLRELKKEEFIEYFNQYIKVDAPQRRTLSVQVFGGNHLVEFKKAINEANPPKMYRITDIFGFKRSRPLYSSLKGGPGRITMD

SEQ ID NO: 174875 - protein, 291 aa, Zea Mays
MVCIRRFVACSSLVFVLISGIWIVIFITHKNPCCSILYSILALFLSTNVVWMSCMQHVQEFLNYAKFVSWWVSLGVASSIGLGSGLHTFVLYLGPHIALFTIKAVQCGRIDLKIAPYDTIQLKVGPSWLDKKCSEFGPPVYPASAHSVRIPVFDLLPQIQLEAVLWGIGTALARLSGSESKAVQELDAATSKEDGPVASSLNRTKRWLLSHSQHLNFFSILILASVGLLSSILCYQVLQCGYFTPVIYDIWLCVFTIDLFCTFGSCASFSSTFKSCLDKMTPTNKRSKSTL

SEQ ID NO: 174876 - protein, 504 aa, Zea Mays
MSNTNIIKIGPYIELFCSDYVDEPHVSTTTMRSSGEVPQDHSATEENPKTIDSIVERRPSLSSQISITLRSSGEVLQDHSATEENPKTSESIVERRPSLSSQISITLRSSGEVLQDHSATEENSKTSESIVERRPSLSSQISMNEAYRLAIGNKGSLTSPTLTDVILGKDSTSSINEELRLLLSQISASRGLEAPWADPGPSPRAYGRGDELVVQNITNRLSLERNASGLESLDGSIVSEMEGESTIDRLRRQIDLDRKSIHLLCRELEEERNASAIAASQALAMITKLQDEKAAMQMEASHYQRMMEEQAEYDSEAVAKANELLTEREQLIEELEVELENYRRQYGGGSTQRRGNRVAFKQENRDTTMLDGGGLEDPLINTQQGINSLVGLEEERAYIATGLRKLEQKLQFYSNNSVSVELPSPDVKDDLSDKVYVTEDFSLHCQESSMESKEAGSSTTSGEVDLVAVQEEIAKLNRRLKTLEGDRSFLEHSINSLRNGDEVM

SEQ ID NO: 174877 - protein, 947 aa, Zea Mays
MGTRMPIFPRLSSALSTALLEWILMLLLFIDAVYSFLVTRFARLCRLPAPCPFCSRLDHFLGNEKPCFYRDLICKTHKSEISSLAFCSLHQKLAGARNMCEGCCGEVAGDDKTDETDSNQRIGDAFNSPREKVCSCCGQHFKRRSVALSSRETAELEPTRAFGSPKTYTEYSVVCQVDEPLEPKDIYHQSDYRSNEPDGLLQMTSDSETEVPCAIDVRSSQSREADVKGEDLQEDPACEQPVLPSPVVIKKSEIVVRKEPSVEDTCITSSACPAVDDHPNSGGGVDQMEEKESLSRKWAPQHDPVLVIENSGLQDAGISQIMPSDELPQVSGETEPSQSTNEGNTDPYKSQFTILEEHYAVSEEGNIKCILEQFDVTEITSRSGGEFRQRSASAADSHTNALVLENTHHGASEDAEQKGAGSKTSGEVEDYTKKIEPTGDMGEHELVVQDPSGSAPKDLIVKDYVDEPHVSTTTMRSSGEVPQDHSATEENPKTIDSIVERRPSLSSQISITLRSSGEVLQDHSATEENPKTSEILQDHSATEENSKTSESIVERRPSLSSQISMNEAYRLAIGNKGSLTSPTLTDVILGKDSTSSINEELRLLLSQISASRGLEAPWADPGPSPRAYGRGDELVVQNITNRLSLERNASGLESLDGSIVSEMEGESTIDRLRRQIDLDRKSIHLLCRELEEERNASAIAASQALAMITKLQDEKAAMQMEASHYQRMMEEQAEYDSEAVAKANELLTEREQLIEELEVELENYRRQYGGGSTQRRGNRVAFKQENRDTTMLDGGGLEDPLINTQQGINSLVGLEEERAYIATGLRKLEQKLQFYSNNSVSVELPSPDVKDDLSDKVYVTEDFSLHCQESSMESKEAGSSTTSGEVDLVAVQEEIAKLNRRLKTLEGDRSFLEHSINSLRNGDEGLMFIQEIACNLRELRAIAIGKK

SEQ ID NO: 174878 - protein, 530 aa, Zea Mays
MSTQLCSGPSPEPKDVHPFIDAAMLQDSSIVASVVQKLLLNFVTRPKLPLNASHPVFSDDARPGVLQRVGSAAANVVLLPYYTFNYLVSSTPEGATSQLADNSLLVLLIMIHYRKCFSTNESIPTNNVYTMDSNTNDKDAPVFHDNPYCKALNSAKDIQYDRADVEGNAQNGPVVRLSFALLFDALGRFLNDEIPVLLLYSLVHGNCDFQEYVLVRTDLDTLLMPILETLYNASRKTSNQIYMLLIILLILSQDSTFNASVHKLVLPGVPWYHERLMHQTSMGSLMVVILIQTIKYNLSKLRDVYLHTNCLAILANMAPHVHRLSAYASQRLVSLFDMLSRKYAKLAELKNDKSLKVISDQMEADNIADDMSTELHIYTDFLRIVLEIINAILTYALPRNPEVVYAVLHRQEVFEPFKNHPRFNELLENIYTVLDFFNSRMDMQQLDGEWSVDKVLEVINKTCRSWRGEGMKMFTQLRFTYEQESHPEEFFIPYAWRLVLSRGFSFNPSAINLFPVEIHLEDAPAGEQKV

SEQ ID NO: 174879 - protein, 307 aa, Zea Mays
MCILSLMQLCFSSIVASVVQKLLLNFVTRPKLPLNASHPVFSDDARPGVLQRVGSAAANVVLLPYYTFNYLVSSTPEGATSQLADNSLLVLLIMIHYRKCFSTNESIPTNNVYTMDSNTNDKDAPVFHDNPYCKALNSAKDIQYDRADVEGNAQNGPVVRLSFALLFDALGRFLNDEIPVLLLYSLVHGNCDFQEYVLVRTDLDTLLMPILETLYNASRKTSNQIYMLLIILLILSQDSTFNASVHKLVLPGVPWYHERLMHQTSMGSLMVVILIQTIKYNLSKLRVGCLPSHKLSCNFSKYGSACA

SEQ ID NO: 174880 - protein, 514 aa, Zea Mays
MCILSLMQLCFSSIVASVVQKLLLNFVTRPKLPLNASHPVFSDDARPGVLQRVGSAAANVVLLPYYTFNYLVSSTPEGATSQLADNSLLVLLIMIHYRKCFSTNESIPTNNVYTMDSNTNDKDAPVFHDNPYCKALNSAKDIQYDRADVEGNAQNGPVVRLSFALLFDALGRFLNDEIPVLLLYSLVHGNCDFQEYVLVRTDLDTLLMPILETLYNASRKTSNQIYMLLIILLILSQDSTFNASVHKLVLPGVPWYHERLMHQTSMGSLMVVILIQTIKYNLSKLRDVYLHTNCLAILANMAPHVHRLSAYASQRLVSLFDMLSRKYAKLAELKNDKSLKVISDQMEADNIADDMSTELHIYTDFLRIVLEIINAILTYALPRNPEVVYAVLHRQEVFEPFKNHPRFNELLENIYTVLDFFNSRMDMQQLDGEWSVDKVLEVINKTCRSWRGEGMKMFTQLRFTYEQESHPEEFFIPYAWRLVLSRGFSFNPSAINLFPVEIHLEDAPAGEQKV

SEQ ID NO: 174881 - protein, 564 aa, Zea Mays
MGAAPSTPRLGAAGAAPSPSAAEQMFTALVGEKAYPISSEFWKQLLELPLTLQWPRDRVLQACHAFAENNYQTKHLAKILIHLVWCLQECTSTTSVSSVVYRRAINAAYISSIFLKFIIENAKTDSWQELCLVIDRSEKGLENFPAENTVEYFLIRGVLEYIGSVGVSPESCYLHHELLNLMLVLMSTQLCSGPSPEPKDVHPFIDAAMLQDSSIVASVVQKLLLNFVTRPKLPLNASHPVFSDDARPGVLQRVGSAAANVVLLPYYTFNYLVSSTPEGATSQLADNSLLVLLIMIHYRKCFSTNESIPTNNVYTMDSNTNDKDAPVFHDNPYCKALNSAKDIQYDRADVEGNAQNGPVVRLSFALLFDALGRFLNDEIPVLLLYSLVHGNCDFQEYVLVRTDLDTLLMPILETLYNASRKTSNQIYMLLIILLILSQDSTFNASVHKLVLPGVPWYHERLMHQTSMGSLMVVILIQTIKYNLSKLRDVYLHTNCLAILANMAPHVHRLSAYASQRLVSLFDMLSRKYAKLAELKNDKSLKVISDQMEADNIADDMSFTYIQIS

SEQ ID NO: 174882 - protein, 405 aa, Zea Mays
MVLAQLGGSISRALAQMSNATVIDEKVLNDCLNEISRALLQADVQFKMVRDMQANIKRIVNLEALAAGTNKRRIMQQAVFTELCNMLDPGKPSFTPKKGKPSVVMFVGLQGSGKTTTCSKYAYYHQKKGFKPALVCADTFRAGAFDQLKQNATKAKIPFYGSYMESDPVKIAVEGVERFKKENCDLIIVDTSGRHKQEAALFEEMRQVSEATKPDLVIFVMDSSIGQAAFDQAQAFKQSVSVGAVIITKMDGHAKGGGALSAVAATKSPVIFIGTGEHIDDFEVFDVKPFVSRLLGMGDWSGFMDKIHEVIPTDQQPDLLQKLSEGSFSLRLMYEQFQNLLKMGPIGQVFSMLPGFSAELMPKGHEKESQAKIKRYMTMMDSMTDAGMSWTCWKSTSDLLKSGAR

SEQ ID NO: 174883 - protein, 120 aa, Zea Mays
MGNVEGCCIGNATLCAAASETSKVSISILMKRCEVILGQFLADENDLGEHPLPSVRVEETICVLQELARLIIDIDAANTLNIPPYLKQALGENKSHGRAHLLSLLPTFSELVVSRNRDGQ

SEQ ID NO: 174884 - protein, 755 aa, Zea Mays
MDQRDSIILTLKNVQALRTLFNVAHRLHNVLGPSWVLVLETLSALDRAIHSPHASTQEVSASVSKLSRDTSGQYSDFHILSSLNSQLFESSALMNIAAVKSLLSALHQLSSQHISGSSQLSVQQIGSISFSVERMTTILANNLHRVEPIWDQIAAHHLELANCSNPQLCNMALNSLDQSICLVAGSEKFQGISAAPHQFPESHLVKESETVSFEYAVLSPLMILYSSNKNVDVQMGALKILLHVLERHGEKLSYSWPSILHMLRMVTDASEKDLISLGFQSIRVIMNEGLATIPVQCLDECILVTGAYGTQKTDINISLTSVGLLWTATDFIVKGLVSKPIEQASHMNDDVQSCEMTEEANSKQVPPKLVDYSILFFSVFSVLQKLGSDDRPEVRNSAVRTLFQTLSIHGQKLSKSMWEDCLWLYVFPMLEHVSHLASTSSRDEWQGKELGTRAGKAVHMLIHHSRNTAQKQWDETIVLVLGGIARLLRSFFSYLQQLRKFSSGWVLLLSFIKNSILNGSKEVAIAAINCLQTFVGANCPKGNLESSYVKSVLDIYELVLQTSSNFKNDSTDKVKQEVLRGLGDLYVQAQSLFTGDMYLRLMAIMHLMIKTTLNPTDYDSELGSIPAVQRGILEIIPMLRPTVVLSPMWTHLLLELLCYLNGHEGPLQKNNEQTPDHNSQALVDGAKHALVERSNLNGGGTKLDMVGSGWGILFVEKLVPIIANLFLEAPPNERFSVSPEVIQGLGRYLLFMIYI

SEQ ID NO: 174885 - protein, 662 aa, Zea Mays
MNIAAVKSLLSALHQLSSQHISGSSQLSVQQIGSISFSVERMTTILANNLHRVEPIWDQIAAHHLELANCSNPQLCNMALNSLDQSICLVAGSEKFQGISAAPHQFPESHLVKESETVSFEYAVLSPLMILYSSNKNVDVQMGALKILLHVLERHGEKLSYSWPSILHMLRMVTDASEKDLISLGFQSIRVIMNEGLATIPVQCLDECILVTGAYGTQKTDINISLTSVGLLWTATDFIVKGLVSKPIEQASHMNDDVQSCEMTEEANSKQVPPKLVDYSILFFSVFSVLQKLGSDDRPEVRNSAVRTLFQTLSIHGQKLSKSMWEDCLWLYVFPMLEHVSHLASTSSRDEWQGKELGTRAGKAVHMLIHHSRNTAQKQWDETIVLVLGGIARLLRSFFSYLQQLRKFSSGWVLLLSFIKNSILNGSKEVAIAAINCLQTFVGANCPKGNLESSYVKSVLDIYELVLQTSSNFKNDSTDKVKQEVLRGLGDLYVQAQSLFTGDMYLRLMAIMHLMIKTTLNPTDYDSELGSIPAVQRGILEIIPMLRPTVVLSPMWTHLLLELLCYLNGHEGPLQKNNEQTPDHNSQALVDGAKHALVERSNLNGGGTKLDMVGSGWGILFVEKLVPIIANLFLEAPPNERFSVSPEVIQGLGRYLLFMIYI

SEQ ID NO: 174886 - protein, 983 aa, Zea Mays
MTSLRTNVELEGEAGEPSYRRLVLRLVSHVIRLYSSSLVTESEVFLNMLVKVTRQDLPLWHQILVLEILRGFCVEACTLRLLFQTFDLNPVNTNVVENIVRALALVVASIQASDSSEETLAAVGGMFSSKAKGIEWSMDHDASNAAVLVASEAHTITLALEGLLGVVFTIATLTDEALDVGELESPKCESNSMECSGQLALLCMALVNSTWLTILDSLSFILTRSQGEAIILEILKGYQAFTQALRTLFNVAHRLHNVLGPSWVLVLETLSALDRAIHSPHASTQEVSASVSKLSRDTSGQYSDFHILSSLNSQLFESSALMNIAAVKSLLSALHQLSSQHISGSSQLSVQQIGSISFSVERMTTILANNLHRVEPIWDQIAAHHLELANCSNPQLCNMALNSLDQSICLVAGSEKFQGISAAPHQFPESHLVKESETVSFEYAVLSPLMILYSSNKNVDVQMGALKILLHVLERHGEKLSYSWPSILHMLRMVTDASEKDLISLGFQSIRVIMNEGLATIPVQCLDECILVTGAYGTQKTDINISLTSVGLLWTATDFIVKGLVSKPIEQASHMNDDVQSCEMTEEANSKQVPPKLVDYSILFFSVFSVLQKLGSDDRPEVRNSAVRTLFQTLSIHGQKLSKSMWEDCLWLYVFPMLEHVSHLASTSSRDEWQGKELGTRAGKAVHMLIHHSRNTAQKQWDETIVLVLGGIARLLRSFFSYLQQLRKFSSGWVLLLSFIKNSILNGSKEVAIAAINCLQTFVGANCPKGNLESSYVKSVLDIYELVLQTSSNFKNDSTDKVKQEVLRGLGDLYVQAQSLFTGDMYLRLMAIMHLMIKTTLNPTDYDSELGSIPAVQRGILEIIPMLRPTVVLSPMWTHLLLELLCYLNGHEGPLQKNNEQTPDHNSQALVDGAKHALVERSNLNGGGTKLDMVGSGWGILFVEKLVPIIANLFLEAPPNERFSVSPEVIQGLGRYLLFMIYI

SEQ ID NO: 174887 - protein, 1022 aa, Zea Mays
MTSLRTNVELEGEAGEPSYRRLVLRLVSHVIRLYSSSLVTESEVFLNMLVKVTRQDLPLWHQILVLEILRGFCVEACTLRLLFQTFDLNPVNTNVVENIVRALALVVASIQASDSSEETLAAVGGMFSSKAKGIEWSMDHDASNAAVLVASEAHTITLALEGLLGVVFTIATLTDEALDVGELESPKCESNSMECSGQLALLCMALVNSTWLTILDSLSFILTRSQGEAIILEILKGYQAFTQACGVLRAIEPLNSFLASLCKFTINNPNEGEKKSILQSPGSKRSETSMDQRDSIILTLKNVQVLETLSALDRAIHSPHASTQEVSASVSKLSRDTSGQYSDFHILSSLNSQLFESSALMNIAAVKSLLSALHQLSSQHISGSSQLSVQQIGSISFSVERMTTILANNLHRVEPIWDQIAAHHLELANCSNPQLCNMALNSLDQSICLVAGSEKFQGISAAPHQFPESHLVKESETVSFEYAVLSPLMILYSSNKNVDVQMGALKILLHVLERHGEKLSYSWPSILHMLRMVTDASEKDLISLGFQSIRVIMNEGLATIPVQCLDECILVTGAYGTQKTDINISLTSVGLLWTATDFIVKGLVSKPIEQASHMNDDVQSCEMTEEANSKQVPPKLVDYSILFFSVFSVLQKLGSDDRPEVRNSAVRTLFQTLSIHGQKLSKSMWEDCLWLYVFPMLEHVSHLASTSSRDEWQGKELGTRAGKAVHMLIHHSRNTAQKQWDETIVLVLGGIARLLRSFFSYLQQLRKFSSGWVLLLSFIKNSILNGSKEVAIAAINCLQTFVGANCPKGNLESSYVKSVLDIYELVLQTSSNFKNDSTDKVKQEVLRGLGDLYVQAQSLFTGDMYLRLMAIMHLMIKTTLNPTDYDSELGSIPAVQRGILEIIPMLRPTVVLSPMWTHLLLELLCYLNGHEGPLQKNNEQTPDHNSQALVDGAKHALVERSNLNGGGTKLDMVGSGWGILFVEKLVPIIANLFLEAPPNERFSVSPEVIQGLGRYLLFMIYI

SEQ ID NO: 174888 - protein, 984 aa, Zea Mays
MTSLRTNVELEGEAGEPSYRRLVLRLVSHVIRLYSSSLVTESEVFLNMLVKVTRQDLPLWHQILVLEILRGFCVEACTLRLLFQTFDLNPVNTNVVENIVRALALVVASIQVASDSSEETLAAVGGMFSSKAKGIEWSMDHDASNAAVLVASEAHTITLALEGLLGVVFTIATLTDEALDVGELESPKCESNSMECSGQLALLCMALVNSTWLTILDSLSFILTRSQGEAIILEILKGYQAFTQALRTLFNVAHRLHNVLGPSWVLVLETLSALDRAIHSPHASTQEVSASVSKLSRDTSGQYSDFHILSSLNSQLFESSALMNIAAVKSLLSALHQLSSQHISGSSQLSVQQIGSISFSVERMTTILANNLHRVEPIWDQIAAHHLELANCSNPQLCNMALNSLDQSICLVAGSEKFQGISAAPHQFPESHLVKESETVSFEYAVLSPLMILYSSNKNVDVQMGALKILLHVLERHGEKLSYSWPSILHMLRMVTDASEKDLISLGFQSIRVIMNEGLATIPVQCLDECILVTGAYGTQKTDINISLTSVGLLWTATDFIVKGLVSKPIEQASHMNDDVQSCEMTEEANSKQVPPKLVDYSILFFSVFSVLQKLGSDDRPEVRNSAVRTLFQTLSIHGQKLSKSMWEDCLWLYVFPMLEHVSHLASTSSRDEWQGKELGTRAGKAVHMLIHHSRNTAQKQWDETIVLVLGGIARLLRSFFSYLQQLRKFSSGWVLLLSFIKNSILNGSKEVAIAAINCLQTFVGANCPKGNLESSYVKSVLDIYELVLQTSSNFKNDSTDKVKQEVLRGLGDLYVQAQSLFTGDMYLRLMAIMHLMIKTTLNPTDYDSELGSIPAVQRGILEIIPMLRPTVVLSPMWTHLLLELLCYLNGHEGPLQKNNEQTPDHNSQALVDGAKHALVERSNLNGGGTKLDMVGSGWGILFVEKLVPIIANLFLEAPPNERFSVSPEVIQGLGRYLLFMIYI

SEQ ID NO: 174889 - protein, 942 aa, Zea Mays
MTSLRTNVELEGEAGEPSYRRLVLRLVSHVIRLYSSSLVTESEVFLNMLVKVTRQDLPLWHQILVLEILRGFCVEACTLRLLFQTFDLNPVNTNVVENIVRALALVVASIQVASDSSEETLAAVGGMFSSKAKGIEWSMDHDASNAAVLVASEAHTITLALEGLLGVVFTIATLTDEALDVGELESPKCESNSMECSGQLALLCMALVNSTWLTILDSLSFILTRSQGEAIILEILKGYQAFTQACGVLRAIEPLNSFLASLCKFTINNPNEGEKKSILQSPGSKRSETSMDQRDSIILTLKNVQALRTLFNVAHRLHNVLGPSWVLVLETLSALDRAIHSPHASTQEVSASVSKLSRDTSGQYSDFHILSSLNSQLFESSALMNIAAVKSLLSALHQLSSQHISGSSQLSVQQIGSISFSVERMTTILANNLHRVEPIWDQIAAHHLELANCSNPQLCNMALNSLDQSICLVAGSEKFQGISAAPHQFPESHLVKESETVSFEYAVLSPLMILYSSNKNVDVQMGALKILLHVLERHGEKLSYSWPSILHMLRMVTDASEKDLISLGFQSIRVIMNEGLATIPVQCLDECILVTGAYGTQKTDINISLTSVGLLWTATDFIVKGLVSKPIEQASHMNDDVQSCEMTEEANSKQVPPKLVDYSILFFSVFSVLQKLGSDDRPEVRNSAVRTLFQTLSIHGQKLSKSMWEDCLWLYVFPMLEHVSHLASTSSRDEWQGKELGTRAGKAVHMLIHHSRNTAQKQWDETIVLVLGGIARLLRSFFSYLQQLRKFSSGWVLLLSFIKNSILNGSKEVAIAAINCLQTFVGANCPKGNLESSYVKSVLDIYELVLQTSSNFKNDSTDKVKQEVLRGLGDLYVQAQSLFTGDMYLRLMAIMHLMIKTTLNPTDYDSELYSCCTTRYIGNHSYATPNSCIVSHVDTSAS

SEQ ID NO: 174890 - protein, 880 aa, Zea Mays
MTSLRTNVELEGEAGEPSYRRLVLRLVSHVIRLYSSSLVTESEVFLNMLVKVTRQDLPLWHQILVLEILRGFCVEACTLRLLFQTFDLNPVNTNVVENIVRALALVVASIQASDSSEETLAAVGGMFSSKAKGIEWSMDHDASNAAVLVASEAHTITLALEGLLGVVFTIATLTDEALDVGELESPKCESNSMECSGQLALLCMALVNSTWLTILDSLSFILTRSQGEAIILEILKGYQAFTQALRTLFNVAHRLHNVLGPSWVLVLETLSALDRAIHSPHASTQEVSASVSKLSRDTSGQYSDFHILSSLNSQLFESSALMNIAAVKSLLSALHQLSSQHISGSSQLSVQQIGSISFSVERMTTILANNLHRVEPIWDQIAAHHLELANCSNPQLCNMALNSLDQSICLVAGSEKFQGISAAPHQFPESHLVKESETVSFEYAVLSPLMILYSSNKNVDVQMGALKILLHVLERHGEKLSYSWPSILHMLRMVTDASEKDLISLGFQSIRVIMNEGLATIPVQCLDECILVTGAYGTQKTDINISLTSVGLLWTATDFIVKGLVSKPIEQASHMNDDVQSCEMTEEANSKQVPPKLVDYSILFFSVFSVLQKLGSDDRPEVRNSAVRTLFQTLSIHGQKLSKSMWEDCLWLYVFPMLEHVSHLASTSSRDEWQGKELGTRAGKAVHMLIHHSRNTAQKQWDETIVLVLGGIARLLRSFFSYLQQLRKFSSGWVLLLSFIKNSILNGSKEVAIAAINCLQTFVGANCPKGNLESSYVKSVLDIYELVLQTSSNFKNDSTDKVKQEVLRGLGDLYVQAQSLFTGDMYLRLMAIMHLMIKTTLNPTDYDSELYSCCTTRYIGNHSYATPNSCIVSHVDTSAS

SEQ ID NO: 174891 - protein, 941 aa, Zea Mays
MTSLRTNVELEGEAGEPSYRRLVLRLVSHVIRLYSSSLVTESEVFLNMLVKVTRQDLPLWHQILVLEILRGFCVEACTLRLLFQTFDLNPVNTNVVENIVRALALVVASIQASDSSEETLAAVGGMFSSKAKGIEWSMDHDASNAAVLVASEAHTITLALEGLLGVVFTIATLTDEALDVGELESPKCESNSMECSGQLALLCMALVNSTWLTILDSLSFILTRSQGEAIILEILKGYQAFTQACGVLRAIEPLNSFLASLCKFTINNPNEGEKKSILQSPGSKRSETSMDQRDSIILTLKNVQALRTLFNVAHRLHNVLGPSWVLVLETLSALDRAIHSPHASTQEVSASVSKLSRDTSGQYSDFHILSSLNSQLFESSALMNIAAVKSLLSALHQLSSQHISGSSQLSVQQIGSISFSVERMTTILANNLHRVEPIWDQIAAHHLELANCSNPQLCNMALNSLDQSICLVAGSEKFQGISAAPHQFPESHLVKESETVSFEYAVLSPLMILYSSNKNVDVQMGALKILLHVLERHGEKLSYSWPSILHMLRMVTDASEKDLISLGFQSIRVIMNEGLATIPVQCLDECILVTGAYGTQKTDINISLTSVGLLWTATDFIVKGLVSKPIEQASHMNDDVQSCEMTEEANSKQVPPKLVDYSILFFSVFSVLQKLGSDDRPEVRNSAVRTLFQTLSIHGQKLSKSMWEDCLWLYVFPMLEHVSHLASTSSRDEWQGKELGTRAGKAVHMLIHHSRNTAQKQWDETIVLVLGGIARLLRSFFSYLQQLRKFSSGWVLLLSFIKNSILNGSKEVAIAAINCLQTFVGANCPKGNLESSYVKSVLDIYELVLQTSSNFKNDSTDKVKQEVLRGLGDLYVQAQSLFTGDMYLRLMAIMHLMIKTTLNPTDYDSELYSCCTTRYIGNHSYATPNSCIVSHVDTSAS

SEQ ID NO: 174892 - protein, 298 aa, Zea Mays
MNEGLATIPVQCLDECILVTGAYGTQKTDINISLTSVGLLWTATDFIVKGLVSKPIEQASHMNDDVQSCEMTEEANSKQVPPKLVDYSILFFSVFSVLQKLGSDDRPEVRNSAVRTLFQTLSIHGQKLSKSMWEDCLWLYVFPMLEHVSHLASTSSRDEWQGKELGTRAGKAVHMLIHHSRNTAQKQWDETIVLVLGGIARLLRSFFSYLQQLRKFSSGWVLLLSFIKNSILNGSKEVAIAAINCLQTFVGANCPKGNLESSYVKSVLDIYELVLQTSSNFKNDSTDKVKQEVLRGLG

SEQ ID NO: 174893 - protein, 364 aa, Zea Mays
MTSLRTNVELEGEAGEPSYRRLVLRLVSHVIRLYSSSLVTESEVFLNMLVKVTRQDLPLWHQILVLEILRGFCVEACTLRLLFQTFDLNPVNTNVVENIVRALALVVASIQVASDSSEETLAAVGGMFSSKAKGIEWSMDHDASNAAVLVASEAHTITLALEGLLGVVFTIATLTDEALDVGELESPKCESNSMECSGQLALLCMALVNSTWLTILDSLSFILTRSQGEAIILEILKGYQAFTQALRTLFNVAHRLHNVLGPSWVLVLETLSALDRAIHSPHASTQEVSASVSKLSRDTSGQYSDFHILSSLNSQELNRYGIKLLLIILRMVTDASEKDLISLGFQSIRVIMNEGLATIPVQCL

SEQ ID NO: 174894 - protein, 622 aa, Zea Mays
MTSLRTNVELEGEAGEPSYRRLVLRLVSHVIRLYSSSLVTESEVFLNMLVKVTRQDLPLWHQILVLEILRGFCVEACTLRLLFQTFDFCKGGVNGLAYGWSQSALLPFRRGVLVVWGVSGVVRQMNPVNTNVVENIVRALALVVASIQVASDSSEETLAAVGGMFSSKAKGIEWSMDHDASNAAVLVASEAHTITLALEGLLGVVFTIATLTDEALDVGELESPKCESNSMECSGQLALLCMALVNSTWLTILDSLSFILTRSQGEAIILEILKGYQAFTQACGVLRAIEPLNSFLASLCKFTINNPNEGEKKSILQSPGSKRSETSMDQRDSIILTLKNVQALRTLFNVAHRLHNVLGPSWVLVLETLSALDRAIHSPHASTQEVSASVSKLSRDTSGQYSDFHILSSLNSQLFESSALMNIAAVKSLLSALHQLSSQHISGSSQLSVQQIGSISFSVERMTTILANNLHRVEPIWDQIAAHHLELANCSNPQLCNMALNSLDQSICLVAGSEKFQGISAAPHQFPESHLVKESETVSFEYAVLSPLMILYSSNKNVDVQMGALKILLHVLERHGEKLSYSWPSILHMLRMVTDASEKDLISLGFQHDMISLWEFSPGIAP

SEQ ID NO: 174895 - protein, 584 aa, Zea Mays
MTSLRTNVELEGEAGEPSYRRLVLRLVSHVIRLYSSSLVTESEVFLNMLVKVTRQDLPLWHQILVLEILRGFCVEACTLRLLFQTFDLNPVNTNVVENIVRALALVVASIQASDSSEETLAAVGGMFSSKAKGIEWSMDHDASNAAVLVASEAHTITLALEGLLGVVFTIATLTDEALDVGELESPKCESNSMECSGQLALLCMALVNSTWLTILDSLSFILTRSQGEAIILEILKGYQAFTQACGVLRAIEPLNSFLASLCKFTINNPNEGEKKSILQSPGSKRSETSMDQRDSIILTLKNVQALRTLFNVAHRLHNVLGPSWVLVLETLSALDRAIHSPHASTQEVSASVSKLSRDTSGQYSDFHILSSLNSQLFESSALMNIAAVKSLLSALHQLSSQHISGSSQLSVQQIGSISFSVERMTTILANNLHRVEPIWDQIAAHHLELANCSNPQLCNMALNSLDQSICLVAGSEKFQGISAAPHQFPESHLVKESETVSFEYAVLSPLMILYSSNKNVDVQMGALKILLHVLERHGEKLSYSWPSILHMLRMVTDASEKDLISLGFQHDMISLWEFSPGIAP

SEQ ID NO: 174896 - protein, 262 aa, Zea Mays
MVFMAALEADLRALSAEARRRHPAVKDAAEHAILKLRSLSAPSEIAQNEDILRMFLMACNVKSVKLSVIGLSCLQKLISHAAVASSALKDILATLKDHAEMTDEIVQLKTLQTMLILFQSHLHPESEESMSQALGICLYLLESNRSSDSVRNTAAATFRQAVALVFDNVIRAESLPSGKASSARLGSRVSAVADNVTHSFSHTLSLPSNSGDPTIMQNLSDVGKLGLRLLEDLTAIAAGGSAMWLRVYSLHRTFALDILELL

SEQ ID NO: 174897 - protein, 279 aa, Zea Mays
MVFMAALEADLRALSAEARRRHPAVKDAAEHAILKLRSLSAPSEIAQNEDILRMFLMACNVKSVKLSVIGLSCLQKLISHAAVASSALKDILATLKDHAEMTDEIVQLKTLQTMLILFQSHLHPESEESMSQALGICLYLLESNRSSDSVRNTAAATFRQAVALVFDNVIRAESLPSGKASSARLGSRVSAVADNVTHSFSHTLSLPSNSGDPTIMQNLSDVGKLGLRLLEDLTAIAAGGSAMWLRVYSLHRTFALDILERVAYHYINRRGKGPRPENK

SEQ ID NO: 174898 - protein, 248 aa, Zea Mays
MVFMAALEADLRALSAEARRRHPAVKDAAEHAILKLRSLSAPSEIAQNEDILRMFLMACNVKSVKLSVIGLSCLQKLISHAAVASSALKDILATLKDHAEMTDEIVQLKTLQTMLILFQSHLHPESEESMSQALGICLYLLESNRSSDSVRNTAAATFRQAVALVFDNVIRAESLPSGKASSARLGSRVSAVADNVTHSFSHTLSLPSNSGDPTIMQNLSDVGKLGLRLLEDLTAIAAGYVAPCLFTA

SEQ ID NO: 174899 - protein, 139 aa, Zea Mays
MVFMAALEADLRALSAEARRRHPAVKDAAEHAILKLRSLSAPSEIAQNEDILRMFLMACNVKSVKLSVIGLSCLQKLISHAAVASSALKDILATLKDHAEMTDEIVQLKTLQTMLILFQSHLHPEREHVTSSWNMPLPT

SEQ ID NO: 174900 - protein, 226 aa, Zea Mays
MVFMAALEADLRALSAEARRRHPAVKDAAEHAILKLRSLSAPSEIAQNEDILRMFLMACNVKSVKLSVIGLSCLQKLISHAAVASSALKDILATLKDHAEMTDEIVQLKTLQTMLILFQSHLHPESEESMSQALGICLYLLESNRSSDSVRNTAAATFRQAVALVFDNVIRAESLPSGKASSARLGSRVSAVADNVTHSFSHTLFRLLYMADRYQATLGILPSCRI

SEQ ID NO: 174901 - protein, 204 aa, Zea Mays
MVFMAALEADLRALSAEARRRHPAVKDAAEHAILKLRSLSAPSEIAQNEDILRMFLMACNVKSVKLSVIGLSCLQKLISHAAVASSALKDILATLKDHAEMTDEIVQLKTLQTMLILFQSHLHPESEESMSQALGICLYLLESNRSSDSVRNTAAATFRQAVALVFDNVIRAESLPSGKASSARLGSRVSAVADNVTHSFSHTL

SEQ ID NO: 174902 - protein, 630 aa, Zea Mays
MRYSNISWPFLLLLCFVSMADAEYMKYKDPKQPINSRIRDLIGRMTLAEKIGQMTQIERQVASANVMKQYFIGSILSGGGSVPSPQASPAIWVNMVNEFQKGALSTRLGIPLIYGIDAVHGNNNVYNATLFPHNIGLGATRDPGLIKRIGEATALEVRATGIQYTFAPCIAVCRDPRWGRCYESYSEDHKVVQQMTDIILGLQGEIPVNHTKGVPYVAGKDKVAACAKHYVGDGGTHNGINENNTIIDEHGLLSIHMPPYYDSIIKGVATVMGFVISDWLGVDRITSPPGANYTYSVQAGINAGIDMVMVPYNYTDYINDLTSLVHKGVINISRIDDAVKRILRVKFTMGLFENPLADLSFAEQLGKKEHRELAREAVRKSLVLLKNGNSPDQQFLPLPKRARSILVAGSHASNLGYQCGGWSIQWMGDSGNITTVSCAGTTILDAIKSTVADSTSVVYSENPDDSFMKHNDFSFAIVVVGEPPYAETVGDSTDLTMLDPGPDTIRTVCAAVKCAVVIISGRPIVIEPYVPLVEALVAAWLPGTEGQGVADVLFGDYGFTGKLPHTWFKSVDQLPMNVGDLQYDPLYPFGFGLMINSSLPGFSGVDNLGYRKQRVLFAVLCSLLSLVLIS

SEQ ID NO: 174903 - protein, 399 aa, Zea Mays
MPPYYDSIIKGVATVMVSYSSLNGVKMHANHDLVTGYLKSKLHFRGFVISDWLGVDRITSPPGANYTYSVQAGINAGIDMVMVPYNYTDYINDLTSLVHKGVINISRIDDAVKRILRVKFTMGLFENPLADLSFAEQLGKKEHRELAREAVRKSLVLLKNGNSPDQQFLPLPKRARSILVAGSHASNLGYQCGGWSIQWMGDSGNITTGTTILDAIKSTVADSTSVVYSENPDDSFMKHNDFSFAIVVVGEPPYAETVGDSTDLTMLDPGPDTIRTVCAAVKCAVVIISGRPIVIEPYVPLVEALVAAWLPGTEGQGVADVLFGDYGFTGKLPHTWFKSVDQLPMNVGDLQYDPLYPFGFGLMINSSLPGFSGVDNLGYRKQRVLFAVLCSLLSLVLIS

SEQ ID NO: 174904 - protein, 230 aa, Zea Mays
MVNEFQKGALSTRLGIPLIYGIDAVHGNNNVYNATLFPHNIGLGATRDPGLIKRIGEATALEVRATGIQYTFAPCIAVCRDPRWGRCYESYSEDHKVVQQMTDIILGLQGEIPVNHTKGVPYVAGKDKVAACAKHYVGDGGTHNGINENNTIIDEHGLLSIHMPPYYDSIIKGVATVMVSYSSLNGVKMHANHDLVTGYLKSKLHFRVSNNLTLYLHYFAVILNLSLDIL

SEQ ID NO: 174905 - protein, 461 aa, Zea Mays
MTDIILGLQGEIPVNHTKGVPYVAGKDKVAACAKHYVGDGGTHNGINENNTIIDEHGLLSIHMPPYYDSIIKGVATVMVSYSSLNGVKMHANHDLVTGYLKSKLHFRGFVISDWLGVDRITSPPGANYTYSVQAGINAGIDMVMVPYNYTDYINDLTSLVHKGVINISRIDDAVKRILRVKFTMGLFENPLADLSFAEQLGKKEHRELAREAVRKSLVLLKNGNSPDQQFLPLPKRARSILVAGSHASNLGYQCGGWSIQWMGDSGNITTGTTILDAIKSTVADSTSVVYSENPDDSFMKHNDFSFAIVVVGEPPYAETVGDSTDLTMLDPGPDTIRTVCAAVKCAVVIISGRPIVIEPYVPLVEALVAAWLPGTEGQGVADVLFGDYGFTGKLPHTWFKSVDQLPMNVGDLQYDPLYPFGFGLMINSSLPGFSGVDNLGYRKQRVLFAVLCSLLSLVLIS

SEQ ID NO: 174906 - protein, 467 aa, Zea Mays
MVRGSRPLGQTISKKFSDMRYSNISWPFLLLLCFVSMADAEYMKYKDPKQPINSRIRDLIGRMTLAEKIGQMTQIERQVASANVMKQYFIGSILSGGGSVPSPQASPAIWVNMVNEFQKGALSTRLGIPLIYGIDAVHGNNNVYNATLFPHNIGLGATRDPGLIKRIGEATALEVRATGIQYTFAPCIAVCRDPRWGRCYESYSEDHKVVQQMTDIILGLQGEIPVNHTKGVPYVAGKDKVAACAKHYVGDGGTHNGINENNTIIDEHGLLSIHMPPYYDSIIKGVATVMGFVISDWLGVDRITSPPGANYTYSVQAGINAGIDMVMVPYNYTDYINDLTSLVHKGVINISRIDDAVKRILRVKFTMGLFENPLADLSFAEQLGKKEHRELAREAVRKSLVLLKNGNSPDQQFLPLPKRARSILVAGSHASNLGYQCGGWSIQWMGDSGNITTVIQYPVQGQQFLMR

SEQ ID NO: 174907 - protein, 644 aa, Zea Mays
MVRGSRPLGQTISKKFSDMRYSNISWPFLLLLCFVSMADAEYMKYKDPKQPINSRIRDLIGRMTLAEKIGQMTQIERQVASANVMKQYFIGSILSGGGSVPSPQASPAIWVNMVNEFQKGALSTRLGIPLIYGIDAVHGNNNVYNATLFPHNIGLGATRDPGLIKRIGEATALEVRATGIQYTFAPCIAVCRDPRWGRCYESYSEDHKVVQQMTDIILGLQGEIPVNHTKGVPYVAGKDKVAACAKHYVGDGGTHNGINENNTIIDEHGLLSIHMPPYYDSIIKGVATVMGFVISDWLGVDRITSPPGANYTYSVQAGINAGIDMVMVPYNYTDYINDLTSLVHKGVINISRIDDAVKRILRVKFTMGLFENPLADLSFAEQLGKKEHRELAREAVRKSLVLLKNGNSPDQQFLPLPKRARSILVAGSHASNLGYQCGGWSIQWMGDSGNITTGTTILDAIKSTVADSTSVVYSENPDDSFMKHNDFSFAIVVVGEPPYAETVGDSTDLTMLDPGPDTIRTVCAAVKCAVVIISGRPIVIEPYVPLVEALVAAWLPGTEGQGVADVLFGDYGFTGKLPHTWFKSVDQLPMNVGDLQYDPLYPFGFGLMINSSLPGFSGVDNLGYRKQRVLFAVLCSLLSLVLIS

SEQ ID NO: 174908 - protein, 422 aa, Zea Mays
MVRGSRPLGQTISKKFSDMRYSNISWPFLLLLCFVSMADAEYMKYKDPKQPINSRIRDLIGRMTLAEKIGQMTQIERQVASANVMKQYFIGSILSGGGSVPSPQASPAIWVNMVNEFQKGALSTRLGIPLIYGIDAVHGNNNVYNATLFPHNIGLGATRDPGLIKRIGEATALEVRATGIQYTFAPCIAVCRDPRWGRCYESYSEDHKVVQQMTDIILGLQGEIPVNHTKGVPYVAGKDKVAACAKHYVGDGGTHNGINENNTIIDEHGLLSIHMPPYYDSIIKGVATVMVSYSSLNGVKMHANHDLVTGYLKSKLHFRGFVISDWLGVDRITSPPGANYTYSVQAGINAGIDMVMVPYNYTDYINDLTSLVHKGVINISRIDDAVKRILRVKFTMGLFENPLADLSFAEQLGKKGQQFLMR

SEQ ID NO: 174909 - protein, 240 aa, Zea Mays
MVRGSRPLGQTISKKFSDMRYSNISWPFLLLLCFVSMADAEYMKYKDPKQPINSRIRDLIGRMTLAEKIGQMTQIERQVASANVMKQYFIGSILSGGGSVPSPQASPAIWVNMVNEFQKGALSTRLGIPLIYGIDAVHGNNNVYNATLFPHNIGLGATRDPGLIKRIGEATALEVRATGIQYTFAPCIAVCRDPRWGRCYESYSEDHKVVQQMTDIILGLQGEIPVNHTKGVPYVAGKVS

SEQ ID NO: 174910 - protein, 626 aa, Zea Mays
MRYSNISWPFLLLLCFVSMADAEYMKYKDPKQPINSRIRDLIGRMTLAEKIGQMTQIERQVASANVMKQYFIGSILSGGGSVPSPQASPAIWVNMVNEFQKGALSTRLGIPLIYGIDAVHGNNNVYNATLFPHNIGLGATRDPGLIKRIGEATALEVRATGIQYTFAPCIAVCRDPRWGRCYESYSEDHKVVQQMTDIILGLQGEIPVNHTKGVPYVAGKDKVAACAKHYVGDGGTHNGINENNTIIDEHGLLSIHMPPYYDSIIKGVATVMGFVISDWLGVDRITSPPGANYTYSVQAGINAGIDMVMVPYNYTDYINDLTSLVHKGVINISRIDDAVKRILRVKFTMGLFENPLADLSFAEQLGKKEHRELAREAVRKSLVLLKNGNSPDQQFLPLPKRARSILVAGSHASNLGYQCGGWSIQWMGDSGNITTGTTILDAIKSTVADSTSVVYSENPDDSFMKHNDFSFAIVVVGEPPYAETVGDSTDLTMLDPGPDTIRTVCAAVKCAVVIISGRPIVIEPYVPLVEALVAAWLPGTEGQGVADVLFGDYGFTGKLPHTWFKSVDQLPMNVGDLQYDPLYPFGFGLMINSSLPGFSGVDNLGYRKQRVLFAVLCSLLSLVLIS

SEQ ID NO: 174911 - protein, 325 aa, Zea Mays
MVRGSRPLGQTISKKFSDMRYSNISWPFLLLLCFVSMADAEYMKYKDPKQPINSRIRDLIGRMTLAEKIGQMTQIERQVASANVMKQYFIGSILSGGGSVPSPQASPAIWVNMVNEFQKGALSTRLGIPLIYGIDAVHGNNNVYNATLFPHNIGLGATRDPGLIKRIGEATALEVRATGIQYTFAPCIAVCRDPRWGRCYESYSEDHKVVQQMTDIILGLQGEIPVNHTKGVPYVAGKDKVAACAKHYVGDGGTHNGINENNTIIDEHGLLSIHMPPYYDSIIKGVATVMVSYSSLNGVKMHANHDLVTGYLKSKLHFRVRFRDI

SEQ ID NO: 174912 - protein, 284 aa, Zea Mays
MTDIILGLQGEIPVNHTKGVPYVAGKDKVAACAKHYVGDGGTHNGINENNTIIDEHGLLSIHMPPYYDSIIKGVATVMVSYSSLNGVKMHANHDLVTGYLKSKLHFRGFVISDWLGVDRITSPPGANYTYSVQAGINAGIDMVMVPYNYTDYINDLTSLVHKGVINISRIDDAVKRILRVKFTMGLFENPLADLSFAEQLGKKEHRELAREAVRKSLVLLKNGNSPDQQFLPLPKRARSILVAGSHASNLGYQCGGWSIQWMGDSGNITTVIQYPVQGQQFLMR

SEQ ID NO: 174913 - protein, 327 aa, Zea Mays
MKEAETVAAKVALMSLPQEANPTQQLLLPSVNYKNLLQELVQKEGFPLPIYNTASDVSNYSAAFVSTVEIHGVTFHGKPGNTKKQAEMNAAKSAFEHFKNINHDAGSSGSANPLPVAATKQSVDGNTLRAKLEVNKSHLAEPSTEVEAIYSSTEVDKLPLPGPSMDIEVMDSTLEVDKLPLPERSMDVKVVNSSLKVDKLHFAEPITEAEVIHSSLQVDEPLIPKPGMSSSLENTPAVNGHSAPISPTITPTLISVPTATMPVSNDRCGCYMSTNRIQVYPRHTDMVIPEGAAVLPISDNQWVAVSLPYSMEQRDFCCRNPDCHLGR

SEQ ID NO: 174914 - protein, 247 aa, Zea Mays
MYKSRLQELCQKRRWAPPLYEPTREGPAHAPLFRATVVVNGERFSSRDEGEKSLKEAYNLAAMAAFDNLIALPAAALAPAPAAPAPPSSETQLPYKSQLQIYAQKRGKLLPSYRPIHGGSLHAPLFKSEVTIDGQTFESPEYCHTMKEAETVAAKVALMSLPQEANPTQQLLLPSVNYKNLLQELVQKEGFPLPIYNTASDVSNYSAAFVSTVEIHGVTFHGKPGNTKKQAEMNAAKSAFEHFKNIC

SEQ ID NO: 174915 - protein, 378 aa, Zea Mays
MYKSRLQELCQKRRWAPPLYEPTREGPAHAPLFRATVVVNGERFSSRDEGEKSLKEAYNLAAMAAFDNLIALPAAALAPAPAAPAPPSSETQLPYKSQLQIYAQKRGKLLPSYRPIHGGSLHAPLFKSEVTIDGQTFESPEYCHTMKEAETVAAKVALMSLPQEANPTQQLLSVDGNTLRAKLEVNKSHLAEPSTEVEAIYSSTEVDKLPLPGPSMDIEVMDSTLEVDKLPLPERSMDVKVVNSSLKVDKLHFAEPITEAEVIHSSLQVDEPLIPKPGMSSSLENTPAVNGHSAPISPTITPTLISVPTATMPVSNDRCGCYMSTNRIQVYPRHTDMVIPEGAAVLPISDNQWVAVSLPYSMEQRDFCCRNPDCHLGR

SEQ ID NO: 174916 - protein, 218 aa, Zea Mays
MLQSLLLNISKTSVDGNTLRAKLEVNKSHLAEPSTEVEAIYSSTEVDKLPLPGPSMDIEVMDSTLEVDKLPLPERSMDVKVVNSSLKVDKLHFAEPITEAEVIHSSLQVDEPLIPKPGMSSSLENTPAVNGHSAPISPTITPTLISVPTATMPVSNDRCGCYMSTNRIQVYPRHTDMVIPEGAAVLPISDNQWVAVSLPYSMEQRDFCCRNPDCHLGR

SEQ ID NO: 174917 - protein, 357 aa, Zea Mays
MYKSRLQELCQKRRWAPPLYEPTREGPAHAPLFRATVVVNGERFSSRDEGEKSLKEAYNLAAMAAFDNLIALPAAALAPAPAAPAPPSSETQLPYKSQLQIYAQKRGKLLPSYRPIHGGSLHAPLFKSEVTIDGQTFESPEYCHTMKEAETSVDGNTLRAKLEVNKSHLAEPSTEVEAIYSSTEVDKLPLPGPSMDIEVMDSTLEVDKLPLPERSMDVKVVNSSLKVDKLHFAEPITEAEVIHSSLQVDEPLIPKPGMSSSLENTPAVNGHSAPISPTITPTLISVPTATMPVSNDRCGCYMSTNRIQVYPRHTDMVIPEGAAVLPISDNQWVAVSLPYSMEQRDFCCRNPDCHLGR

SEQ ID NO: 174918 - protein, 139 aa, Zea Mays
MVVPRAPETQQDQDEEMLVPHQDAIEGLQKDVLEGPQPMEEFASAVENQIIPDTSTSRFTWYIENFSKRNVRKHYSDDFTVGGYKWRVLVFPRGNNVDYLSMYLDVADSNLMPPGWSRNAQFSLAVVNQLDSKASLRKG

SEQ ID NO: 174919 - protein, 333 aa, Zea Mays
MASCYNPWRLFPGMSTAVPAGPVTAPAHSRTCKSSVFAKAMAETGQIKIFGDHPSRTEAALAKTRRHLYKEERLEAEQRRLEEIGPIAYYSEWVEAYKNKDTSREAIQKHFEETGEDENVQLIKMFQHQTAGEYRIMMGTDVRIQRDPLAMRMREDQIKQIWGGDPVYPTINYVQDPDEVIDYRGPEFHEPTPEVVPYLMEHGIMITKEELYARLNEEREDVNQDITYIPEAKDPMATAIDIGEHSYNEDSDDEDEDVDKAAAQPQSLEDEEDDRDDVAEVEEKVNQNWSALKSTGQAEKPKEKSKKDEMTLKEAIDDSENLTDFLMDFEETE

SEQ ID NO: 174920 - protein, 496 aa, Zea Mays
MALLSAVKAGIFVVQAAGNTGPSPKSMSSYSPWIFTVGASAHDRVYSNYVVLGNNLTIQGVGLAPGTDGDPMYNLVAAPHALKNNTASCNEMSLGECQDSSHLDADLIRGKILVCSYSIRFVLGLSSVKQALDTANDVSAAGVIFYLDPFVLGFQLNPTPMHMPGLIIPSSDDSKVFLTYYNDSLVRDGTSGQVVSFGGVAKILGGLNPNYGNSAPKVMFYSARGPDPEDNTLSNADILKPNLVAPGSSIWGAWSSVGLDSAEFAGESFAMLSGTSMAAPHVAGLAALIKQKFPSFSPAAIASALSTTTTLSDRQGKPIMAQRTYSNPDLTQSPATSFDMGNGFVNATAALDPGLIIDCSYDDFFSFLCGINGSSPVVKNYTGNSCVASTMTGADLNLPSITIAVLNQTRTITRTVINVAADESYSVNYSAPNGTAVSVVPTQFFIPSGQKQLVTFVVNATINSSTASFGNVGFQGNKGHRAIIPFSVISKVVYSS

SEQ ID NO: 174921 - protein, 702 aa, Zea Mays
MLDYSVRTATTHTPEFLGLPQGAWVQEGGPQFAGQGVVIGLIDTGIDPTHPSFADDLSTDSYPVPAHYSGICEVTNDFPSGSCNRKLVGAQHFAASAITRGVFNASQDLASPSDSDGHGTHTASIAAGNHGIPVVVAGHQFGNASGMAPRAHIAVYKALYKSFGGFAADVVAAIDQAAEDNVDIISLSITPNRRPPGLATFFNPIDMALLSAVKAGIFVVQAAGNTGPSPKSMSSYSPWIFTVGASAHDRVYSNYVVLGNNLTIQGVGLAPGTDGDPMYNLVAAPHALKNNTASCNEMSLGECQDSSHLDADLIRGKILVCSYSIRFVLGLSSVKQALDTANDVSAAGVIFYLDPFVLGFQLNPTPMHMPGLIIPSSDDSKVFLTYYNDSLVRDGTSGQVVSFGGVAKILGGLNPNYGNSAPKVMFYSARGPDPEDNTLSNADILKPNLVAPGSSIWGAWSSVGLDSAEFAGESFAMLSGTSMAAPHVAGLAALIKQKFPSFSPAAIASALSTTTTLSDRQGKPIMAQRTYSNPDLTQSPATSFDMGNGFVNATAALDPGLIIDCSYDDFFSFLCGINGSSPVVKNYTGNSCVASTMTGADLNLPSITIAVLNQTRTITRTVINVAADESYSVNYSAPNGTAVSVVPTQFFIPSGQKQLVTFVVNATINSSTASFGNVGFQGNKGHRAIIPFSVISKVVYSS

SEQ ID NO: 174922 - protein, 425 aa, Zea Mays
MYNLVAAPHALKNNTASCNEMSLGECQDSSHLDADLIRGKILVCSYSIRFVLGLSSVKQALDTANDVSAAGVIFYLDPFVLGFQLNPTPMHMPGLIIPSSDDSKVFLTYYNDSLVRDGTSGQVVSFGGVAKILGGLNPNYGNSAPKVMFYSARGPDPEDNTLSNADILKPNLVAPGSSIWGAWSSVGLDSAEFAGESFAMLSGTSMAAPHVAGLAALIKQKFPSFSPAAIASALSTTTTLSDRQGKPIMAQRTYSNPDLTQSPATSFDMGNGFVNATAALDPGLIIDCSYDDFFSFLCGINGSSPVVKNYTGNSCVASTMTGADLNLPSITIAVLNQTRTITRTVINVAADESYSVNYSAPNGTAVSVVPTQFFIPSGQKQLVTFVVNATINSSTASFGNVGFQGNKGHRAIIPFSVISKVVYSS

SEQ ID NO: 174923 - protein, 585 aa, Zea Mays
MGSPSMSLSASPYHMVGPSHGLPYTGGMPYGALNLPVNNPVQNDWSNHVNPFTGEHLNLLPNLLHKQLSLPNSPMSSLLFSQHQQRLAQVQSSHQNYLNIMPHVLYPHHSAEITSRFGSVGSSHSSRDKRSRSGKGKHNIRFSQLPSDTGSQNGDSGGIKFRSKYMSSEEIESILRMQHSASHSSDPYIVDYYHQACMAKRGATSKQKTNFSPTSMKDVPSKSRSSSDQHTYLQVDALGRVSFSSIRRPRSLLEVDHPSSADGSHDQKSTVRPLEKEPMLAARVTVEDALCLVLEVDDTDRLLQSSQSQDNIFELKRRRQVLLEGLAASLQFVDPLGPSKSGHSSGSALKDDVIFLRIVSLPKGRKFLARYLRLLVPGSELTRIVCMAIFRHLRFLFGGLPSDSSAAETTVALAKTVSSCVHHMELGALSACLAAVVCSSEQPPLRPLGSSAGDGASLVIKSVLDRATELLTDRHAAASYTVPNRALWQASFDAFFGLLTKYCVSKFESIQQMFVTQTPSSGIGPEASKATSKEMPVELLRASLPHTNEQQRQRLLDFAQRSMPVTGFNPSGARGGHITSESVPG

SEQ ID NO: 174924 - protein, 257 aa, Zea Mays
MGKSNILWTLLALHVFASMCGDKFLAPKSCNFLMTTIRLVVLLLESNDTSLCLVSSYIQSNKPTTLPSCAHCLFNVDTVSIDGFISSLLDELDLCSLQWNNRTCSNENITRCSSHMVSSGLDTRCSETCNIFKQGKLSEDTHNYPAEINLCYFTELISLLELFGIYMSCEWTYNNVVIRLLEILELCMCRDYSAALLVLVSQLGRSFVDDVGYEERSVSKLRNKLSLLLTGAHFTKSWSLSVQFTAIGALETLLQVI

SEQ ID NO: 174925 - protein, 891 aa, Zea Mays
MCKEEHLRGDSAEAARATESDARDLLEKEIIELKTQNMSLKQTQNTCKNNDELLRISELEEENRKLIQILGEERKKITSEKKKIEEEKCKTLEMQRIWKSEAQKSEEYRRVADTERKVANDWRASCERLRSEANELRAQLTAQIQKTEEILKRAEAEKQKVAREKKRADSEKSLSEKNRTLVEVEKKKVTEEKCRADNLFAKLEEQKKLNEHLRTSIQVETKNAIEEKKRGDHLFQKLEEMREQTECLQRKANEFSAGRDVISSGKCGRRHIDRISENANVKLLKEKLKLKKEQLKHVKNVSKLDKAKTALIRRELQSLKQDWTQLLGRFNMLDDHLARGVEDIHVLTQLNQHPEIHGFEQKLLPNDSVPAPYFRLQAGTVPFGSSIPSEYTSYQLPRESCSRSISGTSSELCPPLGSSHRLLKSKCQHRSSCPTSISDEKFMGSQGKDNLFVSSTDIRKKQDSVVPELAPKIRNDRALPCGTLTDRRETLGGDRKRKHTKMSQDPSAFLPSKNDLLHLKSKVPATTSNVALSFDDDPLCLQQGNNTICVTEGDMDKAPSFSFPSKVSCGGNGCTSSKFASLIPFEEMVRENCLKLLNLDDDADEEKFRKAKERPHSPNLSIIRPRRTKLPTYAEPHSLGRSLNGCPALGSDAIDSKTRSKASEVKEPVIQKSTQNYIQLDPSSNTIECSGIAKPLFVNDKSNAAVNVSCSTSLVVVPASTSFDSLLHEHVAQNSVASSAEALDSISRPMLSGGGHSDSILHLSKEVSNKNNSHLICDKSSPGLQANVRTSETTVTKPNNSVSNSLLRHHHGSENPPLHLVGFTRMKRSKMINIFRYWEILSSQSQKHSDEASVDGPLLDKVSTDTMLPIEFTEETFVDGNFASSAFSSSG

SEQ ID NO: 174926 - protein, 919 aa, Zea Mays
MAAEPREPTSSLDAQLAASSSSAAGVGGPNPCCATQWKNCQKLVRSRTALREAVKLLQAENEKLRKENSELSKVCKEEHLRGDSAEAARATESDARDLLEKEIIELKTQNMSLKQTQNTCKNNDELLRISELEEENRKLIQILGEERKKITSEKKKIEEEKCKTLEMQRIWKSEAQKSEEYRRVADTERKVANDWRASCERLRSEANELRAQLTAQIQKTEEILKRAEAEKQKVAREKKRADSEKSLSEKNRTLVEVEKKKVTEEKCRADNLFAKLEEQKKLNEHLRTSIQVETKNAIEEKKRGDHLFQKLEEMREQTECLQRKANEFSAGRDVISSGKCGRRHIDRISENANVKLLKEKLKLKKEQLKHVKNVSKLDKAKTALIRRELQSLKQDWTQLLGRFNMLDDHLARGVEDIHVLTQPSQAPSPYTPPYRPVHLVCTQPREPLNQHPEIHGFEQKLLPNDSVPAPYFRLQAGTVPFGSSIPSEYTSYQLPRESCSRSISDIRKKQDSVVPELAPKIRNDRALPCGTLTDRRETLGGDRKRKHTKMSQDPSAFLPSKNDLLHLKSKVPATTSNVALSFDDDPLCLQQGNNTICVTEGDMDKAPSFSFPSKVSCGGNGCTSSKFASLIPFEEMVRENCLKLLNLDDDADEEKFRKAKERPHSPNLSIIRPRRTKLPTYAEPHSLGRSLNGCPALGSDAIDSKTRSKASEVKEPVIQKSTQNYIQLDPSSNTIECSGIAKPLFVNDKSNAAVNVSCSTSLVVVPASTSFDSLLHEHVAQNSVASSAEALDSISRPMLSGGGHSDSILHLSKEVSNKNNSHLICDKSSPGLQANVRTSETTVTKPNNSVSNSLLRHHHGSENPPLHLVGFTRMKRSKMINIFRYWEILSSQSQKHSDEASVDGPLLDKVSTDTMLPIE

SEQ ID NO: 174927 - protein, 405 aa, Zea Mays
MSQDPSAFLPSKNDLLHLKSKVPATTSNVALSFDDDPLCLQQGNNTICVTEGDMDKAPSFSFPSKVSCGGNGCTSSKFASLIPFEEMVRENCLKLLNLDDDADEEKFRKAKERPHSPNLSIIRPRRTKLPTYAEPHSLGRSLNGCPALGSDAIDSKTRSKASEVKEPVIQKSTQNYIQLDPSSNTIECSGIAKPLFVNDKSNAAVNVSCSTSLVVVPASTSFDSLLHEHVAQNSVASSAEALDSISRPMLSGGGHSDSILHLSKEVSNKNNSHLICDKSSPGLQANVRTSETTVTKPNNSVSNSLLRHHHGSENPPLHLVGFTRMKRSKMINIFRYWEILSSQSQKHSDEASVDGPLLDKVSTDTMLPIDEKVSLIFSLLLWDTRFTEETFVDGNFASSAFSSSG

SEQ ID NO: 174928 - protein, 828 aa, Zea Mays
MCKEEHLRGDSAEAARATESDARDLLEKEIIELKTQNMSLKQTQNTCKNNDELLRISELEEENRKLIQILGEERKKITSEKKKIEEEKCKTLEMQRIWKSEAQKSEEYRRVADTERKVANDWRASCERLRSEANELRAQLTAQIQKTEEILKRAEAEKQKVAREKKRADSEKSLSEKNRTLVEVEKKKVTEEKCRADNLFAKLEEQKKLNEHLRTSIQVETKNAIEEKKRGDHLFQKLEEMREQTECLQRKANEFSAGRDVISSGKCGRRHIDRISENANVKLLKEKLKLKKEQLKHVKNVSKLDKAKTALIRRELQSLKQDWTQLLGRFNMLDDHLARGVEDIHVLTQAGTVPFGSSIPSEYTSYQLPRESCSRSISDIRKKQDSVVPELAPKIRNDRALPCGTLTDRRETLGGDRKRKHTKMSQDPSAFLPSKNDLLHLKSKVPATTSNVALSFDDDPLCLQQGNNTICVTEGDMDKAPSFSFPSKVSCGGNGCTSSKFASLIPFEEMVRENCLKLLNLDDDADEEKFRKAKERPHSPNLSIIRPRRTKLPTYAEPHSLGRSLNGCPALGSDAIDSKTRSKASEVKEPVIQKSTQNYIQLDPSSNTIECSGIAKPLFVNDKSNAAVNVSCSTSLVVVPASTSFDSLLHEHVAQNSVASSAEALDSISRPMLSGGGHSDSILHLSKEVSNKNNSHLICDKSSPGLQANVRTSETTVTKPNNSVSNSLLRHHHGSENPPLHLVGFTRMKRSKMINIFRYWEILSSQSQKHSDEASVDGPLLDKVSTDTMLPIDEKVSLIFSLLLWDTRFTEETFVDGNFASSAFSSSG

SEQ ID NO: 174929 - protein, 843 aa, Zea Mays
MCKEEHLRGDSAEAARATESDARDLLEKEIIELKTQNMSLKQTQNTCKNNDELLRISELEEENRKLIQILGEERKKITSEKKKIEEEKCKTLEMQRIWKSEAQKSEEYRRVADTERKVANDWRASCERLRSEANELRAQLTAQIQKTEEILKRAEAEKQKVAREKKRADSEKSLSEKNRTLVEVEKKKVTEEKCRADNLFAKLEEQKKLNEHLRTSIQVETKNAIEEKKRGDHLFQKLEEMREQTECLQRKANEFSAGRDVISSGKCGRRHIDRISENANVKLLKEKLKLKKEQLKHVKNVSKLDKAKTALIRRELQSLKQDWTQLLGRFNMLDDHLARGVEDIHVLTQAGTVPFGSSIPSEYTSYQLPRESCSRSISGTSSELCPPLGSSHRLLKSKCQHRSSCPTSISDEKFMGSQGKDNLFVSSTDIRKKQDSVVPELAPKIRNDRALPCGTLTDRRETLGGDRKRKHTKMSQDPSAFLPSKNDLLHLKSKVPATTSNVALSFDDDPLCLQQGNNTICVTEGDMDKAPSFSFPSKVSCGGNGCTSSKFASLIPFEEMVRENCLKLLNLDDDADEEKFRKAKERPHSPNLSIIRPRRTKLPTYAEPHSLGRSLNGCPALGSDAIDSKTRSKASEVKEPVIQKSTQNYIQLDPSSNTIECSGIAKPLFVNDKSNAAVNVSCSTSLVVVPASTSFDSLLHEHVAQNSVASSAEALDSISRPMLSGGGHSDSILHLSKEVSNKNNSHLICDKSSPGLQANVRTSETTVTKPNNSVSNSLLRHHHGSENPPLHLVGFTRMKRSKMINIFRYWEILSSQSQKHSDEASVDGPLLDKVSTDTMLPIE

SEQ ID NO: 174930 - protein, 510 aa, Zea Mays
MALNRSCFLMIQFLPHIFGCRLGQFHLALLSQVNTLHISCPEKAAHDQSQGKDNLFVSSTDIRKKQDSVVPELAPKIRNDRALPCGTLTDRRETLGGDRKRKHTKMSQDPSAFLPSKNDLLHLKSKVPATTSNVALSFDDDPLCLQQGNNTICVTEGDMDKAPSFSFPSKVSCGGNGCTSSKFASLIPFEEMVRENCLKLLNLDDDADEEKFRKAKERPHSPNLSIIRPRRTKLPTYAEPHSLGRSLNGCPALGSDAIDSKTRSKASEVKEPVIQKSTQNYIQLDPSSNTIECSGIAKPLFVNDKSNAAVNVSCSTSLVVVPASTSFDSLLHEHVAQNSVASSAEALDSISRPMLSGGGHSDSILHLSKEVSNKNNSHLICDKSSPGLQANVRTSETTVTKPNNSVSNSLLRHHHGSENPPLHLVGFTRMKRSKMINIFRYWEILSSQSQKHSDEASVDGPLLDKVSTDTMLPIDEKVSLIFSLLLWDTRFTEETFVDGNFASSAFSSSG

SEQ ID NO: 174931 - protein, 1004 aa, Zea Mays
MAAEPREPTSSLDAQLAASSSSAAGVGGPNPCCATQWKNCQKLVRSRTALREAVKLLQAENEKLRKENSELSKVCKEEHLRGDSAEAARATESDARDLLEKEIIELKTQNMSLKQTQNTCKNNDELLRISELEEENRKLIQILGEERKKITSEKKKIEEEKCKTLEMQRIWKSEAQKSEEYRRVADTERKVANDWRASCERLRSEANELRAQLTAQIQKTEEILKRAEAEKQKVAREKKRADSEKSLSEKNRTLVEVEKKKVTEEKCRADNLFAKLEEQKKLNEHLRTSIQVETKNAIEEKKRGDHLFQKLEEMREQTECLQRKANEFSAGRDVISSGKCGRRHIDRISENANVKLLKEKLKLKKEQLKHVKNVSKLDKAKTALIRRELQSLKQDWTQLLGRFNMLDDHLARGVEDIHVLTQPSQAPSPYTPPYRPVHLVCTQPREPLNQHPEIHGFEQKLLPNDSVPAPYFRLQAGTVPFGSSIPSEYTSYQLPRESCSRSISGTSSELCPPLGSSHRLLKSKCQHRSSCPTSISDEKFMGSQGKDNLFVSSTDIRKKQDSVVPELAPKIRNDRALPCGTLTDRRETLGGDRKRKHTKMSQDPSAFLPSKNDLLHLKSKVPATTSNVALSFDDDPLCLQQGNNTICVTEGDMDKAPSFSFPSKVSCGGNGCTSSKFASLIPFEEMVRENCLKLLNLDDDADEEKFRKAKERPHSPNLSIIRPRRTKLPTYAEPHSLGRSLNGCPALGSDAIDSKTRSKASEVKEPVIQKSTQNYIQLDPSSNTIECSGIAKPLFVNDKSNAAVNVSCSTSLVVVPASTSFDSLLHEHVAQNSVASSAEALDSISRPMLSGGGHSDSILHLSKEVSNKNNSHLICDKSSPGLQANVRTSETTVTKPNNSVSNSLLRHHHGSENPPLHLVGFTRMKRSKMINIFRYWEILSSQSQKHSDEASVDGPLLDKVSTDTMLPIDEKVSLIFSLLLWDTRFTEETFVDGNFASSAFSSSG

SEQ ID NO: 174932 - protein, 482 aa, Zea Mays
MAAEPREPTSSLDAQLAASSSSAAGVGGPNPCCATQWKNCQKLVRSRTALREAVKLLQAENEKLRKENSELSKVCKEEHLRGDSAEAARATESDARDLLEKEIIELKTQNMSLKQTQNTCKNNDELLRISELEEENRKLIQILGEERKKITSEKKKIEEEKCKTLEMQRIWKSEAQKSEEYRRVADTERKVANDWRASCERLRSEANELRAQLTAQIQKTEEILKRAEAEKQKVAREKKRADSEKSLSEKNRTLVEVEKKKVTEEKCRADNLFAKLEEQKKLNEHLRTSIQVETKNAIEEKKRGDHLFQKLEEMREQTECLQRKANEFSAGRDVISSGKCGRRHIDRISENANVKLLKEKLKLKKEQLKHVKNVSKLDKAKTALIRRELQSLKQDWTQLLGRFNMLDDHLARGVEDIHVLTQLNQHPEIHGFEQKLLPNDSVPAPYFRLQAGTVPFGSSIPSEYTSYQLPRESCSRSISGQG

SEQ ID NO: 174933 - protein, 871 aa, Zea Mays
MCKEEHLRGDSAEAARATESDARDLLEKEIIELKTQNMSLKQTQNTCKNNDELLRISELEEENRKLIQILGEERKKITSEKKKIEEEKCKTLEMQRIWKSEAQKSEEYRRVADTERKVANDWRASCERLRSEANELRAQLTAQIQKTEEILKRAEAEKQKVAREKKRADSEKSLSEKNRTLVEVEKKKVTEEKCRADNLFAKLEEQKKLNEHLRTSIQVETKNAIEEKKRGDHLFQKLEEMREQTECLQRKANEFSAGRDVISSGKCGRRHIDRISENANVKLLKEKLKLKKEQLKHVKNVSKLDKAKTALIRRELQSLKQDWTQLLGRFNMLDDHLARGVEDIHVLTQLNQHPEIHGFEQKLLPNDSVPAPYFRLQAGTVPFGSSIPSEYTSYQLPRESCSRSISGTSSELCPPLGSSHRLLKSKCQHRSSCPTSISDEKFMGSQGKDNLFVSSTDIRKKQDSVVPELAPKIRNDRALPCGTLTDRRETLGGDRKRKHTKMSQDPSAFLPSKNDLLHLKSKVPATTSNVALSFDDDPLCLQQGNNTICVTEGDMDKAPSFSFPSKVSCGGNGCTSSKFASLIPFEEMVRENCLKLLNLDDDADEEKFRKAKERPHSPNLSIIRPRRTKLPTYAEPHSLGRSLNGCPALGSDAIDSKTRSKASEVKEPVIQKSTQNYIQLDPSSNTIECSGIAKPLFVNDKSNAAVNVSCSTSLVVVPASTSFDSLLHEHVAQNSVASSAEALDSISRPMLSGGGHSDSILHLSKEVSNKNNSHLICDKSSPGLQANVRTSETTVTKPNNSVSNSLLRHHHGSENPPLHLVGFTRMKRSKMINIFRYWEILSSQSQKHSDEASVDGPLLDKVSTDTMLPIE

SEQ ID NO: 174934 - protein, 976 aa, Zea Mays
MAAEPREPTSSLDAQLAASSSSAAGVGGPNPCCATQWKNCQKLVRSRTALREAVKLLQAENEKLRKENSELSKVCKEEHLRGDSAEAARATESDARDLLEKEIIELKTQNMSLKQTQNTCKNNDELLRISELEEENRKLIQILGEERKKITSEKKKIEEEKCKTLEMQRIWKSEAQKSEEYRRVADTERKVANDWRASCERLRSEANELRAQLTAQIQKTEEILKRAEAEKQKVAREKKRADSEKSLSEKNRTLVEVEKKKVTEEKCRADNLFAKLEEQKKLNEHLRTSIQVETKNAIEEKKRGDHLFQKLEEMREQTECLQRKANEFSAGRDVISSGKCGRRHIDRISENANVKLLKEKLKLKKEQLKHVKNVSKLDKAKTALIRRELQSLKQDWTQLLGRFNMLDDHLARGVEDIHVLTQHPEIHGFEQKLLPNDSVPAPYFRLQAGTVPFGSSIPSEYTSYQLPRESCSRSISGTSSELCPPLGSSHRLLKSKCQHRSSCPTSISDEKFMGSQGKDNLFVSSTDIRKKQDSVVPELAPKIRNDRALPCGTLTDRRETLGGDRKRKHTKMSQDPSAFLPSKNDLLHLKSKVPATTSNVALSFDDDPLCLQQGNNTICVTEGDMDKAPSFSFPSKVSCGGNGCTSSKFASLIPFEEMVRENCLKLLNLDDDADEEKFRKAKERPHSPNLSIIRPRRTKLPTYAEPHSLGRSLNGCPALGSDAIDSKTRSKASEVKEPVIQKSTQNYIQLDPSSNTIECSGIAKPLFVNDKSNAAVNVSCSTSLVVVPASTSFDSLLHEHVAQNSVASSAEALDSISRPMLSGGGHSDSILHLSKEVSNKNNSHLICDKSSPGLQANVRTSETTVTKPNNSVSNSLLRHHHGSENPPLHLVGFTRMKRSKMINIFRYWEILSSQSQKHSDEASVDGPLLDKVSTDTMLPIDEKVSLIFSLLLWDTRFTEETFVDGNFASSAFSSSG

SEQ ID NO: 174935 - protein, 84 aa, Zea Mays
MREVCRLVPCSNGDQRGFRDFISYLVQKECAGVIRIPAVKAMWTRILFILPPTSDACGMVGIPPLPADTMIVVTLPKETTVEAS

SEQ ID NO: 174936 - protein, 88 aa, Zea Mays
MWEPLREVCRLVPCSNGDQRGFRDFISYLVQKECAGVIRIPAVKAMWTRILFILPPTSDACGMVGIPPLPADTMIVVTLPKETTVEAS

SEQ ID NO: 174937 - protein, 877 aa, Zea Mays
MYNCNMATVKRGEDLKSVPYKTAKACIIGLTYICSAASSEELKSSVMKGICSVVYRTVLSFFISTLEGKDIYRMDYTKRAMLQDPVTLLDTLKLELDNAKQPTIDNLSELGAICLLCTFLLFPENILEACFKLLDSAECDDVKGEGLYLLNQLTCHLTCNAANDAMGDKIDEQCPVMEGNLSDTNKFVDSNPVVSENAMEPNECYITMAISRHPFLRRWILSRYKKLCDSCKPAVVSEVSSCLKVLGSLSEPSDDKSHTGNESSVLEKLDNNVRENMRPDELISSSEQGALAKTESVDNYGNKFSQNKNVDMVRSDNQKSDELTDAKLDDFKGGTVVSDAQHQGSRSDLLMPKSVYDSAGGSTSLTSPGQHFGRAKHLFSEPFDIYGTYVARDVISVSKELWVGSLGNRATEALVRSKFEEFGPLVNFLFYPSRKFSLVEYRNILHAVHACGYMQGSSIWGGFLQVKYLDRLIGSKGVIRGIAIGESRHVYVAKVKNKKDKDEVFDDLKMAGLKWPSGITDIPGENALLLEFETAVDAATAKFYIRHQARPNVCSRDMNLPGHQLLVQNIDHSVPDIDLINAFSQFGEVIRWQINRADSNCFIVYRSQDAAARAKSHLHGARFGLKSISIESRTYSAGSVHDKTVSPVAPLLGQSVPDNSVRHEIRNPIVPGYHAGYAAPGDRPIYGPPPPNTSRAPQGNFPCPPVSTHHGSVMPPPPIQTSFVRPMYPGPGSPWENTTPNPPPFSHVSPRMMPGSNFRVNPASLPFVPSCVTPVSQLPGGSAQHSEKMPPSLPLPTVAPPPFTPLDMPPTHPPPLPISQPPSVPPPPNSPPPQPFADSSDSQKPSSHPQWQGPLLKSGLHYCRIYASRIEFGCLQI

SEQ ID NO: 174938 - protein, 980 aa, Zea Mays
MASPPADPHPKKRRVADAQDPSSSSNPAPTRRPSPAPPPPETLGAVASSTSSPPPTETASLPPEGVRLQKLRNQEELRNVFQRYSRIRKYIQEHKDGGLTPELEQDYLYLISASRGCESVQCFLSLPIPRFASRCPTALEAATKVTINMYNCNMATVKRGEDLKSVPYKTAKACIIGLTYICSAASSEELKSSVMKGICSVVYRTVLSFFISTLEGKDIYRMDYTKRAMLQDPVTLLDTLKLELDNAKQPTIDNLSELGAICLLCTFLLFPENILEACFKLLDSAECDDVKGEGLYLLNQLTCHLTCNAANDAMGDKIDEQCPVMEGNLSDTNKFVDSNPVVSENAMEPNECYITMAISRHPFLRRWILSRYKKLCDSCKPAVVSEVSSCLKVLGSLSEPSDDKSHTGNESSVLEKLDNNVRENMRPDELISSSEQGALAKTESVDNYGNKFSQNKNVDMVRSDNQKSDELTDAKLDDFKGGTVVSDAQHQGSRSDLLMPKSVYDSAGGSTSLTSPGQHFGRAKHLFSEPFDIYGTYVARDVISVSKELWVGSLGNRATEALVRSKFEEFGPLVNFLFYPSRKFSLVEYRNILHAVHACGYMQGSSIWGGFLQVKYLDRLIGSKGVIRGIAIGESRHVYVAKVKNKKDKDEVFDDLKMAGLKWPSGITDIPGENALLLEFETAVDAATAKFYIRHQARPNVCSRDMNLPGHQLLVQNIDHSVPDIDLINAFSQFGEVISAGSVHDKTVSPVAPLLGQSVPDNSVRHEIRNPIVPGYHAGYAAPGDRPIYGPPPPNTSRAPQGNFPCPPVSTHHGSVMPPPPIQTSFVRPMYPGPGSPWENTTPNPPPFSHVSPRMMPGSNFRVNPASLPFVPSCVTPVSQLPGGSAQHSEKMPPSLPLPTVAPPPFTPLDMPPTHPPPLPISQPPSVPPPPNSPPPQPFADSSDSQKPSSHPQWQGPLLKSGLHYCRIYASRIEFGCLQI

SEQ ID NO: 174939 - protein, 212 aa, Zea Mays
MNPIVPGYHAGYAAPGDRPIYGPPPPNTSRAPQGNFPCPPVSTHHGSVMPPPPIQTSFVRPMYPGPGSPWENTTPNPPPFSHVSPRMMPGSNFRVNPASLPFVPSCVTPVSQLPGGSAQHSEKMPPSLPLPTVAPPPFTPLDMPPTHPPPLPISQPPSVPPPPNSPPPQPFADSSDSQKPSSHPQWQGPLLKSGLHYCRIYASRIEFGCLQI

SEQ ID NO: 174940 - protein, 832 aa, Zea Mays
MASPPADPHPKKRRVADAQDPSSSSNPAPTRRPSPAPPPPETLGAVASSTSSPPPTETASLPPEGVRLQKLRNQEELRNVFQRYSRIRKYIQEHKDGGLTPELEQDYLYLISASRGCESVQCFLSLPIPRFASRCPTALEAATKVTINMYNCNMATVKRGEDLKSVPYKTAKACIIGLTYICSAASSEELKSSVMKGICSVVYRTVLSFFISTLEGKDIYRMDYTKRAMLQDPVTLLDTLKLELDNAKQPTIDNLSELGAICLLCTFLLFPENILEACFKLLDSAECDDVKGEGLYLLNQLTCHLTCNAANDAMGDKIDEQCPVMEGNLSDTNKFVDSNPVVSENAMEPNECYITMAISRHPFLRRWILSRYKKLCDSCKPAVVSEVSSCLKVLGSLSEPSDDKSHTGNESSVLEKLDNNVRENMRPDELISSSEQGALAKTESVDNYGNKFSQNKNVDMVRSDNQKSDELTDAKLDDFKGGTVVSDAQHQGSRSDLLMPKSVYDSAGGSTSLTSPGQHFGRAKHLFSEPFDIYGTYVARDVISVSKELWVGSLGNRATEALVRSKFEEFGPLVNFLFYPSRKFSLVEYRNILHAVHACGYMQGSSIWGGFLQVKYLDRLIGSKGVIRGIAIGESRHVYVAKVKNKKDKDEVFDDLKMAGLKWPSGITDIPGENALLLEFETAVDAATAKFYIRHQARPNVCSRDMNLPGHQLLVQNIDHSVPDIDLINAFSQFGEVIRWQINRADSNCFIVYRSQDAAARAKSHLHGARFGLKSISIESRTYSAGSVHDKTVSPVAPLLGQSVPDNSVRHEISCFLQQQLVTIMVAVDTTL

SEQ ID NO: 174941 - protein, 129 aa, Zea Mays
MMYTTNCRMMYATNRWRHNNATVPPCRHRRRLARRERSSHRSRGFFPRRREEDCIPARLRWERPGWAGVEARAGLNERCYRVGRDFIQADLVHGVFTPIQTVPEPNEQGLSMHDILEDNSRLPCFLPAP

SEQ ID NO: 174942 - protein, 172 aa, Zea Mays
MRLLQAEELFRKVLEVGSKNKAARLLGLDVGSKYVGVAISDEKNRVAMPLSVLCRTKTNINLMADDFKTLVSMYSIAGFVVGYPFKIYGQPCASAIQVSLAGELCKTGKLDDLPYAYWDENFTSKCVEALLHPLNLKDLDDAKTMTDKFAAVCILQRPSRSTAPKSTLTACR

SEQ ID NO: 174943 - protein, 112 aa, Zea Mays
MADDFKTLVSMYSIAGFVVGYPFKIYGQPCASAIQVSLAGELCKTGKLDDLPYAYWDENFTSKCVEALLHPLNLKDLDDAKTMTDKFAAVCILQGYLDNMNRKLRSTDKSEA

SEQ ID NO: 174944 - protein, 530 aa, Zea Mays
MEGVSSAPEMDEAISTDQSSRSTKRRAKVWDHVDSELIDGKEKAVCKYCKAHLSSAAGKEISFRKCEDPSWKEMINYCQPSFRLVGRQTVRSDCMLLYEEEKLQLIEQFTKLKSHVSLTADLWSSNQNLGYLGVTAHFISEDFELHKKIIAFKKISFPHTSYAVQDGITSCLLEWGLVGDLFTLTLDNASVNNRAMKDMRDALGSQMFFSGEHLHVRCSSHVLNIMVQAGLKVVPNAVGKVRDIIKVVISTPSRLQIFNSIVQTLGLRSKSGLILDVPHRWNATYDMLNEALKYKAALNRYAVEQHHECPTEEDWSKAEALHGFLQEFSDATKAFSADRHPTAHLFLKMLLVIRGVLLDENYNSNELLNEMANVMYTKFQKYWINPNIVLLIAAVLDPSMKTEFVKFYFYTVGDNVDMKMRELKRYLKKYYLEYEKIMRSHSLHVFITPDDQMRSEPSTSSPLCGKRRVEHAFAQFASQNANARPERTEMDTYLEDPRILIKPDECFNVLGWWKKNSDAYPILSLMARDF

SEQ ID NO: 174945 - protein, 454 aa, Zea Mays
MEGVSSAPEMDEAISTDQSSRSTKRRAKVWDHVDSELIDGKEKAVCKYCKAHLSSAAGKAHFISEDFELHKKIIAFKKISFPHTSYAVQDGITSCLLEWGLVGDLFTLTLDNASVNNRAMKDMRDALGSQMFFSGEHLHVRCSSHVLNIMVQAGLKVVPNAVGKVRDIIKVVISTPSRLQIFNSIVQTLGLRSKSGLILDVPHRWNATYDMLNEALKYKAALNRYAVEQHHECPTEEDWSKAEALHGFLQEFSDATKAFSADRHPTAHLFLKMLLVIRGVLLDENYNSNELLNEMANVMYTKFQKYWINPNIVLLIAAVLDPSMKTEFVKFYFYTVGDNVDMKMRELKRYLKKYYLEYEKIMRSHSLHVFITPDDQMRSEPSTSSPLCGKRRVEHAFAQFASQNANARPERTEMDTYLEDPRILIKPDECFNVLGWWKKNSDAYPILSLMARDF

SEQ ID NO: 174946 - protein, 397 aa, Zea Mays
MEGVSSAPEMDEAISTDQSSRSTKRRAKVWDHVDSELIDGKEKAVCKYCKAHLSSAAGKAHFISEDFELHKKIIAFKKISFPHTSYAVQDGITSCLLEWGLVGDLFTLTLDNASVNNRAMKDMRDALGSQMFFSGEHLHVRCSSHVLNIMVQAGLKVVPNAVGKVRDIIKVVISTPSRLQIFNSIVQTLGLRSKSGLILDVPHRWNATYDMLNEALKYKAALNRYAVEQHHECPTEEDWSKAEALHGFLQEFSDATKAFSADRHPTAHLFLKMLLVIRVGDNVDMKMRELKRYLKKYYLEYEKIMRSHSLHVFITPDDQMRSEPSTSSPLCGKRRVEHAFAQFASQNANARPERTEMDTYLEDPRILIKPDECFNVLGWWKKNSDAYPILSLMARDF

SEQ ID NO: 174947 - protein, 61 aa, Zea Mays
MMCNSVKLTASKEQMRILMMLVNEPLGEAMKNMEVGVVKLKDGDDAHVINMSSSNVPQYAK

SEQ ID NO: 174948 - protein, 58 aa, Zea Mays
MPLTSASPSSPSTIRIWGLCNFSISVFLSPSPLVWGYRLPLSTELMGLPDLLPVPFVT

SEQ ID NO: 174949 - protein, 63 aa, Zea Mays
MWLELLKELRVLAIARLLKRDWKLVVRPSTTVAWQFSNVVACLYLSSNRGAEEDDPKEGSGKL

SEQ ID NO: 174950 - protein, 345 aa, Zea Mays
MFYTTTCIEHSTSRSSLFQPYRAHRSPSHTGLGLLRVVLLFPLHVLPLLAIQPAAPSEVHEVRHAVAREQPVVIVVAADVQVVDEPARSHPLPARHLHHLHDEGAGQVAHSEGHVQQRHAEAGHALGQLGVQELDLPDDAERLGEPHKRELRHEPERRDGDPALRQPPPLALHRRGDSRRRGGEEQAPTDALLHGEPVRVARVPLQCRRDPPVVAGRPQRHGGHVEDGQGAAGNAEPARADAPVHSIGLLNGEALVHGKGEEDGGGPDRQDADRRLELLHLVHRAQPRPVVAVPLGGRRRRVRAVAGRVVLGGTEQARLVQEPERTYVRSSKRQRVRHTTHPSAS

SEQ ID NO: 174951 - protein, 400 aa, Zea Mays
MRTQAWGRGAVARLMTPFNRRAAHASSPHLLRACSSASYTIALARLRRHFTSSASFSPAYSARQDTHTFMEVVQEVLRHGSADSVRAVIRANKKSYSLVQLIAASFDVYNILCSKNMTPNGMQDSSSKGRNGTGFLHGARVGIVAKPSPEFVAGVFGTWLSGGVAVPLALSYPEAELLHVMNDSDISMVLSTKEHHEIMENLSIKCSAYCSILPSVTSIPSEINPQEPSSNEAISSVSTLITETNSSKKIKGDDPALILYTSGTTGKPKGVVHTHEGILSQVQILSEAWGYRSEDQFLHCLPLHHVHGLFNALFAPLYSGSVVEFIPKFSVSGIWQRWRESYPNDASKSTEAITVFTGVPTMYTRLLQGYDSMDPDQKSASSYAAKHLRCVDHQLFLPHL

SEQ ID NO: 174952 - protein, 439 aa, Zea Mays
MTHTKEHHEIMENLSIKCSAYCSILPSVTSIPSEINPQEPSSNEAISSVSTLITETNSSKKIKGDDPALILYTSGTTGKPKGVVHTHEGILSQVQILSEAWGYRSEDQFLHCLPLHHVHGLFNALFAPLYSGSVVEFIPKFSVSGIWQRWRESYPNDASKSTEAITVFTGVPTMYTRLLQGYDSMDPDQKSASSYAAKHLRLMMCGSSALPSPLMKRWEEVTGHRLLERYGMTEFVMALSNPLHGIRKEGTVGKPLPRIEAKIIMEDGAETTTGVGELCIRSPSLFKEYWKRPEVTAESFIDGGFFKTGDTVTVDEEGYFIILGRTNADIMKFGGYKLSALEIEAVLLEHDAVLECAVLGLPDEAYGEVICAIIVPKEDAKKKAGQDSKPALTLEALTSWSKDKLAPYKIPTRLYLWDSLPRNAMGKVNKKELKKLLGA

SEQ ID NO: 174953 - protein, 360 aa, Zea Mays
MRTQAWGRGAVARLMTPFNRRAAHASSPHLLRACSSASYTIALARLRRHFTSSASFSPAYSARQDTHTFMEVVQEVLRHGSADSVRAVIRANKKSYSLVQLIAASFDVYNILCSKNMTPNGMQDSSSKGRNGTGFLHGARVGIVAKPSPEFVAGVFGTWLSGGVAVPLALSYPEAELLHVMNDSDISMVLSTKEHHEIMENLSIKCSAYCSILPSVTSIPSEINPQEPSSNEAISSVSTLITETNSSKKIKGDDPALILYTSGTTGKPKGVVHTHEGILSQVQILSEAWGYRSEDQFLHCLPLHHVHGLFNALFAPLYSGSVVEFIPKFSVSGIWQRWRESYPNDASKSSNHVYTSAARV

SEQ ID NO: 174954 - protein, 412 aa, Zea Mays
MTHIPSEINPQEPSSNEAISSVSTLITETNSSKKIKGDDPALILYTSGTTGKPKGVVHTHEGILSQVQILSEAWGYRSEDQFLHCLPLHHVHGLFNALFAPLYSGSVVEFIPKFSVSGIWQRWRESYPNDASKSTEAITVFTGVPTMYTRLLQGYDSMDPDQKSASSYAAKHLRLMMCGSSALPSPLMKRWEEVTGHRLLERYGMTEFVMALSNPLHGIRKEGTVGKPLPRIEAKIIMEDGAETTTGVGELCIRSPSLFKEYWKRPEVTAESFIDGGFFKTGDTVTVDEEGYFIILGRTNADIMKFGGYKLSALEIEAVLLEHDAVLECAVLGLPDEAYGEVICAIIVPKEDAKKKAGQDSKPALTLEALTSWSKDKLAPYKIPTRLYLWDSLPRNAMGKVNKKELKKLLGA

SEQ ID NO: 174955 - protein, 243 aa, Zea Mays
MEGNEQGCGGLPQRPPVLGASMQPPIKKLVRQLDFNSAALAGNPAMAVAAAAVSRVLQPKASSVGFQHPQHVGAAMPMGVPQQLHQRVLPVMRLHQVVGHVPLAVSVPQLRPVPPQPVQRPPVAVPLKPESPKLRARLYEGKDSTPTKKKCCNCRNSKCLKLYCECFASGTYCDGCNCTNCFNNPDNEVARREAVEAILDRNPDAFRPKIGSSPHMHRNNVSSVVQILFAYFLKEHLLLLVFL

SEQ ID NO: 174956 - protein, 111 aa, Zea Mays
MRGHPPDRGAGFAGSRRSSGLDLADSWCSMSLEQWWGKCPRDPTRFHHWIGRARRGGEDVGGGHGAVEEDVAGDPQTAFLDLIAACAAGVVETHDVRRARRGGGGCRGGTD

SEQ ID NO: 174957 - protein, 170 aa, Zea Mays
MASDTEGIAALFSMYNDDEEEEDADEPSPPFPALPAAVTSSSPLSPQAGAEDPNPSVAPPSPSRPEELASLKTLASPHPSPARGLLPPLPSRRSSSPFAVSSPSPLRGPFFAPPADLPRPPRRGALAIVDYAHDETAMSPEQEYGLLVGWGDHEQHIRIWLRCSGCRGES

SEQ ID NO: 174958 - protein, 459 aa, Zea Mays
MASDTEGIAALFSMYNDDEEEEDADEPSPPFPALPAAVTSSSPLSPQAGAEDPNPSVAPPSPSRPEELASLKTLASPHPSPARGLLPPLPSRRSSSPFAVSSPSPLRGPFFAPPADLPRPPRRGALAIVDYAHDETAMSPEQEDGEITSNTYGFGSDAQAAEGNLEERTYSGTVHVMTPNTLAELSQHPDAPEQNQVGTDMAVDVTRTEIKGAQVEGTTDISTNGESDDPSNRFLPPPVTTKCSAALQFSSLFMFRGSVMAMLLFRHLHTFTLILVRAGKSFNAEVRNRKDYRNPDFLQHAVGYQEIDQIGTCFSKYVFDPYGYDKGDYYDEIEAEMKREVERKEQEKKRSPKVEFITGVQPPINASIPKIPGLAGVCTLPVPTEGVQKETRPNKKSKWDKVDGDVKNHVVPSGHDNLSATTAALLTSANVGAGYAGFAQQKRKEAEEKKNDHKSDRRS

SEQ ID NO: 174959 - protein, 181 aa, Zea Mays
MASDTEGIAALFSMYNDDEEEEDADEPSPPFPALPAAVTSSSPLSPQAGAEDPNPSVAPPSPSRPEELASLKTLASPHPSPARGLLPPLPSRRSSSPFAVSSPSPLRGPFFAPPADLPRPPRRGALAIVDYAHDETAMSPEQEVESVKMGRSRATHTDLAQMLRLQRGILKNELTPAQFML

SEQ ID NO: 174960 - protein, 437 aa, Zea Mays
MASDTEGIAALFSMYNDDEEEEDADEPSPPFPALPAAVTSSSPLSPQAGAEDPNPSVAPPSPSRPEELASLKTLASPHPSPARGLLPPLPSRRSSSPFAVSSPSPLRGPFFAPPADLPRPPRRGALAIVDYAHDETAMSPEQEDGEITSNTYGFGSDAQAAEERTYSGTVHVMTPNTLAELSQHPDAPEQNQVGTDMAVDVTRTEIKGAQVEGTTDISTNGESDDPSNRFLPPPVTTKCSAALQQKINRFLAYRRAGKSFNAEVRNRKDYRNPDFLQHAVGYQEIDQIGTCFSKYVFDPYGYDKGDYYDEIEAEMKREVERKEQEKKRSPKVEFITGVQPPINASIPKIPGLAGVCTLPVPTEGVQKETRPNKKSKWDKVDGDVKNHVVPSGHDNLSATTAALLTSANVGAGYAGFAQQKRKEAEEKKNDHKSDRRS

SEQ ID NO: 174961 - protein, 257 aa, Zea Mays
MESDTERDVHNSSRSTNPSGHHQRPLRLVKSTAFKREERRKRKDRKRQRHLVDELVRWQPLGAPTPLPAATGSVSPSQAQPDTPWPCDPPPPPDPAEADSWSWGPPAVPSPTPTQPTVDVAGAVPLHPQVVAVRSCRAFFESQFEEDEEEENEGSAARFFSELLGSDAALRGFYEAERDKGHFLCLVCEGSGARLGKRFAGCAALVQHAGSIARTKWRLAHRAFADSVGLLLGWGAGRIAPPPVPPPILTATVLLIK

SEQ ID NO: 174962 - protein, 668 aa, Zea Mays
MRADRAMGEGSGNQRIDLGAPLRSARLADAPTQYKAGLNSGPLRHPGTVPFAWEQRPGQPKSVRTRRAAPPTPPRETSRARPGETGGSPYYDAVAELDLQALRGVADQGSRTAAASRKVVVGENELAVAVESTKDVKKHEALPAAAVLQKQDGIVEEEEERFSDALDTLSRTESFAMNCSVSGLSGALDPGHGAEPGSRGFMMDRFLPAAQAVAVGSPQYTFRKAGAAGGTGNSGSGHARAAAVKAGVGNGEDRMRRAPVQLPYQHLPPNYLSCAYPRHEEHEEEDEGDDDDDDYDVHSTRGFSAKGCGLLPSLCAKTSLLLLNPMPAMKRGKVRGRVRGWQLPCKGQGQGQMAQSPLARSSQNKHLGCDSNGQSWEDVYKHKLEQKYLGQGEDDRRSKLTSESNQLTFWSDSPTGDGSSPYYHSIAGGMSPYRSYAVMSPSSKPNGSSGTGDKDDKASRSNGSGSFGKDHDRTSLVGSDDSSFKRSSSMSSGPDGTVHEDSMDHHRDTDSDTCHLGVLVHTKAALDANIYDTQPGGRKTVGNNLIVKDQVNDPLTEKIAELREPTFPLDDGKDLQRNASHELPQHLEDNDVAKKEIIPLQSLLPLPVPKSPSESWLSRTLPSVTNRSPLPSFLGIQVHSKKQAPWVITQPKENDHKPSRPRQIRFAD

SEQ ID NO: 174963 - protein, 340 aa, Zea Mays
MKRRMKGMTMTMTMMCIVPGGFQPRGVVCSLAYQSWEDVYKHKLEQKYLGQGEDDRRSKLTSESNQLTFWSDSPTGDGSSPYYHSIAGGMSPYRSYAVMSPSSKPNGSSGTGDKDDKASRSNGSGSFGKDHDRTSLVGSDDSSFKRSSSMSSGPDGTVHEDSMDHHRDTDSDTCHLGVLVHTKAALDANIYDTQPGGRKTVGNNLIVKDQVNDPLTEKIAELREPTFPLDDGKDLQRNASHELPQHLEDNDVAKKEIIPLQSLLPLPVPKSPSESWLSRTLPSVTNRSPLPSFLGIQVHSKKQAPWVITQPKENDHKPSRPRQIRFADVVEKPTSLDSEI

SEQ ID NO: 174964 - protein, 454 aa, Zea Mays
MPVARPEPQEPRVIAHVDMDCFYVQGRNFGRNGCAYSVFRSMRGDEAKRVCPGINLVQVPVARGKADLNLYRSAGAEVVAILASKGKCERASIDEVYLDLTDAANEMVLQAPPDSPEGIFMEAAKSNILGLPADASEKEKNVRAWLCQSEADYQDKLLACGAIIVAQLRVRVLEETQFTCSAGIAHNKMLAKLVSGMHKPAQQTVVPSSSVQDLLASLPVKKMKQLGGKLGSSLQDDLGVETIGDLLSFTEEKLQEQYGVNTGTWLWKTARGISGEEVEDRLLPKSHGCGKTFPGPRALKYSASVKGWLDQLCEELSERIQSDLNQNKRIAQTLTLHARAFKKNEHDSMKKFPSKSCPLRYGTGKIQEDAMRLFESGLHEFLESQNTGWGITSLSVTASKIFDIPSGTSSILRYIKGPSSAAALTIPDSPSSAAALAIPDSSFVPEDPSLGDVP

SEQ ID NO: 174965 - protein, 149 aa, Zea Mays
MPVARPEPQEPRVIAHVDMDCFYVQGRNFGRNGCAYSVFRSMRGDEAKRVCPGINLVQVPVARGKADLNLYRSAGAEVVAILASKGKCERASIDEVYLDLTDAANEMVLQAPPDSPEGIFMEAAKSNILGLPAVRMLSQLDLLLLCYLM

SEQ ID NO: 174966 - protein, 194 aa, Zea Mays
MPVARPEPQEPRVIAHVDMDCFYVQGRNFGRNGCAYSVFRSMRGDEAKRVCPGINLVQVPVARGKADLNLYRSAGAEVVAILASKGKCERASIDEVYLDLTDAANEMVLQAPPDSPEGIFMEAAKSNILGLPADASEKEKNVRAWLCQSEADYQDKLLACGAIIVAQLRVRVLEETQFTCSAGIAHNKVYNESY

SEQ ID NO: 174967 - protein, 627 aa, Zea Mays
MPVARPEPQEPRVIAHVDMDCFYVQGRNFGRNGCAYSVFRSMRGDEAKRVCPGINLVQVPVARGKADLNLYRSAGAEVVAILASKGKCERASIDEVYLDLTDAANEMVLQAPPDSPEGIFMEAAKSNILGLPADASEKEKNVRAWLCQSEADYQDKLLACGAIIVAQLRVRVLEETQFTCSAGIAHNKMLAKLVSGMHKPAQQTVVPSSSVQDLLASLPVKKMKQLGGKLGSSLQDDLGVETIGDLLSFTEEKLQEQYGVNTGTWLWKTARGISGEEVEDRLLPKSHGCGKTFPGPRALKYSASVKGWLDQLCEELSERIQSDLNQNKRIAQTLTLHARAFKKNEHDSMKKFPSKSCPLRYGTGKIQEDAMRLFESGLHEFLESQNTGWGITSLSVTASKIFDIPSGTSSILRYIKGPSSAAALTIPDSPSSAAALAIPDSSFVPEDPSLDNDVFVEPIHEEECQPSTSEKEDDNNTHSASAFSAKKCRANEEKRISKKLPGVQGTSSILKFLSRGQSTLHEKRKSDGLICSHQGLLDCPGSSSEAYKAGAHNVPAEAEDRNNTNSCAEPSGSNTWTFNLQDIDPAVVEELPPEIQREIQGWVRPSKHPITKRRGSTISSYFPPARS

SEQ ID NO: 174968 - protein, 266 aa, Zea Mays
MLAKLVSGMHKPAQQTVVPSSSVQDLLASLPVKKMKQLGGKLGSSLQDDLGVETIGDLLSFTEEKLQEQYGVNTGTWLWKTARGISGEEVEDRLLPKSHGCGKTFPGPRALKYSASVKGWLDQLCEELSERIQSDLNQNKRIAQTLTLHARAFKKNEHDSMKKFPSKSCPLRYGTGKIQEDAMRLFESGLHEFLESQNTGWGITSLSVTASKIFDIPSGTSSILRYIKGPSSAAALTIPDSPSSAAALAIPDSSFVPEDPSLGDVP

SEQ ID NO: 174969 - protein, 565 aa, Zea Mays
MPVARPEPQEPRVIAHVDMDCFYVQVEQRRNPALRGQPTAVVQYNGWKGGGLIAVSYEARGFGVKRSMRGDEAKRVCPGINLVQVPVARGKADLNLYRSAGAEVVAILASKGKCERASIDEVYLDLTDAANEMVLQAPPDSPEGIFMEAAKSNILGLPADASEKEKNVRAWLCQSEADYQDKLLACGAIIVAQLRVRVLEETQFTCSAGIAHNKMLAKLVSGMHKPAQQTVVPSSSVQDLLASLPVKKMKQLGGKLGSSLQDDLGVETIGDLLSFTEEKLQEQYGVNTGTWLWKTARGISGEEVEDRLLPKSHGCGKTFPGPRALKYSASVKGWLDQLCEELSERIQSDLNQNKRIAQTLTLHARAFKKNEHDSMKKFPSKSCPLRYGTGKIQEDAMRLFESGLHEFLESQNTGWGITSLSVTASKIFDIPSGTSSILRYIKGPSSAAALTIPDSPSSAAALAIPDSSFVPEDPSLDNDVFVEPIHEEECQPSTSEKEDDNNTHSASAFSAKKCRANEEKRISKKLPGVQHQCLIFKLEGGITSPKLMLGIAFCIRNDQIEGFYF

SEQ ID NO: 174970 - protein, 439 aa, Zea Mays
MLAKLVSGMHKPAQQTVVPSSSVQDLLASLPVKKMKQLGGKLGSSLQDDLGVETIGDLLSFTEEKLQEQYGVNTGTWLWKTARGISGEEVEDRLLPKSHGCGKTFPGPRALKYSASVKGWLDQLCEELSERIQSDLNQNKRIAQTLTLHARAFKKNEHDSMKKFPSKSCPLRYGTGKIQEDAMRLFESGLHEFLESQNTGWGITSLSVTASKIFDIPSGTSSILRYIKGPSSAAALTIPDSPSSAAALAIPDSSFVPEDPSLDNDVFVEPIHEEECQPSTSEKEDDNNTHSASAFSAKKCRANEEKRISKKLPGVQGTSSILKFLSRGQSTLHEKRKSDGLICSHQGLLDCPGSSSEAYKAGAHNVPAEAEDRNNTNSCAEPSGSNTWTFNLQDIDPAVVEELPPEIQREIQGWVRPSKHPITKRRGSTISSYFPPARS

SEQ ID NO: 174971 - protein, 228 aa, Zea Mays
MLAKLVSGMHKPAQQTVVPSSSVQDLLASLPVKKMKQLGGKLGSSLQDDLGVETIGDLLSFTEEKLQEQYGVNTGTWLWKTARGISGEEVEDRLLPKSHGCGKTFPGPRALKYSASKNEHDSMKKFPSKSCPLRYGTGKIQEDAMRLFESGLHEFLESQNTGWGITSLSVTASKIFDIPSGTSSILRYIKGPSSAAALTIPDSPSSAAALAIPDSSFVPEDPSLGDVP

SEQ ID NO: 174972 - protein, 435 aa, Zea Mays
MLAKLVSGMHKPAQQTVVPSSSVQDLLASLPVKKMKQLGGKLGSSLQDDLGVETIGDLLSFTEEKLQEQYGVNTGTWLWKTARGISGEEVEDRLLPKSHGCGKTFPGPRALKYSASVKGWLDQLCEELSERIQSDLNQNKRIAQTLTLHARAFKKNEHDSMKKFPSKSCPLRYGTGKIQEDAMRLFESGLHEFLESQNTGWGITSLSVTASKIFDIPSGTSSILRYIKGPSSAAALTIPDSPSSAAALAIPDSSFVPEDPSLDNDVFVEPIHEEECQPSTSEKEDDNNTHSASAFSAKKCRANEEKRISKKLPGVQGTSSILKFLSRGQSTLHEKRKSDGLICSHQGPGSSSEAYKAGAHNVPAEAEDRNNTNSCAEPSGSNTWTFNLQDIDPAVVEELPPEIQREIQGWVRPSKHPITKRRGSTISSYFPPARS

SEQ ID NO: 174973 - protein, 608 aa, Zea Mays
MPVARPEPQEPRVIAHVDMDCFYVQVEQRRNPALRGQPTAVVQYNGWKGGGLIAVSYEARGFGVKRSMRGDEAKRVCPGINLVQVPVARGKADLNLYRSAGAEVVAILASKGKCERASIDEVYLDLTDAANEMVLQAPPDSPEGIFMEAAKSNILGLPADASEKEKNVRAWLCQSEADYQDKLLACGAIIVAQLRVRVLEETQFTCSAGIAHNKMLAKLVSGMHKPAQQTVVPSSSVQDLLASLPVKKMKQLGGKLGSSLQDDLGVETIGDLLSFTEEKLQEQYGVNTGTWLWKTARGISGEEVEDRLLPKSHGCGKTFPGPRALKYSASVKGWLDQLCEELSERIQSDLNQNKRIAQTLTLHARAFKKNEHDSMKKFPSKSCPLRYGTGKIQEDAMRLFESGLHEFLESQNTGWGITSLSVTASKIFDIPSGTSSILRYIKGPSSAAALTIPDSPSSAAALAIPDSSFVPEDPSLDNDVFVEPIHEEECQPSTSEKEDDNNTHSASAFSAKKCRANEEKRISKKLPGVQVSCSFLLGGYHQTDFLLVILKLLVNEDLIFLLLLFACFRATKQHQCLIFKLEGGITSPKLMLGIAFCIRNDQIEGFYF

SEQ ID NO: 174974 - protein, 351 aa, Zea Mays
MLAKLVSGMHKPAQQTVVPSSSVQDLLASLPVKKMKQLGGKLGSSLQDDLGVETIGDLLSFTEEKLQEQYGVNTGTWLWKTARGISGEEVEDRLLPKSHGCGKTFPGPRALKYSASVKGWLDQLCEELSERIQSDLNQNKRIAQTLTLHARAFKKNEHDSMKKFPSKSCPLRYGTGKIQEDAMRLFESGLHEFLESQNTGWGITSLSVTASKIFDIPSGTSSILRYIKGPSSAAALTIPDSPSSAAALAIPDSSFVPEDPSLDNDVFVEPIHEEECQPSTSEKEDDNNTHSASAFSAKKCRANEEKRISKKLPGVQHQCLIFKLEGGITSPKLMLGIAFCIRNDQIEGFYF

SEQ ID NO: 174975 - protein, 649 aa, Zea Mays
MPVARPEPQEPRVIAHVDMDCFYVQVEQRRNPALRGQPTAVVQYNGWKGGGLIAVSYEARGFGVKRSMRGDEAKRVCPGINLVQVPVARGKADLNLYRSAGAEVVAILASKGKCERASIDEVYLDLTDAANEMVLQAPPDSPEGIFMEAAKSNILGLPADASEKEKNVRAWLCQSEADYQDKLLACGAIIVAQLRVRVLEETQFTCSAGIAHNKMLAKLVSGMHKPAQQTVVPSSSVQDLLASLPVKKMKQLGGKLGSSLQDDLGVETIGDLLSFTEEKLQEQYGVNTGTWLWKTARGISGEEVEDRLLPKSHGCGKTFPGPRALKYSASVKGWLDQLCEELSERIQSDLNQNKRIAQTLTLHARAFKKNEHDSMKKFPSKSCPLRYGTGKIQEDAMRLFESGLHEFLESQNTGWGITSLSVTASKIFDIPSGTSSILRYIKGPSSAAALTIPDSPSSAAALAIPDSSFVPEDPSLDNDVFVEPIHEEECQPSTSEKEDDNNTHSASAFSAKKCRANEEKRISKKLPGVQGTSSILKFLSRGQSTLHEKRKSDGLICSHQGPGSSSEAYKAGAHNVPAEAEDRNNTNSCAEPSGSNTWTFNLQDIDPAVVEELPPEIQREIQGWVRPSKHPITKRRGSTISSYFPPARS

SEQ ID NO: 174976 - protein, 115 aa, Zea Mays
MEINKVQSIKVYLMPWFNETLFGRAPLAPPSLLPYQSRKWLAVQYRKPKAVASNQRTNLQRQYTEWGPVHNLPSGLCGNTAITLGPWRGSRMESGSMSVIATDQRASALGWQPSA

SEQ ID NO: 174977 - protein, 107 aa, Zea Mays
MSSNQAAARQACDELGLTPWRLTKSSPSRFTWLAVQYRKPKAVASNQRTNLQRQYTEWGPVHNLPSGLCGNTAITLGPWRGSRMESGSMSVIATDQRASALGWQPSA

SEQ ID NO: 174978 - protein, 292 aa, Zea Mays
MDFKGFWESRFGGKKEPEPEQNGHANGVQNQKRTSDLAVYEQFEQQARQTQVRAAAIRDGDADVIQKPLLPSFESAEMRNLAETLLRDIIRGSPDVKWESIKGLENAKRLLKEAVVMPIKYPKYFTGLLSPWKGILLFGPPGTGKTMLAKAVATECKTTFFNISASSIVSKWRGDSEKLVKVLFELARHHAPSTIFLDEIDAIISQRGEARSEHEASRRLKTELLIQMDGLTKTNDLVFVLAATNLPWELDAAMLRRLEKRILVPLPEGEARYSSRVQRSCHATTETSHVSS

SEQ ID NO: 174979 - protein, 227 aa, Zea Mays
MNPGMEDDPTCGPILDNVAVKKLFTPDKPKDNVVLNGDFEEGPWMFPNTSFGVLLPTNLDEQTSAIPGWMIESNRAVRYIDSDEYKVPQGKRAIELLSGKEGIISQMVETTPQKVYSLTFTLGTAGDSCQPPMAVMAFAGDQAQNFHYSPMGNATSQAANVTFTARAERTRVAFYSVYYNTRSDDHSSLCGPVIDDVRVWALNAAAGLKASIGLVLGIVGVVGMVLF

SEQ ID NO: 174980 - protein, 316 aa, Zea Mays
MILIVPQGDHAVRLGNDASVGQVVDVEKGSEYAITFSAARTCAQLEALNVSVLGGVSQTVDLQTLYNIEGWDAYALAFQATEEQAHLQFMNPGMEDDPTCGPILDNVAVKKLFTPDKPKDNVVLNGDFEEGPWMFPNTSFGVLLPTNLDEQTSAIPGWMIESNRAVRYIDSDEYKVPQGKRAIELLSGKEGIISQMVETTPQKVYSLTFTLGTAGDSCQPPMAVMAFAGDQAQNFHYSPMGNATSQAANVTFTARAERTRVAFYSVYYNTRSDDHSSLCGPVIDDVRVWALNAAAGLKASIGLVLGIVGVVGMVLF

SEQ ID NO: 174981 - protein, 63 aa, Zea Mays
MKCIDNNHDMSTHTLCIRIQLTARSLQLMQVPHDSGTKSICMCRVPETKSKVLQLHSIIPMQL

SEQ ID NO: 174982 - protein, 224 aa, Zea Mays
MWWRAVRRRWVATARPASSAAAGAEKSCRAVVVPRFGGPEVLEVRQGMPVPDLKPQEMRCGYGRSIFEPLLPLIIGRDISGEVAATGTLASSFSIGQEVFGSLHPTALRGTYADYAILSLDELTLKPSTLSHVEASAIPFAALTAWRALHGTARISEGQRVLVIGGGGAVGLAAVQLAVAAGCVVSATCGTQSIERVMGVGAEQAIDYTAEVSSLWCSCPCTIF

SEQ ID NO: 174983 - protein, 1217 aa, Zea Mays
MCYTCTFSLCKACMKDAKFSCVRENKGFCATCMNTVMLIENREEAADPMEVDFDDKSSWWYLFKDYWLNLKTNLSLTVEEISAAKSQKSGELPDTNDEINSESSSGRHLENNTSKKRGRNRSKQAAIEQGSEGKETTGKSAKLGLSGIRDAQTSSGKKVRKLSRRSLSSQHSPKDSESVGTSTSSADEVSWASKELINFVAHARNGDKSVINQYDVQPLLLDYIKRNNLRDPRRKSQIICDSLLQSLFGKDRVGHFEMLKLLESHFPTSEVSPIDADENHGGVVDPDPSQDADGNSEASVVMSSEKRRKSQLIDDVDTFDEKVVGSFVRIRIPGTGQRQDIYRLVQIVGTGRSAEKYKSGKRTTDITLVILNLDKREAVTIDIISNQEFTEEECKRLRQSIKYGFIPRLTVGEVQEKAKVLQTLKVNDWIESEKMRLGHLRDRASDMGRRKELRECVEKLKLLSTPEERARRLNEEPEIHADPAMDPYYESPEEQEQEIERSSFNKSRSSFLRKDGSLVSPGKGDGRNAAQRDPKTNWESNRNTRAESSSHMESPLSRRSTYSSQGESVGYTNKPEGLNIDAQTVRLEGTTRSAPQGSPGASSGSLATNIGSGAKTASQSAINESEKIWLYMDPSNKIQGPFSIIQLRKWNSNGYFPPSLKIWKASEKQDDSILLTDALAGKFEKDLPPWEPPHVSLSQINKTPLEQSTIADEQTPKSVIAKSFSSSDQRHDYSSTNLGTTMIHSGSQGYYGMQNSHAAYTSQQSLTGSWNATSSQFGVAISPLTPTQPAMQSLSGQNIVAAENMGHLTTGMAPATANAEMVNSDLTSQNQMLSSLPQTDDRLADGIESKSGEDVSHGRVRSSAEAIGPQDAQLGPVQLNAQQLENTRNHMSSIDLSKSMMPSQMMSAPSAASVQPSLTTTARSDNQSSGWAVPAQMANTPGQSQITGNLTWGNTPQGDASLGWGMVGQSNMNMPWVASAQGASGYNMGVAMPTQPNAVPNMGWLPNPGNTSMNMIWAATQGQGTPNAAPMMGGQMQGVPMAPWGGVAAGSANSYPAWGNQQAGNMNQNVGWSAPVQGNPGQANNNMNWNAPNGNPNWNNQQRENGGRHSGHRGAFSGGDSGGRSWKSRSGGDGGSRGHSRFSHSTNTEGYPSRTDRHYDRQNSGNERRYENHNERNGRQFDRQPSDNERNHDRPDGRHGGRDDDRQADRSESRELR

SEQ ID NO: 174984 - protein, 1797 aa, Zea Mays
MSDAEPPPAMEEATLTTPDVVLGEGYKDIEGQKDGRTCYGEGGDVIVADEFAGIVEDPNQPDVFKAKEPEEGVDVGGQTNVISAAVHVLTEVDAAVSSSTLVDDPMEVGMQTKEVSAAADDLIEVGAALVPSAQDHTAVAACLVNDDCNIVITGGVHRSDDQTVQEFGGDSLDADEVAPLVNDVQDDSARIDMDVAANDHVHAQDQESSQLDVATALLNEVETEIAEAGDHVVQDCTNMDMQIQTGDDKHVGTIADTATDEEGKHMGEDTMGRDGSEKHDGAVGVDVSDERVEMGRGGLSGDDNEQKEVATADEDRVEEEDMQVDAVSITGDMVEEGRIAVEYIAGEAVNGKDGIDVPEEKTPQIDKAGNDIPEEEGLQMGGAGLIGNKNGPKEAVIADYHGVEENTILMEAATTTNNDDDDDNKIVGEDVAEAVNDITGDGVPEQEAAHMDDDDDDEPPPLVAKKGGGRRKRGRPSSKVQAVVKPSVKGKDEEEVCFICFDGGDLVICDRRGCPKAYHPSCVNRDDDFFKSKGRWNCGWHICSNCQKPARHMCYTCTFSLCKACMKDAKFSCVRENKGFCATCMNTVMLIENREEAADPMEVDFDDKSSWWYLFKDYWLNLKTNLSLTVEEISAAKSQKSGELPDTNDEINSESSSGRHLENNTSKKRGRNRSKQAAIEQGSEGKETTGKSAKLGLSGIRDAQTSSGKKVRKLSRRSLSSQHSPKDSESVGTSTSSADEVSWASKELINFVAHARNGDKSVINQYDVQPLLLDYIKRNNLRDPRRKSQIICDSLLQSLFGKDRVGHFEMLKLLESHFPTSEVSPIDADENHGGVVDPDPSQDADGNSEASVVMSSEKRRKSRKYDLKHQPNIDDYAAIDNHNIGLMYLRRNLMEELIDDVDTFDEKVVGSFVRIRIPGTGQRQDIYRLVQIVGTGRSAEKYKSGKRTTDITLVILNLDKREAVTIDIISNQEFTEEECKRLRQSIKYGFIPRLTVGEVQEKAKVLQTLKVNDWIESEKMRLGHLRDRAIFTLRECVEKLKLLSTPEERARRLNEEPEIHADPAMDPYYESPEEQEQEIERSSFNKSRSSFLRKDGSLVSPGKGDGRNAAQRDPKTNWESNRNTRAESSSHMESPLSRRSTYSSQGESVGYTNKPEGLNIDAQTVRLEGTTRSAPQGSPGASSGSLATNIGSGAKTASQSAINESEKIWLYMDPSNKIQGPFSIIQLRKWNSNGYFPPSLKIWKASEKQDDSILLTDALAGKFEKDLPPWEPPHVSLSQINKTPLEQSTIADEQTPKSVIAKSFSSSDQRHDYSSTNLGTTMIHSGSQGYYGMQNSHAAYTSQQSLTGSWNATSSQFGVAISPLTPTQPAMQSLSGQNIVAAENMGHLTTGMAPATANAEMVNSDLTSQNQMLSSLPQTDDRLADGIESKSGEDVSHGRVRSSAEAIGPQDAQLGPVQLNAQQLENTRNHMSSIDLSKSMMPSQMMSAPSAASVQPSLTTTARSDNQSSGWAVPAQMANTPGQSQITGNLTWGNTPQGDASLGWGMVGQSNMNMPWVASAQGASGYNMGVAMPTQPNAVPNMGWLPNPGNTSMNMIWAATQGQGTPNAAPMMGGQMQGVPMAPWGGVAAGSANSYPAWGNQQAGNMNQNVGWSAPVQGNPGQANNNMNWNAPNGNPNWNNQQRENGGRHSGHRGAFSGGDSGGRSWKSRSGGDGGSRGHSRFSHSTNTEGYPSRTDRHYDRQNSGNERRYENHNERNGRQFDRQPSDNERNHDRPDGRHGGRDDDRQADRSESRELR

SEQ ID NO: 174985 - protein, 1769 aa, Zea Mays
MSDAEPPPAMEEATLTTPDVVLGEGYKDIEGQKDGRTCYGEGGDVIVADEFAGIVEDPNQPDVFKAKEPEEGVDVGGQTNVISAAVHVLTEVDAAVSSSTLVDDPMEVGMQTKEVSAAADDLIEVGAALVPSAQDHTAVAACLVNDDCNIVITGGVHRSDDQTVQEFGGDSLDADEVAPLVNDVQDDSARIDMDVAANDHVHAQDQESSQLDVATALLNEVETEIAEAGDHVVQDCTNMDMQIQTGDDKHVGTIADTATDEEGKHMGEDTMGRDGSEKHDGAVGVDVSDERVEMGRGGLSGDDNEQKEVATADEDRVEEEDMQVDAVSITGDMVEEGRIAVEYIAGEAVNGKDGIDVPEEKTPQIDKAGNDIPEEEGLQMGGAGLIGNKNGPKEAVIADYHGVEENTILMEAATTTNNDDDDDNKIVGEDVAEAVNDITGDGVPEQEAAHMDDDDDDEPPPLVAKKGGGRRKRGRPSSKVQAVVKPSVKGKDEEEVCFICFDGGDLVICDRRGCPKAYHPSCVNRDDDFFKSKGRWNCGWHICSNCQKPARHMCYTCTFSLCKACMKDAKFSCVRENKGFCATCMNTVMLIENREEAADPMEVDFDDKSSWWYLFKDYWLNLKTNLSLTVEEISAAKSQKSGELPDTNDEINSESSSGRHLENNTSKKRGRNRSKQAAIEQGSEGKETTGKSAKLGLSGIRDAQTSSGKKVRKLSRRSLSSQHSPKDSESVGTSTSSADEVSWASKELINFVAHARNGDKSVINQYDVQPLLLDYIKRNNLRDPRRKSQIICDSLLQSLFGKDRVGHFEMLKLLESHFPTSEVSPIDADENHGGVVDPDPSQDADGNSEASVVMSSEKRRKSQLIDDVDTFDEKVVGSFVRIRIPGTGQRQDIYRLVQIVGTGRSAEKYKSGKRTTDITLVILNLDKREAVTIDIISNQEFTEEECKRLRQSIKYGFIPRLTVGEVQEKAKVLQTLKVNDWIESEKMRLGHLRDRASDMGRRKELRECVEKLKLLSTPEERARRLNEEPEIHADPAMDPYYESPEEQEQEIERSSFNKSRSSFLRKDGSLVSPGKGDGRNAAQRDPKTNWESNRNTRAESSSHMESPLSRRSTYSSQGESVGYTNKPEGLNIDAQTVRLEGTTRSAPQGSPGASSGSLATNIGSGAKTASQSAINESEKIWLYMDPSNKIQGPFSIIQLRKWNSNGYFPPSLKIWKASEKQDDSILLTDALAGKFEKDLPPWEPPHVSLSQINKTPLEQSTIADEQTPKSVIAKSFSSSDQRHDYSSTNLGTTMIHSGSQGYYGMQNSHAAYTSQQSLTGSWNATSSQFGVAISPLTPTQPAMQSLSGQNIVAAENMGHLTTGMAPATANAEMVNSDLTSQNQMLSSLPQTDDRLADGIESKSGEDVSHGRVRSSAEAIGPQDAQLGPVQLNAQQLENTRNHMSSIDLSKSMMPSQMMSAPSAASVQPSLTTTARSDNQSSGWAVPAQMANTPGQSQITGNLTWGNTPQGDASLGWGMVGQSNMNMPWVASAQGASGYNMGVAMPTQPNAVPNMGWLPNPGNTSMNMIWAATQGQGTPNAAPMMGGQMQGVPMAPWGGVAAGSANSYPAWGNQQAGNMNQNVGWSAPVQGNPGQANNNMNWNAPNGNPNWNNQQRENGGRHSGHRGAFSGGDSGGRSWKSRSGGDGGSRGHSRFSHSTNTEGYPSRTDRHYDRQNSGNERRYENHNERNGRQFDRQPSDNERNHDRPDGRHGGRDDDRQADRSESRELR

SEQ ID NO: 174986 - protein, 294 aa, Zea Mays
MDAGTNERRFVGRVDCRGGPAPGWVHSFPITDHYVVVPEMPLRYCARNLLRAEPTPLYKFEWHLESGSYMHVMCKASGRVVATVEVPPFVTFHFINAYEEKDDEGRVTAIIADCCEHNANTSILDKLRLQNLRSSTGQDVLPDARVGRFRIPLDGSPFGELEPALDPDQHGRGMDMCSINPAHVGKKYRYAYACGAHRPCNFPNTLTKIDLVEKTAKNWYEEGAVPSEPFFVPRPGAVEEDDGVAISMVSAKDGSAYALVLDAKTFHEIARAKFPYAMPYGLHCCWVPRSTSDA

SEQ ID NO: 174987 - protein, 326 aa, Zea Mays
MAVGSGLALYHVLGVATCVALLYFTFGEVDLRHISLPSLPVSRPSPFRAAAVAAPFVERRGAQLFLAGRPFYVNGWNSYWLMDQAVEPRSRDRVSRMFRTGAEMGLTVCRSWAFNDGAYNALQVSPGHFDERVFKALDRVVVEAGRHGVRLILSLANNLEAYGGKTQYVRWAWEEGVGMSASNDSFFYDPAIRDYFKVYLKTLLTRKNHLTGVEYRDDPTILAWELMNEPRCTTDPSGDTLQRWMEEMSAYVKSIDKKHLLTVGTEGFYGPTSPQEKLDVNPGTWKDNNYGSDFIRNAKIPDIDFASIHLYPDTCSTPRWTRSSSS

SEQ ID NO: 174988 - protein, 990 aa, Zea Mays
MVNEIRFSEEDDSKADDLGLPSEDSGDGDFDPAGPDSSEDQNDGLNSEESDFTSDSDYFCAEIAKSCGQDEVSASPLSNVINRTDRMKLRAYSRRSNEENHNHAFMDMELEQDIVLPVPSRRQVERLDYKKLYDEAYEEESSNSSDEEEWSGKELLEGSGTDSLDERLRPVKRCSRRAPAGQQNNELTPQSRPHGSNSEQKTEVLRSNGSSSTGRKYDPEVTQKLKVHFEKDPYPSRETKENLSEELGLTFNQVSKWFSSTRHYSRVASAKKEMHPDSHTCENNDETTVDSMQAKQPNAGVMEKLTGDRNGIVPEKPMVQDNLNQGAMEKLTRDKNDIVPEKPVMQSSLNQCNNEDIPLSGTEIEMESYEQESSDSSDEEWSILSTPRKTRLQDHGKSSVTESLRSAKRCSRRAPAREQNNERIQSEQLHGSASEQQTEFLRSNVSSGKVSKYHFGPIVSQKLKEHFEKDPYPCRATKESLAQELGLTFNQISKWFSGTRHYSRDAVAKNQKRPGENTTVNNNSTTFDDIQVIEPNVGLIDKPAADVNDMISEKLMVQINLNEGIEEDIPPSQYARCEEKITMTPAAISREAGLPGYGPGPGENFLQVSSRNTSCEQSVILAPTAIAREVGPPGYATGENQGNGAPWNTSYERRLFMNPVTSSRAVSPPGYGPEESRGSGISWNTSSEQILFMSPTTISRELGPPGYGPREDQCSGTSWNASCELGVFMSPVTTSREDSPPGYGPRENQENDNMRCELRMFTSPTTISREVGPPGYELTGKNKGNGASCTTNYQQGAFTSPEAFPREACPPGFVSGENQGNDTPWYMSSKQMAFTSPTTNPRVGPPGYGQENQGSRVSWNTSYEQGVFMSSTNISREAGPPGYGPGESQGNITSWISTGGQRMFTGPSTIPNEVGQQGYGPSGIPGTDGSRSMDLKAFPPGYGPAGENQGGGASGSVISPQARSAENVEFSDDARKKAIQRELRRRQKFR

SEQ ID NO: 174989 - protein, 952 aa, Zea Mays
MKSGFLKRMIAKRMTSACLRRTQGMVTSIQQDEVSASPLSNVINRTDRMKLRAYSRRSNEENHNHAFMDMELEQDIVLPVPSRRQVERLDYKKLYDEAYEEESSNSSDEEEWSGKELLEGSGTDSLDERLRPVKRCSRRAPAGQQNNELTPQSRPHGSNSEQKTEVLRSNGSSSTGRKYDPEVTQKLKVHFEKDPYPSRETKENLSEELGLTFNQVSKWFSSTRHYSRVASAKKEMHPDSHTCENNDETTVDSMQAKQPNAGVMEKLTGDRNGIVPEKPMVQDNLNQGAMEKLTRDKNDIVPEKPVMQSSLNQCNNEDIPLSGTEIEMESYEQESSDSSDEEWSILSTPRKTRLQDHGKSSVTESLRSAKRCSRRAPAREQNNERIQSEQLHGSASEQQTEFLRSNVSSGKVSKYHFGPIVSQKLKEHFEKDPYPCRATKESLAQELGLTFNQISKWFSGTRHYSRDAVAKNQKRPGENTTVNNNSTTFDDIQVIEPNVGLIDKPAADVNDMISEKLMVQINLNEGIEEDIPPSQYARCEEKITMTPAAISREAGLPGYGPGPGENFLQVSSRNTSCEQSVILAPTAIAREVGPPGYATGENQGNGAPWNTSYERRLFMNPVTSSRAVSPPGYGPEESRGSGISWNTSSEQILFMSPTTISRELGPPGYGPREDQCSGTSWNASCELGVFMSPVTTSREDSPPGYGPRENQENDNMRCELRMFTSPTTISREVGPPGYELTGKNKGNGASCTTNYQQGAFTSPEAFPREACPPGFVSGENQGNDTPWYMSSKQMAFTSPTTNPRVGPPGYGQENQGSRVSWNTSYEQGVFMSSTNISREAGPPGYGPGESQGNITSWISTGGQRMFTGPSTIPNEVGQQGYGPSGIPGTDGSRSMDLKAFPPGYGPAGENQGGGASGSVISPQARSAENVEFSDDARKKAIQRELRRRQKFR

SEQ ID NO: 174990 - protein, 210 aa, Zea Mays
MVPDPPSPLQRNKQPAKQMSKSSSHRPSKSSTPSHAPGRLTLSLTSPFASPLLLLLTAAAAAAVFLYSLTAARSYGARGEAPPLSSPTVETMERARAIWELPAAGPARAVLFVAHGCRCRPENFWPPSPRCPGCVGLPEDVAITDRALRRRFAVLAVASAGECWSPGKEAGGQDEPRRRRDYDRRGRVRQLSWRASGGLPSRDVHPHAER

SEQ ID NO: 174991 - protein, 198 aa, Zea Mays
MSINLRLSSIVILNLHNSNILRDDTGHLKVADFDLCKMLKWRRKVREDKAVTSPGNACKYVAPEVLRNEEYDTKVDVFSFALILQEMIEGCLPYYDKKNDEIEKAHNSKERPPFRAPPKHYAHGLRELIEQCWSENSADRPDFRVIINRLSAIQNEIAHRNRWKARPLKCFLSIEGMWKKDRNEGSTTRSSRSSRSYF

SEQ ID NO: 174992 - protein, 238 aa, Zea Mays
MMIVMEFMRKGDLRTHLSKKGALPPSYAVKLALDIARGMNYLHEHKPQAIIHRDLEPSNILRDDTGHLKVADFDLCKMLKWRRKVREDKAVTSPGNACKYVAPEVLRNEEYDTKVDVFSFALILQEMIEGCLPYYDKKNDEIEKAHNSKERPPFRAPPKHYAHGLRELIEQCWSENSADRPDFRVIINRLSAIQNEIAHRNRWKARPLKCFLSIEGMWKKDRNEGSTTRSSRSSRSYF

SEQ ID NO: 174993 - protein, 300 aa, Zea Mays
MESKPHAPASGLATPRFRLGKQSSLAPERGGEGGGAGSADGSAEANGVMSFQLMYLAHEGSAEGIRELLDGGVDPNFRDSDGRTALHIAACEGHAEVVELLLQSGAEAAVEDQWGSTPLADAMHYQNHDVIKIFEKHGSKHKIAPMHVNNVREVPEYEIDPAELDFSNGNDLSKGTFRKATWRGIPVAVKKLDDDLIADGSKVQAFRDELDVLQLIRHPNVVQFLGAVTQSNPMMIVMEFMRKGDLRTHLSKKGALPPSYAVKLALDIARGMNYLHEHKPQAIIHRDLEPSWQILIYVRC

SEQ ID NO: 174994 - protein, 413 aa, Zea Mays
MESKPHAPASGLATPRFRLGKQSSLAPERGGEGGGAGSADGSAEANGVMSFQLMYLAHEGSAEGIRELLDGGVDPNFRDSDGRTALHIAACEGHAEVVELLLQSGAEAAVEDQWGSTPLADAMHYQNHDVIKIFEKHGSKHKIAPMHVNNVREVPEYEIDPAELDFSNGNDLSKGTFRKATWRGIPVAVKKLDDDLIADGSKVQAFRDELDVLQLIRHPNVVQFLGAVTQSNPMMIVMEFMRKGDLRTHLSKKGALPPSYAVKLALDIARGMNYLHEHKPQAIIHRDLEPSNILRDDTGHLKVADFDLCKMLKWRRKVREDKAVTSPGNACKYVAPEVLRNEEYDTKVDVFSFALILQEMIEGCLPYYDKKNDEIEKAHNSKERPPFRAPPKHYAHGLRDAGAKILQTGLILE

SEQ ID NO: 174995 - protein, 365 aa, Zea Mays
MESKPHAPASGLATPRFRLGKQSSLAPERGGEGGGAGSADGSAEANGVMSFQLMYLAHEGSAEGIRELLDGGVDPNFRDSDGRTALHIAACEGHAEVVELLLQSGAEAAVEDQWGSTPLADAMHYQNHDVIKIFEKHGSKHKIAPMHVNNVREVPEYEIDPAELDFSNGNDLSKGTFRKATWRGIPVAVKKLDDDLIADGSKVQAFRDELDVLQLIRHPNVVQFLGAVTQSNPMMIVMEFMRKGDLRTHLSKKGALPPSYAVKLALDIARGMNYLHEHKPQAIIHRDLEPSNILRDDTGHLKVADFDLCKMLKWRRKVREDKAVTSPGNACKYVAPEVLRNEEYDTKVDVFSFALILQEVSCDIL

SEQ ID NO: 174996 - protein, 556 aa, Zea Mays
MQGEYADYGDAVTFDTTHKTNIYDKPLGMFIGANNHLQCTLFGFVLLGDETVQTFEWAFNSFKTCMGCEGPRVMLTDQDPSMPIALRTVFPKTVHRLCLWHVQNRFMPFLNELYARFADKDFKTTFQSIIHHPLTPHEFECAWEMMLEEFNLHEDMTLRKLYEIRKEWIPAFFKNDFCGVMVSTQRSESMNRLVKQSHVDANTPLHEFAKQMMKMLHSKKMKESKETLMSKGPRTTDILYRFEVRVSRAYTRAVMNRFEESIKYATAYRILKVTNGCDKDWIVQHTKRSNKIVWGQHQFKITTDIEAGEYTCECKQWEHTGLLCVHLLRAFMHLQVEKIPSKYILQRYTVSSRKDVPFERINKSFRGKDGVTKSYRQKMLLTKTMKVVRQACMSKAGYDKTMDVLDELDGILCRLEPDIGCNGSCDVSNDEENQEGEVNNNNAGVGMEDDNSITCHKMDEHNTMTGCEHALTLITSGNQVDNMRIPPEVGDTSSPCHVAHDQMEQIGASSEAKKRLNFNVDVINLRMPDRARPKGRTIKNIEDRIMKLGAKRKKEE

SEQ ID NO: 174997 - protein, 50 aa, Zea Mays
MESTVERISSSVQSWVKDHELAAIALEVVAITARLQVVGWRGYGEDIATS

SEQ ID NO: 174998 - protein, 707 aa, Zea Mays
MMSRSYTNLLDLAEGNFAALGPVGGSGRQRHGSFGLRRMSRVMTVPGTLTELDGEDESEPAATSSVASDVPSSVAADRLIVVSNQLPIVARRRPDGRGWSFSWDDDSLLLQLRDGIPDEMEVLFVGSLRADVPAAEQDAVSQALLDRFRCAPVFLPDHLNDRFYHGFCKRQLWPLFHYMLPFSSPASASAAATSSSVATSSPGNGCFDRSAWEAYVLANKFFFEKVVEVINPEDDYVWVHDYHLLALPTFLRRRFNRLRIGFFLHSPFPSSEIYRTLPVRDEILKALLNCDLIGFHTFDYARHFLSCCSRMLGIEYQSKRGYIGLDYFGRTVGIKIMPVGVHMGQLESGLRLPDREWRLSELQQQFQGKTVLLGVDDMDIFKGINLKLLAFENMLRTHPKWQGRAVLVQIANPARGRGKDLEAIQAEIEQSCQRINVDFGQSGYSPVVFINRDVSSVEKVAYYTIAECVVVTAVRDGMNLTPYEYIVCRQGAPGSESVSEVSGPKKSMLVVSEFIGCSPSLSGAIRVNPWNIEATAEAMNEAISMPEQEKQLRHEKHYRYVSSHDVAYWSKSFILDLERACRDHFKRTCWGIGLGFGFRVVALDPHFRKLNMDSIVNAYEISESRAILLDYDGTLVPQTSINKEPSPEVLNIINTLCSDSRNIVFLVSGRDKDTLGKWFSSCPKLGIAAEHGYILRQRSCLITWKVY

SEQ ID NO: 174999 - protein, 697 aa, Zea Mays
MMSRSYTNLLDLAEGNFAALGPVGGSGRQRHGSFGLRRMSRVMTVPGTLTELDGEDESEPAATSSVASDVPSSVAADRLIVVSNQLPIVARRRPDGRGWSFSWDDDSLLLQLRDGIPDEMEVLFVGSLRADVPAAEQDAVSQALLDRFRCAPVFLPDHLNDRFYHGFCKRQLWPLFHYMLPFSSPASASAAATSSSVATSSPGNGCFDRSAWEAYVLANKFFFEKVVEVINPEDDYVWVHDYHLLALPTFLRRRFNRLRIGFFLHSPFPSSEIYRTLPVRDEILKALLNCDLIGFHTFDYARHFLSCCSRMLGIEYQSKRGYIGLDYFGRTVGIKIMPVGVHMGQLESGLRLPDREWRLSELQQQFQGKTVLLGVDDMDIFKGINLKLLAFENMLRTHPKWQGRAVLVQIANPARGRGKDLEAIQAEIEQSCQRINVDFGQSGYSPVVFINRDVSSVEKVAYYTIAECVVVTAVRDGMNLTPYEYIVCRQGAPGSESVSEVSGPKKSMLVVSEFIGCSPSLSGAIRVNPWNIEATAEAMNEAISMPEQEKQLRHEKHYRYVSSHDVAYWSKSFILDLERACRDHFKRTCWGIGLGFGFRVVALDPHFRKLNMDSIVNAYEISESRAILLDYDGTLVPQTSINKEPSPEVLNIINTLCSDSRNIVFLVSGRDKDTLGKWFSSCPKLGIAAEHGYILRE

SEQ ID NO: 175000 - protein, 702 aa, Zea Mays
MMSRSYTNLLDLAEGNFAALGPVGGSGRQRHGSFGLRRMSRVMTVPGTLTELDGEDESEPAATSSVASDVPSSVAADRLIVVSNQLPIVARRRPDGRGWSFSWDDDSLLLQLRDGIPDEMEVLFVGSLRADVPAAEQDAVSQALLDRFRCAPVFLPDHLNDRFYHGFCKRQLWPLFHYMLPFSSPASASAAATSSSVATSSPGNGCFDRSAWEAYVLANKFFFEKVVEVINPEDDYVWVHDYHLLALPTFLRRRFNRLRIGFFLHSPFPSSEIYRTLPVRDEILKALLNCDLIGFHTFDYARHFLSCCSRMLGIEYQSKRGYIGLDYFGRTVGIKIMPVGVHMGQLESGLRLPDREWRLSELQQQFQGKTVLLGVDDMDIFKGINLKLLAFENMLRTHPKWQGRAVLVQIANPARGRGKDLEAIQAEIEQSCQRINVDFGQSGYSPVVFINRDVSSVEKVAYYTIAECVVVTAVRDGMNLTPYEYIVCRQGAPGSESVSEVSGPKKSMLVVSEFIGCSPSLSGAIRVNPWNIEATAEAMNEAISMPEQEKQLRHEKHYRYVSSHDVAYWSKSFILDLERACRDHFKRTCWGIGLGFGFRVVALDPHFRKLNMDSIVNAYEISESRAILLDYDGTLVPQTSINKEPSPEVLNIINTLCSDSRNIVFLVSGRDKDTLGKWFSSCPKLGIAAEHGYILRFMCCHK

SEQ ID NO: 175001 - protein, 425 aa, Zea Mays
MRQGAPGSESVSEVGGPKKSMLVVSEFIGCSPSLSGAIRVNPWNIEATAEAMNEAISMPEQEKQLRHEKHYRYVSSHDVAYWSKSFILDLERACRDHFKRTCWGIGLGFGFRVVALDAHFRKLNMDSIVNAYEISGSRAILLDYDGTLVPQTSINKEPSPEVLNIINTLCSDSRNIVFLVSGRDKDMLGKWFSSCPKLGIAAEHGYFLRWSSEEEWQTCTQAMDFGWMQMAKPVMNLYTEATDGSYIETKESALVWHHQDADPGFGSSQAKELLDHLESVLANEPVSVKSGQFIVEVKPQGVSKGIVAERILASVKERGKQADFVLCIGDDRSDEDMFENIADIIKRNMVAPRTSLFACTVGQKPSKAKFYLDDTFEVVAMLSALADATGAELESDSADELAASISSLDIGDEQSETSDTPIGGS

SEQ ID NO: 175002 - protein, 612 aa, Zea Mays
MRHFLSCCSRMLGIEYQSKRGHIGLDYFGRTVGIKIMPVGVHMGQLESGLRLPDREWRLSELQQQFQGKTVLLGVDDMDIFKGINLKLLAFENMLRTHPKWQGRAVLVQIANPARGRGKDLEAIQAEIEESCQRINGDFGQSGYSPVVFIDRDVSSVEKIAYYTIAECVVVTAVRDGMNLTPYEYIVCRQGAPGSESVSEVGGPKKSMLVVSEFIGCSPSLSGAIRVNPWNIEATAEAMNEAISMPEQEKQLRHEKHYRYVSSHDVAYWSKSFILDLERACRDHFKRTCWGIGLGFGFRVVALDAHFRKLNMDSIVNAYEISGSRAILLDYDGTLVPQTSINKEPSPEVLNIINTLCSDSRNIVFLVSGRDKDMLGKWFSSCPKLGIAAEHGYFLRWSSEEEWQTCTQAMDFGWMQMAKPVMNLYTEATDGSYIETKESALVWHHQDADPGFGSSQAKELLDHLESVLANEPVSVKSGQFIVEVKPQGVSKGIVAERILASVKERGKQADFVLCIGDDRSDEDMFENIADIIKRNMVAPRTSLFACTVGQKPSKAKFYLDDTFEVVAMLSALADATGAELESDSADELAASISSLDIGDEQSETSDTPIGGS

SEQ ID NO: 175003 - protein, 203 aa, Zea Mays
MDFGWMQMAKPVMNLYTEATDGSYIETKESALVWHHQDADPGFGSSQAKELLDHLESVLANEPVSVKSGQFIVEVKPQGVSKGIVAERILASVKERGKQADFVLCIGDDRSDEDMFENIADIIKRNMVAPRTSLFACTVGQKPSKAKFYLDDTFEVVAMLSALADATGAELESDSADELAASISSLDIGDEQSETSDTPIGGS

SEQ ID NO: 175004 - protein, 56 aa, Zea Mays
MQLKEKKRKEEMERLEKEKWAEIRSYKGLMVAEKMTSNRQIASAGKSMQEMEDEFV

SEQ ID NO: 175005 - protein, 132 aa, Zea Mays
MEQKRRRDKAPPSGVPSQFFNRTHRGSTWRSNPLRGEKIGKMTCVETRNETRPVRLRPRRRYIHAPVSPLAWFHVDKVSSAHVYLRLKKGETIHTISEALLEDCAQLVKAHSIQGTCAYSREACQRDHQQAE

SEQ ID NO: 175006 - protein, 208 aa, Zea Mays
MVLYFKARPDAGDYTIYMGADKNENEELIKYGLPEDVWFHVDKVSSAHVYLRLKKGETIHTISEALLEDCAQLVKAHSIQGNKMNNVEVIYTPWANLKKSPSMDVGQVHVLIVEKRVNEIINRLNKTRVERRAPDLKAEKEASNAAEKAERKMQLKEKKRKEEMERLEKEKWAEIRSYKGLMVAEKMTSNRQIASAGKSMQEMEDEFV

SEQ ID NO: 175007 - protein, 112 aa, Zea Mays
MEQKRRRDKAPPSGVPSQFFNRTHRGSTWRSNPLRGEKIGKMTCVETRNETRPVRLRPRRRYIHAPVSPLAWFVAAPAAACRSAAPGPPSNCSCRFMYLPRAATENIHEYIQ

SEQ ID NO: 175008 - protein, 122 aa, Zea Mays
MLLLHFCLPLSDAHLHLSRHHIVPQLIDWHEGGYLTVDLPMSRGEVVIGGPNVSSFLPTAVPLLQNTVKQKSFIGSSHLGSHAVLEYQFLPEQPSDAYERGSQLRFYDALAEVLNSRKEEQM

SEQ ID NO: 175009 - protein, 69 aa, Zea Mays
MAAAEARRRSAVWALLPLLLRLLHPVALVLANTEGAFVAGQFSGRASVSVFGYATQSDLNFNNIFSIHG

SEQ ID NO: 175010 - protein, 130 aa, Zea Mays
MAAAEARRRSAVWALLPLLLRLLHPVALVLANTEGAFVAGQFSGRASVSVFGYATQSDLNFNNIFSIHDAHLHLSRHHIVPQLIDWHEGGYLTVDLPMSRGEVVIGGPNVTKGYFKDEAKTNDDSAQIEL

SEQ ID NO: 175011 - protein, 144 aa, Zea Mays
MFVAGQFSGRASVSVFGYATQSDLNFNNIFSIHDAHLHLSRHHIVPQLIDWHEGGYLTVDLPMSRGEVVIGGPNVSSFLPTAVPLLQNTVKQKSFIGSSHLGSHAVLEYQFLPEQPSDAYERGSQLRFYDALAEVLNSRKEEQM

SEQ ID NO: 175012 - protein, 484 aa, Zea Mays
MTVGPLFRCPLPEIPNTPPPRSLTWHPRILALAHSKFLAPTPVRPLPISPRARALHLAIPTPSREHFPGRGRMACAATMPIDLLPAPAPAEEEVKAVEEDEEMVVEVEGEGCGGGAVVVAVADAEAEGHPYDFHVSGPRNLPPPNWKDIIRKGPNYKRMVMACFIQAVYLLELDRQDQKGEEDGLAPKWWKPFKYKVTQTLVDERDGSIYGAMLEWDRSSALSDFILIRPSGAPRAVLALRGTLLQKPTMKRDLQDDLRFLVWESLKGSVRFVGALAALQLAVEKFGSANVCVAGHSLGAGFALQICKELAKQGVFVECHLFNPPSVSLAMGVRSMSEKASYLWKKVKGSLPLKEETTTLETAKAEANDKKRLRTENKWVPHLYVNNSDYICCHYNAPSCPSTSTDGSSDEQQQQRKASEIASDVVAKLFVTSKGPQKFLEAHGLQQWWSDGMELQLALYDSKLINRQLKSIYTATAIPSSTRS

SEQ ID NO: 175013 - protein, 264 aa, Zea Mays
MAQQQTNPEEVVLGQEVGAARVATLNRPRQLNGISDRVVYLLAQFLEKWEKDENAKFVIFKGAGRAFSAGGDLKMFYEGKSNDSCLEVVYRMYWLCYHIHTYKKTMVALVNGLVMGGGAAMVAPLKFAVVTEKTIFATPEASVGLHTDCSFSYIHSRLPGYLGEYLALTGARLNAKEMISAGLATHFVSSEKLEELEKRLLDLDTGAESAVRAVIEEFSTDVQTDEDSILNKLSTINKCFSAETVEDIIKAFVRIQHSCHPTLC

SEQ ID NO: 175014 - protein, 222 aa, Zea Mays
MAQQQTNPEEVVLGQEVGAARVATLNRPRQLNGISDRVVYLLAQFLEKWEKDENAKFVIFKGAGRAFSAGGDLKMFYEGKSNDSCLEVVYRMYWLCYHIHTYKKTMVALVNGLVMGGGAAMVAPLKFAVVTEKTIFATPEASVGLHTDCSFSYIHSRLPGYLGEYLALTGARLNAKEMISAGLATHFVSSEKLEELEKRLLDLDTGFQLSTNASLQRLLRIS

SEQ ID NO: 175015 - protein, 326 aa, Zea Mays
MLCILPFEEEICRLNGLPATYVGHPLLDDAIGLNMGTELCSDKSKYQRSCEAFRLEHGLSPGATIITMLPGSRMQEVVRMLPIFLHTVQNLRHTFDELSLVIPVAPHRDVRTYIENVVQSEPFPVVLIPGGSLKERYNAFSASRAALCTSGTAVMELMLARLPCVVAYQAHFITECFIHLRKKINFISLPNILLNSLVVPEILFGACTAKNLAAKLSEVISNDQIRQMQIESAGQVFRVLYEPIKKRDTLLREEIDYSGLSSNFLSPSMIAALTVLYMDKHQNTACRNLVVESEAKKSLVLPTWSGFHACCSCTTGVTRQQATGYV

SEQ ID NO: 175016 - protein, 278 aa, Zea Mays
MLLRWIAAEGRRRARPSRPLARSLSYGRVVDAAARDGELRVFVVAGEVSGDSLASRLMAALRALSPVPVRFAGVGGELMCKEGLQSLFPMEEIAIMGMWELLPHIYSIKRKIEDSANAAMLFQPHAVVTIDSKGFSFRLLKQLKCRSNQKVQSPLHIHYVSPSFWAWKGGESRLSKLHNFVDHMLCILPFEEEICRLNGLPATYVGHPLLDDAIGLNMGTELCSDKSKYQRSCEAFRLEHGLSPVRLFQMIKSARCKLNQLAKYSGFSMNPSRNGILY

SEQ ID NO: 175017 - protein, 462 aa, Zea Mays
MLLRWIAAEGRRRARPSRPLARSLSYGRVVDAAARDGELRVFVVAGEVSGDSLASRLMAALRALSPVPVRFAGVGGELMCKEGLQSLFPMEEIAIMGMWELLPHIYSIKRKIEDSANAAMLFQPHAVVTIDSKGFSFRLLKQLKCRSNQKVQSPLHIHYVSPSFWAWKGGESRLSKLHNFVDHMLCILPFEEEICRLNGLPATYVGHPLLDDAIGLNMGTELCSDKSKYQRSCEAFRLEHGLSPGATIITMLPGSRMQEVVRMLPIFLHTVQNLRHTFDELSLVIPVAPHRDVRTYIENVVQSEPFPVVLIPGGSLKERYNAFSASRAALCTSGTAVMELMLARLPCVVAYQAHFITECFIHLRKKINFISLPNILLNSLVVPEILFGACTAKNLAAKLSEVISNDQIRQMQIESAGQVFRVLYEPIKKRDTLLREEIDYSGFHACCSCTTGVTRQQATGYV

SEQ ID NO: 175018 - protein, 190 aa, Zea Mays
MGCPQASRAALCTSGTAVMELMLARLPCVVAYQAHFITECFIHLRKKINFISLPNILLNSLVVPEILFGACTAKNLAAKLSEVISNDQIRQMQIESAGQVFRVLYEPIKKRDTLLREEIDYSGLSSNFLSPSMIAALTVLYMDKHQNTACRNLVVESEAKKSLVLPTWSGFHACCSCTTGVTRQQATGYV

SEQ ID NO: 175019 - protein, 245 aa, Zea Mays
MLLRWIAAEGRRRARPSRPLARSLSYGRVVDAAARDGELRVFVVAGEVSGDSLASRLMAALRALSPVPVRFAGVGGELMCKEGLQSLFPMEEIAIMGMWELLPHIYSIKRKIEDSANAAMLFQPHAVVTIDSKGFSFRLLKQLKCRSNQKVQSPLHIHYVSPSFWAWKGGESRLSKLHNFVDHMLCILPFEEEICRLNGLPATYVGHPLLDDAIGLNMGTELCSDKSKYQRSCEAFRLEHGLSPG

SEQ ID NO: 175020 - protein, 89 aa, Zea Mays
MEGASRSGNTAHLLPTPSTESPSTISRRCRGSWASRRGGEEAKDTTAKPNSSNPAPSAGRTSFLRSPCCCYFRARLRSTIPLHSHKLAS

SEQ ID NO: 175021 - protein, 191 aa, Zea Mays
MEARNRRTQKKPSEEANQVLQAWQEEVERARQSQREAEAKISSLEAELQKMRVEMAGMRRDAEHYSRQEHVELEKRYRELTDLLYHKQTQLESMASEKAGLEFQLEKSLKQFREVQVEAERSKATRRSASSWEEDTDIKALEPLPLHHRHMATANHQLQKAAKLLDTGAVRATRFLWRHPVARVSVLFYLA

SEQ ID NO: 175022 - protein, 66 aa, Zea Mays
MTPGRRSGEERWKGHWDSKSQQRSILHSGQKVHDAFQLKRASYTDLPPAKVSEMMHPRKCPYSITS

SEQ ID NO: 175023 - protein, 145 aa, Zea Mays
MQVLVIDSEQPAYIGLAGIAQRDRPCVSATRKKNLASASGNHGNCVISRFNEWEKGVKRTGKTFILWKPAVSFGRVATQCKASGIVYCNNLFHKTVRPAVQRHRAVTGRHHHVTSSCNTDLRQEMSLSPLVLIKTMQKLFDQFYS

SEQ ID NO: 175024 - protein, 421 aa, Zea Mays
MVGVPNSDLLAFAQYQSNVDTWLKNSILPYYPDTMITYITVGAEVTESPTNVSALVVPAMRNVHTALKKAGLHKKITISSTHSLGILSRSFPPSAGAFNSSYAYFLKPMLQFLVENQAPFMVDLYPYYAYQNSRSNVSLNYALFSPESQDVIDPNTGLVYTNMFDAQVDSIFFALMALNFKTLKIMITESGWPNKGAVKETGATPDNAQTYNTNLIRHVVNDSGTPAKPGEEIDVYIFSLFNENRKPGIESERNWGLFFPDKSSIYSLDWTGRGNVDVMTGANITSANGTWCIASTNASETDLQNALNWACGPGNVDCSAIQPSQPCYQPDTLASHASYAFNSYYQQNGANVVACDFGGAGIRTTKDPSYDTCVYLAAGNKMSTTNSTSLPARSDSGPVPCAKCFATLLPMLAIVMAAVMV

SEQ ID NO: 175025 - protein, 400 aa, Zea Mays
MARIVSRALPFASRSSLRLPLPPPFPGAALVRSAAAGSPLPPAAEAALAASLLSWRGHTATPESSIAAPPPFAGFLAGIRRFRKGRRGQASAKRSQPQDAPPPPPPPPPPPKEREIELVARIGIEEDMPDDPEVLNIVEILKLNVPMAMKIALDGLLDSSYSTRDTSISDVGKYDKVEVSVLLCNDNFIQDLNKEWRDVDCATDILSMSQYIPDLDVPILMLGDIVISVEAAERQAGEKGVTLLDEVRVLVVRGILHLLGFQHESSNEAAAELEKEEQLILKSLRWKGKGLAKSVLDSSKPQTDSLDGQVTNDLKKAGSLRFYKPKFKYIFCDMDGTLLNSKSQVSARNAEALREARSRGVNIVIATGKARPAVIDALSMVDLSGRTGAVGLWFGRETDL

SEQ ID NO: 175026 - protein, 595 aa, Zea Mays
MARIVSRALPFASRSSLRLPLPPPFPGAALVRSAAAGSPLPPAAEAALAASLLSWRGHTATPESSIAAPPPFAGFLAGIRRFRKGRRGQASAKRSQPQDAPPPPPPPPPPPKEREIELVARIGIEEDMPDDPEVLNIVEILKLNVPMAMKIALDGLLDSSYSTRDTSISDVGKYDKVEVSVLLCNDNFIQDLNKEWRDVDCATDILSMSQYIPDLDVPILMLGDIVISVEAAERQAGEKGVTLLDEVRVLVVRGILHLLGFQHESSNEAAAELEKEEQLILKSLRWKGKGLAKSVLDSSKPQTDSLDGQVTNDLKKAGSLRFYKPKFKYIFCDMDGTLLNSKSQVSARNAEALREARSRGVNIVIATGKARPAVIDALSMVDLSGRTGIVSESSPGVFLQGLLVYGLEGRRIYKRNLDQEALSYSIENKIPFVAFSQDHCYSMFDHPLVDSLHYIYHEPKAKIVPSIGQLLETAEIQKVLFLETPERISSALRPYWAKAIEGRAHVVQAQPDMLELVPPATSKGNGVKVLLNHLSISPDEVMAIGDGENDIEMLQLASFGVALANGSDKTKAAANVIGATNDEDGVAQAIYEYAF

SEQ ID NO: 175027 - protein, 430 aa, Zea Mays
MARIVSRALPFASRSSLRLPLPPPFPGAALVRSAAAGSPLPPAAEAALAASLLSWRGHTATPESSIAAPPPFAGFLAGIRRFRKGRRGQASAKRSQPQDAPPPPPPPPPPPKEREIELVARIGIEEDMPDDPEVLNIVEILKLNVPMAMKIALDGLLDSSYSTRDTSISDVGKYDKVEVSVLLCNDNFIQDLNKEWRDVDCATDILSMSQYIPDLDVPILMLGDIVISVEAAERQAGEKGVTLLDEVRVLVVRGILHLLGFQHESSNEAAAELEKEEQLILKSLRWKGKGLAKSVLDSSKPQTDSLDGQVTNDLKKAGSLRFYKPKFKYIFCDMDGTLLNSKSQVSARNAEALREARSRGVNIVIATGKARPAVIDALSMVDLSGRTGIVSESSPGVFLQGLLVYGLEGRRIYKRNLDQEVCRERTRYHL

SEQ ID NO: 175028 - protein, 644 aa, Zea Mays
MEISEQRLPWKQVGIRAKQTTTKTLLPSSLGPSPSLRPPHHAGTSMARIVSRALPFASRSSLRLPLPPPFPGAALVRSAAAGSPLPPAAEAALAASLLSWRGHTATPESSIAAPPPFAGFLAGIRRFRKGRRGQASAKRSQPQDAPPPPPPPPPPPKEREIELVARIGIEEDMPDDPEVLNIVEILKLNVPMAMKIALDGLLDSSYSTRDTSISDVGKYDKVEVSVLLCNDNFIQDLNKEWRDVDCATDILSMSQYIPDLDVPILMLGDIVISVEAAERQAGEKGVTLLDEVRVLVVRGILHLLGFQHESSNEAAAELEKEEQLILKSLRWKGKGLAKSVLDSSKPQTDSLDGQVTNDLKKAGSLRFYKPKFKYIFCDMDGTLLNSKSQVSARNAEALREARSRGVNIVIATGKARPAVIDALSMVDLSGRTGIVSESSPGVFLQGLLVYGLEGRRIYKRNLDQEVCREALSYSIENKIPFVAFSQDHCYSMFDHPLVDSLHYIYHEPKAKIVPSIGQLLETAEIQKVLFLETPERISSALRPYWAKAIEGRAHVVQAQPDMLELVPPATSKGNGVKVLLNHLSISPDEVMAIGDGENDIEMLQLASFGVALANGSDKTKAAANVIGATNDEDGVAQAIYEYAF

SEQ ID NO: 175029 - protein, 161 aa, Zea Mays
MTPEAALDHVRSIRPRVLLAPSQWHAVNSFGALTGGQLPVRSTNLACFLEAIEAGCTNTTGNDDYHVMEFDCEDSGLPLYQIMLPRPASPTGSGCTDAVLVTEADLEGYDTYIGTRKDAVSLEVATRSPIMRRLSCLFGSLKLSNSNCEPASSRFTEVRAC

SEQ ID NO: 175030 - protein, 344 aa, Zea Mays
MRICESGDGDDVAGLVFQQEQQEEVQASGELVRLKAKHALVGAGARVLFYPTLLYNVLRNRFEADFRWWDRVDQFILLGAVPFPSDVPRLKQLGVQGVVTLNEPYETLVPTSLYQANEIEHLVIPTRDYLFAPSFEDISQAIDFIHPAFSGNASQGGTTYVHCKAGRGRSTTIVLCYLIKYRNMTPEAALDHVRSIRPRVLLAPSQWHAVNSFGALTGGQLPVRSTNLACFLEAIEAGCTNTTGNDDYHVMEFDCEDSGLPLYQIMLPRPASPTGSGCTDAVLVTEADLEGYDTYIGTRKDAVSLEVATRSPIMRRLSCLFGSLKLSNSNCEPASSRFTEVRAC

SEQ ID NO: 175031 - protein, 169 aa, Zea Mays
MGTFGYLAPEYALSGKLTAKSDVYSFGVVLLELITGRKPVDASQPLGDESLVEWARSVLTKAIEHREFGDLPDPRMENRFDENEMFHMIVAAAACIRHSAAMRPRMGQVVRALDSLADSNLNNGLQPGRCEVFLEPQSEEIRLFRLREFGSPDGSEELSQASWRSRRDL

SEQ ID NO: 175032 - protein, 259 aa, Zea Mays
MLVYDFVPNNTLYYHLHVSETSLDWRTRVKIAAGAARGIGYLHEDCHPRIIHRDIKSSNILLDNNFEAQVSDFGLARLAADSNTHVTTRVMGTFGYLAPEYALSGKLTAKSDVYSFGVVLLELITGRKPVDASQPLGDESLVEWARSVLTKAIEHREFGDLPDPRMENRFDENEMFHMIVAAAACIRHSAAMRPRMGQVVRALDSLADSNLNNGLQPGRCEVFLEPQSEEIRLFRLREFGSPDGSEELSQASWRSRRDL

SEQ ID NO: 175033 - protein, 657 aa, Zea Mays
MGYGYVDPFPPPQQPQQAAYVAPQQGDYGQPQPQPAPRPPACPYSSSASAPPGSASYHFSPPAPSPPPVSSPPPASPLPEPSAPPAPLLPSPPPPAPLPPSPPPPALSPPPPDALPPSLPPSPLPYPTRSPPQAPPPPLTTDQPRVQPRVYPSPPPPSLPPPPPPTVSPPAPAPSNSPSPSPAPAAQAPGPARVAAYSPPPPRIAPPPPPHYHGKSHYTPHSPVKSHSNSSHAASGSGKNIEISREAATTIVALAGLAMLSFIGATIWFVKKKRRRIEPPATLPTQQPAPPPPPNYIPSSAGSSLASDGFYLRSPGYPFMRYSTGSHGFPYSPADSGIGYSHMLFTPENLAAITDDFAEDNLLGEGGFGCVFKGILPDGRPVAVKKLKIGNGQGEREFKAEVDTISRVHHRHLVSLVGYCIAEGQRMLVYDFVPNNTLYYHLHGHPRIIHRDIKSSNILLDNNFEAQVSDFGLARLAADSNTHVTTRVMGTFGYLAPEYALSGKLTAKSDVYSFGVVLLELITGRKPVDASQPLGDESLVEWARSVLTKAIEHREFGDLPDPRMENRFDENEMFHMIVAAAACIRHSAAMRPRMGQVVRALDSLADSNLNNGLQPGRCEVFLEPQSEEIRLFRLREFGSPDGSEELSQASWRSRRDL

SEQ ID NO: 175034 - protein, 231 aa, Zea Mays
MLVYDFVPNNTLYYHLHGHPRIIHRDIKSSNILLDNNFEAQVSDFGLARLAADSNTHVTTRVMGTFGYLAPEYALSGKLTAKSDVYSFGVVLLELITGRKPVDASQPLGDESLVEWARSVLTKAIEHREFGDLPDPRMENRFDENEMFHMIVAAAACIRHSAAMRPRMGQVVRALDSLADSNLNNGLQPGRCEVFLEPQSEEIRLFRLREFGSPDGSEELSQASWRSRRDL

SEQ ID NO: 175035 - protein, 401 aa, Zea Mays
MGYGYVDPFPPPQQPQQAAYVAPQQGDYGQPQPQPAPRPPACPYSSSASAPPGSASYHFSPPAPSPPPVSSPPPASPLPEPSAPPAPLLPSPPPPAPLPPSPPPPALSPPPPDALPPSLPPSPLPYPTRSPPQAPPPPLTTDQPRVQPRVYPSPPPPSLPPPPPPTVSPPAPAPSNSPSPSPAPAAQAPGPARVAAYSPPPPRIAPPPPPHYHGKSHYTPHSPVKSHSNSSHAASGSGKNIEISREAATTIVALAGLAMLSFIGATIWFVKKKRRRIEPPATLPTQQPAPPPPPNYIPSSAGSSLASDGFYLRSPGYPFMRYSTGSHGFPYSPADSGIGYSHMLFTPENLAAITDDFAEDNLLGEGGFGCVFKGILPDGRPVAVKKLKIGNGQGEREFKAE

SEQ ID NO: 175036 - protein, 421 aa, Zea Mays
MGYGYVDPFPPPQQPQQAAYVAPQQGDYGQPQPQPAPRPPACPYSSSASAPPGSASYHFSPPAPSPPPSHSNSSHAASGSGKNIEISREAATTIVALAGLAMLSFIGATIWFVKKKRRRIEPPATLPTQQPAPPPPPNYIPSSAGSSLASDGFYLRSPGYPFMRYSTGSHGFPYSPADSGIGYSHMLFTPENLAAITDDFAEDNLLGEGGFGCVFKGILPDGRPVAVKKLKIGNGQGEREFKAEVDTISRVHHRHLVSLVGYCIAEGQRMLVYDFVPNNTLYYHLHVSETSLDWRTRVKIAAGAARGIGYLHEDCHPRIIHRDIKSSNILLDNNFEAQVSDFGLARLAADSNTHVTTRVMGTFGYLAPEYALSGKLTAKSDVYSFGVVLLELITGRKPVDASQPLGDESLVEWVSSSLHCL

SEQ ID NO: 175037 - protein, 177 aa, Zea Mays
MGSGHGMHDIDWDSIMVEETTNEEGRNDVTSEQGLYFQLRLDNQDDGREDDSSASRFGNSIPCEDELGAGIPCSDLVLNETRTIYDMNNPVMEPGSLYATMHHFRLAIRQYAINKKFELGIEATNKTRFRGYCKGSNCPWRIHARPEMKGAPTIQVIVLNYKHTCTSSGRRKTTTPT

SEQ ID NO: 175038 - protein, 612 aa, Zea Mays
MAAMVGARRALLAARFSPRGTIAASAAPAPLYRPMDSPLRLPAERVCLQSWVPHRGAGTFASERTDEDYQREWGQNKAGSYTDSRWNGSNLQLQRDVTSAGSTTGTHKNKGVDGVGGSSEQHYRSGGSYGFQNNHQPYTGTRANNERYNASQPYRGSGPYSQQGLDGHFSNDRQQYNGTEANSTYSSGYYTQSKQKIYEGEGANNGQYGYGPSGQPCPNPVGNSQRVQKQQYVDHRSGGSYPDRSGHHPSQYVNPTHSRKEHVAGFQQGNNSNFGYNASQAYQSPYFTRQADTHSTSQGYSMYLNTDVQRLSHGVHQEKHSHAQSAGSFGNHVNSAPHEYGKYHQSLQGNPSNVGSPYEVPSEAGSKHKCTVEELEKFCDDGNVKEALEVLAMLKENRIVLHAPQYFRLMQACGDATALSEARLIHSQISESSLTVDTDFQNKIMEMYARCGSMEDAKKIFSSMDHHNLTSWNTMISGFVHNVLGEEAIDFFERFKQTGDKPDHGMFRHVFLACGILGSVNEGMLHFESMQKDFGIHPTTEHYASIVTMLGQSGYIVEAYEFVERMPVEPSIEILQRKRKGKRQVSPKLGARSMNTELATDLTLTLLRSMKS

SEQ ID NO: 175039 - protein, 419 aa, Zea Mays
MDDVVPATAKQTVVLYPGGGAGHVAPMTQLAKVFVRHGYDVTMVLLEPPIKSNASGASFVESFAASNPSITFHLLPPIPPPDLASSTKHPFLVVLELLGQYNDKLESFLRTIPRERLHSLVIDMFCTDAIDVAAKVGVPVYTFFAANAGALAVLTQTVALLDGRQTGLKELGDTPIEFLGVPPIPASHIIREMLEDAEDEVRTAMAKIWKRDTDTRGVLINTFYSLEAQALQAFSDPLCVPGKVLPPVYPIGPLVGKGGSGTDGGEAAERPHECLAWLDAQPERSVVFLCWGSRGLLSEEQLKEIAAGLEKSGQRFLWVVRTPASSDDPKRFWLPRPEPDLDALLPEGFLERTKDRGLVIKSWAPQVDVLSNPAVGAFVTHCGWNSSLEAITAGVPMLCWPQGAEQKINKERLFVHLLE

SEQ ID NO: 175040 - protein, 935 aa, Zea Mays
MRGAAAPGHQRWSGSAGTTPRSLSTGSSPRGSERSSDDGEELVEVTLDLQEDDTIILRSVEPAAAGGATALPLGARGDHAGGASSSSRSLSPSIRRTSSHRLLQFSQELKAEAMSIARQFSQDLTKRFGRTQSRAEGQGQQQQPSSGIESALAARAARRQRAQLDRTRSGAHKALRGLRFISSNKANNAWMEVQANFDRLASEGFLSRSDFAECIGMTESKEFALELFDTLSRRRQVQVDKINKEELREIWQQITDNSFDSRLQIFFDMVDKNADGRIGEEEVKEIIMLSASANKLSRLKEQAEEYAALIMEELDPEGLGYIELWQLETLLLQKDTYMNYSQALSYTSQALSQNLAGLRKKSPIRKISTTLSYYLEDNWKRLWVLALWIGIMAGLFTWKFMQYRNRYVFNVMGYCVTTAKGAAETLKLNMAIILLPVCRNTITWLRNTRAARALPFDDNINFHKTIAAAIVVGIILHAGNHLVCDFPRLINSSNEKYAPLGQYFGETKPTYFTLVKGVEGITGVIMVICMIIAFTLATRWFRRSLVKLPKPFDKLTGFNAFWYSHHLFIIVYLALIVHGQFLYLIHVWYRKTTWMYLAVPVCLYVGERVLRFFRSGSYSVRLLKVAIYPGNVLTLQMSKPPAFRYKSGQYMFVQCPAVSPFEWHPFSITSAPGDDYLSIHVRQLGDWTRELKRVFAAACEPPVGGKSGLLRADETTKKALPKLLIDGPYGSPAQDYSKYDVLLLVGLGIGATPFISILKDLLNNIIRMEEEEDASTDLYPPVGPNKPHIDLSTLMTVTSRPKRVLRTTNAYFYWVTREQGSFDWFKGVMNEIAELDQRNIIEMHNYLTSVYEEGDARSALITMLQALNHAKNGVDIVSGTKVRTHFARPNWKKVLSKIASKHPFAKIAFLSWYVHLEFWTNMRAKWRSYHQMLNS

SEQ ID NO: 175041 - protein, 418 aa, Zea Mays
MVICMIIAFTLATRWFRRSLVKLPKPFDKLTGFNAFWYSHHLFIIVYLALIVHGQFLYLIHVWYRKTTWMYLAVPVCLYVGERVLRFFRSGSYSVRLLKVAIYPGNVLTLQMSKPPAFRYKSGQYMFVQCPAVSPFEWHPFSITSAPGDDYLSIHVRQLGDWTRELKRVFAAACEPPVGGKSGLLRADETTKKALPKLLIDGPYGSPAQDYSKYDVLLLVGLGIGATPFISILKDLLNNIIRMEEEEDASTDLYPPVGPNKPHIDLSTLMTVTSRPKRVLRTTNAYFYWVTREQGSFDWFKGVMNEIAELDQRNIIEMHNYLTSVYEEGDARSALITMLQALNHAKNGVDIVSGTKVRTHFARPNWKKVLSKIASKHPFAKIGVFYCGAPVLAQELNKLCHEFNGKSTTKFEFHKEHF

SEQ ID NO: 175042 - protein, 287 aa, Zea Mays
MLTTFFICSMLHRMPNKPLSALTLQDRDIEIQIEVHRKWEFRGAIDNGPILHIDMILTDCIGNAIHCQIPSFPAAKRGDEFQVGKIYKMSRFPVARAKSSYKPVDGDLMFLTSYDKIDPNEPNARNFHETNSCHCLICWLFTKRIPRIESEKINIELPSLDGQEITPPQLPQREHHDLKYILPLNPHDVPDEGYECTVTITSIPEGKTWYYIACNTCPNKPSIDPIIRQCSTCGSTKYCFRYKLTFKASDGTAEAEMFAFDTVARTIIGKPCPMVVASFSRCISYPT

SEQ ID NO: 175043 - protein, 173 aa, Zea Mays
MVISCWEVLLSGGAAYHWYFNPSIEEATAFYNKIESEKINIELPSLDGQEITPPQLPQREHHDLKYILPLNPHDVPDEGYECTVTITSIPEGKTWYYIACNTCPNKPSIDPIIRQCSTCGSTKYCFRYKLTFKASDGTAEAEMFAFDTVARTIIGKPCPMVVASFSRCISYPT

SEQ ID NO: 175044 - protein, 283 aa, Zea Mays
MPNKPLSALTLQDRDIEIQIEVHRKWEFRGAIDNGPILHIDMILTDCIGNAIHCQIPSFPAAKRGDEFQVGKIYKMSRFPVARAKSSYKPVDGDLMFLTSYDKIDPNEPNARNFHGEVLLSGGAAYHWYFNPSIEEATAFYNKIESEKINIELPSLDGQEITPPQLPQREHHDLKYILPLNPHDVPDEGYECTVTITSIPEGKTWYYIACNTCPNKPSIDPIIRQCSTCGSTKYCFRYKLTFKASDGTAEAEMFAFDTVARTIIGKPCPMVVASFSRCISYPT

SEQ ID NO: 175045 - protein, 307 aa, Zea Mays
MPNKPLSALTLQDRDIEIQIEVHRKWEFRGAIDNGPILHIDMILTDCIGNAIHCQIPSFPAAKRGDEFQVGKIYKMSRFPVARAKSSYKPVDGDLMLYVTPYTTLELCHNSPSSFPLYVYSLTSYDKIDPNEPNARNFHGEVLLSGGAAYHWYFNPSIEEATAFYNKIESEKINIELPSLDGQEITPPQLPQREHHDLKYILPLNPHDVPDEGYECTVTITSIPEGKTWYYIACNTCPNKPSIDPIIRQCSTCGSTKYCFRYKLTFKASDGTAEAEMFAFDTVARTIIGKPCPMVVASFSRCISYPT

SEQ ID NO: 175046 - protein, 384 aa, Zea Mays
MPNKPLSALTLQDRDIEIQIEVHRKWEFRGAIDNGPILHIDMILTDCIGNAIHCQIPSFPAAKRGDEFQVGKIYKMSRFPVARAKSSYKPVDGDLMLYVTPYTTLELCHNSPSSFPLYVYSLTSYDKIDPNEPNARNFHDVISIITEISAIKPVGNARIPSSYNRHVLIKNLSDSILKITLWGKRAQEFYLTNTYDPQKQTLVIVLFVGCLPKEFQGEVLLSGGAAYHWYFNPSIEEATAFYNKIESEKINIELPSLDGQEITPPQLPQREHHDLKYILPLNPHDVPDEGYECTVTITSIPEGKTWYYIACNTCPNKPSIDPIIRQCSTCGSTKYCFRYKLTFKASDGTAEAEMFAFDTVARTIIGKPCPMVVASFSRCISYPT

SEQ ID NO: 175047 - protein, 139 aa, Zea Mays
MHVHLPNENYITYNSYANMADILSRPFHRKTMLTEWFTTNQRYFNARDLTYSQFPSKWRWDDKTKTWHPRQAREGKIGRLYYVHPLAGDKYYLRMLLLVVKGARSYEEVRTYNNIVYDTFKEAAKHVGSLAMIKNGWLL

SEQ ID NO: 175048 - protein, 432 aa, Zea Mays
MERLIAGLLGFLLVASVGSHAARAPDQYWKSALPNTPMPTSLSQLLDAAPAGGGTTVNVGWGGVHVDAGHGKPGGTTVDVGKGGVGVNVNPGRSGKPGGTTVGVGKGGVGVNVNPGYGKPGGTTVGVGKGGVGVNVNPGKPGGTTVGVGKGGVGVGVNPGHGKPGGTTVGVGKGGVGVHVNPGKKPVHVNVSPFIYTYAASETQLHDDPSVALFFQETDLRPGKKMTVQFASTGTTGTKFLPRSEAEAIPFSSQKVPEILARLSVDPDSVEAAEMAQTLRDCEAPAAKGEKKACATSLESMVDFATASLGTRHVRAVSTVVAKEGSPKQEYTVTGVERAAGGTDDDGRVVACHAEPYAYAVFACHLTPQTRAYSVSMLGRDGTAVDAVAVCHADTSGWNPKHVAFQVLNVKPGTVPVCHFLPQDHVVWTRSG

SEQ ID NO: 175049 - protein, 104 aa, Zea Mays
MFQRRRRMGRRVCLNGDRCPPSCPDANRIMAPPCQSATSGTLSCRCGGMPRYADFGSSQPFCLEACISSTRRRSPVILSRPRPSTEYSRHGGLPSHRFHLSGGV

SEQ ID NO: 175050 - protein, 195 aa, Zea Mays
MLLHHRLLPRLLLVPSTHTSTLLCPSRLPRRLSLSPRFYALPHLAAPQTVDHSDDEGAPQGEGQIKLPLDHLFVPPGATMDAGDQEAVSARVLKGSNIVLGPYARGDAQVVNADFVKSSVRPDDCPRDGLPEFALVGRSNVGKSSLLNSLVRRKRLALTSKKPGKTQCINHFKVNDSWYLVDLPGYGCKYTCQED

SEQ ID NO: 175051 - protein, 186 aa, Zea Mays
MLLHHRLLPRLLLVPSTHTSTLLCPSRLPRRLSLSPRFYALPHLAAPQTVDHSDDEGAPQGEGQIKLPLDHLFVPPGATMDAGDQEAVSARVLKGSNIVLGPYARGDAQVVNADFVKSSVRPDDCPRDGLPEFALVGRSNVGKSSLLNSLVRRKRLALTSKKPGKTQCINHFKICFCTTGSSYQLG

SEQ ID NO: 175052 - protein, 231 aa, Zea Mays
MLLHHRLLPRLLLVPSTHTSTLLCPSRLPRRLSLSPRFYALPHLAAPQTVDHSDDEGAPQGEGQIKLPLDHLFVPPGATMDAGDQEAVSARVLKGSNIVLGPYARGDAQVVNADFVKSSVRPDDCPRDGLPEFALVGRSNVGKSSLLNSLVRRKRLALTSKKPGKTQCINHFKVNDSWYLVDLPGYGGGEQSVATANITGMDLATKSNTWSVQETSKNICFCTTGSSYQLG

SEQ ID NO: 175053 - protein, 238 aa, Zea Mays
MLLHHRLLPRLLLVPSTHTSTLLCPSRLPRRLSLSPRFYALPHLAAPQTVDHSDDEGAPQGEGQIKLPLDHLFVPPGATMDAGDQEAVSARVLKGSNIVLGPYARGDAQVVNADFVKSSVRPDDCPRDGLPEFALVGRSNVGKSSLLNSLVRRKRLALTSKKPGKTQCINHFKVNDSWYLVDLPGYGGGEQSVATANITGMDLATKSNTWSVQETSKNVRKSILLDKLMKHMASLLYA

SEQ ID NO: 175054 - protein, 427 aa, Zea Mays
MEKNNVQPDHGTSAIMLNIMKKSKVSAKDAWEFFKRMNRKGVNWSFDVGAALINIFCSDGLKKEALIIQSEMEKRGIASNTSIYETLMKAYCKSNQIEEAEGLFVEMKEKSLQATTTTYNILMDAYSRRLQTEVVESLLLEMQDLGIRPSARSYNCLISAYGRQKKMSGKAENAFLRMKRDGIKPLSSSYNALLFAYAANGLHEKAHAIYMDMKREGLKPTLETYTALLDTLRRAGDTEKLMETWKTMVDEKFGGTRVIFHMVIDCLAKHGLYLQVRDVIYEFGKMGLKPTVMTYNILMNAYGRGGQHYKLPQLLKEMTALELKPDSITYCTMIYAYARVRDFSRAFYYHKQMVRNGQIPDPRSYKKLLNTLDVKAARKNIKDKSAIQGIIKGKSGLKPRKEKKDEFWKNRKKQSMLNHGHQRKEFL

SEQ ID NO: 175055 - protein, 302 aa, Zea Mays
MLAGTIWTRTTKASAAGTVNMSATYNSRSQDIESSVVAHGDLWRLEASRGGSTSGNGTSPLYLVQLGPLLFVRDSTLLLPVHLSKQHLLWYGYDRKNGVHSLCPAIWSKHRRWLMMSMMCLNPIACSFMDLQFPNGQLTYVAGEGISASGFLPLFGGLLQAQGKYPGETRVSFSCKNKRGTRFTPMFQWPDKSVSLGVTQALAWKRSGLMVRPSIQVSVCPTFGGSDPGVRAEVVHSLKEELNLMCGLSCSRHPSAYTALSIGRSKWNGQVGSSGVVITLETPLNNIGRPSLSVQLNGGFEL

SEQ ID NO: 175056 - protein, 302 aa, Zea Mays
MLAGTIWTRTTKASAAVLGLLETLRRPTSQDIESSVVAHGDLWRLEASRGGSTSGNGTSPLYLVQLGPLLFVRDSTLLLPVHLSKQHLLWYGYDRKNGVHSLCPAIWSKHRRWLMMSMMCLNPIACSFMDLQFPNGQLTYVAGEGISASGFLPLFGGLLQAQGKYPGETRVSFSCKNKRGTRFTPMFQWPDKSVSLGVTQALAWKRSGLMVRPSIQVSVCPTFGGSDPGVRAEVVHSLKEELNLMCGLSCSRHPSAYTALSIGRSKWNGQVGSSGVVITLETPLNNIGRPSLSVQLNGGFEL

SEQ ID NO: 175057 - protein, 337 aa, Zea Mays
MEISFEAWEGVQRHGQDLADRLAQGFTGLLQAPPQFPWPPAPHKRMPFDIDLPVVPFGAGVPKKDLPFPAAAAAVSSVIDIGGRLGQAGAELGASVGGAVQHAVRHLPVPFRNAQIRRRTLPPAPPQAPLPPATSVGEGAAGRSVERAAVDRCPLEAAAAAAAAATGSAAASSVSGHVSGDDLDEDDEGFGCGIGTLGNFKKANGTVNMSATYNSRSQDIESSVVAHGDLWRLEASRGGSTSGNGTSPLYLVQLGPLLFVRDSTLLLPVHLSKQHLLWYGYDRKNGVHSLCPAIWSKHRRWLMMSMMCLNPIACPVVFFRYLVGCFKLKENILEKQE

SEQ ID NO: 175058 - protein, 457 aa, Zea Mays
MPLMCSAGGDCACTRYASSSIPGFPAHCTTALPPSSPCSCCLYILPRDSQGRSRPSKSASTLARSQQSLARQHWRRPARARHGGGEAKAAAVPVPAGGGRELGAAGGGGAVRPAGAVLLHLRRLAGGQRQQQLHRVAGARQLPALRHRLRRRPVGALHQRTHHRRCHRSTSGFRQLHPAVRRNERGPAPGRRQLRLRRRRHPRRDRPAAGRADPVRGAGAELPDGGADAGEHPGRPGHGVGPPEPVHLQRGHGQQRLPQQLLHAGLLQHGQPVHPGAVRRLAHRRLPPPPAGAVQLRRAQGGDDRGRPGRVQPQRAGPLQRRRRHLRRPHRRRHPDVQPPPRRPRRRVQRAPRRALHLHQRIQHLRRHPRQRRLLRVHGDQRRVLRGGQEQRAGDVPAVPGAVRQQGPAHLLGRLPPVGGGQHHRRPPVLPRRVAQRRLPDGHQHARLHLILILIPP

SEQ ID NO: 175059 - protein, 380 aa, Zea Mays
MDRKVKSSRTRALLNRHLASLGVPKSAHCLALRLAEEFAVNAAARSPVPPPEHAPRLTDASRLHVALVTDNVLAAAVAVASAARSAADPARLVLHVLTDRKSYVPMHSWFALHPVEPAVVEVRGLHQLAWRDAGAVASVMRTVEEVRRSSLDWYRRQCGGGSSAEETRPSAFSLLNYLKIHLPELFPELGRVVLLDDDVVVREDLAGLWEQDLDGNVIGAVGAHEGGGVCVDKTLGDHLNFSDPDVSGSGPLHSSRCAWSWGVNVVDLDAWRRTNVTETYQFWLQKNRESGFRLWQMASLPPALLAFDGRVQAIDPRWNLPGLGWRVPHPDLVRLSAVLHFSGPRKPWLEVAFPELRQLWLAHLNASDSFLQGCGVVEWQ

SEQ ID NO: 175060 - protein, 483 aa, Zea Mays
MEPSRGATGGARRWGEAETEVDAAEEGRRAEDGGEVSLREWLDRPGRAVEAAECVHVFRQVAEAVAVAHAQGVAVGSARPSCFVVSPPFARVAFIESASGSDASGSCSGSDASEDADPDASPPRRGDGAGRGEERAGKSFPLKSVLAMELNWYTSPEEADDSAATFASDVYRLGVLLFELFCTFETMEDKMRAMANLRHRVLPPQLLLKWPKEASFCQLLMHPVPETRPKMSYMKSHIASSDFEGIVQVWDVTRSQVFVEMREHERRVWSVDFSIVDPTKLVSGSDDGSVKLWDMNQAGSIGTIKTRANVCSVQFQPDTARSIAIGSADHKIYCYDLRHIRAPYCTLVGHTKTVSYVKYLDASTIVSASTDNSLKLWDLSMSPGRIIDSPVQTFKGHTNTKNFVGLSISDGYIATGSETNEVFVYHKEFPMPVLAYKFSVTDPISGQEIDDQSQFISCVCWRGQSSTLLSANSSGNIKILEMD

SEQ ID NO: 175061 - protein, 751 aa, Zea Mays
MHSPRWMDQFAPDGRRLGVAILENSSIFTGKEWYWIATGALLGFTVLFNVLFTLSLMYLNPVGKPQAILPEETDTSLEDSEEGKKMTDITQRTKIPTPEPLSSNSMITLDKVLEQLRGQSPNTSDRSHMNASVRITPGRGMILPFEPLSMSFNEINYYVDMPAEMKSQGVTADKLQLLSGISGAFRPGVLTALMGVSGSGKTTLMDVLSGRKTGGYIEGEIYISGYPKNQETFARISGYCEQNDIHSPQITIRESLLFSAFMRLPKEVTDQEKKIFVDEVMELVELNGLKDAIVGLPGVNGLSTEQRKRLTVAVELVANPSIIFMDEPTSGLDARAAAVVMRTVRNTVNTGRTVVCTIHQPSIDIFEAFDELLLMKRGGQIIYSGPLGRNSHKVVEYFEAVPGIPKIKEGCNPATWMLDVTSASTEVQLNIDFAEHYKSSTMHQRNKALVKELSKPPPGSSDLYFPTQYSQSTFDQFRFCLWKQWLTYWRSPDYNLVRMFFALFTALLLGIIFWRVGSKMKSSSDLLIIVGSMYFAVAFIGFENCITAQPVIAVERTVFYRERAAGMYSAIPYAFSQVVAEIPYVFVESVIYTVIVYPMMSFQWTLAKFFWFFYISFLSFLYFTYYGMMGVAITPNPQVASIFAASFYTLFNLFSGFIVPRSRIPVWWIWYYWICPVAWTVYGLIVSQYGDVEDLIKVPGKPDQQVKAFIKDYFGYDPDFMGVVAAVLAGFTALFAFIYVYCIKRFNFQQR

SEQ ID NO: 175062 - protein, 79 aa, Zea Mays
MLDKRLMGERRRPRFSKVLLVDFARESEFVTFFQYLLDHVHDFSRLWSLQESIDDIKQPPWFAQHIIKPVQPTTSLMFF

SEQ ID NO: 175063 - protein, 54 aa, Zea Mays
MLDKRLMGERRRPRFSKVLLVDFARESEFNQSTTSNNPHGSPNTSSNQSNRPPH

SEQ ID NO: 175064 - protein, 496 aa, Zea Mays
MNNIRQYQLPLQRYMALMDLQEGNERLFYKLLIDNVEELLPIVYTPTVGEACQKYGSIFSRPQGLYISLKEKGKILEVLKNWPERSIQVIVVTDGERILGLGDLGCQGMGIPVGKLSLYTALGGVRPSACLPITLDVGTNNEELLNDEFYIGLRQRRATGQEYTDFLQEFMTAVKQNYGEKVLIQFEDFANHNAFDLLARYGTTHLVFNDDIQGTASVVLAGLIAAQTLLGGSLADHTYLFLGAGEAGTGIAELIALEISRQTKAPIEECRKKIWLVDSKGLIVSTRKESLQHFKKPWAHEHKPLSNLLDAVNAIKPTVLIGTSGKGQTFTKDVVEAISSFNERPIILALSNPTSQSECTAEQAYTWSKGQAVFATGSPFDPVEYNGKIHVPGQANNAYIFPGFGLGVVMSGAIRVHDDMLLAASEALAQQVTEENFEKGLIYPPFSNIRKISAHIAASVAAKAYELGLASRRPRPKDLVKYAESCMYSPIYRNYR

SEQ ID NO: 175065 - protein, 368 aa, Zea Mays
MRKPAALVVSTAVFAAAAVVAVMARQRLREARRWARAGAVLRDLQERCAAPVERLRQVADAMVAEMRAGLASNDSEGDSGSSVLLKMLVTYVDSLPSGDEKGLFYALDLGGTNFRVLRIQFGGKEQRIVKQESKTVSIPQHLMSRGSNELFDFIAAALAKFIASEGEGFYLPEGMQRQLGFTFSFPVKQNSVASGTLIKWTKGFAIDEMVGKDVVAELNKAIKRQGVDMEVTVLVNDTVGTLAAGRYVDNDTVAAVILGTGTNAAYIEHMDSIPKWCGPPPESGNMVINMEWGNFRSTHLPLTEFDVALDAESLNPDEQIYEKLISGMYMGEIVRRVLLKMAQDASLFSDNVPLELEVPYILSGCSVE

SEQ ID NO: 175066 - protein, 359 aa, Zea Mays
MATLNPFELLGADDNDDPSLLIAAAAAAAQKAEAKKSAVAPAGKAAQPAATTKFPTKPAPPSQTVRDARGGGSSARGGFGRGERGRGRGGRGYGQNRGFSGDNGNEFQGGYGGGGYGDGAVTGGSEGERERDTRPPYRGGGRRGGYRNVEFGDDSERPPRRNYERHSGTGHGYEMKRDGAGRGNWGTATDELIAQDAEDSPKMEEAAPVAEKQGEQIDAPAADENKDNKDATANEEEEKEEDKEMTLEEFEKIREEKRKALLALKAEERKVEVDKDLRSLQPLSNKKENDEVFIKLSVSINEFLKPAEGERYYGGRGRGRGRGDRGGFRGGYGGGYSRGPAAAAPSIEDQAQFPSLGGK

SEQ ID NO: 175067 - protein, 788 aa, Zea Mays
MSHLLEHETDIAFLPHSDQRDGVEARLILRGCTPASFTIASIGPNNEISGTVPPDALAKAAPVLFASRAPRPSLKYLELLLPAEIGSDHIELPTAAAAGHIVAQVTGSNMHCHEQGILHQDIKGSNLLIDYPDMLKIGDFGLANYGAGCRQPLTSRVVTLWYRTPVLLLNSTSYSVGFDLWSVGCLNEIFFGKPLMPGSGEMYQLLKIFKLCGSPPDMVELQQHINNGHAVLVLGAHRVFEELSSHVIATCNNGVGSTMQDLAHAIGNTEVRPIPWPSFSFSPIGLAPLLALESIAVVGGRCMLQKSAKFKIIYRLSSVLAWFVGSGDQELRWLSSYLFIHYGNSWKLVVYDGQGHILVTMLSSISIREVGSFRCVLKFIWVPILVVGVLDFMMVLSMILQQCDTKSSRRVEKREISKITDATIMLLEEMKPHGIKWKGETYHCPLNALATTRQTDQAYVIFSGTSVAGLMHRDSVQFRPIPWFFFRLCSEQQDIMVLIDSGSSHTFISDKLRPMLSGVEPLVNPITVQLAIRQVIPCHYHLPSAKWSMSGCHFSADLKFLPIPSFGQVITCNYQVPSVEWTMHVRSFSVDLTFLLLPLFDLVVGMDRLQRYSPMLVNWSNKWMSIPYQGATRCLQGVHPSVSTGAIVELWLLSATSQQNRFPDSKMPIINTQVQDIHYQFLDIFEDLVGLPPSRPGDHNIPLLLGAHMFTVCLYQYTPTLKDHDTWYMVQVIWSGMDASHATWEDAEAQKNHFPLVVAWGQAAFEEGGMSASALRQSRSCRLWHRSG

SEQ ID NO: 175068 - protein, 60 aa, Zea Mays
MVQVIWSGMDASHATWEDAEAQKNHFPLVVAWGQAAFEEGGMSASALRQSRSCRLWHRSG

SEQ ID NO: 175069 - protein, 119 aa, Zea Mays
MCSSSRGYLAPEYTIQGQLNKKSDVYSFGVLLLEIVSGRCHTDPRLPVDEQFLLEKVWTLYEFDDLESIIDRTLKRDFDTEEALWLLKVFFPWADHCRLVVSGLLPMGGALERLIVSRI

SEQ ID NO: 175070 - protein, 145 aa, Zea Mays
MCSSSRGYLAPEYTIQGQLNKKSDVYSFGVLLLEIVSGRCHTDPRLPVDEQFLLEKVWTLYEFDDLESIIDRTLKRDFDTEEALWLLKDHEAGLITDVMDLKVRMVEPVQFSLTSCSSTIALWPGARCAHSLLGISHSATTSHAV

SEQ ID NO: 175071 - protein, 106 aa, Zea Mays
MCSSSRGYLAPEYTIQGQLNKKSDVYSFGVLLLEIVSGRCHTDPRLPVDEQFLLEKVWTLYEFDDLESIIDRTLKRDFDTEEALWLLKVVETTLAMQEAGCFSVVY

SEQ ID NO: 175072 - protein, 247 aa, Zea Mays
MCSSSRGYLAPEYTIQGQLNKKSDVYSFGVLLLEIVSGRCHTDPRLPVDEQFLLEKVWTLYEFDDLESIIDRTLKRDFDTEEALWLLKVSLVCIPDSPKIKSSMSMVAKMLQGSSIKVEWMQSKLEGCAPSRITAAKAIVKAGIVVMAPQAISVLGGFRPQGKTIDNVVKVFFPWADHCRLVVSGLLPMGGALERLIVSHPFSLMDMLIFKAVEEQVKKRVENKAMIFEQNATDSQRQDKPIALYEF

SEQ ID NO: 175073 - protein, 137 aa, Zea Mays
MNWTCLIQGTWLMCSSSRGYLAPEYTIQGQLNKKSDVYSFGVLLLEIVSGRCHTDPRLPVDEQFLLEKVWTLYEFDDLESIIDRTLKRDFDTEEALWLLKVSLVCIPDSPKIKSSMSMVAKMLQGECVVGDRIMRLA

SEQ ID NO: 175074 - protein, 472 aa, Zea Mays
MEAAGGEQHETRRRAGAGLALLGVVYSSLLLNAIFVAHHFLSPSRLLLRDDGCGCGLTWSLQAAREAEAVAAVECSGHGQVFVDGVAGEDGRPGCECNSCFGGPDCSLRTPNCTADADSGNPLFLEPYWRRHAAASAVVFSGWHRMSYTTTGGFQSVELERQIRRLHGAVGNAVADDKHLVFASGSLQLINALVHALSPDATAYRQQTSMFDGREYRWAGTTALWANSSRANSTDGTFIEFVTSPNNPDALLREPVLRGSAAAIVDHAYYWPHFTHIPAPADEDIMMFTVSKPSGHAGSRFGWALIRDDEVAKRALEYLRDSNMGASRDTQLRMLGIFKFMLANLRGKDDIFAFGHDVMRSRWLRLSAAVSRTRRITLQKIAPQYCTYFGRVREPSPAYAWVKCEMEEDEDCYEALLKANIITRSGVQYEASSRYTRISLLKSDDDFDVLMERLEDLVDADKYDDSNGSSSM

SEQ ID NO: 175075 - protein, 554 aa, Zea Mays
MEEPADIYVLGFQEIVPLNAGNIFGAEDNRPVAMWEHIIRETLNKISPDKPKYKSHSDPPSPSRFKPSDDAFVMEDELISESDSEGDGEVHPLNEQDLVDSVDGIHGNKCEPQTILQDEEFSRLPSVKTFDRSNNLSFKESNLEEKICQKILTKTFSHSERLGMIWPEPPLDMFAQCLPDSTKPFASGKVLRSYLSFKSVNGDSGPFAEDNSVPDFYMSCAAVKRKRPYFVRIISKQMVGVYLSIWSIYVLAPIVFQSFHSHITGIYFPSIHQHYIWKRGSISVSMSIYQTHFCFICCHLTSGEKEGDELKRNADVQEIHRRTIFNLVSRVNMPKTIYDHERIVWLGDLNYRINLPYEKTHELISKQDWNKLFGKDQLKVELKKGHLFEGWTEGVINFPPTYKYKVNSEKYISDDNKSGRRTPAWCDRILSHGKGMRLLSYKTVDLRLSDHRPVTAVYMADVEVFSSKKLQRALTFTDAEAEEQLSFEEDNASGIYNLGLYESSSEVYTPLVRAKVFSKVTWLKPQPLMRALSRPRRNGLPAVSRSFPTLRLRR

SEQ ID NO: 175076 - protein, 446 aa, Zea Mays
MAAAAPSSSSSSSARARARAPPRPLHPLARGGPEREEMEAVAATHPGAPPMRRKGRKQKQRCSLVPSGPTTQLWPRTVLRKWLNIRSPESDFSADEGDTTGDDTDSEVDYEGNQLGVVPCGLRRRRKSETLRAQYIDVRELRICAGTWNVAGRLPPNDLDIQEWLDMEEPADIYVLGFQEIVPLNAGNIFGAEDNRPVAMWEHIIRETLNKISPDKPKYKSHSDPPSPSRFKPSDDAFVMEDELISESDSEGDGEVHPLNEQDLVDSVDGIHGNKCEPQTILQDEEFSRLPSVKTFDRSNNLSFKESNLEEKICQKILTKTFSHSERLGMIWPEPPLDMFAQCLPDSTKPFASGKVLRSYLSFKSVNGDSGPFAEDNSVPDFYMSCAAVKRKRPYFVRIISKQMVGVYLSIWVRRSLRKHIQSLKVSTVGVGAMGYIGNKKDCMAR

SEQ ID NO: 175077 - protein, 466 aa, Zea Mays
MAAAAPSSSSSSSARARARAPPRPLHPLARGGPEREEMEAVAATHPGAPPMRRKGRKQKQRCSLVPSGPTTQLWPRTVLRKWLNIRSPESDFSADEGDTTGDDTDSEVDYEGNQLGVVPCGLRRRRKSETLRAQYIDVRELRICAGTWNVAGRLPPNDLDIQEWLDMEEPADIYVLGFQEIVPLNAGNIFGAEDNRPVAMWEHIIRETLNKISPDKPKYKSHSDPPSPSRFKPSDDAFVMEDELISESDSEGDGEVHPLNEQDLVDSVDGIHGNKCEPQTILQDEEFSRLPSVKTFDRSNNLSFKESNLEEKICQKILTKTFSHSERLGMIWPEPPLDMFAQCLPDSTKPFASGKVLRSYLSFKSVNGDSGPFAEDNSVPDFYMSCAAVKRKRPYFVRIISKQMVGVYLSIWVRRSLRKHIQSLKVSTVGVGAMGYIGINISKHVHIPNTLLLYMLSPDLWRKGRR

SEQ ID NO: 175078 - protein, 708 aa, Zea Mays
MAAAAPSSSSSSSARARARAPPRPLHPLARGGPEREEMEAVAATHPGAPPMRRKGRKQKQLWPRTVLRKWLNIRSPESDFSADEGDTTGDDTDSEVDYEGNQLGVVPCGLRRRRKSETLRAQYIDVRELRICAGTWNVAGRLPPNDLDIQEWLDMEEPADIYVLGFQEIVPLNAGNIFGAEDNRPVAMWEHIIRETLNKISPDKPKYKSHSDPPSPSRFKPSDDAFVMEDELISESDSEGDGEVHPLNEQDLVDSVDGIHGNKCEPQTILQDEEFSRLPSVKTFDRSNNLSFKESNLEEKICQKILTKTFSHSERLGMIWPEPPLDMFAQCLPDSTKPFASGKVLRSYLSFKSVNGDSGPFAEDNSVPDFYMSCAAVKRKRPYFVRIISKQMVGVYLSIWSIYVLAPIVFQSFHSHITGIYFPSIHQHYIWKRGSISVSMSIYQTHFCFICCHLTSGEKEGDELKRNADVQEIHRRTIFNLVSRVNMPKTIYDHERIVWLGDLNYRINLPYEKTHELISKQDWNKLFGKDQLKVELKKGHLFEGWTEGVINFPPTYKYKVNSEKYISDDNKSGRRTPAWCDRILSHGKGMRLLSYKTVDLRLSDHRPVTAVYMADVEVFSSKKLQRALTFTDAEAEEQLSFEEDNASGIYNLGLYESSSEVYTPLVRAKVFSKVTWLKPQPLMRALSRPRRNGLPAVSRSFPTLRLRR

SEQ ID NO: 175079 - protein, 549 aa, Zea Mays
MEEPADIYVLGFQEIVPLNAGNIFGAEDNRPVAMWEHIIRETLNKISPDKPKYKSHSDPPSPSRFKPSDDAFVMEDELISESDSEGDGEVHPLNEQDLVDSVDGIHGNKCEPQTILQDEEFSRLPSVKTFDRSNNLSFKESNLEEKICQKILTKTFSHSERLGMIWPEPPLDMFAQCLPDSTKPFASGKVLRSYLSFKSVNGDSGPFAEDNSVPDFYMSCAAVKRKRPYFVRIISKQMVGVYLSIWVRRSLRKHIQSLKVSTVGVGAMGYIGNKGSISVSMSIYQTHFCFICCHLTSGEKEGDELKRNADVQEIHRRTIFNLVSRVNMPKTIYDHERIVWLGDLNYRINLPYEKTHELISKQDWNKLFGKDQLKVELKKGHLFEGWTEGVINFPPTYKYKVNSEKYISDDNKSGRRTPAWCDRILSHGKGMRLLSYKTVDLRLSDHRPVTAVYMADVEVFSSKKLQRALTFTDAEAEEQLSFEEDNASGIYNLGLYESSSEVYTPLVRAKVFSKVTWLKPQPLMRALSRPRRNGLPAVSRSFPTLRLRR

SEQ ID NO: 175080 - protein, 470 aa, Zea Mays
MAAAAPSSSSSSSARARARAPPRPLHPLARGGPEREEMEAVAATHPGAPPMRRKGRKQKQRCSLVPSGPTTQLWPRTVLRKWLNIRSPESDFSADEGDTTGDDTDSEVDYEEMCAWERKLHDEERSVRGFGAEAIGNQLGVVPCGLRRRRKSETLRAQYIDVRELRICAGTWNVAGRLPPNDLDIQEWLDMEEPADIYVLGFQEIVPLNAGNIFGAEDNRPVAMWEHIIRETLNKISPDKPKYKSHSDPPSPSRFKPSDDAFVMEDELISESDSEGDGEVHPLNEQDLVDSVDGIHGNKCEPQTILQDEEFSRLPSVKTFDRSNNLSFKESNLEEKICQKILTKTFSHSERLGMIWPEPPLDMFAQCLPDSTKPFASGKVLRSYLSFKSVNGDSGPFAEDNSVPDFYMSCAAVKRKRPYFVRIISKQMVGVYLSIWVRRSLRKHIQSLKVSTVGVGAMGYIGNKKDCMAR

SEQ ID NO: 175081 - protein, 644 aa, Zea Mays
MLHFTLLAVISEMCAWERKLHDEERSVRGFGAEAIGNQLGVVPCGLRRRRKSETLRAQYIDVRELRICAGTWNVAGRLPPNDLDIQEWLDMEEPADIYVLGFQEIVPLNAGNIFGAEDNRPVAMWEHIIRETLNKISPDKPKYKSHSDPPSPSRFKPSDDAFVMEDELISESDSEGDGEVHPLNEQDLVDSVDGIHGNKCEPQTILQDEEFSRLPSVKTFDRSNNLSFKESNLEEKICQKILTKTFSHSERLGMIWPEPPLDMFAQCLPDSTKPFASGKVLRSYLSFKSVNGDSGPFAEDNSVPDFYMSCAAVKRKRPYFVRIISKQMVGVYLSIWSIYVLAPIVFQSFHSHITGIYFPSIHQHYIWKRGSISVSMSIYQTHFCFICCHLTSGEKEGDELKRNADVQEIHRRTIFNLVSRVNMPKTIYDHERIVWLGDLNYRINLPYEKTHELISKQDWNKLFGKDQLKVELKKGHLFEGWTEGVINFPPTYKYKVNSEKYISDDNKSGRRTPAWCDRILSHGKGMRLLSYKTVDLRLSDHRPVTAVYMADVEVFSSKKLQRALTFTDAEAEEQLSFEEDNASGIYNLGLYESSSEVYTPLVRAKVFSKVTWLKPQPLMRALSRPRRNGLPAVSRSFPTLRLRR

SEQ ID NO: 175082 - protein, 699 aa, Zea Mays
MAAAAPSSSSSSSARARARAPPRPLHPLARGGPEREEMEAVAATHPGAPPMRRKGRKQKQTQLWPRTVLRKWLNIRSPESDFSADEGDTTGDDTDSEVDYEEMCAWERKLHDEERSVRGFGAEAIGNQLGVVPCGLRRRRKSETLRAQYIDVRELRICAGTWNVAGRLPPNDLDIQEWLDMEEPADIYVLGFQEIVPLNAGNIFGAEDNRPVAMFKPSDDAFVMEDELISESDSEGDGEVHPLNEQDLVDSVDGIHGNKCEPQTILQDEEFSRLPSVKTFDRSNNLSFKESNLEEKICQKILTKTFSHSERLGMIWPEPPLDMFAQCLPDSTKPFASGKVLRSYLSFKSVNGDSGPFAEDNSVPDFYMSCAAVKRKRPYFVRIISKQMVGVYLSIWVRRSLRKHIQSLKVSTVGVGAMGYIGNKGSISVSMSIYQTHFCFICCHLTSGEKEGDELKRNADVQEIHRRTIFNLVSRVNMPKTIYDHERIVWLGDLNYRINLPYEKTHELISKQDWNKLFGKDQLKVELKKGHLFEGWTEGVINFPPTYKYKVNSEKYISDDNKSGRRTPAWCDRILSHGKGMRLLSYKTVDLRLSDHRPVTAVYMADVEVFSSKKLQRALTFTDAEAEEQLSFEEDNASGIYNLGLYESSSEVYTPLVRAKVFSKVTWLKPQPLMRALSRPRRNGLPAVSRSFPTLRLRR

SEQ ID NO: 175083 - protein, 470 aa, Zea Mays
MAAAAPSSSSSSSARARARAPPRPLHPLARGGPEREEMEAVAATHPGAPPMRRKGRKQKQRCSLVPSGPTTQLWPRTVLRKWLNIRSPESDFSADEGDTTGDDTDSEVDYEGNQLGVVPCGLRRRRKSETLRAQYIDVRELRICAGTWNVAGRLPPNDLDIQEWLDMEEPADIYVLGFQEIVPLNAGNIFGAEDNRPVAMWEHIIRETLNKISPDKPKYKSHSDPPSPSRFKPSDDAFVMEDELISESDSEGDGEVHPLNEQDLVDSVDGIHGNKCEPQTILQDEEFSRLPSVKTFDRSNNLSFKESNLEEKICQKILTKTFSHSERLGMIWPEPPLDMFAQCLPDSTKPFASGKVLRSYLSFKSVNGDSGPFAEDNSVPDFYMSCAAVKRKRPYFVRIISKQMVGVYLSIWVRRSLRKHIQSLKVSTVGVGAMGYIGNKASFNKPQYSQIPFCSIQETLLFKKNMLSET

SEQ ID NO: 175084 - protein, 286 aa, Zea Mays
MLTSSYFGMLQGSISVSMSIYQTHFCFICCHLTSGEKEGDELKRNADVQEIHRRTIFNLVSRVNMPKTIYDHERIVWLGDLNYRINLPYEKTHELISKQDWNKLFGKDQLKVELKKGHLFEGWTEGVINFPPTYKYKVNSEKYISDDNKSGRRTPAWCDRILSHGKGMRLLSYKTVDLRLSDHRPVTAVYMADVEVFSSKKLQRALTFTDAEAEEQLSFEEDNASGIYNLGLYESSSEVYTPLVRAKVFSKVTWLKPQPLMRALSRPRRNGLPAVSRSFPTLRLRR

SEQ ID NO: 175085 - protein, 609 aa, Zea Mays
MLHFTLLAVISEMCAWERKLHDEERSVRGFGAEAIGNQLGVVPCGLRRRRKSETLRAQYIDVRELRICAGTWNVAGRLPPNDLDIQEWLDMEEPADIYVLGFQEIVPLNAGNIFGAEDNRPVAMFKPSDDAFVMEDELISESDSEGDGEVHPLNEQDLVDSVDGIHGNKCEPQTILQDEEFSRLPSVKTFDRSNNLSFKESNLEEKICQKILTKTFSHSERLGMIWPEPPLDMFAQCLPDSTKPFASGKVLRSYLSFKSVNGDSGPFAEDNSVPDFYMSCAAVKRKRPYFVRIISKQMVGVYLSIWVRRSLRKHIQSLKVSTVGVGAMGYIGNKGSISVSMSIYQTHFCFICCHLTSGEKEGDELKRNADVQEIHRRTIFNLVSRVNMPKTIYDHERIVWLGDLNYRINLPYEKTHELISKQDWNKLFGKDQLKVELKKGHLFEGWTEGVINFPPTYKYKVNSEKYISDDNKSGRRTPAWCDRILSHGKGMRLLSYKTVDLRLSDHRPVTAVYMADVEVFSSKKLQRALTFTDAEAEEQLSFEEDNASGIYNLGLYESSSEVYTPLVRAKVFSKVTWLKPQPLMRALSRPRRNGLPAVSRSFPTLRLRR

SEQ ID NO: 175086 - protein, 494 aa, Zea Mays
MAAAAPSSSSSSSARARARAPPRPLHPLARGGPEREEMEAVAATHPGAPPMRRKGRKQKQRCSLVPSGPTTQLWPRTVLRKWLNIRSPESDFSADEGDTTGDDTDSEVDYEEMCAWERKLHDEERSVRGFGAEAIGNQLGVVPCGLRRRRKSETLRAQYIDVRELRICAGTWNVAGRLPPNDLDIQEWLDMEEPADIYVLGFQEIVPLNAGNIFGAEDNRPVAMWEHIIRETLNKISPDKPKYKSHSDPPSPSRFKPSDDAFVMEDELISESDSEGDGEVHPLNEQDLVDSVDGIHGNKCEPQTILQDEEFSRLPSVKTFDRSNNLSFKESNLEEKICQKILTKTFSHSERLGMIWPEPPLDMFAQCLPDSTKPFASGKVLRSYLSFKSVNGDSGPFAEDNSVPDFYMSCAAVKRKRPYFVRIISKQMVGVYLSIWVRRSLRKHIQSLKVSTVGVGAMGYIGNKASFNKPQYSQIPFCSIQETLLFKKNMLSET

SEQ ID NO: 175087 - protein, 697 aa, Zea Mays
MAAAAPSSSSSSSARARARAPPRPLHPLARGGPEREEMEAVAATHPGAPPMRRKGRKQKQLWPRTVLRKWLNIRSPESDFSADEGDTTGDDTDSEVDYEEMCAWERKLHDEERSVRGFGAEAIGNQLGVVPCGLRRRRKSETLRAQYIDVRELRICAGTWNVAGRLPPNDLDIQEWLDMEEPADIYVLGFQEIVPLNAGNIFGAEDNRPVAMFKPSDDAFVMEDELISESDSEGDGEVHPLNEQDLVDSVDGIHGNKCEPQTILQDEEFSRLPSVKTFDRSNNLSFKESNLEEKICQKILTKTFSHSERLGMIWPEPPLDMFAQCLPDSTKPFASGKVLRSYLSFKSVNGDSGPFAEDNSVPDFYMSCAAVKRKRPYFVRIISKQMVGVYLSIWVRRSLRKHIQSLKVSTVGVGAMGYIGNKGSISVSMSIYQTHFCFICCHLTSGEKEGDELKRNADVQEIHRRTIFNLVSRVNMPKTIYDHERIVWLGDLNYRINLPYEKTHELISKQDWNKLFGKDQLKVELKKGHLFEGWTEGVINFPPTYKYKVNSEKYISDDNKSGRRTPAWCDRILSHGKGMRLLSYKTVDLRLSDHRPVTAVYMADVEVFSSKKLQRALTFTDAEAEEQLSFEEDNASGIYNLGLYESSSEVYTPLVRAKVFSKVTWLKPQPLMRALSRPRRNGLPAVSRSFPTLRLRR

SEQ ID NO: 175088 - protein, 335 aa, Zea Mays
MLHFTLLAVISEMCAWERKLHDEERSVRGFGAEAIGNQLGVVPCGLRRRRKSETLRAQYIDVRELRICAGTWNVAGRLPPNDLDIQEWLDMEEPADIYVLGFQEIVPLNAGNIFGAEDNRPVAMWEHIIRETLNKISPDKPKYKSHSDPPSPSRFKPSDDAFVMEDELISESDSEGDGEVHPLNEQDLVDSVDGIHGNKCEPQTILQDEEFSRLPSVKTFDRSNNLSFKESNLEEKICQKILTKTFSHSERLGMIWPEPPLDMFAQCLPDSTKPFASGKVLRSYLSFKSVNGDSGPFAEDNSVPDFYMSCAAVKRKRPYFVRIISKQMVGVYLSI

SEQ ID NO: 175089 - protein, 433 aa, Zea Mays
MRPPGSVAIKDYAIETPLEILPNSEGQPLYEMQIKFDKDIPIAAVNFVLKEEETGAWFQHKGRDFRIPLNGSFNDGGKQDIDIWPGDLGHVLKKSEGSSSQPQNTSPEDTGLSGKHISGFYEEYPILKSEYVQNLVTVTVRRDIEAHKRLVEFDTDIPGEVIIHWGVCRDNTMTWEIPPEPHPPKTKIFRHKALQTLLQQKADGAGNSISFSLDAEYSCLFFVLKLDEYTWLRNLENGSDFYVPLTRVGQYGSTQDPDKAEAQKIEDKSSQADGLISDIRNLVVGLSSRRGQKAKNKVLQEDILQEIERLAAEAYSIFRSPTIDSVDESVQLDDTLSAKPACSGTGSGFEILCQGFNWESHKSGKWYVELGTKAKELSSLGFTIVWSPPPTDSVSPEGYMPRDLYNLNSREEETRAVEIISMQHQTLITPKSL

SEQ ID NO: 175090 - protein, 722 aa, Zea Mays
MRPPGSVAIKDYAIETPLEILPNSEGQPLYEMQIKFDKDIPIAAVNFVLKEEETGAWFQHKGRDFRIPLNGSFNDGGKQDIDIWPGDLGHVLKKSEGSSSQPQNTSPEDTGLSGKHISGFYEEYPILKSEYVQNLVTVTVRRDIEAHKRLVEFDTDIPGEVIIHWGVCRDNTMTWEIPPEPHPPKTKIFRHKALQTLLQQKADGAGNSISFSLDAEYSCLFFVLKLDEYTWLRNLENGSDFYVPLTRVGQYGSTQDPDKAEAQKIEDKSSQADGLISDIRNLVVGLSSRRGQKAKNKVLQEDILQEIERLAAEAYSIFRSPTIDSVDESVQLDDTLSAKPACSGTGSGFEILCQGFNWESHKSGKWYVELGTKAKELSSLGFTIVWSPPPTDSVSPEGYMPRDLYNLNSRYGSMDELKELVKIFHEAGIKVLGDAVLNHRCAQFQNNNGVWNIFGGRMNWDDRAVVADDPHFQGRGNKSSGDNFHAAPNIDHSQEFVRNDLKEWLCWMRKEVGYDGWRLDFVRGFWGGYVKDYLEASEPYFAVGEYWDSLSYTYGEMDYNQDAHRQRIVDWINATNGTAGAFDVTTKGILHAALERSEYWRLSDEKGKPPGVLGWWPSRAVTFIENHDTGSTQGHWRFPYGMELQGYAYILTHPGTPAVFYDHIFSHLQPEIAKFISIRHRQKIHCRSKIKILKAERSLYAAEIDEKVEIQIPSHLIKSEIP

SEQ ID NO: 175091 - protein, 701 aa, Zea Mays
MRPPGSVAIKEEETGAWFQHKGRDFRIPLNGSFNDGGKQDIDIWPGDLGHVLKKSEGSSSQPQNTSPEDTGLSGKHISGFYEEYPILKSEYVQNLVTVTVRRDIEAHKRLVEFDTDIPGEVIIHWGVCRDNTMTWEIPPEPHPPKTKIFRHKALQTLLQQKADGAGNSISFSLDAEYSCLFFVLKLDEYTWLRNLENGSDFYVPLTRVGQYGSTQDPDKAEAQKIEDKSSQADGLISDIRNLVVGLSSRRGQKAKNKVLQEDILQEIERLAAEAYSIFRSPTIDSVDESVQLDDTLSAKPACSGTGSGFEILCQGFNWESHKSGKWYVELGTKAKELSSLGFTIVWSPPPTDSVSPEGYMPRDLYNLNSRYGSMDELKELVKIFHEAGIKVLGDAVLNHRCAQFQNNNGVWNIFGGRMNWDDRAVVADDPHFQGRGNKSSGDNFHAAPNIDHSQEFVRNDLKEWLCWMRKEVGYDGWRLDFVRGFWGGYVKDYLEASEPYFAVGEYWDSLSYTYGEMDYNQDAHRQRIVDWINATNGTAGAFDVTTKGILHAALERSEYWRLSDEKGKPPGVLGWWPSRAVTFIENHDTGSTQGHWRFPYGMELQGYAYILTHPGTPAVFYDHIFSHLQPEIAKFISIRHRQKIHCRSKIKILKAERSLYAAEIDEKVTMKIGSEHFEPSGPQNWIVAAEGQDYKIWEASS

SEQ ID NO: 175092 - protein, 383 aa, Zea Mays
MSEDEANAAAAPAEGKNWRRKGKHDKPKPWDEDPNIDRWKIDKFDPAWNEGGMLEVSSFSTLFPQYREKYLQEAWPVVKGALKEYGISCELNLVEGSMTVSTTRKTRDPFAIIKARELIKLLSRSVPAPQMNCDIIKIGGLVRNKERFVKRRERLLGPNLSTLKAIEILTGCYILVQGNTVAAMGNYRGRGLKQVRRIVEDCMKNVKHPVYHIKELLIKRELAKNPALANENWDRFLPKFKKKNVKQKKPQTKEKKPYTPFPPPQQPSKIDLELENGEYFMSDKKKSAKKWQEKLDKQSGRAEENKRKREAAFVPPKENTAGPSKSDKNASDNSEIADIAKSLKRKAKEFRKNEAQESVIAESYIASNDELRQKKKKKSTKSK

SEQ ID NO: 175093 - protein, 219 aa, Zea Mays
MELEADFADEDVSSNNGLQDLWSLDEIDSKRARFPCCIVWTPLPVVSWLAPYIGHVGICQEDGAILDFAGSNLVSMDNFAYGSVARYLQLDRKKSYSHSEVGAAMSWDDALQSGMRRFQHKYYNLFTCNCHSFVANCLNRLAYNGSVEWNVLNVASLVWFHGQWVDKMSFARSFLPFLTVTCIGILMAGWSFLVGMAAFSILLIGWFVFTVYCVKGLIC

SEQ ID NO: 175094 - protein, 99 aa, Zea Mays
MELEADFADEDVSSNNGLQDLWSLDEIDSKRARFPCCIVWTPLPVVSWLAPYIGHVGICQEDGAILDFAGSNLVSMDNFAYGSVARYLQLDRKKVRMNG

SEQ ID NO: 175095 - protein, 106 aa, Zea Mays
MTFRLLPPLPKKRWSVGVGLVQSNLKALASQLPSVGSGLFLVLNAVTAEVILLQHEIRIEFFFPVCIRVLVFFPCVLLPCLGIVLCVGICAGETTLQVAGEFLPPR

SEQ ID NO: 175096 - protein, 118 aa, Zea Mays
MGRRGGGRGAGGGRFRGCALLAAAFVVSTFVIQGAGGLKQSHAPAVAHKVLLSITNWHPQNYLDDVLHPSEVQDRILERLGNGYTASNKLPSTGETVSPTKQSVLTAAGSSALDHFYQ

SEQ ID NO: 175097 - protein, 97 aa, Zea Mays
MPCFLITVKVEKAHSGDVHCVDWNPLDVNYILTGSADNSVRMWDRRNLGSGGAGSPIHKFEGHKAAVLCVQWSPDRASVFGSSAEDGFLNVWDHEKG

SEQ ID NO: 175098 - protein, 75 aa, Zea Mays
MPCFLITVKVEKAHSGDVHCVDWNPLDVNYILTGSADNSVRMWDRRNLGSGGAGSPIHKFEGHKAAVLCVQKMVS

SEQ ID NO: 175099 - protein, 183 aa, Zea Mays
MPCFLITVKVEKAHSGDVHCVDWNPLDVNYILTGSADNSVRMWDRRNLGSGGAGSPIHKFEGHKAAVLCVQWSPDRASVFGSSAEDGFLNVWDHEKVGKKKNSNVPAGLFFQHAGHRDKIVDFHWNSSDPWTIVSVSDDGESTGGGGTLQIWRMSDLIYRPEDEVLTELENFKAHLASCAPRN

SEQ ID NO: 175100 - protein, 220 aa, Zea Mays
MCPAEPYVLSGGKDKFVVLWSIQDHISALGDSSSSPGASGSKQSGKIANEKESPKVDPRGIFHGHDSTVEDVQFCPSSAQEFCSVGDDACLILWDARTGTDPAVKVEKAHSGDVHCVDWNPLDVNYILTGSADNSVRMWDRRNLGSGGAGSPIHKFEGHKAAVLCVQACQDNILLFCTLYADMVASYDVFGYLFAIILVSDCSGHLTEHLFLEVLQKMVS

SEQ ID NO: 175101 - protein, 339 aa, Zea Mays
MVPCSCSHPSGTFERDKPACGYSITIRETITATSVDFTGAKAFEISGTPVDCVSLALSGRLFPWSSPALVISGINTGPNCGFHSSAIAAAREALVYGVPSIAISLNWKKDETKDSDFKDAAQACLPLINAALDDIEKGTFLRGCLLNIGVPSAPSAIKGFKLTKQSGYSPAQSWQAVSASRPSSATHFMGMHQSLGIQLAQLGKDASAAAAARRVSGQRKAVEVESVATAGKQETREVVKKLFRAEFVERQHQGLDEDTDLRALENGFVSSHFSLSLSFPPFKWLSIHPTLQVSVTPLNVHGQVEPEIQAPASDWLSAAVSLEKEKEAAPATAEAHSAA

SEQ ID NO: 175102 - protein, 151 aa, Zea Mays
MGMHQSLGIQLAQLGKDASAAAAARRVSGQRKAVEVESVATAGKQETREVVKKLFRAEFVERQHQGLDEDTDLRALENGFVSSHFSLSLSFPPFKWLSIHPTLQVSVTPLNVHGQVEPEIQAPASDWLSAAVSLEKEKEAAPATAEAHSAA

SEQ ID NO: 175103 - protein, 235 aa, Zea Mays
MFHSSAIAAAREALVYGVPSIAISLNWKKDETKDSDFKDAAQACLPLINAALDDIEKGTFLRGCLLNIGVPSAPSAIKGFKLTKQSGYSPAQSWQAVSASRPSSATHFMGMHQSLGIQLAQLGKDASAAAAARRVSGQRKAVEVESVATAGKQETREVVKKLFRAEFVERQHQGLDEDTDLRALENGFVSVTPLNVHGQVEPEIQAPASDWLSAAVSLEKEKEAAPATAEAHSAA

SEQ ID NO: 175104 - protein, 358 aa, Zea Mays
MDAFGMPRYCCSLAPSVRGAPLLVRRDIARLQCDDDDEMGHHSCCNKQKVRRGLWSPEEDEKLVKYITAHGHGCWSSVPRQAGLQRCGKSCRLRWINYLRPDLKRGSFSQQEEALIVELHRVLGNRWAQIAKHLPGRTDNEVKNFWNSTIKKKLISQAVGSLHPDLYYNILDGGAAGAQDLAAAGCAPLNGADSASAAAAQAVGVTTTQPSPSMAHVDPAAAWAADFGSQTLFLPGGAAALQYAAAVEGEFVKQCRTAADACYPPEPEDGGGGARQCNNQAAADVVTAAVQPEGAGLPVFLEPKCAGSFMPEPALAPVMDFMEAILGSTAAASAASASSLDDTCFSANAGMQSHCWIP

SEQ ID NO: 175105 - protein, 271 aa, Zea Mays
MQLPPTYVALITCLGVWDKGKRREWKMQLAKNACHCTHRWAQIAKHLPGRTDNEVKNFWNSTIKKKLISQAVGSLHPDLYYNILDGGAAGAQDLAAAGCAPLNGADSASAAAAQAVGVTTTQPSPSMAHVDPAAAWAADFGSQTLFLPGGAAALQYAAAVEGEFVKQCRTAADACYPPEPEDGGGGARQCNNQAAADVVTAAVQPEGAGLPVFLEPKCAGSFMPEPALAPVMDFMEAILGSTAAASAASASSLDDTCFSANAGMQSHCWIP

SEQ ID NO: 175106 - protein, 272 aa, Zea Mays
MWESVALTLAGTAGNNIGKVLQKKGTLILPPLSLKLKVVKAYASNQLWISGFLMDMCGAALMLTALSQAPVSVVQPIAGCGLAILCVFSHFYLKEVMNGLDWIAITLAGLGTIGVGVGGEEQKVDQIPLLNIPWLVLSIVILFVLLNTWLHMYKKQRREQELTGPEVIEEIIYGLESGILFGISSVISKMGFVMSEMGFPKIVVPAAISCSVCCSAVGFVYQVHLVFSRFANWVCVIHRSLHRRCDMLLFVEDRPQLFFLLYQFTNYVPTPS

SEQ ID NO: 175107 - protein, 128 aa, Zea Mays
MVLLSMQTRGLKHGRAIVVSTCTSVASIVSGVVAGMIALDEHLPKAPTARFFLLLGWFFIITGVILLVSSTRLIARLPRPVQKFLKSNIERTHSIRRPGSARGKDPIPTTTIHTSSLHLLASPTKEKA

SEQ ID NO: 175108 - protein, 267 aa, Zea Mays
MWESVALTLAGTAGNNIGKVLQKKGTLILPPLSLKLKVVKAYASNQLWISGFLMDMCGAALMLTALSQAPPIAGCGLAILCVFSHFYLKEVMNGLDWIAITLAGLGTIGVGVGGEEQKVDQIPLLNIPWLVLSIVILFVLLNTWLHMYKKQRREQELTGPEVIEEIIYGLESGILFGISSVISKMGFVMSEMGFPKIVVPAAISCSVCCSAVGFVYQVHLVFSRFANWVCVIHRSLHRRCDMLLFVEDRPQLFFLLYQFTNYVPTPS

SEQ ID NO: 175109 - protein, 202 aa, Zea Mays
MWESVALTLAGTAGNNIGKVLQKKGTLILPPLSLKLKVVKAYASNQLWISGFLMDMCGAALMLTALSQAPVSVVQPIAGCGLAILCVFSHFYLKEVMNGLDWIAITLAGLGTIGVGVGGEEQKVDQIPLLNIPWLVLSIVILFVLLNTWLHMYKKQRREQELTGPEVIEEIIYGLESGILFGLEASSMGGQLLYLHVHQWHL

SEQ ID NO: 175110 - protein, 393 aa, Zea Mays
MAAPNSNDAASASGTGPAGEEDISIEALARRVQEHMTLSSNPAARRHKFWETQPVGQFRDVADTSLPDGPIEPPTPLSEVRADPYPLPAAFEWLTCDLDDDALLADLYSLLAHNYVEDDENMFRFNYSPAFLRWALKPPSFFRAWHIGVRAKESKKLVAFISGVPARIRARDDVVRMAEINFLCVHKKLRSKRLAPVLIREVTRRVHQENIWQAAYTAGVVLPTPITTCRYWHRSLNPKKLIDVGFSRLGPRMTMSRTVRLYKLPDAPLTPGFRRMELRDVAAVTRLLRAYLARFVVAPDFDEVDVEHWLLPQEDVVDSYLVESPETHELMNDALIVAKQKNYDVFNALDVMENESFLKELKFGPGDGQLHYYLYNYRIRNGIKPSELGLVLL

SEQ ID NO: 175111 - protein, 111 aa, Zea Mays
MLQHVSTDQRGRLMMTTERLNQSTDRIKESRRTMLETEELGVSILQDLHQQRQSLLHAHTTLHGVDDNIGKSKKILAAMSKRMDRNKWIIGGIITALVLAILLILYFKLAN

SEQ ID NO: 175112 - protein, 167 aa, Zea Mays
MDLEARNLQPSIKAGLLAKLREYKSDLNNVKSELKRISAPNARQATREELLESGMADTLAVSTDQRGRLMMTTERLNQSTDRIKESRRTMLETEELGVSILQDLHQQRQSLLHAHTTLHGVDDNIGKSKKILAAMSKRMDRNKWIIGGIITALVLAILLILYFKLAN

SEQ ID NO: 175113 - protein, 113 aa, Zea Mays
MLEGYQGQYKYGSETFEASASPSGASYSKCKNDVVKSLKVDEACTHLKCSFGGIWNGGGGAGQKKLFVASFFFDMADEENGSHATKRGTYDENLVNGQIAQQLTGTHLVAIFL

SEQ ID NO: 175114 - protein, 651 aa, Zea Mays
MAAFAAPSLSSLILLASPHSAPTLLRLRRAGGRSLELSSRRGGSARLRVVRRAVTEEESEAARGDEEVEEAPEEPVAGRDLVTLAACLVGLLTGVSIVLFNLSVHEIRDVFWDGIPLRGASWLREEPIGEVWQRVIFVPVSGGVIVGGLNALRSQIETNSDAPVSKIKSAFRPFLKAVAASFTLGTGNSLGPEGPSVEIGSAIAKGFGDVFEWDGGKRLSLVAAGSAAGLSSGFNAAVAGCFFAVESVLWPSADSSSLANSTPMVILSSVIASVVSEIGLGSDPAFTVPEYDFRSPTELPLYLLLGVFCGLVSIALSRCTSLAMKAVESLQRTTGLPKAASPALGGLIVGLLALLYPEVLYWGFENVDILLESRPFTSGLSTTILVQLIGVKILATSLCRASGLVGGYYAPSLFIGAATGMAYGKFMKFTFTGPEPLLHVPFLDVASPQAYGLVGMAATLAGVCKVPLTSVLLLFELTQDYRIVLPLLGAVGLSSWIASPQRFSKRIRSKLDSWEDKSSIPQQANDMLTENKEATSMDAADLSLELYKIESSLCVYDANDSNMFKNLTVGEAMKTNYFSVSMTTPLIEALDLMLAEKQPFVMITENNTSARGLLALKNIQDFCKAAKTTRSQAEVKCKGTPDISCLPSRQV

SEQ ID NO: 175115 - protein, 469 aa, Zea Mays
MKAVESLQRTTGLPKAASPALGGLIVGLLALLYPEVLYWGFENVDILLESRPFTSGLSTTILVQLIGVKILATSLCRASGLVGGYYAPSLFIGAATGMAYGKFMKFTFTGPEPLLHVPFLDVASPQAYGLVGMAATLAGVCKVPLTSVLLLFELTQDYRIVLPLLGAVGLSSWIASPQRFSKRIRSKLDSWEDKSSIPQQANDMLTENKEATSMDAADLSLELYKIESSLCVYDANDSNMFKNLTVGEAMKTNYFSVSMTTPLIEALDLMLAEKQPFVMITENNTSARGLLALKNIQDFCKAAKTTRSQAEVKELLISHVCQAGKCKSWSVTPQMPLTTAEKIMDSHDVDHLPVVSEDANLQDRGLLIGFVDRECIAIARRYLDDSSKIGIVLPAFPVASYTNSRRLYLLLCFHSEPWQQKKFSVLCMGSGRKRGSTKGRNDTTQKHSLLGKSGFFSWSRLIPLQVISC

SEQ ID NO: 175116 - protein, 638 aa, Zea Mays
MAAFAAPSLSSLILLASPHSAPTLLRLRRAGGRSLELSSRRGGSARLRVVRRAVTEEESEAARGDEEVEEAPEEPVAGRDLVTLAACLVGLLTGVSIVLFNLSVHEIRDVFWDGIPLRGASWLREEPIGEVWQRVIFVPVSGGVIVGGLNALRSQIETNSDAPVSKIKSAFRPFLKAVAASFTLGTGNSLGPEGPSVEIGSAIAKGFGDVFEWDGGKRLSLVAAGSAAGLSSGFNAAVAGCFFAVESVLWPSADSSSLANSTPMVILSSVIASVVSEIGLGSDPAFTVPEYDFRSPTELPLYLLLGVFCGLVSIALSRCTSLAMKAVESLQRTTGLPKAASPALGGLIVGLLALLYPEVLYWGFENVDILLESRPFTSGLSTTILVQLIGVKILATSLCRASGLVGGYYAPSLFIGAATGMAYGKFMKFTFTGPEPLLHVPFLDVASPQAYGLVGMAATLAGVCKVPLTSVLLLFELTQDYRIVLPLLGAVGLSSWIASPQRFSKRIRSKLDSWEDKSSIPQQANDMLTENKEATSMDAADLSLELYKIESSLCVYDANDSNMFKNLTVGEAMKTNYFSVSMTTPLIEALDLMLAEKQPFVMITENNTSARGLLALKNIQDFCKAAKTTRSQAELSQP

SEQ ID NO: 175117 - protein, 370 aa, Zea Mays
MAAVASPALRLRPRAASTSATSSSAPPRCRFGSFSHSCFKFGRSFPVQRVNGSTMQHFGTLKAQVFSSTGDHDGRFHIKRTICFAATDKQEPVVSRYSDMPVLHEAESGTKVTPASENSYFAGRGAGKPGFISFQESTFRKSTVESVPHPGKEASRLVWFIGPTILVSFLVLPSLYLRKVLSAVFEDSLLTDFLILFFTEALFYGGVAIFVFLIDKVWRPLQQVAPKSYIWSKSRFFRISSVTTMVLSLIIPLLTMGMVWPWTGPAASATLAPYLVGLVVQFAFEQYARHRKSPSWPVIPIIFKATPTEQGSSAGDGTHIFCQRNRDNKSNPSHHELIRSITDCPSNSWRYLCLVPLKLSDEVSSLFRHS

SEQ ID NO: 175118 - protein, 316 aa, Zea Mays
MAAVASPALRLRPRAASTSATSSSAPPRCRFGSFSHSCFKCAGMAYISQFGRSFPVQRVNGSTMQHFGTLKAQVFSSTGDHDGRFHIKRTICFAATDKQEPVVSRYSDMPVLHEAESGTKVTPASENSYFAGRGAGKPGFISFQESTFRKSTVESVPHPGKEASRLVWFIGPTILVSFLVLPSLYLRKVLSAVFEDSLLTDFLILFFTEALFYGGVAIFVFLIDKVWRPLQQVAPKSYIWSKSRFFRISSVTTMVLSLIIPLLTMGMVWPWTGPAASATLAPYLVGLVVQFAFEQYARHRKSPSWPVIPIIFKCIK

SEQ ID NO: 175119 - protein, 307 aa, Zea Mays
MAAVASPALRLRPRAASTSATSSSAPPRCRFGSFSHSCFKFGRSFPVQRVNGSTMQHFGTLKAQVFSSTGDHDGRFHIKRTICFAATDKQEPVVSRYSDMPVLHEAESGTKVTPASENSYFAGRGAGKPGFISFQESTFRKSTVESVPHPGKEASRLVWFIGPTILVSFLVLPSLYLRKVLSAVFEDSLLTDFLILFFTEALFYGGVAIFVFLIDKVWRPLQQVAPKSYIWSKSRFFRISSVTTMVLSLIIPLLTMGMVWPWTGPAASATLAPYLVGLVVQFAFEQYARHRKSPSWPVIPIIFKFVI

SEQ ID NO: 175120 - protein, 401 aa, Zea Mays
MAGAVSALFLLDIKGRVLVWRDYRGDVSALQAERFFTKLLDKEGDSEVHSPVVYDDAGVTYMFIQHNNVFLLTAARQNCNAASILLFLHRVVDVFKHYFEELEEESLRDNFVVVYELLDEMMDFGYPQYTEAKILSEFIKTDAYRMEVTQRPPMAVTNAVSWRSEGIRYKKNEVFLDVVESVNILVNSNGQIVRSDVVGALKMRTYLSGMPECKLGLNDRVLLEAQGRATKGKAIDLDDIKFHQCVRLARFENDRTISFIPPDGSFDLMTYRLSTQVKPLIWVEAQIEKHSRSRIELMVKARSQFKERSTATNVEIEVPVPSDATNPNIRTSMGSAAYAPERDAMVWKVKSFPGGKEYMCRAEFSLPSITAEEGAPEKKAPIRVKFEIPYFTVSGPLSEDN

SEQ ID NO: 175121 - protein, 293 aa, Zea Mays
MMDFGYPQYTEAKILSEFIKTDAYRMEVTQRPPMAVTNAVSWRSEGIRYKKNEVFLDVVESVNILVNSNGQIVRSDVVGALKMRTYLSGMPECKLGLNDRVLLEAQGRATKGKAIDLDDIKFHQCVRLARFENDRTISFIPPDGSFDLMTYRLSTQVKPLIWVEAQIEKHSRSRIELMVKARSQFKERSTATNVEIEVPVPSDATNPNIRTSMGSAAYAPERDAMVWKVKSFPGGKEYMCRAEFSLPSITAEEGAPEKKAPIRVKFEIPYFTVSGIQTFMKLQDTYLLETATV

SEQ ID NO: 175122 - protein, 263 aa, Zea Mays
MPKGAKKRAKLKKQQQQGHPDDAGNTNASNGNCNGCDDNNSASSGRDGDHHLRIPPKVSRVDANEDSMESSEEMVTPRAAASEPDEEETKATAAEVPVERTVDADVAGSGEVIVDAFPPETVGQEREGKVDEAEVEVHAVVAQEPEVKDVKELAKVHSVLESEPRVDEGRDEVVVVDETPVVPEVQEPEVKGVDATVVLKEQEKNSGNVVAKDSAEVSRSQEAAGVHITEVERGPAVAVIAPGQRAIWWNFCGLFDAFTGSGR

SEQ ID NO: 175123 - protein, 83 aa, Zea Mays
MGRTNPCCFYKSKIYAEEEKVLTGTTTSSLSNQYSATSESVGRRRGASKIADPDSVNNNSATSELARAWIFFESVALLDLFLF

SEQ ID NO: 175124 - protein, 599 aa, Zea Mays
MAIVGESGSGKSTVISLVERFYDPQAGEVLIDGVNIKSLQLDWIRGKIGLVNQEPLLFMTSIKDNITYGKEDATIEEIKRAAELANAANFIDKLPNGYDTMVGQRGAQLSGGQKQRIAIARAIIKNPRILLLDEATSALDVESERIVQEALNRIMLDRTTLVVAHRLSTVRNADCISVVQQGKIVEQGPHDELVMNPDGAYSQLIRLQESKEEEEQKPERHVSDSRSKSRSLSLKRSISRGSMGNSSQHFLTLPIGMPGSVELLEGNDENWEEDEKEQARDGDREAPKKAPMGRLASLNKPEVPILVLGSLAAGVHGVLFPLFGLMISNAIKTFYEPPHQLKKDASFWGLMCVVLGIVSILSIPVEYFLFGVAGGKLIERIRALSFRSIVHQEVAWFDDPKNSSGALGARLSVDALNVRRLVGDNLALAVQVTSTLIAGFVIAFVADWKLTLIILCVMPLSGVQGYAQVKFLKGFSQDAKILYEDASQVATDAVSSIRTVASFCAEKRVTTIYDDKCEASKKQGVRTGMVGGLGFGFSFLMLYLTYGLCFYVGAQFVRHNKSTFGDVFKVRKNASYHQRCSLSLSLSLSLSLSLSLSLS

SEQ ID NO: 175125 - protein, 54 aa, Zea Mays
MRDGKRKVLITSDVFHDTLQVLHVTSSINKLYVELLTLLLMGEARQEYCWCHHR

SEQ ID NO: 175126 - protein, 84 aa, Zea Mays
MHNCTSAVSTKITISHNVNSFSWCSTSPSSISSKQISILKQCSCLDSGITAFQFYWFVQGRYSYLIQNCHQPLEIHCARYWWMC

SEQ ID NO: 175127 - protein, 85 aa, Zea Mays
MSVQMMKNSKMGLCTYYTTRRIHVLNENARLLICYYMLLDNFFLVLFCFLNLAYRMYYVTRNRTSISTADSSSLSLDLMSPKTVY

SEQ ID NO: 175128 - protein, 216 aa, Zea Mays
MAFAVTLTPLRATAVLAGWRRRPGVTPPRFAVVLATSTGVGGERTPPTFRRLREELLQLHAEADLTQSKANSERVRLVRLTEAAENLKKRAATSVRMGKESEAVDLLVQKKKLTKALENIKERIEVLDMLSAKISEVISMKQNMLIEYALRPETSNGEDSDDKIRVFSSTVNVGTNGAGSSDSHPKSVEKESFELRNEAHAIASMADDAEQSALQI

SEQ ID NO: 175129 - protein, 656 aa, Zea Mays
MAIVGESGSGKSTVISMVERFYDPQAGEVLVDGVNIKSLQLQWLRGKISLVSQEPLLFMTSIKDNITYGKADATIEEIKRAAELANAATFIEKLPDAYETTVGQHGSQLSGGQKQRIAIARAILKNPKILLLDEATSALDVESERVVQEALNRIMVGRTTLIVAHRLSTIRSADCIAVVHQGKVVERGVHDKLIKDPDGAYSQLIRLQQAHATERHEVPDTDVSGSIYKSRSLPLEQSTGRDSPRNKGHHSFTKTTGLSKELNRQDFTDRQEDQEHGNSKAPKKAPIGRLFKLNKPEAPVLLLAAIVAFVHGLLFPSFSIMMSGGIRTFYYPPHQLRKDSRFWALTCLLFAVIALISIQLEYFLFGVAGGKLIQRVRSLSFQSIVHQEVAWFDEPSNSSGALGARLYIDALNIRRLVGDNLAILVQCIVTIAAGFSIAFASDWKLTLIVICVIPVMGSQNYIQVKFLKGFSEDAKVMYEDASQVVTEAIGSIQTVASFCAEKRVITSYIQKCQASMKHGIRSGMVGGLGFSLSNLIMYLTYALCFYVGALFVHEGKTTFKDVFRVYFALIFTAFGVSQTSATATDSTKAQESTISILTIIDRRSKINSTSDEGVIIEKVDGNIDFRHVSFKYPSRPDVQVLSNFTLAIPARKVLLA

SEQ ID NO: 175130 - protein, 421 aa, Zea Mays
MAIVGESGSGKSTVISMVERFYDPQAGEVLVDGVNIKSLQLQWLRGKISLVSQEPLLFMTSIKDNITYGKADATIEEIKRAAELANAATFIEKLPDAYETTVGQHGSQLSGGQKQRIAIARAILKNPKILLLDEATSALDVESERVVQEALNRIMVGRTTLIVAHRLSTIRSADCIAVVHQGKVVERGVHDKLIKDPDGAYSQLIRLQQAHATERHEVPDTDVSGSIYKSRSLPLEQSTGRDSPRNKGHHSFTKTTGLSKELNRQDFTDRQEDQEHGNSKAPKKAPIGRLFKLNKPEAPVLLLAAIVAFVHGLLFPSFSIMMSGGIRTFYYPPHQLRKDSRFWALTCLLFAVIALISIQLEYFLFGVAGGKLIQRVRSLSFQSIVHQEVAWFDEPSNSRFCYLNIFIPNFLHFSTTVWTLF

SEQ ID NO: 175131 - protein, 631 aa, Zea Mays
MLALVMLACIPPSILSFATVSRLRAQISRKRQESYEDAGNIVEQTIGAIRTVVSFNGEKKAIAMYNNHIKKAYKATIMEGIITGLGVGSIFFVVFSSYSLAFWYGAKLIISKGYTGGQVINIVFAILVGSMAIGTASPSISAIAEGQSAAQRLFEIINRKPNIDINDTSGIVLEDIEGDVELKDVFFRYPARPEQLILDGLCLQVPSGTTMAIVGESGSGKSTVISMVERFYDPQAGEVLVDGVNIKSLQLQWLRGKISLVSQEPLLFMTSIKDNITYGKADATIEEIKRAAELANAATFIEKLPDAYETTVGQHGSQLSGGQKQRIAIARAILKNPKILLLDEATSALDVESERVVQEALNRIMVGRTTLIVAHRLSTIRSADCIAVVHQGKVVERGVHDKLIKDPDGAYSQLIRLQQAHATERHEVPDTDVSGSIYKSRSLPLEQSTGRDSPRNKGHHSFTKTTGLSKELNRQDFTDRQEDQEHGNSKAPKKAPIGRLFKLNKPEAPVLLLAAIVAFVHGLLFPSFSIMMSGGIRTFYYPPHQLRKDSRFWALTCLLFAVIALISIQLEYFLFGVAGGKLIQRVRSLSFQSIVHQEVAWFDEPSNSRFCYLNIFIPNFLHFSTTVWTLF

SEQ ID NO: 175132 - protein, 1276 aa, Zea Mays
MAGGARHGSEDDAETTTTNEGRRSSDHAAGATTNYSEHKQLVPFLDMLKYADRTDAALMAVGTVAAVANGMTEPLMTVVFAAVIECFGAGDDATILHRVSKVIMYYIYLGIGTAVSSFLQVSCWTVAGERQSTRLRSLYLEAVLRQDIAFFDVEMTTAEAASRMSADTVLIQDALGEKVGKYIQLLTTFVGGFIIGFIRGWMLALVMLACIPPSILSFATVSRLRAQISRKRQESYEDAGNIVEQTIGAIRTVVSFNGEKKAIAMYNNHIKKAYKATIMEGIITGLGVGSIFFVVFSSYSLAFWYGAKLIISKGYTGGQVINIVFAILVGSMAIGTASPSISAIAEGQSAAQRLFEIINRKPNIDINDTSGIVLEDIEGDVELKDVFFRYPARPEQLILDGLCLQVPSGTTMAIVGESGSGKSTVISMVERFYDPQAGEVLVDGVNIKSLQLQWLRGKISLVSQEPLLFMTSIKDNITYGKADATIEEIKRAAELANAATFIEKLPDAYETTVGQHGSQLSGGQKQRIAIARAILKNPKILLLDEATSALDVESERVVQEALNRIMVGRTTLIVAHRLSTIRSADCIAVVHQGKVVERGVHDKLIKDPDGAYSQLIRLQQAHATERHEVPDTDVSGSIYKSRSLPLEQSTGRDSPRNKGHHSFTKTTGLSKELNRQDFTDRQEDQEHGNSKAPKKAPIGRLFKLNKPEAPVLLLAAIVAFVHGLLFPSFSIMMSGGIRTFYYPPHQLRKDSRFWALTCLLFAVIALISIQLEYFLFGVAGGKLIQRVRSLSFQSIVHQEVAWFDEPSNSSGALGARLYIDALNIRRLVGDNLAILVQCIVTIAAGFSIAFASDWKLTLIVICVIPVMGSQNYIQVKFLKGFSEDAKVMYEDASQVVTEAIGSIQTVASFCAEKRVITSYIQKCQASMKHGIRSGMVGGLGFSLSNLIMYLTYALCFYVGALFVHEGKTTFKDVFRVYFALIFTAFGVSQTSATATDSTKAQESTISILTIIDRRSKINSTSDEGVIIEKVDGNIDFRHVSFKYPSRPDVQVLSNFTLAIPARKTVALVGESGSGKSTIISLLERFYDPDSGTISLDGTELKKLKLSWLRDQTGLVSQEPVLFNNTIRTNIAYGKQGEVREDEIVAAAKAANAHEFISSLPQGYSTIVGERGTQLSGGQKQRVAIARAILKDPKILLLDEATSALDAEGEHIVQDALDQVMVSRTTIVVAHRLSTIKGADMIVVMKDGEVAEKGKHEYLVGKGGVYASLVELHSKSA

SEQ ID NO: 175133 - protein, 271 aa, Zea Mays
MYNNHIKKAYKATIMEGIITGLGVGSIFFVVFSSYSLAFWYGAKLIISKGYTGGQVINIVFAILVGSMAIGTASPSISAIAEGQSAAQRLFEIINRKPNIDINDTSGIVLEDIEGDVELKDVFFRYPARPEQLILDGLCLQVPSGTTMAIVGESGSGKSTVISMVERFYDPQAGEVLVDGVNIKSLQLQWLRGKISLVSQEPLLFMTSIKDNITYGKADATIEEIKRAAELANAATFIEKLPDVLSETLLIYVSYLSFCQLISCLPPHTGI

SEQ ID NO: 175134 - protein, 480 aa, Zea Mays
MAAAAAAVNDRLDVHERKAQKSYWEEHSGELNLEAIMLDSRAAELDKEERPEVLSLLPSYEGKSILELGAGIGRFTGELAKTSGHVFAVDFVESVIKKNGSINDHYGNTSFMCADVTSTDLMIEANSIDLIFSNWLLMYLSDEEIDKLVERMVKWLKVGGYIFFRESCFHQTGDTERKFNPTHYREPRFYTKVFKECQTFNQDGTSFKLSLITFKCIGAYVNIKKDQNQICWLWKKVNSSEDGGFQSFLDNVQYKATGILRYERIFGDGYVSTGGAETTKEFVEKLNLKPGQKVLDVGCGIGGGDFYMAEKYGTHVVGIDLSINMIMFALERSIGCKCLVEFEVADCTTKTYPDHMFDVIYSRDTILHIQDKPSLFKSFFKWLKPGGKVLISDYCKSPGKPSEEFATYIKQRGYDLHDVEAYGQFLSVLQKELDKFEKNKDDFLSEFAQEDYDDIVNGWKAKLQRSSAGEQRWGLFVATK

SEQ ID NO: 175135 - protein, 318 aa, Zea Mays
MAAAAAAVNDRLDVHERKAQKSYWEEHSGELNLEAIMLDSRAAELDKEERPEVLSLLPSYEGKSILELGAGIGRFTGELAKTSGHVFAVDFVESVIKKNGSINDHYGNTSFMCADVTSTDLMIEANSIDLIFSNWLLMYLSDEEIDKLVERMVKWLKVGGYIFFRESCFHQTGDTERKFNPTHYREPRFYTKVFKECQTFNQDGTSFKLSLITFKCIGAYVNIKKDQNQICWLWKKVNSSEDGGFQSFLDNVQYKATGILRYERIFGDGYVSTGGAETTKEFVEKLNLKPGQKVLDVGCGIGGGDFYMAEKYGTHVVG

SEQ ID NO: 175136 - protein, 474 aa, Zea Mays
MAAAAAAVNDRLDVHERKAQKSYWEEHSGELNLEAIMLDSRAAELDKEERPEVLSLLPSYEGKSILELGAGIGRFTGELAKTSGHVFAVDFVESVIKKNGSINDHYGNTSFMCADVTSTDLMIEANSIDLIFSNWLLMYLSDEEIDKLVERMVKWLKVGGYIFFRESCFHQTGDTERKFNPTHYREPRFYTKVFKECQTFNQDGTSFKLSLITFKCIGAYVNIKKDQNQICWLWKKVNSSEDGGFQSFLDNVQYKATGILRYERIFGDGYVSTGGAETTKEFVEKLNLKPGQKVLDVGCGIGGGDFYMAEKYGTHVVGIDLSINMIMFALERSIGCKCLVEFEVADCTTKTYPDHMFDVIYSRDTILHIQDKPSLFKSFFKWLKPGGKVLISDYCKSPGKPSEEFATYIKQRGYDLHDVEAYGQKELDKFEKNKDDFLSEFAQEDYDDIVNGWKAKLQRSSAGEQRWGLFVATK

SEQ ID NO: 175137 - protein, 326 aa, Zea Mays
MAAAAAAVNGSLDRLDVHERKAQKSYWEEHSGELNLEAIMLDSRAAELDKEERPEVLSLLPSYEGKSILELGAGIGRFTGELAKTSGHVFAVDFVESVIKKNGSINDHYGNTSFMCADVTSTDLMIEANSIDLIFSNWLLMYLSDEEIDKLVERMVKWLKVGGYIFFRESCFHQTGDTERKFNPTHYREPRFYTKVFKECQTFNQDGTSFKLSLITFKCIGAYVNIKKDQNQICWLWKKVNSSEDGGFQSFLDNVQYKATGILRYERIFGDGYVSTGGAETTKEFVEKLNLKPGQKVLDVGCGIGGGDFYMAEKINPPCLKVSSNG

SEQ ID NO: 175138 - protein, 312 aa, Zea Mays
MPKHEALKALDVYKRAVHQAGNLSDFYESCQGLELARNFQFPTLREPPQTFLSTMEEYVKEAPRMMPVVEPLELPERLLLTYKPEEEVHDTVPIVAEKLQVVEEIAPVPSSQIALPPKPEIADTGDLLGLGDSTPTVLAIEESSALALAILPTGIDNSTTTTQQDSGFDPTGWELALVTTSSNATPLSMESNLGGGFDKLTLDSLYDDGTYRQMQQQQLYGSAPPNPFMASDPFAVSNQVAPPPSVQMAAMAPQPQHLPMMIEPNPFGPPQQHHAGVAPAANPFLDAGFGAFPAVNGMHPQTNPFGGAAQLL

SEQ ID NO: 175139 - protein, 399 aa, Zea Mays
MTLKLHVYQSKVKDLKSRTTELNSQDLLEQLPALQQLLYRLIGCRAEGAAKNNYLVQYALAQVLKESFKIYCAINDGIINLIDKFFEMPKHEALKALDVYKRAVHQAGNLSDFYESCQGLELARNFQFPTLREPPQTFLSTMEEYVKEAPRMMPVVEPLELPERLLLTYKPEEEVHDTVPIVAEKLQVVEEIAPVPSSQIALPPKPEIADTGDLLGLGDSTPTVLAIEESSALALAILPTGIDNSTTTTQQDSGFDPTGWELALVTTSSNATPLSMESNLGGGFDKLTLDSLYDDGTYRQMQQQQLYGSAPPNPFMASDPFAVSNQVAPPPSVQMAAMAPQPQHLPMMIEPNPFGPPQQHHAGVAPAANPFLDAGFGAFPAVNGMHPQTNPFGGAAQLL

SEQ ID NO: 175140 - protein, 347 aa, Zea Mays
MAALQSWRKAYGALKDTTTVSLANLNSDFKDLDVAIVRATNHVESPPKERHLRKIVAATSIARPQADVTYCIHALARRLAKTRNWIVALKTLVVIHRLLREGDPAFREEFLTFTQRVRILQLSNFKDDSSPVAWDYASWVRTYGLFLEEKLECFRVLKYDIEAARLSKQGQGPEKGHSRTTELNSQDLLEQLPALQQLLYRLIGCRAEGAAKNNYLVQYALAQVLKESFKIYCAINDGIINLIDKFFEMPKHEALKALDVYKRAVHQAGNLSDFYESCQGLELARNFQFPTLREPPQTFLSTMEEYVKEAPRMMPVVEPLVISWALVNHLDFCMTPSHFITSSSLNV

SEQ ID NO: 175141 - protein, 621 aa, Zea Mays
MDIDNDSVTWNLELRYTNKQGLRDQSSEPPLAWKGGEAQSHEECEARADTGDKHGAAAEAAMAALQSWRKAYGALKDTTTVSLANLNSDFKDLDVAIVRATNHVESPPKERHLRKIVAATSIARPQADVTYCIHALARRLAKTRNWIVALKTLVVIHRLLREGDPAFREEFLTFTQRVRILQLSNFKDDSSPVAWDYASWVRTYGLFLEEKLECFRVLKYDIEAARLSKQGQGPEKGHSRTTELNSQDLLEQLPALQQLLYRLIGCRAEGAAKNNYLVQYALAQVLKESFKIYCAINDGIINLIDKFFEMPKHEALKALDVYKRAVHQAGNLSDFYESCQGLELARNFQFPTLREPPQTFLSTMEEYVKEAPRMMPVVEPLELPERLLLTYKPEEEVHDTVPIVAEKLQVVEEIAPVPSSQIALPPKPEIADTGDLLGLGDSTPTVLAIEESSALALAILPTGIDNSTTTTQQDSGFDPTGWELALVTTSSNATPLSMESNLGGGFDKLTLDSLYDDGTYRQMQQQQLYGSAPPNPFMASDPFAVSNQVAPPPSVQMAAMAPQPQHLPMMIEPNPFGPPQQHHAGVAPAANPFLDAGFGAFPAVNGMHPQTNPFGGAAQLL

SEQ ID NO: 175142 - protein, 68 aa, Zea Mays
MPPRLATGCSPSPPPAATPTRHPAAACSPPPPPAAPCSPPRRRLLAPSSTRRDAIVSPPHHSLLASAP

SEQ ID NO: 175143 - protein, 602 aa, Zea Mays
MDEVPGRSSSVRATRSIFGESIGGRKPEMNRARNVLGQENLRPEMKQLAKSSIDKLSERKTAVDRERAGAESELSRARAMAKELERQIEQAKARASSKRSEPHTMRPATRASKTGHGAPRSQGERRDAAEYAEVSRELNRARQELLRLRLEVKSAAEAKAKAESDIVSSAINIQSNLLAADEMKRLVDEANEEHVLVELARIEAERERREIDAQRCAEAERFAREMEAKLAVTNADVEVLQAEMELVRAMERNSVKNDGTADVEAEDKALLRTAEAELDAAKKELDSIKAGSFQFMTSMDSARTEIMRVSEEVNRLKAQEKKADAQVQQLNAKLLKARARLEALTETSERSKAIVSNMTSALQQLQDEKKAAMKEEELNELEQRCVRAETENANAEIAATEARMQQSVKELEAAKTAEAAAMKKLKAAVEGTMQARASRRSGTITISRFEYEYLSGRAALVRVVADKKVSAAQAWVQALKAGEKELAARAEATERVTAELRAREAEAAAEAESAAGEQKALEQELYDLNAVAERDGLLCAYPRRRSTRVSATMRRTRARRSSVSSSAGIRNPRTPSFTIKRKKKVMPSLFKLIKQRKDERAS

SEQ ID NO: 175144 - protein, 122 aa, Zea Mays
MLRGQEFSTNSRTVQKSIQFFFQRSVITRLISQKLMLSYKYHLTLVRDVKKLSVWAVFSEQRVNTKIGWLEEKKNTMLFSIPLYQLTHRKCTTQQKGSSFLLTRDIASRLSLVCRRLKKDLI

SEQ ID NO: 175145 - protein, 696 aa, Zea Mays
MAGGDGDRHRAPKRHKSSTPSKAALVDESAEFDYADDFDDDAHDADTEVKKRDFTKLELKVDHASRPLWACADGRIFLETFSPLYKQAYDFLIAIAEPVCRPESMHEYNLTPHSLYAAVSVGLETSTIISVLSKLSKTKLPREIIDFIHGSTANYGKVKLVLKKNRYFVESPFPEVLSTLLRDEVISRARISPEDSLGAPSFTVSKTSGQIASGHEDLLNGMEIAAATEDKETHSFEIDPSQVENVKQRCLPNALNYPMLEEYDFRNDTVNPDLDMELKPQARPRPYQEKSLSKMFGNGRARSGIIVLPCGAGKSLVGVSAACRIKKSCLCLATNAVSVDQWAFQFKLWSTIKDENISRFTSDNKEKFTGMAGVVVTTYNMVAFGGKRSEDSEKIIEEIRNREWGLLLMDEVHVVPAHMFRKVISITKSHCKLGLTATLVREDERITDLNFLIGPKLYEANWLDLVKGGFIANVQCAEVWCPMTKEFFAEYLKKENSKKKQVLYVMNPNKFRACEFLIRFHEQQRGDKIIVFADNLFALTTYAMKLRKPMIFGATSHAERTRILYQFKNSPEVNTIFLSKVGDNSIDIPEANVIIQISSHAGSRRQEAQRLGRILRAKGKHQDRMAGGKEEYNAFFYSLVSTDTQEMYYSTKRQQFLIDQGYSFKVITSLPPAEEGPNLSYYTLDEQLELLSMGMT

SEQ ID NO: 175146 - protein, 748 aa, Zea Mays
MAGGDGDRHRAPKRHKSSTPSKAALVDESAEFDYADDFDDDAHDADTEVKKRDFTKLELKVDHASRPLWACADGRIFLETFSPLYKQAYDFLIAIAEPVCRPESMHEYNLTPHSLYAAVSVGLETSTIISVLSKLSKTKLPREIIDFIHGSTANYGKVKLVLKKNRYFVESPFPEDSLGAPSFTVSKTSGQIASGHEDLLNGMEIAAATEDKETHSFEIDPSQVENVKQRCLPNALNYPMLEEYDFRNDTVNPDLDMELKPQARPRPYQEKSLSKMFGNGRARSGIIVLPCGAGKSLVGVSAACRIKKSCLCLATNAVSVDQWAFQFKLWSTIKDENISRFTSDNKEKFTGMAGVVVTTYNMVAFGGKRSEDSEKIIEEIRNREWGLLLMDEVHVVPAHMFRKVISITKSHCKLGLTATLVREDERITDLNFLIGPKLYEANWLDLVKGGFIANVQCAEVWCPMTKEFFAEYLKKENSKKKQVLYVMNPNKFRACEFLIRFHEQQRGDKIIVFADNLFALTTYAMKLRKPMIFGATSHAERTRILYQFKNSPEVNTIFLSKVGDNSIDIPEANVIIQISSHAGSRRQEAQRLGRILRAKGKHQDRMAGGKEEYNAFFYSLVSTDTQEMYYSTKRQQFLIDQGYSFKVITSLPPAEEGPNLSYYTLDEQLELLSMALNAGDDMIGVERLEEDSDGKALIRARRSAGSMSAFSGAGGMVYMEYSTGKGKGVQKKHKDPSKRHHLFKKRYA

SEQ ID NO: 175147 - protein, 446 aa, Zea Mays
MAAFRSLRRRLPLALLLAVCVAASRSDPSGDDFYNRSICKLQPYRCGEVNITYPFYLSDDTADVLGNSSSYCGYPGLAIDCVDDEYPTIQLGGNSSNTGYSYNVTDIDYPTSTIYLADPDVLDDASCPRVDHNVTVSPSPTLWLNLSDYTVRYLLFFANCSINVLHVPNQSDINPIACASGSDGDYSFVIPSEMPHQLLLQMCSQQVILVPVLQNASLTPVDPQWSTSGYRDALKQGFQLQWDSDRKTERCAECEGSNGRCGYNRSGEFVTCLCADGHVSDHECTKGSKRKKAIIAGILAGTLSSLLFLCLVILTFFSAYKYGMLPFKSKDEPRIESFLQKNGNLHPKRYTYADVKRMTRSFTEKLGQGGFGAVYRGSLHDGRQVAVKMLKDTKGDGEEFMNEVASISRTCHVNIVTLTGFCLQGSKRALVYEYMPNGSLERFVNV

SEQ ID NO: 175148 - protein, 664 aa, Zea Mays
MAAFRSLRRRLPLALLLAVCVAASRSDPSGDDFYNRSICKLQPYRCGEVNITYPFYLSDDTADVLGNSSSYCGYPGLAIDCVDDEYPTIQLGGNSSNTGYSYNVTDIDYPTSTIYLADPDVLDDASCPRVDHNVTVSPSPTLWLNLSDYTVRYLLFFANCSINVLHVPNQSDINPIACASGSDGDYSFVIPSEMPHQLLLQMCSQQVILVPVLQNASLTPVDPQWSTSGYRDALKQGFQLQWDSDRKTERCAECEGSNGRCGYNRSGEFVTCLCADGHVSDHECTKGSKRKKAIIAGILAGTLSSLLFLCLVILTFFSAYKYGMLPFKSKDEPRIESFLQKNGNLHPKRYTYADVKRMTRSFTEKLGQGGFGAVYRGSLHDGRQVAVKMLKDTKGDGEEFMNEVASISRTCHVNIVTLTGFCLQGSKRALVYEYMPNGSLERYAFRAENTLSWEKLFDVATGTARGLEYLHRGCNTPIVHFDIKPHNILLDQDFCPKISDFGLAKLCPNKASSAVSIVGARGTVGYIAPEVYSKQFGVVSSKSDVYSYGMMVLEMVGARDKSTSADSERSSQYFPQWIYEHLDDYCVSASEVDGGTTELVRKMIVVGMWCIQLIPTDRPTMTRVVEMLEGSTSNLELPPKVLLSWQASIDVFLLRPQLIKGYIN

SEQ ID NO: 175149 - protein, 354 aa, Zea Mays
MGGVTSTIAARFAFFPPTPPSYTVVVADAATGRLAIPEISRALSRRRRRDGAGAGGSSSASSVAAAENEEGAEVVRLRTRRGNEIVGVYVRHARASATLLYSHGNAADLGQMYGLFVELSRRLRVNLFGYDYSGYGRSTGKPTECNTYADIEAAYNCLKEKYSVADEDIILYGQSVGSGPTIDLASRLPDLRAVVLHSPILSGVRVLYPVKRTFWFDIYKGTSDDVVDCSHGKQLWEHCKVKYSPLWLNGGGHCNLELYPDYIKHLKQFVSSVSKKTSKPDQKEIMAKDGTTSKEREEAYSEKPQPAAKCSQSQISRKSIDSRVGKSKTVDVPDKSRMSSDDIDKFRRRRCLVW

SEQ ID NO: 175150 - protein, 58 aa, Zea Mays
MRTASDDGQVFGFAVASCPPPLSPDFKYWTRSSRGLPHWMFLLRRLAGASKKHPRLFW

SEQ ID NO: 175151 - protein, 402 aa, Zea Mays
MRRHLRWRTRTIRRAGTRRRSRWLRRWSGWAVRAVSSQTSGSARTASSRPSSSPATRPRTACASTSTGWSTLSSRRMPPCASTSRTYAPSAGRQLEESGVLNGALKARGNSWGLHMPLVCPDGAVVAYAWKRQLAGQAGASAVDRTRLALKAFTDQKRRFFPHLEDEVVSHLHDGEPGGTKKPKLFTSNGDLEEKSLSDILKNLEHEASNIKIFTYWHLDWSKRASSLASLLDDDFVDPSKELNLQNMGKSRSGALTTSIDQVAVIELLVPSVFRAVVSLHPAGSTDPDAVAFFSPTEGGSYLHARGTSVHNVFKHVKEHADKALQYFISVEPSKALPLLLRWIASYQTLFTKVCSKCGRLLMMDKSLALLLPPVHRPYHQTSNIGPDLQEAYHIGCSSYDG

SEQ ID NO: 175152 - protein, 157 aa, Zea Mays
MARYSPPSLRCFFRCAASSASRAVGSGTRKKNLVFLGSPQVAASVLDKLLGASGSPESAFQVAAVVTQPPAAKNRGRKLMPSAVAQLALDRGFPEELIFTPERAREEVEPDVCITAAYGNILPQKFLDIPSCGWCCRNRCFPCIYCPCIGCRSSDCV

SEQ ID NO: 175153 - protein, 358 aa, Zea Mays
MARYSPPSLRCFFRCAASSASRAVGSGTRKKNLVFLGSPQVAASVLDKLLGASGSPESAFQVAAVVTQPPAAKNRGRKLMPSAVAQLALDRGFPEELIFTPERAREESFLSALKEVEPDVCITAAYGNILPQKFLDIPSCVNIHPSLLPLYRGAAPVQRALQDGVAETGVSLAYTVRALDAGPVIACERFSVDECIKAPELLSMLFHLGSKLLINELPSILDGSAKDKAQPQDDSKATLAPKLNSEESWLSFDEEAKVLHNKVRAFAGWPGTRAKLQLINQNSVPDVLEIKVISTKVSTSCVKVGDENEILFSGSSLLIPCSGSTWLEVLELQLPGKKVTKAQDFWNGLRGQKLMKLP

SEQ ID NO: 175154 - protein, 255 aa, Zea Mays
MARYSPPSLRCFFRCAASSASRAVGSGTRKKNLVFLGSPQVAASVLDKLLGASGSPESAFQVAAVVTQPPAAKNRGRKLMPSAVAQLALDRGFPEELIFTPERAREESFLSALKEVEPDVCITAAYGNILPQKFLDIPSCGTVNIHPSLLPLYRGAAPVQRALQDGVAETGVSLAYTVRALDAGPVIACERFSVDECIKAPELLSMLFHLGSKLLINELPSILDGSAKDKAQPQDDSKATLAPKDGLGRAQSCNS

SEQ ID NO: 175155 - protein, 165 aa, Zea Mays
MARYSPPSLRCFFRCAASSASRAVGSGTRKKNLVFLGSPQVAASVLDKLLGASGSPESAFQVAAVVTQPPAAKNRGRKLMPSAVAQLALDRGFPEELIFTPERAREESFLSALKEVEPDVCITAAYGNILPQKFLDIPSCGWCCRNRCFPCIYCPCIGCRSSDCV

SEQ ID NO: 175156 - protein, 275 aa, Zea Mays
MARYSPPSLRCFFRCAASSASRAVGSGTRKKNLVFLGSPQVAASVLDKLLGASGSPESAFQVAAVVTQPPAAKNRGRKLMPSAVAQLALDRGFPEELIFTPERAREESFLSALKEVEPDVCITAAYGNILPQKFLDIPSCGTVNIHPSLLPLYRGAAPVQRALQDGVAETGVSLAYTVRALDAGPVIACERFSVDECIKAPELLSMLFHLGSKLLINELPSILDGSAKDKAQPQDDSKATLAPKLNSEESWLSFDEEAKVLHNKDGLGRAQSCNS

SEQ ID NO: 175157 - protein, 132 aa, Zea Mays
MGRPPDEGDQVDDVLETKLDRKFKIITDKGTLDAIGLHPDGRAKRMVYWESVSNLVEPGGIVVITSCNHTKDELLHEVEDFTKRKFGKENVDEGARDASEIFRYIDHVRTYPTIMFGGIEGSQVCTVAFQRV

SEQ ID NO: 175158 - protein, 246 aa, Zea Mays
MLGLQSYWDASYLEDLANFQEHGHTGEIWFGADVMDTVAVWTKSLCNIIEGKIPSGQDNIKSEVNENLFSNYPVLDVGTGNGLLLQALAKQGFTDLTGTDYSKGAVELARNLAARDGFSSINFLVDDVLETKLDRKFKIITDKGTLDAIGLHPDGRAKRMVYWESVSNLVEPGGIVVITSCNHTKDELLHEVEDFTKRKFGKENVDEGARDASEIFRYIDHVRTYPTIMFGGIEGSQVCTVAFQRV

SEQ ID NO: 175159 - protein, 207 aa, Zea Mays
MAGIRLTPEEPEMPVGTPPRPQLPPFVAAAGGGGGGLEMASDDERSIAADSWSVRSEYGSTLDDDQRYADAAEVLAASASSANFPSAASDYCSDKDDQDPGDVEGSMLGLQSYWDASYLEDLANFQEHGHTGEIWFGADVMDTVAVWTKSLCNIIEGKIPSGQDNIKSEVNENLFSNYPVLDVGTGNGLLLQALAKQGYYPNFLNDV

SEQ ID NO: 175160 - protein, 368 aa, Zea Mays
MSSAVKDQLQQMSTTYDSLLLELNMIWDEVGEPDMARDRMLLELEQEWLDVYRRKVDQANRCRAQLRQAIADAEAELAGICSAMSEPPIHVRQSNQKLHGLREELNAIVPYLEEMRKKKVERWDQFVDVIEQIKKVASEIRPSDFVPFIIPVDQSDLSLRKLDELTKELQSLQKEKSDRLKQVMEHLSTLHLLCEVLGVDFKQTVYEVHPSLGEADGSKNLSNSTIERLASAVNRLRELKVQRMQKLQDLASSMLELWNLMDTPLEEQQMFQNLTCNIAASEHEITGPNTLSTDFLSYVESEVLRLEQLKASKMKDLVLKKKTELEDHRRRAHLIGEEGYAAEFSDEAIEELSILRWCWNKLRLTLPQ

SEQ ID NO: 175161 - protein, 390 aa, Zea Mays
MSSAVKDQLQQMSTTYDSLLLELNMIWDEVGEPDMARDRMLLELEQEWLDVYRRKVDQANRCRAQLRQAIADAEAELAGICSAMSEPPIHVRQSNQKLHGLREELNAIVPYLEEMRKKKVERWDQFVDVIEQIKKVASEIRPSDFVPFIIPVDQSDLSLRKLDELTKELQSLQKEKSDRLKQVMEHLSTLHLLCEVLGVDFKQTVYEVHPSLGEADGSKNLSNSTIERLASAVNRLRELKVQRMQKLQDLASSMLELWNLMDTPLEEQQMFQNLTCNIAASEHEITGPNTLSTDFLSYVESEVLRLEQLKASKMKDLVLKKKTELEDHRRRAHLIGEEGYAAEFSDEAIEAGAVDPALVLEQIEAHIATVKEEAFSRKDILEKVERWLNA

SEQ ID NO: 175162 - protein, 628 aa, Zea Mays
MSSAVKDQLQQMSTTYDSLLLELNMIWDEVGEPDMARDRMLLELEQEWLDVYRRKVDQANRCRAQLRQAIADAEAELAGICSAMSEPPIHVRQSNQKLHGLREELNAIVPYLEEMRKKKVERWDQFVDVIEQIKKVASEIRPSDFVPFIIPVDQSDLSLRKLDELTKELQSLQKEKSDRLKQVMEHLSTLHLLCEVLGVDFKQTVYEVHPSLGEADGSKNLSNSTIERLASAVNRLRELKVQRMQKLQDLASSMLELWNLMDTPLEEQQMFQNLTCNIAASEHEITGPNTLSTDFLSYVESEVLRLEQLKASKMKDLVLKKKTELEDHRRRAHLIGEEGYAAEFSDEAIEAGAVDPALVLEQIEAHIATVKEEAFSRKDILEKVERWLNACEEEAWLEDYNKDDNRYNAGRGAHLTLKRAEKARILVNKIPGLVDVLTTKIVAWETERGKEFTYDGVRLRSMLEDYIIIRQEKELEKKRQRDQKKIQDQLKAEQEALYGSKPSPSKTQSTKKVPRQSMGGANRRLSLGGATTQAPKTDIMHSKTARAAKKAEDLGALSPKAWTLPVFPSRNYLSTQALCERQKHHASLLPRSCQETMSRRCLRGPSPTTQRKRTKPPKHLQGSIQKRR

SEQ ID NO: 175163 - protein, 696 aa, Zea Mays
MSSAVKDQLQQMSTTYDSLLLELNMIWDEVGEPDMARDRMLLELEQEWLDVYRRKVDQANRCRAQLRQAIADAEAELAGICSAMSEPPIHVRQSNQKLHGLREELNAIVPYLEEMRKKKVERWDQFVDVIEQIKKVASEIRPSDFVPFIIPVDQSDLSLRKLDELTKELQSLQKEKSDRLKQVMEHLSTLHLLCEVLGVDFKQTVYEVHPSLGEADGSKNLSNSTIERLASAVNRLRELKVQRMQKLQDLASSMLELWNLMDTPLEEQQMFQNLTCNIAASEHEITGPNTLSTDFLSYLKASKMKDLVLKKKTELEDHRRRAHLIGEEGYAAEFSDEAIEAGAVDPALVLEQIEAHIATVKEEAFSRKDILEKVERWLNACEEEAWLEDYNKDDNRYNAGRGAHLTLKRAEKARILVNKIPGLVDVLTTKIVAWETERGKEFTYDGVRLRSMLEDYIIIRQEKELEKKRQRDQKKIQDQLKAEQEALYGSKPSPSKTQSTKKVPRQSMGGANRRLSLGGATTQAPKTDIMHSKTARAAKKAEDLGALSPSSRGLDIAGLPIKKLSFNASTLREAETPRKPFAQIMPGNNVSSMPARPISNDTEEENKTPKTFAGLNPKTPVTVTAPMQLAVTPAVANKVIATPATLFQEKAESPALPGDIEYSFEERRLAVYLARQVAFFVHSPSPSCANTQLLLS

SEQ ID NO: 175164 - protein, 320 aa, Zea Mays
MGRAPCCDKTSVKRGPWSPEEDDLLRSYVQNHGTGGNWIALPHKAGLNRCGKSCRLRWLNYLRPDIKHGGYTEQEDRVICSLYSSIGSRWSIIASKLPGRTDNDVKNYWNTKLKKKAIAMQQQQQQQQEYYQQQHSSGGRGRRAAAAAAAPRSQCASVQPSPASASSAVTTASASDACSFGAMYPSPSALQAAPVLARYDSTAAAPAPLSLPQQASSLAAEFVPPAPPPVGASWAGGLPLDDMFLPELLGDSEFPPGDGDFFGAGAGAGLLAPLLLQDRFPAASLQELSACYFPNAPAEMWAAADHAHAKPPAGLCHSLT

SEQ ID NO: 175165 - protein, 138 aa, Zea Mays
MIDMLRECGLAHKTILFILEEFDLFAQGKQRLLYSLLDAMQSLTSQAVVIGVSCRLDADQLLEKRVRSRFSHRKLLFISPSLDDIQRLVEHLLILAKDSGLPSKYIADYNSRLTVSFLRPDCYGAYLILFEYLAINGI

SEQ ID NO: 175166 - protein, 114 aa, Zea Mays
MIDMLRECGLAHKTILFILEEFDLFAQGKQRLLYSLLDAMQSLTSQAVVIGVSCRLDADQLLEKRVRSRFSHRKLLFISPSLDDIQRLVEHLLILAKDSGLPSKYIADYNSRLT

SEQ ID NO: 175167 - protein, 94 aa, Zea Mays
MVAAVSLPSQAQAVLRSRLCDPVFIHSALSSSLDTNYSKLKYLVASSVSEACNNSVLLLGPRGCGKAAVVDMVLDDLKEEHPDAISVGLRRSKE

SEQ ID NO: 175168 - protein, 168 aa, Zea Mays
MKRLCTTSCLVSPQMVFLLKFGGDLTSCITVLRTIGIPFLGNIHVWRRLEKRIYIPLPDFESRKALININLRTVQIAADVNIDEVARRTEGYSGDDLTNVCRDASMNGMRRKIAGKTRDEIKNMSKDDIAKDPVAMCDFVEALVKVQKSVSPADIEKHEKWMAEFGSA

SEQ ID NO: 175169 - protein, 407 aa, Zea Mays
MANPLAGLQDHIKLARDYALEGLYDTSIIFFDGAIAQINKHLTTLDDALVRTKWMNCKKAISEEVESVKQLDAQLKSLKEAPGTRRSSSPPIRSNKSFVFQPLDEYPTSSPAPFDDPDVWAPPRDTPTRRPTRGQSSARKSSQDGAWARGSSRTGTPSRSSKPNGSKGGSVVKSSTASNSSVRKGKPSSSKADSAGIRRPWKGVLMFGPPGTGKTLLAKAVATECGTTFFNVSSATLASKWRGESERMVRCLFDLARAYAPSTIFIDEIDSLCTSRGASGEHESSRRVKSELLVQIDGVNNSSTTEDGQPKIVMVLAATNFPWDIDEALRLGLKNSLVCPTPKHRSKVRASCGHSHMESWTMALLLMDGEGFGVFSTCIRRSSRLSFLDLPIVAWTPRQSIVWVVPY

SEQ ID NO: 175170 - protein, 492 aa, Zea Mays
MANPLAGLQDHIKLARDYALEGLYDTSIIFFDGAIAQINKHLTTLDDALVRTKWMNCKKAISEEVESVKQLDAQLKSLKEAPGTRRSSSPPIRSNKSFVFQPLDEYPTSSPAPFDDPDVWAPPRDTPTRRPTRGQSSARKSSQDGAWARGSSRTGTPSRSSKPNGSKGGSVVKSSTASNSSVRKGKPSSSKADSASSDAEEGKSKKGQYEGPDMDLAAMLERDVLDSTPGVRWDDVAGLSEAKRLLEEAVVLPLWMPEYFQGIRRPWKGVLMFGPPGTGKTLLAKAVATECGTTFFNVSSATLASKWRGESERMVRCLFDLARAYAPSTIFIDEIDSLCTSRGASGEHESSRRVKSELLVQIDGVNNSSTTEDGQPKIVMVLAATNFPWDIDEALRLGLKNSLVCPTPKHRSKGLGRSFRLHENAPYLVQDIPRIPIIIGTGAWLQMKRLCTTSCLVSPQMVFLLKFGGDLTSCITVLRTIGIPFLGNIHVW

SEQ ID NO: 175171 - protein, 241 aa, Zea Mays
MANPLAGLQDHIKLARDYALEGLYDTSIIFFDGAIAQINNDAEEGKSKKGQYEGPDMDLAAMLERDVLDSTPGVRWDDVAGLSEAKRLLEEAVVLPLWMPEYFQGIRRPWKGVLMFGPPGTGKTLLAKAVATECGTTFFNVSSATLASKWRGESERMVRCLFDLARAYAPSTIFIDEIDSLCTSRGASGEHESSRRVKSELLVQIDGVNNSSTTEDGQPKIVMVLAATNFPWDIDEALRSG

SEQ ID NO: 175172 - protein, 491 aa, Zea Mays
MASTVLERLAVSELQREPANPRDRLFQSHRVRHMLDLVVSTSGKLVEIYEDKDNARKDEINTHLTAPTQSGLFSKYYERLKEIREYHRRNPSARFVSTTDDYEELLKEEPVIEFTGEETFGRYLDLHELYNEFINSKFGTLMEYSAYVGCFSQTDKISHSHKATRKYREYLEHILEYLTSFLYRTEPLQDIDKIFLKLESEFEEQWANEGILGWGNKGTEKESEIDLDYYSTVEELVELGPEKLKQALAARGLKSGGTVQQRADRLFLLKVTPLEQLDRKHFAKVPHTKDGSNTAPNGNAFKEDMKKEIALMEVKMKRLCELLDEAFVRTKENAEKKLTLTYEEMEAEREEEEVQVDTESDDEEQQIYNPLKLPMGWDGKPIPYWLYKLHGLGQEFKCEICGNHSYWGRRAYERHFKEWRHQHGMRCLGIPNTKNFNEITSIEEAKALWEKIQARQGVNKWRPDLEEEYEDQEGNIYNKKTYTDLQRQGLI

SEQ ID NO: 175173 - protein, 101 aa, Zea Mays
MEGRETLPAYISNSGYHKYLCVCIYIVLISQYIRAEKQKSFRRDKRSSLLAGRRDSLPVRSPDVHVTRPWTSVRRLCYAAKSDQATHVEWNIFLKGYKHIH

SEQ ID NO: 175174 - protein, 69 aa, Zea Mays
MGSAVGRRIVLTGRKKVEHSHLHLAILNNYSILSSNVMCYFKHRYITNPLIYMLRTAMRALARWGVVGF

SEQ ID NO: 175175 - protein, 78 aa, Zea Mays
MGIENLCTVKLAPRFDFILAADALNNRWWLLSRARCLEMGLGNDLARTRLGLQGRACGWDLRDEDLFEMQFVRIYLLA

SEQ ID NO: 175176 - protein, 94 aa, Zea Mays
MNRYESFRRSGFQKSNMKRLLASITGSQKISIPTSIVVSGIAKIFVGELIETARVVMSERKDSGPIRPCHIREAYRRLKLEGKIPRRSVPRLFR

SEQ ID NO: 175177 - protein, 523 aa, Zea Mays
MNRETSFGDQGMYYYGYYYPGSYGGWDENGYFVGYNGVEVHPAVVQTDNGSYLCHLPGYENGYASYSQVVPGGIASVDGQYVSKEPYYSTALPIQDPRTPGIFAQPIAYRTELASAYSWDPSFVLLDGVQGHPVGVHQTNYAARPKYSFNKHVIPSSKATRSAKSAADTVKGSSSALETVTNAVNSSPPSKSANKTPGASITKGYLPYSKSVMHTNNQEKNSVYQSKGINVKESGRSWNSREKLGRSKLNGQGDSESNENNHTDNLKHSLSHRSDVVGLSSAGDANASIPSPVAISKNACNLSDFVTKVAQERIAEKGTKCPVFLFFSVNASGQFCGVAEMVGPVDFNRNMNFWQQDKWNGFFSVKWHIIKDVPNPQFRHIILENNENKPVTNSRDTQEVNFSQGTEMLNIFKNFTCKTSILDDFDFYENRQKVMQDRRGKLLTTSFDHPLPKAEKSPEIKSQTQLISGPEVGRAKSDEGQGNNVGMVLDTTKKNEEQSSNVPEILDAACSNKEQPNKIAIEG

SEQ ID NO: 175178 - protein, 554 aa, Zea Mays
MEPKGELAQKRILPSRFAHPYAIEEAINSLEIDASTKASNVNLPAKKDASSSDAVSCISSGDAASTAKESEMNRETSFGDQGMYYYGYYYPGSYGGWDENGYFVGYNGVEVHPAVVQTDNGSYLCHLPGYENGYASYSQVVPGGIASVDGQYVSKEPYYSTALPIQDPRTPGIFAQPIAYRTELASAYSWDPSFVLLDGVQGHPVGVHQTNYAARPKYSFNKHVIPSSKATRSAKSAADTVKGSSSALETVTNAVNSSPPSKSANKTPGASITKGYLPYSKSVMHTNNQEKNSVYQSKGINVKESGRSWNSREKLGRSKLNGQGDSESNENNHTDNLKHSLSHRSDVVGLSSAGDANASIPSPVAISKNACNLSDFVTKYEQALFFVIKSYSEDDIHKSVKYNVWASTPNGNKRLDNAYRVAQERIAEKGTKCPVFLFFSVNASGQFCGVAEMVGPVDFNRNMNFWQQDKWNGFFSVKWHIIKDVPNPQFRHIILENNENKPVTNSRDTQEVNFSQGTEMLNIFKNFTCKTSILDDFDFYENRQKVMQDRRAKS

SEQ ID NO: 175179 - protein, 512 aa, Zea Mays
MPNWRLVYLALQRWTEQARLPAAPGRPSFAVELEDTRSNAGFFCGELWCGLMEPKGELAQKRILPSRFAHPYAIEEAINSLEIDASTKASNVNLPAKKDASSSDAVSCISSGDAASTAKESEMNRETSFGDQGMYYYGYYYPGSYGGWDENGYFVGYNGVEVHPAVVQTDNGSYLCHLPGYENGYASYSQVVPGGIASVDGQYVSKEPYYSTALPIQDPRTPGIFAQPIAYRTELASAYSWDPSFVLLDGVQGHPVGVHQTNYAARPKYSFNKHVIPSSKATRSAKSAADTVKGSSSALETVTNAVNSSPPSKSANKVNASGQFCGVAEMVGPVDFNRNMNFWQQDKWNGFFSVKWHIIKDVPNPQFRHIILENNENKPVTNSRDTQEVNFSQGTEMLNIFKNFTCKTSILDDFDFYENRQKVMQDRRGKLLTTSFDHPLPKAEKSPEIKSQTQLISGPEVGRAKSDEGQGNNVGMVLDTTKKNEEQSSNVPEILDAACSNKEQPNKIAIEG

SEQ ID NO: 175180 - protein, 384 aa, Zea Mays
MEPKGELAQKPIEEAINSLEIDASTKASNVNLPAKKDASSSDAVSCISSGDAASTAKESEMNRETSFGDQGMYYYGYYYPGSYGGWDENGYFVGYNGVEVHPAVVQTDNGSYLCHLPGYENGYASYSQVVPGGIASVDGQYVSKEPYYSTALPIQDPRTPGIFAQPIAYRTELASAYSWDPSFVLLDGVQGHPVGVHQTNYAARPKYSFNKHVIPSSKATRSAKSAADTVKGSSSALETVTNAVNSSPPSKSANKTPGASITKGYLPYSKSVMHTNNQEKNSVYQSKGINVKESGRSWNSREKLGRSKLNGQGDSESNENNHTDNLKHSLSHRSDVVGLSSAGDANASIPSPVAISKNACNLSDFVTKLMQVVSSVAWLRWLVQ

SEQ ID NO: 175181 - protein, 624 aa, Zea Mays
MEPKGELAQKPIEEAINSLEIDASTKASNVNLPAKKDASSSDAVSCISSGDAASTAKESEMNRETSFGDQGMYYYGYYYPGSYGGWDENGYFVGYNGVEVHPAVVQTDNGSYLCHLPGYENGYASYSQVVPGGIASVDGQYVSKEPYYSTALPIQDPRTPGIFAQPIAYRTELASAYSWDPSFVLLDGVQGHPVGVHQTNYAARPKYSFNKHVIPSSKATRSAKSAADTVKGSSSALETVTNAVNSSPPSKSANKTPGASITKGYLPYSKSVMHTNNQEKNSVYQSKGINVKESGRSWNSREKLGRSKLNGQGDSESNENNHTDNLKHSLSHRSDVVGLSSAGDANASIPSPVAISKNACNLSDFVTKYEQALFFVIKSYSEDDIHKSVKYNVWASTPNGNKRLDNAYRVAQERIAEKGTKCPVFLFFSVNASGQFCGVAEMVGPVDFNRNMNFWQQDKWNGFFSVKWHIIKDVPNPQFRHIILENNENKPVTNSRDTQEVNFSQGTEMLNIFKNFTCKTSILDDFDFYENRQKVMQDRRGKLLTTSFDHPLPKAEKSPEIKSQTQLISGPEVGRAKSDEGQGNNVGMVLDTTKKNEEQSSNVPEILDAACSNKEQPNKIAIEG

SEQ ID NO: 175182 - protein, 594 aa, Zea Mays
MEPKGELAQKRILPSRFAHPYAIEEAINSLEIDASTKASNVNLPAKKDASSSDAVSCISSGDAASTAKESEMNRETSFGDQGMYYYGYYYPGSYGGWDENGYFVGYNGVEVHPAVVQTDNGSYLCHLPGYENGYASYSQVVPGGIASVDGQYVSKEPYYSTALPIQDPRTPGIFAQPIAYRTELASAYSWDPSFVLLDGVQGHPVGVHQTNYAARPKYSFNKHVIPSSKATRSAKSAADTVKGSSSALETVTNAVNSSPPSKSANKTPGASITKGYLPYSKSVMHTNNQEKNSVYQSKGINVKESGRSWNSREKLGRSKLNGQGDSESNENNHTDNLKHSLSHRSDVVGLSSAGDANASIPSPVAISKNACNLSDFVTKVAQERIAEKGTKCPVFLFFSVNASGQFCGVAEMVGPVDFNRNMNFWQQDKWNGFFSVKWHIIKDVPNPQFRHIILENNENKPVTNSRDTQEVNFSQGTEMLNIFKNFTCKTSILDDFDFYENRQKVMQDRRGKLLTTSFDHPLPKAEKSPEIKSQTQLISGPEVGRAKSDEGQGNNVGMVLDTTKKNEEQSSNVPEILDAACSNKEQPNKIAIEG

SEQ ID NO: 175183 - protein, 467 aa, Zea Mays
MKVVARAMDEPPKPVSDEGVKVSTKSTSEFETRATQKRAGNAGKVMKHDVAKEDAKAGKPTSWNVNQQVSTVDREVSHAADAAQETSTTISNGNLHPAPHKVSSSSQRNAVTHNGAANPSVESTDMIDSPVRQQKRPPVEEQDRSGKRRKGENEPDLSEHHVDKEKSLDSRGGDKFRSVDHEKSANEEQNLRAGKIKEKSDDKYDRDPREKLDRGERRRGEDAIERSTDRLSDRRERSIERMQERGTDKALEKGREDRNKDERNKVKYAEPSVDRTHSSDERFRGQSLPPPPPLPASFVPQSVGANRREEDADRRGGSSRHVQRSSPRHDEKERRQSEENISSFQDDGKHRREEDIRDRKREDRDTLSNKVDDRDREKGTSLKEDSDPSNVSKRRKIKREQTLEAGEYAPSAPQPPSHGSGSSQLSDIRERERKGVISQHRISHADDLPRTHGKDMTSKSSRRESDQ

SEQ ID NO: 175184 - protein, 64 aa, Zea Mays
MTEEQVDAMAGSETLRQQASLFGATRNYKVLSKSTNRLRDSLLPKDEPKLAVPMLLLIAQHRSK

SEQ ID NO: 175185 - protein, 91 aa, Zea Mays
MKKGVGIELVVLEELIQQMANVQYTENMTEEQVDAMAGSETLRQQASLFGATRNYKVLSKSTNRLRDSLLPKDEPKLAVPMLLLIAQHRSK

SEQ ID NO: 175186 - protein, 192 aa, Zea Mays
MSNRAVGHWASKFSVWQGGSEPGEEWVAVRRTRAPSENGAVGLGARGFSALACDSVPRPRGMGAGGGEQEWQSWRDERAEAHPKSALISTSITHTASQGCRGPKSASAGAGKGANGQSVVQRLQSELLALLMGDDPGVSAFPGATTCSTRPVCTTPAKSILAYQGNGDVGKQREDDSLACEFITIVWQDYFV

SEQ ID NO: 175187 - protein, 77 aa, Zea Mays
MQGVCSGCPSSSVTLKSGIENMLMHYGPVWFGPQRICQAQTASQAIDFGRLRATMECLAGICLGGCNPNVPYVPHVM

SEQ ID NO: 175188 - protein, 337 aa, Zea Mays
MLGVGLGVRLMVAVAPAPPVPAPPGKPPLPLCSSLRHRSSGWWFSNGDAHGRDSTAATTSSRATRRKWWSDPDGSQEDYGSSSLEEDEYGYGYDYDYEDEAAFPGFGGAGEMFDEPWFSKVFKTYGFMLPVMLASMFAVTGLKAFLMAMAIPLGQSAISFIIDAVWPRRKGNRDDRWRRPVQEEEEEEEDFPRDATDFATAAVGADDSTKSSSSGDGGGNKSSGGYGGWDELLDNNNNTAAAREAKRSSNSFSAGNTYYSTKSRPSATGEADADYTAAGGGGRAEQGVGAPPERMRMRRRRVPRTMGLGSTRYKQAPLLMRLLVAVFPFLGSWFSVL

SEQ ID NO: 175189 - protein, 243 aa, Zea Mays
MLPVMLASMFAVTGLKAFLMAMAIPLGQSAISFIIDAVWPRRKGNRDDRWRRPVQEEEEEEEDFPRDATDFATGGRGRYSSSYYEGRRGRQSYQSSVSNDFADAASAAVGADDSTKSSSSGDGGGNKSSGGYGGWDELLDNNNNTAAAREAKRSSNSFSAGNTYYSTKSRPSATGEADADYTAAGGGGRAEQGVGAPPERMRMRRRRVPRTMGLGSTRYKQAPLLMRLLVAVFPFLGSWFSVL

SEQ ID NO: 175190 - protein, 224 aa, Zea Mays
MAMAIPLGQSAISFIIDAVWPRRKGNRDDRWRRPVQEEEEEEEDFPRDATDFATGGRGRYSSSYYEGRRGRQSYQSSVSNDFADAASAAVGADDSTKSSSSGDGGGNKSSGGYGGWDELLDNNNNTAAAREAKRSSNSFSAGNTYYSTKSRPSATGEADADYTAAGGGGRAEQGVGAPPERMRMRRRRVPRTMGLGSTRYKQAPLLMRLLVAVFPFLGSWFSVL

SEQ ID NO: 175191 - protein, 306 aa, Zea Mays
MRRMDGFISSSLALVVLALHLSVDGCSAVNLEGSILLKFQSRVEEDPYGAMVGWSPRDSDPCSWNGVRCVDGRVVTLNLKDLSLRGTLGPELGTLSHLRALVLSNNLFSGSIPKELSALTMLEILDLSNNNLSGEVPQEIAEMQSLRQLLLSNNCFQWPLTQHSYGNYDQENDFNIYDNLGRGNMNRRAENGLESGSSSQENKKDTSNLSGNPTQLPSQHEPRNTASHLTQRRLLQDSNLAAPSPANALVPAAVPVPSTGTELPPKKIKKQGPSNGFMSLYCHWSHFLCLASHVCFCYAAPSQGQQ

SEQ ID NO: 175192 - protein, 612 aa, Zea Mays
MRRMDGFISSSLALVVLALHLSVDGCSAVNLEGSILLKFQSRVEEDPYGAMVGWSPRDSDPCSWNGVRCVDGRVVTLNLKDLSLRGTLGPELGTLSHLRALLLSNNCFQWPLTQHSYGNYDQENDFNIYDNLGRGNMNRRAENGLESGSSSQENKKDTSNLSGNPTQLPSQHEPRNTASHLTQRRLLQDSNLAAPSPANALVPAAVPVPSTGTGSFSAFSPNNAPVPAVNSPSSPPMVPRTTSEEDQETRSIKWLYVIVLPLVALLMFGIACMLLLCRTKSGTTIGPWKTGLSGQLQKAFVTGVPKLQRSELEGACEDFSNIVASYPQYTVYKGTLSSGVEIAVVSTMIISSKDWSKHSEGRFRKKIDSLSRINHKNYINLLGYCEEEEPFMRMMVMEYAPNGTLYEHLHVEGFDPIDWNGRMRVIMGVAYCTLHMHELSPPITHPDIKSSAILLSEDGAAKIVDMSVWHEVYSRENVPNDDDLVDHPERVAADPAGNIYSFGLLMLEIISGKPPYSKEKGSLLNLALECIRDNRNMSCLLDPNLKDHKEKDLEIICDLLYECIQSDPKKRPTMREVTTRLREVLSISPEAATPRLSPLWWAELEILSVEAS

SEQ ID NO: 175193 - protein, 376 aa, Zea Mays
MVPRTTSEEDQETRSIKWLYVIVLPLVALLMFGIACMLLLCRTKSGTTIGPWKTGLSGQLQKAFVTGVPKLQRSELEGACEDFSNIVASYPQYTVYKGTLSSGVEIAVVSTMIISSKDWSKHSEGRFRKKIDSLSRINHKNYINLLGYCEEEEPFMRMMVMEYAPNGTLYEHLHVEGFDPIDWNGRMRVIMGVAYCTLHMHELSPPITHPDIKSSAILLSEDGAAKIVDMSVWHEVYSRENVPNDDDLVDHPERVAADPAGNIYSFGLLMLEIISGKPPYSKEKGSLLNLALECIRDNRNMSCLLDPNLKDHKEKDLEIICDLLYECIQSDPKKRPTMREVTTRLREVLSISPEAATPRLSPLWWAELEILSVEAS

SEQ ID NO: 175194 - protein, 537 aa, Zea Mays
MLEILDLSNNNLSGEVPQEIAEMQSLRQLLLSNNCFQWPLTQHSYGNYDQENDFNIYDNLGRGNMNRRAENGLESGSSSQENKKDTSNLSAQLPSQHEPRNTASHLTQRRLLQDSNLAAPSPANALVPAAVPVPSTGTGSFSAFSPNNAPVPAVNSPSSPPMVPRTTSEEDQETRSIKWLYVIVLPLVALLMFGIACMLLLCRTKSGTTIGPWKTGLSGQLQKAFVTGVPKLQRSELEGACEDFSNIVASYPQYTVYKGTLSSGVEIAVVSTMIISSKDWSKHSEGRFRKKIDSLSRINHKNYINLLGYCEEEEPFMRMMVMEYAPNGTLYEHLHVEGFDPIDWNGRMRVIMGVAYCTLHMHELSPPITHPDIKSSAILLSEDGAAKIVDMSVWHEVYSRENVPNDDDLVDHPERVAADPAGNIYSFGLLMLEIISGKPPYSKEKGSLLNLALECIRDNRNMSCLLDPNLKDHKEKDLEIICDLLYECIQSDPKKRPTMREVTTRLREVLSISPEAATPRLSPLWWAELEILSVEAS

SEQ ID NO: 175195 - protein, 196 aa, Zea Mays
MARASSSRQVIAKARVPIVKFVERKSGIAFDISFDIDGGPQAADFIKDAVKKLPALRPLCMILKVFLHQRELNEVYTGGIGSYALLTMLITHLQLVWGGKDILGYHRSKEHNLGILLVRFFDFYGRKLNNWDVGVSCNSSRTFFLKSDKDFMNHDRPHLLAIQDPMAPDNDIGKNSFNYFKIQFSLTGKAGTMKIC

SEQ ID NO: 175196 - protein, 499 aa, Zea Mays
MCSRTSLLRTSSHSTSPPLPPSSPSPSPSRHPRRPQLPRQRPLSPVLWRTSRRRARSARGSGEGGGSGAPCFSYTRRSWTSVILSHLLLKSNLHEQLLCKMSLMLSNIYGHSVEVFGSFRTGLYLPTSDIDVVIFESRVKTPQVGLYALAKALSQKGVAKKIQVIAKARVPIVKFVERKSGIAFDISFDIDGGPQAADFIKDAVKKLPALRPLCMILKVFLHQRELNEVYTGGIGSYALLTMLITHLQLVWGGKDILGYHRSKEHNLGILLVRFFDFYGRKLNNWDVGVSCNSSRTFFLKSDKDFMNHDRPHLLAIQDPMAPDNDIGKNSFNYFKVKSAFSKAYSVLTDANLFISLGHNRSILGTIVRPDSVLLDRKGWNNEDMLAEPWEPITQQFDTENDAVYNWHVIDEDEPLPRNSQSTSEDTSSSPSKKRKSPKSRRKSRKKSKATASGSSDVANGFRKDRSSKREAGSSKRRKGPKEYDRFTNTLPKYTHVSKW

SEQ ID NO: 175197 - protein, 332 aa, Zea Mays
MEAEASVPATDYVYDALPGLHLAFSPEETLDDAAAGQDEDDATATYAVFRNEITEAGDVLADIPAADFFSLDVSTSASVEPEPEPEPPSPAPTAAAATPSISRALEDQPPQGSERAWFRGGRRFRSPMLQLHKEILDFCDFISPSTEEQSSRAAAVQDVSDVVKHIWPQCKVEVFGSFRTGLYLPTSDIDVVIFESRVKTPQVGLYALAKALSQKGVAKKIQVIAKARVPIVKFVERKSGIAFDISFDIDGGPQAADFIKDAVKKLPALRPLCMILKVFLHQRELNEVYTGGIGSYALLTMLITHLQLVWGGKDILGYHRSKEHNLGILLVF

SEQ ID NO: 175198 - protein, 402 aa, Zea Mays
MEAEASVPATDYVYDALPGLHLAFSPEETLDDAAAGQDEDDATATYAVFRNEITEAGDVLADIPAADFFSLDVSTSASVEPEPEPEPPSPAPTAAAATPSISRALEDQPPQGSERAWFRGGRRFRSPMLQLHKEILDFCDFISPSTEEQSSRAAAVQDVSDVVKHIWPQCKVEVFGSFRTGLYLPTSDIDVVIFESRVKTPQVGLYALAKALSQKGVAKKIQVIAKARVPIVKFVERKSGIAFDISFDIDGGPQAADFIKDAVKKLPALRPLCMILKVFLHQRELNEVYTGGIGSYALLTMLITHLQLVWGGKDILGYHRSKEHNLGILLVRFFDFYGRKLNNWDVGVSCNSSRTFFLKSDKDFMNHDRPHLLAIQDPMAPDNDIGKNSFNYFKHFPRRTLC

SEQ ID NO: 175199 - protein, 218 aa, Zea Mays
MDSEHWISRLAAAKRYYAAQLGRVDDVPGMGTEEVEMEVEDDGDMEMELEMALELGDATWPEVACPYCYEDHDVASLCIHLEEDHPYEPHAAPCPICSQRITRDMLNHITMQHGYLFKNGHRSRRFIVPESHAISLLSRDLRGTHLQALLGGGHGHRSNNAVTTNISSDPLLSSFGLSFSASDAPEPSKSASSIPDGTAIRKETPVQPWESRYILLLI

SEQ ID NO: 175200 - protein, 221 aa, Zea Mays
MDSEHWISRLAAAKRYYAAQLGRVDDVPGMGTEEVEMEVEDDGDMEMELEMALELGDDHPYEPHAAPCPICSQRITRDMLNHITMQHGYLFKNGHRSRRFIVPESHAISLLSRDLRGTHLQALLGGGHGHRSNNAVTTNISSDPLLSSFGLSFSASDAPEPSKSASSIPDGTAIRKETPVQPWESSIDSSLTSEEREQKRKQATGRATFVQGLVMSTLFGD

SEQ ID NO: 175201 - protein, 151 aa, Zea Mays
MDSEHWISRLAAAKRYYAAQLGRVDDVPGMGTEEVEMEVEDDGDMEMELEMALELGDATWPEVACPYCYEDHDVASLCIHLEEDHPYEPHAAPCPICSQRITRDMLNHITMQHGYLFKNGHRSRRFIVPESHAISLLSRDLRVILFFHRLA

SEQ ID NO: 175202 - protein, 1255 aa, Zea Mays
MESPFVPNSFTGKRKSPVGNSAIVQPHVGSRAVHEYQFLPEQPSDTYERATRSHYYDTPVEVSNARIPSITSGSQLLHGSEEAAPSYAFQGHTSGSSLLPPSSRPQVFPAAPTDYEMTQSNSNLSSVPVEGQFDISQVAAFENPPVSSEIIAYHDEDTSRVERKRKHSEEAKIAKEVEAHERRIRKELEKQDMLNKKREEQRRKEMERLDRERRKEEERLLRERQREEERFQREQRREHERMEKFLQKQSRRAEKQRQKEELRKEKEAARQKAANERATARRIAREYMELVEDERLESMELAAQNKGLPSMLYLDSDTLQQLDSFRGMLSQFPPTTVRMKLPFSIKPWTGSEDNVGNLLMYSYNFISGDILLTGLQVWKFLITFTDVLGLCPVTLDEFVQSLHDYDSRLLGELHIALLRSIIKDIEDVARTPSIALGVNPGGGHPQIVEGAYAWGFNIRSWQRHLNLLTWPEILRQFALSAGFGPQLKKRTVEDSYYRNDNEGHDGENVILTIRNGTAAVNAAAKMKERGYTNRRRSRHRLTPGTVKFAAFHVLSLEGSNGLTILEVAEKIQKSGLRDLTTSKTPEASIAAALSRDTKLFERTAPSTYCVKSPYRKDPADSEAVLSAARERIRAFQNVLSDSEAEKEVDEAERDDDSDCDDGDDDPDGDDVNTEVEDDKDPLLAVKSQDEVPSTTTVIGIKANLDGVGNALNSSSSFTKSAKGAPLPSLGRSNAADTSNDLPLGVSSANHEVVPDDSENTQIDESNQAEPWVRALAEGDYCDLSVEERLNALVALVGVATEGNSIRAVLEERLELANALKKQMWAEAQLDKRRFKEEFTSRVQYNSDMGLKPDIYQENNVTEITSTPACDAYRENDEHVGTINNCEMLDQHNQGNAGSLPYERNGVCQEILATPDTSYVQQYAYADKRRSQLKSYIGHRAEQLYVYRSLPLGQDRRRNRYWQFTTSASPNDPGSGRIFFESKDGYWRVIDSEEAFDSLLAALDTRGTREAQLHSMLQVIEPTFKEAIKRNVSIELSAGRYPKNGATDMIRANYHSEVGSSSSTPSATSDSITAYSDSFKVELGRNDFEKTAISKRADIFLKWMWREFYNQELTCAMKYGKKRCSELLHSCNCCYQIYLAEERHCSSCHKTFKSIYNFSDHTTQCEEKQRTEPFWNMQNTDYSVPIGMVLLKLQLVSIEAYIPSEALQPFWTDVYRKSWSVKLYTTKSIAEIFQLLTVLEGAIRPDCLSSDFETNG

SEQ ID NO: 175203 - protein, 1561 aa, Zea Mays
MESPFVPNSFTGKRKSPVGNSAIVQPHVGSRAVHEYQFLPEQPSDTYERATRSHYYDTPVEVSNARIPSITSGSQLLHGSEEAAPSYAFQGHTSGSSLLPPSSRPQVFPAAPTDYEMTQSNSNLSSVPVEGQFDISQVAAFENPPVSSEIIAYHDEDTSRVERKRKHSEEAKIAKEVEAHERRIRKELEKQDMLNKKREEQRRKEMERLDRERRKEEERLLRERQREEERFQREQRREHERMEKFLQKQSRRAEKQRQKEELRKEKEAARQKAANERATARRIAREYMELVEDERLESMELAAQNKGLPSMLYLDSDTLQQLDSFRGMLSQFPPTTVRMKLPFSIKPWTGSEDNVGNLLMVWKFLITFTDVLGLCPVTLDEFVQSLHDYDSRLLGELHIALLRSIIKDIEDVARTPSIALGVNPGGGHPQIVEGAYAWGFNIRSWQRHLNLLTWPEILRQFALSAGFGPQLKKRTVEDSYYRNDNEGHDGENVILTIRNGTAAVNAAAKMKERGYTNRRRSRHRLTPGTVKFAAFHVLSLEGSNGLTILEVAEKIQKSGLRDLTTSKTPEASIAAALSRDTKLFERTAPSTYCVKSPYRKDPADSEAVLSAARERIRAFQNVLSDSEAEKEVDEAERDDDSDCDDGDDDPDGDDVNTEVEDDKDPLLAVKSQDEVPSTTTVIGIKANLDGVGNALNSSSSFTKSAKGAPLPSLGRSNAADTSNDLPLGVSSANHEVVPDDSENTQIDESNQAEPWVRALAEGDYCDLSVEERLNALVALVGVATEGNSIRAVLEERLELANALKKQMWAEAQLDKRRFKEEFTSRVQYNSDMGLKPDIYQENNVTEITSTPACDAYRENDEHVGTINNCEMLDQHNQGNAGSLPYERNGVCQEILATPDTSYVQQYAYADKRRSQLKSYIGHRAEQLYVYRSLPLGQDRRRNRYWQFTTSASPNDPGSGRIFFESKDGYWRVIDSEEAFDSLLAALDTRGTREAQLHSMLQVIEPTFKEAIKRNVSIELSAGRYPKNGATDMIRANYHSEVGSSSSTPSATSDSITAYSDSFKVELGRNDFEKTAISKRADIFLKWMWREFYNQELTCAMKYGKKRCSELLHSCNCCYQIYLAEERHCSSCHKTFKSIYNFSDHTTQCEEKQRTEPFWNMQNTDYSVPIGMVLLKLQLVSIEAYIPSEALQPFWTDVYRKSWSVKLYTTKSIAEIFQLLTVLEGAIRPDCLSSDFETSECLNSQVGSASVLPWVPDTTSAVMLRMLDLDSAILYVQNQKMDRDDGGFMKFPSRYTVAKSKQETTPETAGLDLYDGRWLPGSGRRGRGRGSRGGSRGGRGRSRGGRIPRGVSSSSRIEFKGGIVASDKAPRKNVRRGRGRGRGRRRGRRTVRPRQPSVGRARSIPKENLLGSFSMLSSSKAATIEESPRSSGADEWGLETRTTYTECDENSSGSQSEDNEENGQPMDDDYEDQVPDYSIGYSTGSRHHVMMSMMDHDSDEEDEDAEGDENVEEDADLAVDDADVEMDEDDEIGDDGEDGGVGGEMNADEDPDATSYSSDYSD

SEQ ID NO: 175204 - protein, 1829 aa, Zea Mays
MDAGGDEDGAGKAALESTAEAATLPPASTVAVPSPVPASAPGAATGTSGSGEKPVKRMMKTPYQLEVLEKTYAVEQYPSEAMRLELSAKIGLSDRQLQMWFCHRRLKDRKPPSKRQRREEESALVPVMPPPPVLPAPVMPLASSDLVVGAPGPYDEPLHPLHSRRGAGRGRSSAVPRISMPDIGRRYYEPPPIMIAPPIPSMQLTQYELRVINSVESQLGEPLREDGPALGVNFDPLPPGAFGAPIVPEQQKQPVRSYDAEIFSWHDQKLLKASAFLPNMESPFVPNSFTGKRKSPVGNSAIVQPHVGSRAVHEYQFLPEQPSDTYERATRSHYYDTPVEVSNARIPSITSGSQLLHGSEEAAPSYAFQGHTSGSSLLPPSSRPQVFPAAPTDYEMTQSNSNLSSVPVEGQFDISQVAAFENPPVSSEIIAYHDEDTSRVERKRKHSEEAKIAKEVEAHERRIRKELEKQDMLNKKREEQRRKEMERLDRERRKEEERLLRERQREEERFQREQRREHERMEKFLQKQSRRAEKQRQKEELRKEKEAARQKAANERATARRIAREYMELVEDERLESMELAAQNKGLPSMLYLDSDTLQQLDSFRGMLSQFPPTTVRMKLPFSIKPWTGSEDNVGNLLMVWKFLITFTDVLGLCPVTLDEFVQSLHDYDSRLLGELHIALLRSIIKDIEDVARTPSIALGVNPGGGHPQIVEGAYAWGFNIRSWQRHLNLLTWPEILRQFALSAGFGPQLKKRTVEDSYYRNDNEGHDGENVILTIRNGTAAVNAAAKMKERGYTNRRRSRHRLTPGTVKFAAFHVLSLEGSNGLTILEVAEKIQKSGLRDLTTSKTPEASIAAALSRDTKLFERTAPSTYCVKSPYRKDPADSEAVLSAARERIRAFQNVLSDSEAEKEVDEAERDDDSDCDDGDDDPDGDDVNTEVEDDKDPLLAVKSQDEVPSTTTVIGIKANLDGVGNALNSSSSFTKSAKGAPLPSLGRSNAADTSNDLPLGVSSANHEVVPDDSENTQIDESNQAEPWVRALAEGDYCDLSVEERLNALVALVGVATEGNSIRAVLEERLELANALKKQMWAEAQLDKRRFKEEFTSRVQYNSDMGLKPDIYQENNVTEITSTPACDAYRENDEHVGTINNCEMLDQHNQGNAGSLPYERNGVCQEILATPDTSYVQQYAYADKRRSQLKSYIGHRAEQLYVYRSLPLGQDRRRNRYWQFTTSASPNDPGSGRIFFESKDGYWRVIDSEEAFDSLLAALDTRGTREAQLHSMLQVIEPTFKEAIKRNVSIELSAGRYPKNGATDMIRANYHSEVGSSSSTPSATSDSITAYSDSFKVELGRNDFEKTAISKRADIFLKWMWREFYNQELTCAMKYGKKRCSELLHSCNCCYQIYLAEERHCSSCHKTFKSIYNFSDHTTQCEEKQRTEPFWNMQNTDYSVPIGMAYIPSEALQPFWTDVYRKSWSVKLYTTKSIAEIFQLLTVLEGAIRPDCLSSDFETSECLNSQVGSASVLPWVPDTTSAVMLRMLDLDSAILYVQNQKMDRDDGGFMKFPSRYTVAKSKQETTPETAGLDLYDGRWLPGSGRRGRGRGSRGGSRGGRGRSRGGRIPRGVSSSSRIEFKGGIVASDKAPRKNVRRGRGRGRGRRRGRRTVRPRQPSVGRARSIPKENLLGSFSMLSSSKAATIEESPRSSGADEWGLETRTTYTECDENSSGSQSEDNEENGQPMDDDYEDQVPDYSIGYSTGSRHHVMMSMMDHDSDEEDEDAEGDENVEEDADLAVDDADVEMDEDDEIGDDGEDGGVGGEMNADEDPDATSYSSDYSD

SEQ ID NO: 175205 - protein, 1856 aa, Zea Mays
MDAGGDEDGAGKAALESTAEAATLPPASTVAVPSPVPASAPGAATGTSGSGEKPVKRMMKTPYQLEVLEKTYAVEQYPSEAMRLELSAKIGLSDRQLQMWFCHRRLKDRKPPSKRQRREEESALVPVMPPPPVLPAPVMPLASSDLVVGAPGPYDEPLHPLHSRRGAGRGRSSAVPRISMPDIGRRYYEPPPIMIAPPIPSMQLTQYELRVINSVESQLGEPLREDGPALGVNFDPLPPGAFGAPIVPEQQKQPVRSYDAEIFSWHDQKLLKASAFLPNMESPFVPNSFTGKRKSPVGNSAIVQPHVGSRAVHEYQFLPEQPSDTYERATRSHYYDTPVEVSNARIPSITSGSQLLHGSEEAAPSYAFQGHTSGSSLLPPSSRPQVFPAAPTDYEMTQSNSNLSSVPVEGQFDISQVAAFENPPVSSEIIAYHDEDTSRVERKRKHSEEAKIAKEVEAHERRIRKELEKQDMLNKKREEQRRKEMERLDRERRKEEERLLRERQREEERFQREQRREHERMEKFLQKQSRRAEKQRQKEELRKEKEAARQKAANERATARRIAREYMELVEDERLESMELAAQNKGLPSMLYLDSDTLQQLDSFRGMLSQFPPTTVRMKLPFSIKPWTGSEDNVGNLLMYSYNFISGDILLTGLQVWKFLITFTDVLGLCPVTLDEFVQSLHDYDSRLLGELHIALLRSIIKDIEDVARTPSIALGVNPGGGHPQIVEGAYAWGFNIRSWQRHLNLLTWPEILRQFALSAGFGPQLKKRTVEDSYYRNDNEGHDGENVILTIRNGTAAVNAAAKMKERGYTNRRRSRHRLTPGTVKFAAFHVLSLEGSNGLTILEVAEKIQKSGLRDLTTSKTPEASIAAALSRDTKLFERTAPSTYCVKSPYRKDPADSEAVLSAARERIRAFQNVLSDSEAEKEVDEAERDDDSDCDDGDDDPDGDDVNTEVEDDKDPLLAVKSQDEVPSTTTVIGIKANLDGVGNALNSSSSFTKSAKGAPLPSLGRSNAADTSNDLPLGVSSANHEVVPDDSENTQIDESNQAEPWVRALAEGDYCDLSVEERLNALVALVGVATEGNSIRAVLEERLELANALKKQMWAEAQLDKRRFKEEFTSRVQYNSDMGLKPDIYQENNVTEITSTPACDAYRENDEHVGTINNCEMLDQHNQGNAGSLPYERNGVCQEILATPDTSYVQQYAYADKRRSQLKSYIGHRAEQLYVYRSLPLGQDRRRNRYWQFTTSASPNDPGSGRIFFESKDGYWRVIDSEEAFDSLLAALDTRGTREAQLHSMLQVIEPTFKEAIKRNVSIELSAGRYPKNGATDMIRANYHSEVGSSSSTPSATSDSITAYSDSFKVELGRNDFEKTAISKRADIFLKWMWREFYNQELTCAMKYGKKRCSELLHSCNCCYQIYLAEERHCSSCHKTFKSIYNFSDHTTQCEEKQRTEPFWNMQNTDYSVPIGMVLLKLQLVSIEAYIPSEALQPFWTDVYRKSWSVKLYTTKSIAEIFQLLTVLEGAIRPDCLSSDFETSECLNSQVGSASVLPWVPDTTSAVMLRMLDLDSAILYVQNQKMDRDDGGFMKFPSRYTVAKSKQETTPETAGLDLYDGRWLPGSGRRGRGRGSRGGSRGGRGRSRGGRIPRGVSSSSRIEFKGGIVASDKAPRKNVRRGRGRGRGRRRGRRTVRPRQPSVGRARSIPKENLLGSFSMLSSSKAATIEESPRSSGADEWGLETRTTYTECDENSSGSQSEDNEENGQPMDDDYEDQVPDYSIGYSTGSRHHVMMSMMDHDSDEEDEDAEGDENVEEDADLAVDDADVEMDEDDEIGDDGEDGGVGGEMNADEDPDATSYSSDYSD

SEQ ID NO: 175206 - protein, 1518 aa, Zea Mays
MDAGGDEDGAGKAALESTAEAATLPPASTVAVPSPVPASAPGAATGTSGSGEKPVKRMMKTPYQLEVLEKTYAVEQYPSEAMRLELSAKIGLSDRQLQMWFCHRRLKDRKPPSKRQRREEESALVPVMPPPPVLPAPVMPLASSDLVVGAPGPYDEPLHPLHSRRGAGRGRSSAVPRISMPDIGRRYYEPPPIMIAPPIPSMQLTQYELRVINSVESQLGEPLREDGPALGVNFDPLPPGAFGAPIVPEQQKQPVRSYDAEIFSWHDQKLLKASAFLPNMESPFVPNSFTGKRKSPVGNSAIVQPHVGSRAVHEYQFLPEQPSDTYERATRSHYYDTPVEVSNARIPSITSGSQLLHGSEEAAPSYAFQGHTSGSSLLPPSSRPQVFPAAPTDYEMTQSNSNLSSVPVEGQFDISQVAAFENPPVSSEIIAYHDEDTSRVERKRKHSEEAKIAKEVEAHERRIRKELEKQDMLNKKREEQRRKEMERLDRERRKEEERLLRERQREEERFQREQRREHERMEKFLQKQSRRAEKQRQKEELRKEKEAARQKAANERATARRIAREYMELVEDERLESMELAAQNKGLPSMLYLDSDTLQQLDSFRGMLSQFPPTTVRMKLPFSIKPWTGSEDNVGNLLMVWKFLITFTDVLGLCPVTLDEFVQSLHDYDSRLLGELHIALLRSIIKDIEDVARTPSIALGVNPGGGHPQIVEGAYAWGFNIRSWQRHLNLLTWPEILRQFALSAGFGPQLKKRTVEDSYYRNDNEGHDGENVILTIRNGTAAVNAAAKMKERGYTNRRRSRHRLTPGTVKFAAFHVLSLEGSNGLTILEVAEKIQKSGLRDLTTSKTPEASIAAALSRDTKLFERTAPSTYCVKSPYRKDPADSEAVLSAARERIRAFQNVLSDSEAEKEVDEAERDDDSDCDDGDDDPDGDDVNTEVEDDKDPLLAVKSQDEVPSTTTVIGIKANLDGVGNALNSSSSFTKSAKGAPLPSLGRSNAADTSNDLPLGVSSANHEVVPDDSENTQIDESNQAEPWVRALAEGDYCDLSVEERLNALVALVGVATEGNSIRAVLEERLELANALKKQMWAEAQLDKRRFKEEFTSRVQYNSDMGLKPDIYQENNVTEITSTPACDAYRENDEHVGTINNCEMLDQHNQGNAGSLPYERNGVCQEILATPDTSYVQQYAYADKRRSQLKSYIGHRAEQLYVYRSLPLGQDRRRNRYWQFTTSASPNDPGSGRIFFESKDGYWRVIDSEEAFDSLLAALDTRGTREAQLHSMLQVIEPTFKEAIKRNVSIELSAGRYPKNGATDMIRANYHSEVGSSSSTPSATSDSITAYSDSFKVELGRNDFEKTAISKRADIFLKWMWREFYNQELTCAMKYGKKRCSELLHSCNCCYQIYLAEERHCSSCHKTFKSIYNFSDHTTQCEEKQRTEPFWNMQNTDYSVPIGMVLLKLQLVSIEAYIPSEALQPFWTDVYRKSWSVKLYTTKSIAEIFQLLTVLEGAIRPDCLSSDFETNG

SEQ ID NO: 175207 - protein, 799 aa, Zea Mays
MSVQREEQRRKEMERLDRERRKEEERLLRERQREEERFQREQRREHERMEKFLQKQSRRAEKQRQKEELRKEKEAARQKAANERATARRIAREYMELVEDERLESMELAAQNKGLPSMLYLDSDTLQQLDSFRGMLSQFPPTTVRMKLPFSIKPWTGSEDNVGNLLMVWKFLITFTDVLGLCPVTLDEFVQSLHDYDSRLLGELHIALLRSIIKDIEDVARTPSIALGVNPGGGHPQIVEGAYAWGFNIRSWQRHLNLLTWPEILRQFALSAGFGPQLKKRTVEDSYYRNDNEGHDGENVILTIRNGTAAVNAAAKMKERGYTNRRRSRHRLTPGTVKFAAFHVLSLEGSNGLTILEVAEKIQKSGLRDLTTSKTPEASIAAALSRDTKLFERTAPSTYCVKSPYRKDPADSEAVLSAARERIRAFQNVLSDSEAEKEVDEAERDDDSDCDDGDDDPDGDDVNTEVEDDKDPLLAVKSQDEVPSTTTVIGIKANLDGVGNALNSSSSFTKSAKGAPLPSLGRSNAADTSNDLPLGVSSANHEVVPDDSENTQIDESNQAEPWVRALAEGDYCDLSVEERLNALVALVGVATEGNSIRAVLEERLELANALKKQMWAEAQLDKRRFKEEFTSRVQYNSDMGLKPDIYQENNVTEITSTPACDAYRENDEHVGTINNCEMLDQHNQGNAGSLPYERNGVCQEILATPDTSYVQQYAYADKRRSQLKSYIGHRAEQLYVYRSLPLGQDRRRNRYWQFTTSASPNDPGSGRIFFESKDGYWRVIDSEELPAEVSNELTLTTHG

SEQ ID NO: 175208 - protein, 1267 aa, Zea Mays
MDAGGDEDGAGKAALESTAEAATLPPASTVAVPSPVPASAPGAATGTSGSGEKPVKRMMKTPYQLEVLEKTYAVEQYPSEAMRLELSAKIGLSDRQLQMWFCHRRLKDRKPPSKRQRREEESALVPVMPPPPVLPAPVMPLASSDLVVGAPGPYDEPLHPLHSRRGAGRGRSSAVPRISMPDIGRRYYEPPPIMIAPPIPSMQLTQYELRVINSVESQLGEPLREDGPALGVNFDPLPPGAFGAPIVPEQQKQPVRSYDAEIFSWHDQKLLKRKSPVGNSAIVQPHVGSRAVHEYQFLPEQPSDTYERATRSHYYDTPVEVSNARIPSITSGSQLLHGSEEAAPSYAFQGHTSGSSLLPPSSRPQVFPAAPTDYEMTQSNSNLSSVPVEGQFDISQVAAFENPPVSSEIIAYHDEDTSRVERKRKHSEEAKIAKEVEAHERRIRKELEKQDMLNKKREEQRRKEMERLDRERRKEEERLLRERQREEERFQREQRREHERMEKFLQKQSRRAEKQRQKEELRKEKEAARQKAANERATARRIAREYMELVEDERLESMELAAQNKGLPSMLYLDSDTLQQLDSFRGMLSQFPPTTVRMKLPFSIKPWTGSEDNVGNLLMYSYNFISGDILLTGLQVWKFLITFTDVLGLCPVTLDEFVQSLHDYDSRLLGELHIALLRSIIKDIEDVARTPSIALGVNPGGGHPQIVEGAYAWGFNIRSWQRHLNLLTWPEILRQFALSAGFGPQLKKRTVEDSYYRNDNEGHDGENVILTIRNGTAAVNAAAKMKERGYTNRRRSRHRLTPGTVKFAAFHVLSLEGSNGLTILEVAEKIQKSGLRDLTTSKTPEASIAAALSRDTKLFERTAPSTYCVKSPYRKDPADSEAVLSAARERIRAFQNVLSDSEAEKEVDEAERDDDSDCDDGDDDPDGDDVNTEVEDDKDPLLAVKSQDEVPSTTTVIGIKANLDGVGNALNSSSSFTKSAKGAPLPSLGRSNAADTSNDLPLGVSSANHEVVPDDSENTQIDESNQAEPWVRALAEGDYCDLSVEERLNALVALVGVATEGNSIRAVLEERLELANALKKQMWAEAQLDKRRFKEEFTSRVQYNSDMGLKPDIYQENNVTEITSTPACDAYRENDEHVGTINNCEMLDQHNQGNAGSLPYERNGVCQEILATPDTSYVQQYAYADKRRSQLKSYIGHRAEQLYVYRSLPLGQDRRRNRYWQFTTSASPNDPGSGRIFFESKDGYWRVIDSEELPAEVSNELTLTTHG

SEQ ID NO: 175209 - protein, 1271 aa, Zea Mays
MDAGGDEDGAGKAALESTAEAATLPPASTVAVPSPVPASAPGAATGTSGSGEKPVKRMMKTPYQLEVLEKTYAVEQYPSEAMRLELSAKIGLSDRQLQMWFCHRRLKDRKPPSKRQRREEESALVPVMPPPPVLPAPVMPLASSDLVVGAPGPYDEPLHPLHSRRGAGRGRSSAVPRISMPDIGRRYYEPPPIMIAPPIPSMQLTQYELRVINSVESQLGEPLREDGPALGVNFDPLPPGAFGAPIVPEQQKQPVRSYDAEIFSWHDQKLLKASAFLPNMESPFVPNSFTGKRKSPVGNSAIVQPHVGSRAVHEYQFLPEQPSDTYERATRSHYYDTPVEVSNARIPSITSGSQLLHGSEEAAPSYAFQGHTSGSSLLPPSSRPQVFPAAPTDYEMTQSNSNLSSVPVEGQFDISQVAAFENPPVSSEIIAYHDEDTSRVERKRKHSEEAKIAKEVEAHERRIRKELEKQDMLNKKREEQRRKEMERLDRERRKEEERLLRERQREEERFQREQRREHERMEKFLQKQSRRAEKQRQKEELRKEKEAARQKAANERATARRIAREYMELVEDERLESMELAAQNKGLPSMLYLDSDTLQQLDSFRGMLSQFPPTTVRMKLPFSIKPWTGSEDNVGNLLMVWKFLITFTDVLGLCPVTLDEFVQSLHDYDSRLLGELHIALLRSIIKDIEDVARTPSIALGVNPGGGHPQIVEGAYAWGFNIRSWQRHLNLLTWPEILRQFALSAGFGPQLKKRTVEDSYYRNDNEGHDGENVILTIRNGTAAVNAAAKMKERGYTNRRRSRHRLTPGTVKFAAFHVLSLEGSNGLTILEVAEKIQKSGLRDLTTSKTPEASIAAALSRDTKLFERTAPSTYCVKSPYRKDPADSEAVLSAARERIRAFQNVLSDSEAEKEVDEAERDDDSDCDDGDDDPDGDDVNTEVEDDKDPLLAVKSQDEVPSTTTVIGIKANLDGVGNALNSSSSFTKSAKGAPLPSLGRSNAADTSNDLPLGVSSANHEVVPDDSENTQIDESNQAEPWVRALAEGDYCDLSVEERLNALVALVGVATEGNSIRAVLEERLELANALKKQMWAEAQLDKRRFKEEFTSRVQYNSDMGLKPDIYQENNVTEITSTPACDAYRENDEHVGTINNCEMLDQHNQGNAGSLPYERNGVCQEILATPDTSYVQQYAYADKRRSQLKSYIGHRAEQLYVYRSLPLGQDRRRNRYWQFTTSASPNDPGSGRIFFESKDGYWRVIDSEELPAEVSNELTLTTHG

SEQ ID NO: 175210 - protein, 395 aa, Zea Mays
MGLLLKFVLRTHVDTRTGTSRMKSSSAKECQRTKYAAGTNVQVAPVAIPAEVQDIPAQHTQDHEVVPGPTEVQGNPVKHTAEQPGSYSMDCDLDNHVNSVSSKDAVEHDHVHSALPDVHRGNTHADTVTNDGEPIGANNNGKVSRLTYGEDKFRPGIQRSENHTESMEGLSCLQRAGDSVGSPASINNTELPKNNVSSEAHIDDNELRRNDLVNDVESNSIDGKHDTMMNLSVPKISCLYKCCSPCFQSIYKMVHGIISNTLRPNLHCLTADDMHDILSSWCLNLLGSVRKLYSSHDEASCTEVFVRMSNKETHLEHCACQSDIYLSRECVCHLESNGDVETANTDCHPLSGQSLSFFFKDGVWMPLDLTAETKLHCSFRRFCVCSILGTVSMLS

SEQ ID NO: 175211 - protein, 90 aa, Zea Mays
MASGYRAEEEYDYLFKVVLIGDSGVGKSNLLSRFARDEFSLETRSTIGVEFATKTVQVDDKLVKAQIWDTAGQESYGLVRSTCWPSNWCL

SEQ ID NO: 175212 - protein, 169 aa, Zea Mays
MACSFPPSSATRLHALDAAAAGVKNGRVPLKASVAPAQRALGCCRATARQEGATQEPSVAASSARAQLDLLEQLTSATPDDTAAGLENGMPPPEPRRRATIREQLSALANEEEHQEAGPAHPGQRAERLGVLRDRWRVRARPASRHSSYRCPHWVYPALPMTTKMLHAI

SEQ ID NO: 175213 - protein, 100 aa, Zea Mays
MKTRSQTSPKPLKTVAMAPRPSSTKRKPRPKPAGKGDPRAPKKPPTAFFYFMEDFRKIYKQEKPSVKSMQEEKVKYYDIATEKRAEFEKAMIEYNKKKES

SEQ ID NO: 175214 - protein, 113 aa, Zea Mays
MKTRSQTSPKPLKTVAMAPRPSSTKRKPRPKPAGKGDPRAPKKPPTAFFYFMEDFRKIYKQEKPSVKSMQEIGKACGEKWNTMTFEVKYYDIATEKRAEFEKAMIEYNKKKES

SEQ ID NO: 175215 - protein, 262 aa, Zea Mays
MFTFAFGGSNGSLLAAGSNAQVLFWDWRSSRQIACLEESHMDDVTQVKFTPDQQSKLISAAVDGLICVFDTDGDIDDDNHLLSVMNAETSVAKVGFFGNKYKKLWCLTHIETLSVWDWNDGARELNIEDARSLATDRWNLDHVDYFVDCHYSVPDDRLWLIGGTTAGTLGYFPVRNDHDGPIGSAEAILEGGHTGVVRSVYPSSGIHGRLGQNRGIFGWTGGEDGRLCCWRSDEIAETNKSWISSSLVWKQQKKTKNRHQPY

SEQ ID NO: 175216 - protein, 384 aa, Zea Mays
MDGYGEAAAVAMELEAEASPSRGRSSPVVSGSPSQNSDGSMSSWRLGLKNSIQTNFGDDYVFQIASCQEISTLAVSLSTNALKFYSPETGQYLGECKGHEGTIHEISFSAPSSPQVICSCSSDGTVRAWDTRNFKQISLLRGGVSQEMFTFAFGGSNGSLLAAGSNAQVKFTPDQQSKLISAAVDGLICVFDTDGDIDDDNHLLSVMNAETSVAKVGFFGNKYKKLWCLTHIETLSVWDWNDGARELNIEDARSLATDRWNLDHVDYFVDCHYSVPDDRLWLIGGTTAGTLGYFPVRNDHDGPIGSAEAILEGGHTGVVRSVYPSSGIHGRLGQNRGIFGWTGGEDGRLCCWRSDEIAETNKSWISSSLVWKQQKKTKNRHQPY

SEQ ID NO: 175217 - protein, 387 aa, Zea Mays
MDMERRLLWPWSWRPRPAHPGGAPLLWFQGHHPRILMEACPRGGWASRTASRLTLEMIMSSKLPLETGQYLGECKGHEGTIHEISFSAPSSPQVICSCSSDGTVRAWDTRNFKQISLLRGGVSQEMFTFAFGGSNGSLLAAGSNAQVLFWDWRSSRQIACLEESHMDDVTQVKFTPDQQSKLISAAVDGLICVFDTDGDIDDDNHLLSVMNAETSVAKVGFFGNKYKKLWCLTHIETLSVWDWNDGARELNIEDARSLATDRWNLDHVDYFVDCHYSVPDDRLWLIGGTTAGTLGYFPVRNDHDGPIGSAEAILEGGHTGVVRSVYPSSGIHGRLGQNRGIFGWTGGEDGRLCCWRSDEIAETNKSWISSSLVWKQQKKTKNRHQPY

SEQ ID NO: 175218 - protein, 171 aa, Zea Mays
MSSPKLQKSLPCLSSLFSGATQNVLRFPSPDPARGGQELPMIRTATVRARLLLSRSYVAQAQAASRWPLVRWKASHLGSVRSFYQMDITRQYKNKSLTARGCHSSPESQELAMKSCVPCNSKDLGPMSEDSAKKLLEQVNGWELITEGGVLKLHRTWKVTIQIFILLVGIM

SEQ ID NO: 175219 - protein, 145 aa, Zea Mays
MDITRQYKNKSLTARGCHSSPESQELAMKSCVPCNSKDLGPMSEDSAKKLLEQVNGWELITEGGVLKLHRTWKVKNFVKGLEFFQLVAAIAEEEGHHPDLHLVGWNNVKIDVWTHSVRGLTSNDFILAAKINHLTLDGIIRKKAK

SEQ ID NO: 175220 - protein, 299 aa, Zea Mays
MILSLVNNYDSFGGRKQYVQWARERGQTIGSDDEFFTNPFVKGIYKNHIKAVLTRVNTITGVAYKDDPTIMAWELMNEPRCQSDVSGHAIQSWITEMAAHVKSIDGNHLLEAGLEGFYGASSARRSANPSGYQVGTDFIANNRAPGIDFATVHSYPDQWLGGLDAQAQLRFLGAWLDAHIADARAVLRKPLLVAEFGESRHDPGYSGGQRDAVFGTVYARVYDSARAGGPAAGALFWQLLAEGMDSYGDGYEVVLPQAPSTAGVIATQSRRLQGLARAFVRARKAHQGKAGKGAKGGGN

SEQ ID NO: 175221 - protein, 65 aa, Zea Mays
MLHLDLSSTETRHSFYFVLAFVYTYLLVFFKKKTDDLSIVYLPMIFRLCIFTAVSSRSMNGPALF

SEQ ID NO: 175222 - protein, 79 aa, Zea Mays
MGVVVGRQQIQRADCRDDVCEGEVGRESEGEDEPTNSQRYSWSATSEPKVMAVSEQTASKKGHSVAAGTAAAGRERGRR

SEQ ID NO: 175223 - protein, 157 aa, Zea Mays
MELRRPAPSPLVDNYVVPGDVVLDLSEMNNQTIKLGAGLRQECDTIEATSAGKLRQLKPNKYCIENSQKRYKPSVEDTVLGIVVDTKPDNFLVDIKGPNLAFLPVLSFEGGTRRNIPKFKIGTLIYARVVKANSIMNPELSCMDGKFFSFQLNVHFP

SEQ ID NO: 175224 - protein, 212 aa, Zea Mays
MNNQTIKLGAGLRQECDTIEATSAGKLRQLKPNKYCIENSQKRYKPSVEDTVLGIVVDTKPDNFLVDIKGPNLAFLPVLSFEGGTRRNIPKFKIGTLIYARVVKANSIMNPELSCMDATGKAAKFGQLKDGYMFDTSTGMSRMLLSSPTCPVLEVLGKKLSFEIAVGLNGRVWVNAPAASTVILVSNAIMRSESLSGIKQRAMVENLLERLS

SEQ ID NO: 175225 - protein, 391 aa, Zea Mays
MASPTRTPSPPPAVEPIAPSLSSEHPPVNPSCDGSFSPENPAPAPPPPPATPHPHTPSDSSPSSTPHPSAPQPLPSPPPHTPDDSSPSSTPHPSAPQPPPSPPPPSADASPPLSRQGETSPPRPSPPPSPAPVSPPTPAPASSEAKSEQEEAESASESGSMTLAIVLAKTEDATPPKASSAEASPTRSPQKESAVTIAKLLSAEDLAAMEAKATPDKVTPPSDAGSLAAAAAVTTVGGVSGGVGSKRWLLGGVPEKVRRAELRRAELGFRVSAAVFCLVALSVMAADTTTGWSGDSFRRYNEYRYVLAASVVTFTYCGFQLVAEVHYVVTGRHMIRAPFRSYFNLAMDQAIQICSSVLFVCCCEFMIAWFDKLPALVIYRCQKTRSKYMVI

SEQ ID NO: 175226 - protein, 283 aa, Zea Mays
MEAPDEEAGLGLPEGERLLEVALISAQGLKPPSGVRRRLQAYAVAWVDAGHKLQTLPDATGGLDPAWHARLLFRVREASLADDSPAAVSVEIYAAAAAGSWHFGGDSLVGSARFLIGDHRLLSRPVGSPSMFAVGVRRPSGRVHGLLNVAASLVAVPPSPAACHALRLSPAVSLSGPSVAPTPSRVLRVLNRAHRTPPPSPRLLTPKKQQMVDDGSDEAEEDARGMGGVVFCGPCVGPLPRKIRTSPSDENLQAFANIFSGGLRHCRTEPSFLRSPEYKWTED

SEQ ID NO: 175227 - protein, 83 aa, Zea Mays
MDESAANETLQPFQSGLKRALFQRKHEPKGQTRRTNTSSTSETNNRWPCNCMFLFLTQRIDVYHHCIPWLDRGACIHERPPCQ

SEQ ID NO: 175228 - protein, 225 aa, Zea Mays
MQEIADKIFSVARETIRPGRGLTSFEATKLRVALEDIACMLEQDSLVLQENLDNVNNVNNPGHSSYEPSALSSPPPADEYLSPDWDFAEHFENFWGLEYDSDQMPSFSDNEMDKSGKVIAKWDSRATKIFTEICVEEVNARNRPQHFLNTEGYANLIRKFKERTGRTYTRDQMKNRWDSLKRMFTQWKTLNERATGLGRDPHTGSISAPDEWWAKQNEVSRSFFL

SEQ ID NO: 175229 - protein, 170 aa, Zea Mays
MDGDLSLISRVRNVNGKPFSFAFAYHTYLSVSDISEVRIEGLETLDYLDNLSQRERFTEQGDAITFESEVDRVYVGCPGVIAVLDHGKKRTFIVRKEGLPDIVVWNPWEKKSKTMADFGDDEYKQMLCVDAAAVERAITLKPGEEWTGKLELSAVASTNCSDHLDRPGRL

SEQ ID NO: 175230 - protein, 204 aa, Zea Mays
MSMGHCSEQRTGFEVTKDWNGADQFAIRSPRGASVRAEKNFSRSDSSVGLSAQVCLHGGQVVSWRNHRGEELLFSSSKAIFKPPRATRGGIPICFPQFGNCGTLEQHGFARNKIWTIDDEAPPLNYGDNNSNKASVDLLLKPSEDDLKCWPHCFELRLRVSLSMDGDLSLISRVRNVNGKPFSFAFAYHTYLSVSDIRYPNLDG

SEQ ID NO: 175231 - protein, 158 aa, Zea Mays
MLVLDAWQYFMHRLMHSVPYMYRRFHSWHHRVAAPYAYAAQYGHPVDAVLTETLSGAAAYLASGMSPRVAAAFFVFATVKGVDDHCGVAAPWNPFHAAFRNNTAYHDVHHQRGGGRRNFSQPFFVVWDRLLGTHTPYALRQRDGGGLEVKAFKGRQMQ

SEQ ID NO: 175232 - protein, 63 aa, Zea Mays
MHAALALLARVAPRWRICSLFSPHRRPRRSPASGGASSPMAQPRQVKHALRQQWLGRRLPRQQ

SEQ ID NO: 175233 - protein, 133 aa, Zea Mays
MACRRSRRRIARMTMACPRSRRPRPRLRTRYWPPWRVDGEVAVVEGEVNNAGHTVGSTAVVAVVGPRHIVVANCGDSRAVLSRGGVPVPLSSDHKPDRPDELERVESAMPPRCWWSSPWRGAAPTTSASWWWS

SEQ ID NO: 175234 - protein, 427 aa, Zea Mays
MPLAAAAAAVAACPSPIGLTRSLCRIEAHPRRRRRFRLEANSSASTSAPAPTAADEGGGAGLCPVVRFDMADFTVADRVSVGLHGRSDEMIFEATVCDPSSELYGSTVVLRQLKSLQAKRRGRRALEVLKKLARRQMMYHSYALQVHGYIAPCNAVEEEDVPLVLVHGYHGSHSLRHWLQLSDWIPTLEATLALDEEQVRRVGDDSVGGPAVTRQLRLIRILMRDLLIGVNYLHSHGLAHTELRIENVHVSPIDKHVKVGILGNAADFQDNDLSSSTIASNNDRRKMMIAFDMRCVGFIMAKMVLRELMDPSTFFKFKSFLTKGNDPSCLREFLLPTLYQNSPSGNIGLQMLDRQWGAGWNLLALLLATKPEERISCVDALRHPFLCGPKWRINPSANLIRWGLGSTAVRMAEDYIYGRHQTFIIFC

SEQ ID NO: 175235 - protein, 456 aa, Zea Mays
MPLAAAAAAVAACPSPIGLTRSLCRIEAHPRRRRRFRLEANSSASTSAPAPTAADEGGGAGLCPVVRFDMADFTVADRVSVGLHGRSDEMIFEATVCDPSSELYGSTVVLRQLKSLQAKRRGRRALEVLKKLARRQMMYHSYALQVHGYIAPCNAVEEEDVPLVLVHGYHGSHSLRHWLQLSDWIPTLEATLALDEEQVRRVGDDSVGGPAVTRQLRLIRILMRDLLIGVNYLHSHGLAHTELRIENVHVSPIDKHVKVGILGNAADFQDNDLSSSTIASNNDRRKMMIAFDMRCVGFIMAKMVLRELMDPSTFFKFKSFLTKGNDPSCLREFLLPTLYQNSPSGNIGLQMLDRQWGAGWNLLALLLATKPEERISCVDALRHPFLCGPKWRINPSANLIRWGLGSTAVRMAEDYIYGRHQRRRLSYFVELMEVLNPSLRTQNYARTQLASRQIWQ

SEQ ID NO: 175236 - protein, 486 aa, Zea Mays
MPLAAAAAAVAACPSPIGLTRSLCRIEAHPRRRRRFRLEANSSASTSAPAPTAADEGGGAGLCPVVRFDMADFTVADRVSVGLHGRSDEMIFEATVCDPSSELYGSTVVLRQLKSLQAKRRGRRALEVLKKLARRQMMYHSYALQVHGYIAPCNAVEEEDVPLVLVHGYHGSHSLRHWLQLSDWIPTLEATLALDEEQVRRVGDDSVGGPAVTRQLRLIRILMRDLLIGVNYLHSHGLAHTELRIENVHVSPIDKHVKVGILGNAADFQDNDLSSSTIASNNDRRKMMIAFDMRCVGFIMAKMVLRELMDPSTFFKFKSFLTKGNDPSCLREFLLPTLYQNSPSGNIGLQMLDRQWGAGWNLLALLLATKPEERISCVDALRHPFLCGPKWRINPSANLIRWGLGSTAVRMAEDYIYGRHQRRRLSYFVELMEVLNPSLRTQNWLHLLPGRWRLLYCTGRHIGLTLRQPSPRNYARTQLASRQIWQ

SEQ ID NO: 175237 - protein, 351 aa, Zea Mays
MPLAAAAAAVAACPSPIGLTRSLCRIEAHPRRRRRFRLEANSSASTSAPAPTAADEGGGAGLCPVVRFDMADFTVADRVSVGLHGRSDEMIFEATVCDPSSELYGSTVVLRQLKSLQAKRRGRRALEVLKKLARRQMMYHSYALQVHGYIAPCNAVEEEDVPLVLVHGYHGSHSLRHWLQLSDWIPTLEATLALDEEQVRRVGDDSVGGPAVTRQLRLIRILMRDLLIGVNYLHSHGLAHTELRIENVHVSPIDKHVKVGILGNAADFQDNDLSSSTIASNNDRRKMMIAFDMRCVGFIMAKMVLRELMDPSTFFKFKSFLTKGNDPSCLREFLLPTLYQNSPSGNIGLQL

SEQ ID NO: 175238 - protein, 476 aa, Zea Mays
MSPFEHGEVFVLDDGGEVDLDLGNYERFLDIKLTRDNNITTGKIFQAVINKERRGDYLGKTVQVVPHITDEIQDWIERVAVVPVDGKEGPPDVCVIELGGTIGDKIFSPHNDSGILDAGDIESMPFIEALGQFSYRVGPGNFCLVHVSLVPVLNVVGEQKTKPTQHSVRGLRGLGLAPDVLACRSTEPLEEHVKAKLSQFCHVPDQKAHEAILKGADGVLVPGGFGDRGVQGKILAAKYARENNVPYLGICLGMQIAVIEFARSVMKLRGANSTEFDPATTSPCVIFMPEGSKTQMGATMRLGSRRTYFHVSGCKSAKLYGNASSVDERHRHRYEVNPDMVPDFEKAGLQFVGKDESGKRMGIVELPSHKFFIGAQFHPEFKSRPGKPSPLFLGLIAAASGQLEPLLQRSNPTTKACSISKVPKLKLYPTGPVNNPLNSLVNGYYPNEKRRLRFSKPPAPATHGSDIFNEERLPVR

SEQ ID NO: 175239 - protein, 474 aa, Zea Mays
MSPFEHGEVFVLDDGGEVDLDLGNYERFLDIKLTRDNNITTGKIFQAVINKERRGDYLGKTVQVVPHITDEIQDWIERVAVVPVDGKEGPPDVCVIELGGTIGDKIFSPHNDSGILDAGDIESMPFIEALGQFSYRVGPGNFCLVHVSLVPVLNVVGEQKTKPTQHSVRGLRGLGLAPDVLACRSTEPLEEHVKAKLSQFCHVPVSNIVNLHDVTNIWHIPLLLRDQKAHEAILKGADGVLVPGGFGDRGVQGKILAAKYARENNVPYLGICLGMQIAVIEFARSVMKLRGANSTEFDPATTSPCVIFMPEGSKTQMGATMRLGSRRTYFHVSGCKSAKLYGNASSVDERHRHRYEVNPDMVPDFEKAGLQFVGKDESGKRMGIVELPSHKFFIGAQFHPEFKSRPGKPSPLFLGLIAAASGQLEPLLQRSNPTTKACSISKVPKLKLYPTGPVNNPLNSLVNGYYPNGTGIHT

SEQ ID NO: 175240 - protein, 457 aa, Zea Mays
MPFIEALGQFSYRVGPGNFCLVHVSLVPVLNVVGEQKTKPTQHSVRGLRGLGLAPDVLACRSTEPLEEHVKAKLSQFCHVPVSNIVNLHDVTNIWHIPLLLRDQKAHEAILKVLDLQYDGKVPREPELTKWTKRATKFDKLKTPVKIAMVGKYTGLSDSYLSVIKALLHASVAMERKLVVEWVPSCDLEDSSAKETPEAHKKAWKLLKSVSRNSIPSQGADGVLVPGGFGDRGVQGKILAAKYARENNVPYLGICLGMQIAVIEFARSVMKLRGANSTEFDPATTSPCVIFMPEGSKTQMGATMRLGSRRTYFHVSGCKSAKLYGNASSVDERHRHRYEVNPDMVPDFEKAGLQFVGKDESGKRMGIVELPSHKFFIGAQFHPEFKSRPGKPSPLFLGLIAAASGQLEPLLQRSNPTTKACSISKVPKLKLYPTGPVNNPLNSLVNGYYPNGTGIHT

SEQ ID NO: 175241 - protein, 436 aa, Zea Mays
MPFIEALGQFSYRVGPGNFCLVHVSLVPVLNVVGEQKTKPTQHSVRGLRGLGLAPDVLACRSTEPLEEHVKAKLSQFCHVPDQKAHEAILKVLDLQYDGKVPREPELTKWTKRATKFDKLKTPVKIAMVGKYTGLSDSYLSVIKALLHASVAMERKLVVEWVPSCDLEDSSAKETPEAHKKAWKLLKSVSRNSIPSQGADGVLVPGGFGDRGVQGKILAAKYARENNVPYLGICLGMQIAVIEFARSVMKLRGANSTEFDPATTSPCVIFMPEGSKTQMGATMRLGSRRTYFHVSGCKSAKLYGNASSVDERHRHRYEVNPDMVPDFEKAGLQFVGKDESGKRMGIVELPSHKFFIGAQFHPEFKSRPGKPSPLFLGLIAAASGQLEPLLQRSNPTTKACSISKVPKLKLYPTGPVNNPLNSLVNGYYPNGTGIHT

SEQ ID NO: 175242 - protein, 619 aa, Zea Mays
MKYVLVTGGVVSGLGKGVTASSIGVVLKACGLRVTTIKIDPYLNTDAGTMSPFEHGEVFVLDDGGEVDLDLGNYERFLDIKLTRDNNITTGKIFQAVINKERRGDYLGKTVQVVPHITDEIQDWIERVAVVPVDGKEGPPDVCVIELGGTIGDKIFSPHNDSGILDAGDIESMPFIEALGQFSYRVGPGNFCLVHVSLVPVLNVVGEQKTKPTQHSVRGLRGLGLAPDVLACRSTEPLEEHVKAKLSQFCHVPVSNIVNLHDVTNIWHIPLLLRDQKAHEAILKVLDLQYDGKVPREPELTKWTKRATKFDKLKTPVKIAMVGKYTGLSDSYLSVIKALLHASVAMERKLVVEWVPSCDLEDSSAKETPEAHKKAWKLLKGADGVLVPGGFGDRGVQGKILAAKYARENNVPYLGICLGMQIAVIEFARSVMKLRGANSTEFDPATTSPCVIFMPEGSKTQMGATMRLGSRRTYFHVSGCKSAKLYGNASSVDERHRHRYEVNPDMVPDFEKAGLQFVGKDESGKRMGIVELPSHKFFIGAQFHPEFKSRPGKPSPLFLGLIAAASGQLEPLLQRSNPTTKACSISKVPKLKLYPTGPVNNPLNSLVNGYYPNGTGIHT

SEQ ID NO: 175243 - protein, 605 aa, Zea Mays
MKYVLVTGGVVSGLGKGVTASSIGVVLKACGLRVTTIKIDPYLNTDAGTMSPFEHGEVFVLDDGGEVDLDLGNYERFLDIKLTRDNNITTGKIFQAVINKERRGDYLGKTVQVVPHITDEIQDWIERVAVVPVDGKEGPPDVCVIELGGTIGDIESMPFIEALGQFSYRVGPGNFCLVHVSLVPVLNVVGEQKTKPTQHSVRGLRGLGLAPDVLACRSTEPLEEHVKAKLSQFCHVPDQKAHEAILKVLDLQYDGKVPREPELTKWTKRATKFDKLKTPVKIAMVGKYTGLSDSYLSVIKALLHASVAMERKLVVEWVPSCDLEDSSAKETPEAHKKAWKLLKGADGVLVPGGFGDRGVQGKILAAKYARENNVPYLGICLGMQIAVIEFARSVMKLRGANSTEFDPATTSPCVIFMPEGSKTQMGATMRLGSRRTYFHVSGCKSAKLYGNASSVDERHRHRYEVNPDMVPDFEKAGLQFVGKDESGKRMGIVELPSHKFFIGAQFHPEFKSRPGKPSPLFLGLIAAASGQLEPLLQRSNPTTKACSISKVPKLKLYPTGPVNNPLNSLVNGYYPNEKRRLRFSKPPAPATHGSDIFNEERLPVR

SEQ ID NO: 175244 - protein, 433 aa, Zea Mays
MPFIEALGQFSYRVGPGNFCLVHVSLVPVLNVVGEQKTKPTQHSVRGLRGLGLAPDVLACRSTEPLEEHVKAKLSQFCHVPVSNIVNLHDVTNIWHIPLLLRDQKAHEAILKVLDLQYDGKVPREPELTKWTKRATKFDKLKTPVKIAMVGKYTGLSDSYLSVIKALLHASVAMERKLVVEWVPSCDLEDSSAKETPEAHKKAWKLLKGADGVLVPGGFGDRGVQGKILAAKYARENNVPYLGICLGMQIAVIEFARSVMKLRGANSTEFDPATTSPCVIFMPEGSKTQMGATMRLGSRRTYFHVSGCKSAKLYGNASSVDERHRHRYEVNPDMVPDFEKAGLQFVGKDESGKRMGFHPEFKSRPGKPSPLFLGLIAAASGQLEPLLQRSNPTTKACSISKVPKLKLYPTGPVNNPLNSLVNGYYPNGTGIHT

SEQ ID NO: 175245 - protein, 253 aa, Zea Mays
MYIQSVSRNSIPSQGADGVLVPGGFGDRGVQGKILAAKYARENNVPYLGICLGMQIAVIEFARSVMKLRGANSTEFDPATTSPCVIFMPEGSKTQMGATMRLGSRRTYFHVSGCKSAKLYGNASSVDERHRHRYEVNPDMVPDFEKAGLQFVGKDESGKRMGIVELPSHKFFIGAQFHPEFKSRPGKPSPLFLGLIAAASGQLEPLLQRSNPTTKACSISKVPKLKLYPTGPVNNPLNSLVNGYYPNGTGIHT

SEQ ID NO: 175246 - protein, 132 aa, Zea Mays
MEADGGASRLALAAGARGQAIARDGGGGGCECSHLMCLAWMLLARCVLGKLQVHRLVKHVCPKVNIQKDNGVQMKIIGTHVDATEIVYDEDSYNKIHASPQVPSTLKACLFLYHVSISSLNSWNPSMVWNSV

SEQ ID NO: 175247 - protein, 98 aa, Zea Mays
MVCSTCSDGTVMYHDVLKHLIKCQYALYNHLGCVYHVHLYIKCPAAPRSRIFLEQVMHICRSTTTSLVSMLCSARILCALPGCFWRDVCLENFRCIVW

SEQ ID NO: 175248 - protein, 95 aa, Zea Mays
MSSEELRASFSDLAVGSPTQTEGKTYPSGDLSSEEVMQVTCFTEDLHDVVLHFQIVRFSKQIYVWVGCNTAKFGHLYAAATTRPSERDLCTRRNI

SEQ ID NO: 175249 - protein, 134 aa, Zea Mays
MSSEELRASFSDLAVGSPTQTEGKTYPSGDLSSEEVMQVTCFTEDLHDVVLHFQIVRFSKQIYVWVGCNTAKFGHLYAAATTRPDNRVSVTSVLGGTSDNTGSIPERLHPTCPSVEDRSEHCPSMQHPKRQPHS

SEQ ID NO: 175250 - protein, 82 aa, Zea Mays
MKLPTFRFSSSPVPTSPLPFPRLPSHGCSARSTATPRRPAAPAPALLRRARDQHLACSGLPIRPLLALTLFCSMRPAQQPES

SEQ ID NO: 175251 - protein, 416 aa, Zea Mays
MVTGRVKAAMGFQRSPKSQVPEAASPSRAPTSGSVSTAGSAPSKASALARSFGAYFPRSSAQVRPAARAPPQVAELLRAIEQLQERESRLRVELLEQKILKETVAIVPFLEAELAAKKAELQRCRDTAERLEAENGRLCAELDAAALEVTSRKQRIVELEKEMAELRTRQDAAADADDCSSSASAPSERLESSSAAPKPNRASLAQLDPPAPPAPGPAPLKSKSYFSASSSHPSPASSSPPPSPSSSTSTSSSPAHSRSSSDTAAAPRPRVVELSKLPPIPPPPPPCPPPPPPSRSKRSSPPNSASVDGSAAAAPPPPPPPPPPPPPPARRQFGAAPAPPAGASSGQGDVRRVPEVVEFYHSLMRRESKRDGSGTASEAANGGGGGAAATRDMIGEIENRSAHLLAVRKAEASIHP

SEQ ID NO: 175252 - protein, 594 aa, Zea Mays
MVTGRVKAAMGFQRSPKSQVPEAASPSRAPTSGSVSTAGSAPSKASALARSFGAYFPRSSAQVRPAARAPPQVAELLRAIEQLQERESRLRVELLEQKILKETVAIVPFLEAELAAKKAELQRCRDTAERLEAENGRLCAELDAAALEVTSRKQRIVELEKEMAELRTRQDAAADADDCSSSASAPSERLESSSAAPKPNRASLAQLDPPAPPAPGPAPLKSKSYFSASSSHPSPASSSPPPSPSSSTSTSSSPAHSRSSSDTAAAPRPRVVELSKLPPIPPPPPPCPPPPPPSRSKRSSPPNSASVDGSAAAAPPPPPPPPPPPPPPARRQFGAAPAPPAGASSGQGDVRRVPEVVEFYHSLMRRESKRDGSGTASEAANGGGGGAAATRDMIGEIENRSAHLLAIKSDVERQGDFIRFLIKEVEGAAFGYCDLKKLEREAASFRDDARQPCAAALKKMQALFEKLEHGVYNLARVRDAATGRYTRFQIPWEWMKQDTGIVSQIKLQSVKLAMKHLKRVSSELEVIKGGPEEEEQELMLQGVRFAFRVHQFAGGFDVDTMRAFQELKEKASMCRVQRQKQHRHLRQHRLVARA

SEQ ID NO: 175253 - protein, 312 aa, Zea Mays
MLRKKFSGRVRAGEGDGDPGGHGARGLPERRQLRHHLGHRQQRLLLRGQRHGHQALLAGHADAVVQDPPPRARAGGGGGTAERQRGRAAERRAGGAGRDRRERLQLRLLAGRAAGRGAQVRAGRGGQAGGRHGGAHRHGGARLRGAREPTLRLHAAVPAAVPRQRRVVGLRPGHGLPRLVQPLRPVPQPGARGAPRQAPAPAPGRDHRLRRLVRGHDEHLPGPREARVHKRSADLLREPDRAVWQARVLRLQGPVHVRVLGRDAPDGGGVQGDRRRGAARAARVPCSSRRHLSSDMTLRRFIIGSFKSGGNI

SEQ ID NO: 175254 - protein, 441 aa, Zea Mays
MAAGGKGWAERVRRGARTAWFMVAMVASLLVASSPALVAAGDMAVALWLEARLGCFRGDGLRGHLQRYRFRNSLADIPLVSVVRSIVITCVYLMSDTSGLSHGPYLGTTTFCSLASLLILLIKASVYSPAQDIGPELSPSLPDHKLNLKNLWGMPVLFLSSLVFALGHVIVAYRTSGRARRKLLIHRIDPESILAYKNAFSGCYKVPRSPTPYSGKLFTRSESETKRKSLIQDDRDLPISFLADSDSMFIACQGITIHYKVSDPAASLPSSPGFFSERDTHHDVISSSISPRRQRHESPPSASSNTRRVLNRSFSHQYHNTSLYAPLLVEPVASPTLLDDIPLMCIDDGNADGCLSHVGFDLEAGGQGKFAVVLVHGFGGGVFSWRHVSNLLARQLGCTVMAFDRPGWGLTSRPRRKDWEDKKLPNPYELESQRWACTLWF

SEQ ID NO: 175255 - protein, 213 aa, Zea Mays
MTQHVSMISITLSPRELDKHTPGYQAPVYVEQPRQQQVPPPHRQPRRPPAQFQQLEYEDSYARGRGRGVGVEGAGVEVATVAMVDMETTKVAIIRVVGIMTIKVEIMAMIIKTDIVAMIIKVGMVVDMAITKADMGTIKKMVDITETQEVVCEEEAIGVTEESVVVDCISKIPFDTIQLPSSDYIVIIDHHCSLYYDRGEPSTKTSAHAHVVF

SEQ ID NO: 175256 - protein, 61 aa, Zea Mays
MAYAFLVVSPPDMSQCFEEMAAAKSNKTSSKPGLNYPGLEEQTLQFILDCCESNIENIQST

SEQ ID NO: 175257 - protein, 113 aa, Zea Mays
MGRRRRREAFRPCFVDLGAGISWEYDRRSCCTRALPRQEEHKHTSGGILSWGLMWPLIAKKKGSWYPANLEDSSLHGLQAYRVFISIALILGDGLYNFIKDGQLSDGLCLPCG

SEQ ID NO: 175258 - protein, 55 aa, Zea Mays
MRVRERRKSPRVYAIDKHWSLVWTASGKPGIRRRSTSPPRCSFVSWTRTATTHGP

SEQ ID NO: 175259 - protein, 74 aa, Zea Mays
MSSGVLAAFVLVVASPAEARPSRLENKRKALEKLEKLREKALGPKEKSGATGNGKEMPPPANLLIPPAAVEAFL

SEQ ID NO: 175260 - protein, 164 aa, Zea Mays
MHGMERNTGTLTRRDSKVQTLHLHLKSYTGPRWFSPSIIKFTQHNHFAPLALTTKLSRLLPLPAGVACGGTRLKRRGRAARVEGARGGRRAWGARGRCGGDALAARAHGERGRRFSSVSEPKQRFRGTHWFGFWRLLQTQQQILVTCQSLEVVVMEFFASHGHG

SEQ ID NO: 175261 - protein, 244 aa, Zea Mays
MHGMERNTGTLTRRDSKVQTLHLHLKSYTGPRWFSPSIIKFTQHNHFAPLALTTKLSRLLPLPAGVACGGTRLKRRGRAARVEGARGGRRAWGARGRCGGDALAARAHGERGRRFSSVSEPKQRFRYSHSSSVCLSFVLALRFWNQTSTCLGRSLSLTAKASFCFGVRVWLRRKLSSRRRDCSLDSRSFLARCGPPAPPRSSSSSSTLPIGNSSSSPPLAGWFMSRSLMLFPFPLPLLLLHPNP

SEQ ID NO: 175262 - protein, 157 aa, Zea Mays
MVAVAVAVECFPGRTTPRLQSRTVGAGKSKGARTAPIIDDSSHLITTTSFFGVCGTSPCRRSWPSPSPSSRTPGWGWPCLAWDCLWRCSRSSSRADGAPQASPWPSASSPALPSWPPRPWPSASEGPFCGSPLCRRLYRKGSCPSCSRKNTTSTRPS

SEQ ID NO: 175263 - protein, 409 aa, Zea Mays
MRASVEEAGALLARSDSAGRRRRSPPPVQTASPRPGSLRRQSSSFREDVGHAASETYLVSRLTFTLLQYLGLGYRWMSQLLSLTIYAIVLMPGFIQVGYYYFFSSQVRRSVVYGDQPRNRLDLYIPEDNSRPCPVVAFVTGGAWIIGYKAWGALLGRRLAERGIIVACIDYRNFPQGTIGDMVHDASQGISFVCNNIASHGGDPNQIYVCRIYLIGQSAGAHIAACALMEQAVKESGGNPVSWSLTQIKAYFGLSGGYNMHNLVDHFHERGLNRSIFLSIMEGEESLSRYSPEIVAKTSSAETIALLPLVVLMHGTEDYSIPSSSSQTFVDVLQQAGAQARLLLYEGKTHTDIFVQDPLRGGRDPLVEDVLSIIHADDANACQKIALAPTPRRLVFEWQLKLARKISPF

SEQ ID NO: 175264 - protein, 99 aa, Zea Mays
MSAAVSPATVEKRSNTSQNKLGQTPERMTLKDTHITRQEYGEFLKERNERELYFFRPSYQVKDEWAPQATSLEPAKEDRASPQATTEREHDEASATNFL

SEQ ID NO: 175265 - protein, 68 aa, Zea Mays
MGRQWVEMILQALEYEKEHGKVLDEFFLSTAGKFQTEIGKSWAAEVNSRRKEGCGKQEPSSNFHGNVL

SEQ ID NO: 175266 - protein, 143 aa, Zea Mays
MAVSSRFPSQPAARGLLRRTPQRILPVERTPRRLALVVTAVSGGPVPGGSPVPRRPPPPEDAATVAPTSVPSSAASAIDFLTLCHRLKTTKRKGWINHSIKGPESIADHMYRMALMALIAGDLPAVDRERCIKIAIVHDIAEG

SEQ ID NO: 175267 - protein, 130 aa, Zea Mays
MGARDLNIQTEHGQLGMPSNICCVVVEYLAGGALKNFLIKNRRRKLAFKVVVQIALDLARGLCYLHSKKIVHRDVKTENMLLDKTRTVKIADFGVARVEASNPSDMTGETGTLGYMAPELWDLPVGDILL

SEQ ID NO: 175268 - protein, 144 aa, Zea Mays
MGARDLNIQTEHGQLGMPSNICCVVVEYLAGGALKNFLIKNRRRKLAFKVVVQIALDLARGLCYLHSKKIVHRDVKTENMLLDKTRTVKIADFGVARVEASNPSDMTGETGTLGYMAPEVFDFNHRSVFLNLKLHTWRSYPLYR

SEQ ID NO: 175269 - protein, 258 aa, Zea Mays
MRQPTSAGGDAGFLRADQIDLKSLDEQLERHLGHPAERVVGPVSGTGSRRGETAKLGPEELTPLQRCREDWEIDPTKLIIKGVIARGTFGTVHRGVYDGQDVAVKLLDWGEDGHRSEQEIGALRAAFAQEVAVWHKLEHPNVTKVLNGHAYNRKCDVYSFGICLWEIYCCDMPYPDLSFSEVTSAVVRQNLRPEIPRCCPSSLANVMKRCWDANPDKRPEMAEVVSMLEAIDTSKGGGMIPKDQTQGCLSCFRQYRGP

SEQ ID NO: 175270 - protein, 287 aa, Zea Mays
MRQPTSAGGDAGFLRADQIDLKSLDEQLERHLGHPAERVVGPVSGTGSRRGETAKLGPEELTPLQRCREDWEIDPTKLIIKGVIARGTFGTVHRGVYDGQDVAVKLLDWGEDGHRSEQEIGALRAAFAQEVAVWHKLEHPNVTKFIGAIMGARDLNIQTEHGQLGMPSNICCVVVEYLAGGALKNFLIKNRRRKLAFKVVVQIALDLARGLCYLHSKKIVHRDVKTENMLLDKTRTVKIADFGVARVEASNPSDMTGETGTLGYMAPEVFARKLLKYKLETCPACNS

SEQ ID NO: 175271 - protein, 366 aa, Zea Mays
MVFACSDSRVCPSVTLGLQPGEAFTVRNIASMVPPYDKIKYAGTGSAIEYAVCALKVQVIVVIGHSCCGGIRALLSLKDGAPDNFHFVEDWVRIGSPAKNKVKKEHASVPFDDQCSILEKEAVNVSLQNLKSYPFVKEGLAGGTLKLVGAHYDFVKGQFVTWEPPQDAIERLTSGFQQFKVNVYDKKPELFGPLKSGQAPKYMVFACSDSRVCPSVTLGLQPGEAFTVRNIAAMVPGYDKTKYTGIGSAIEYAVCALKVEVLVVIGHSCCGGIRALLSLQDGAPDTFHFVEDWVKIGFIAKMKVKKEHASVPFDDQCSILEKEAVNVSLENLKTYPFVKEGLANGTLKLIGAHYDFVSGEFLTWKK

SEQ ID NO: 175272 - protein, 404 aa, Zea Mays
MDPTVERLKSGFQKFKTEVYDKKPELFEPLKSGQSPRYMVFACSDSRVCPSVTLGLQPGEAFTVRNIASMVPPYDKIKYAGTGSAIEYAVCALKVQVIVVIGHSCCGGIRALLSLKDGAPDNFHFVEDWVRIGSPAKNKVKKEHASVPFDDQCSILEKEAVNVSLQNLKSYPFVKEGLAGGTLKLVGAHYDFVKGQFVTWEPPQDAIERLTSGFQQFKVNVYDKKPELFGPLKSGQAPKYMVFACSDSRVCPSVTLGLQPGEAFTVRNIAAMVPGYDKTKYTGIGSAIEYAVCALKVEVLVVIGHSCCGGIRALLSLQDGAPDTFHFVEDWVKIGFIAKMKVKKEHASVPFDDQCSILEKEAVNVSLENLKTYPFVKEGLANGTLKLIGAHYDFVSGEFLTWKK

SEQ ID NO: 175273 - protein, 348 aa, Zea Mays
MYEKKQGKDSFWYPYIKELDRHRGRGQLAVESPLLWTESELDYLTGSPLKDEVVARDEAIRREYNELDTLWFMAGSLFQQYPFDIPTEAFPFEIFKQAFVAVQSCVVHLQKVSLARRFALVPLGPPLLTYRSNCKAMLTADGDSVRLVVDRPYKAGEPIIIWCGPQTNSRLVLNYGFVDEDNPFDRVAIEASLNTEDPQYQEKRMVAQRNGKLAIQNFNVYVGKEKQTVAEMLPYLRLGYISNPDEMQSILSSEGDTCPVSPCTERAVLDQLVGYLESRLAGYPTTLDEDEAMLADGNLEPKKEVATRLVRLEKKMLHACLQATNEFINDLPDHTVSPCPAPYAPELK

SEQ ID NO: 175274 - protein, 494 aa, Zea Mays
MAPVSPAAAAAAVSASHHGRHLLPSSPRRLPRPRPRSRPHLRLAACHADTLLPSSSSEARAAPGPAVEPSSESATDCFVDWLRARGLPPGKVDIRERPVPCLRDGKDQPLRYVSAVVDLQAGDVAFEVSMSLVVTLERVLGDESIAELLTNNKLSELACLALYLMYEKKQGKDSFWYPYIKELDRHRGRGQLAVESPLLWTESELDYLTGSPLKDEVVARDEAIRREYNELDTLWFMAGSLFQAFVAVQSCVVHLQKVSLARRFALVPLGPPLLTYRSNCKAMLTADGDSVRLVVDRPYKAGEPIIIWCGPQTNSRLVLNYGFVDEDNPFDRVAIEASLNTEDPQYQEKRMVAQRNGKLAIQNFNVYVGKEKQTVAEMLPYLRLGYISNPDEMQSILSSEGDTCPVSPCTERAVLDQLVGYLESRLAGYPTTLDEDEAMLADGNLEPKKEVATRLVRLEKKMLHACLQATNEFINDLPDHTVSPCPAPYAPELK

SEQ ID NO: 175275 - protein, 304 aa, Zea Mays
MAPVSPAAAAAAVSASHHGRHLLPSSPRRLPRPRPRSRPHLRLAACHADTLLPSSSSEARAAPGPAVEPSSESATDCFVDWLRARGLPPGKVDIRERPVPCLRDGKDQPLRYVSAVVDLQAGDVAFEVSMSLVVTLERVLGDESIAELLTNNKLSELACLALYLMYEKKQGKDSFWYPYIKELDRHRGRGQLAVESPLLWTESELDYLTGSPLKDEVVARDEAIRREYNELDTLWFMAGSLFQQYPFDIPTEAFPFEIFKQAFVAVQSCVVHLQEICASLGYLQQISYQSITSPILSSISNFFL

SEQ ID NO: 175276 - protein, 180 aa, Zea Mays
MLRAAVAAKTTLGIKAKEAMDKGELVSDNLVVGIIDEAMKKPSCQKGFILDGFPRTVTQAQKLDEMLAKQGANVDKVLNFAIDDAILEERITGRWIHPPSGRTYHTKFAPPKSPGVDDVTGEPLIQRRDDTAEVLKSRLEAFHKQTEPVIDYYSKKGLVVNLPAEKPPKEVTAEVLKALS

SEQ ID NO: 175277 - protein, 172 aa, Zea Mays
MAANLEDVPSLDLMHELLRRMKCSSKPDKHLILIGPPGSGKGTQSPLIKDEYCLCHLATGDMLRAAVAAKTTLGIKAKEAMDKGELVSDNLVVGIIDEAMKKPSCQKGFILDGFPRTVTQAQKLDEMLAKQGANVDKVLNFAIDDAILEERITGRWIHPPSGNWRAIDSKEG

SEQ ID NO: 175278 - protein, 220 aa, Zea Mays
MAANLEDVPSLDLMHELLRRMKCSSKPDKHLILIGPPGSGKGTQSPLIKDEYCLCHLATGDMLRAAVAAKTTLGIKAKEAMDKGELVSDNLVVGIIDEAMKKPSCQKGFILDGFPRTVTQAQKLDEMLAKQGANVDKVLNFAIDDAILEERITGRWIHPPSGRTYHTKFAPPKSPGVDDVVLVGNWGSGRGGSSPGRWSRRRGYPRGEAGNWRAIDSKEG

SEQ ID NO: 175279 - protein, 276 aa, Zea Mays
MKLGAKGLGLLLLLVLLALCSTIEVGEARRDRHWRSSRTSSSQLLKKGKGKKTSSRRQYGSNRPSPKPPASSTPSSGAGGKGNQTPYQPSPNAPHIPRPSPPANGSAHSTPKPPTPPSCGKAHQQPSQSQPPPPATSSQHGAVFNVVDFGAKGDGVTDDTKAFQGAWAAACTQGASTLLVPPELEFLVGPISFSGPYCKPNIVFQLEGTILAPISAKSWGSGLLQWLEFTKLNGIVIQGNGIINGRGQQWWTYSDPEDEDDDDTSFKECHRLNLQR

SEQ ID NO: 175280 - protein, 179 aa, Zea Mays
MVVGTADRNVIVFNLQNPQAEFKRITSPLKLQTRCLAAFPDQQGFLIGSIEGRVGVHHVEESQQGKNFTFKCHRDGNDIYAISSLNFHPVHGTFATTGSDGSFNFWDKDSKQRLKAYNRCPSPITCSAFNHDGSIFAYAVCYDWSKGAEKHNPSTAKTNIFLHSAQDSDVKGKPRAGKK

SEQ ID NO: 175281 - protein, 197 aa, Zea Mays
MASFNPAGASAANHNPNKSFEVTPAPGDSVSSLSFSPKANHLVATSWDNQVRCWEVMAGGACQAKASISHDQPVLCSAWKDDGLTVFSGGCDKQVKMWPLLSGAQPTVFSGHEAPIKELAWVPQMNLLVSGSWDKTLRYWDIRQPQPVHVQQLPERCYALSLCYPLMVVGTADRNVIVFNLQNPQVSDGERRLCSGL

SEQ ID NO: 175282 - protein, 341 aa, Zea Mays
MYSSNAAGAVIIDVVHSSLGKYVDRDIGFVEFSSLVLWALEELGKVESEPTDSTSDFLSTLKQHHQIAETKIAWLAKLFLWEPFFPVRTHDTLFHAMLLFSKHHRLNVAPVVESMNSSVIGFVTQDAVMELLLQSSGLEWLDKIADKQLSEFRFANVRKPVLVYSDQTLADGLHILSKEKTGVAVIDRKTSRLIGSLQCSDLYLFLDDSTLFSKRTTTTLEELISLNNKTDRKCSTAENSCAPGRNILALRSRQSGMVGLPATNLESDTLKQAMEKLTTLRSSCSFIVDEHGRVQGVVTTRDIISVFSPLCMDSRIDGATFFSAALEQAGCRVENGQMFQN

SEQ ID NO: 175283 - protein, 213 aa, Zea Mays
MELLLQSSGLEWLDKIADKQLSEFRFANVRKPVLVYSDQTLADGLHILSKEKTGVAVIDRKTSRLIGSLQCSDLYLFLDDSTLFSKRTTTTLEELISLNNKTDRKCSTAENSCAPGRNILALRSRQSGMVGLPATNLESDTLKQAMEKLTTLRSSCSFIVDEHGRVQGVVTTRDIISVFSPLCMDSRIDGATFFSAALEQAGCRVENGQMFQN

SEQ ID NO: 175284 - protein, 218 aa, Zea Mays
MAREAASEATASRESGAEAAGECWSEALKSFLDHIPVSSVPGALQPTASPAVEVKLHGSVLGALDAMYSSNAAGAVIIDVVHSSLGKYVDRDIGFVEFSSLVLWALEELGKVESEPTDSTSDFLSTLKQHHQIAETKIAWLAKLFLWEPFFPVRTHDTLFHAMLLFSKHHRLNVAPVVESMNSSVIGFVTQNSIVMLTAGRCIALGCSDGAASPVKWP

SEQ ID NO: 175285 - protein, 400 aa, Zea Mays
MSNCFNSGINKIFVMSQFNSTSLNRHIHRTYLEGGINFADGSVQVLAATQMPEEPAGWFQGTADSIRKFIWVLEDYYSHKSIDNIVILSGDQLYRMNYMELVQKHVEDDADITISCAPVDESRASKNGLVKIDHTGRVLQFFEKPKGADLNSMLLMLQRVETNFLSYAIDDAQKYPYLASMGIYVFKKDALLDLLKSKYIQLHDFGSEILPRAVLDHSVQACIFTGYWEDVGTIKSFFDANLALTEQPSKFDFYDPKTPFFTAPRCLPPTQLDKCKMKDAFISDGCLLRECNIEHSVIGVCSRVSSGCELKDSVMMGADTYETEEEASKLLLAGKVPVGIGRNTKIRNCIIDMNARIGKNVVITNSKGIQEADHPEEGYYIRSGIVVILKNATINDGSVI

SEQ ID NO: 175286 - protein, 585 aa, Zea Mays
MLVVVVTPFGSGRRLELQANSSGRKVSKTMNGLQKASQLATRSLREASAISISQPPFFCSVVYLVVGGDMQFALALDTNSGPHQIRSCEGDGIDRLEKLSIGGRKQEKALRNRCFGGRVAATTQCILTSDACPETLHSQTQSSRKNYADANRVSAIILGGGTGSQLFPLTSTRATPAVPVGGCYRLIDIPMSNCFNSGINKIFVMSQFNSTSLNRHIHRTYLEGGINFADGSVQVLAATQMPEEPAGWFQGTADSIRKFIWVLEDYYSHKSIDNIVILSGDQLYRMNYMELVQKHVEDDADITISCAPVDESRASKNGLVKIDHTGRVLQFFEKPKGADLNSMRVETNFLSYAIDDAQKYPYLASMGIYVFKKDALLDLLKSKYIQLHDFGSEILPRAVLDHSVQACIFTGYWEDVGTIKSFFDANLALTEQPSKFDFYDPKTPFFTAPRCLPPTQLDKCKMKDAFISDGCLLRECNIEHSVIGVCSRVSSGCELKDSVMMGADTYETEEEASKLLLAGKVPVGIGRNTKIRNCIIDMNARIGKNVVITNSKGIQEADHPEEGYYIRSGIVVILKNATINDGSVI

SEQ ID NO: 175287 - protein, 615 aa, Zea Mays
MLVVVVTPFGSGRRLELQANSSGRKVSKTMNGLQKAKAKGKIGTLMMVGCMSLSITCKKCEPLFLSSPPVCPLILYINTSTASQLATRSLREASAISISQPPFFCSVVYLVVGGDMQFALALDTNSGPHQIRSCEGDGIDRLEKLSIGGRKQEKALRNRCFGGRVAATTQCILTSDACPETLHSQTQSSRKNYADANRVSAIILGGGTGSQLFPLTSTRATPAVPVGGCYRLIDIPMSNCFNSGINKIFVMSQFNSTSLNRHIHRTYLEGGINFADGSVQVLAATQMPEEPAGWFQGTADSIRKFIWVLEDYYSHKSIDNIVILSGDQLYRMNYMELVQKHVEDDADITISCAPVDESRASKNGLVKIDHTGRVLQFFEKPKGADLNSMRVETNFLSYAIDDAQKYPYLASMGIYVFKKDALLDLLKAVLDHSVQACIFTGYWEDVGTIKSFFDANLALTEQPSKFDFYDPKTPFFTAPRCLPPTQLDKCKMKDAFISDGCLLRECNIEHSVIGVCSRVSSGCELKDSVMMGADTYETEEEASKLLLAGKVPVGIGRNTKIRNCIIDMNARIGKNVVITNSKGIQEADHPEEGYYIRSGIVVILKNATINDGSVI

SEQ ID NO: 175288 - protein, 573 aa, Zea Mays
MMASPPSSSPPVCPLILYINTSTASQLATRSLREASAISISQPPFFCSVVYLVVGGDMQFALALDTNSGPHQIRSCEGDGIDRLEKLSIGGRKQEKALRNRCFGGRVAATTQCILTSDACPETLHSQTQSSRKNYADANRVSAIILGGGTGSQLFPLTSTRATPAVPVGGCYRLIDIPMSNCFNSGINKIFVMSQFNSTSLNRHIHRTYLEGGINFADGSVQVLAATQMPEEPAGWFQGTADSIRKFIWVLEDYYSHKSIDNIVILSGDQLYRMNYMELVQKHVEDDADITISCAPVDESRASKNGLVKIDHTGRVLQFFEKPKGADLNSMRVETNFLSYAIDDAQKYPYLASMGIYVFKKDALLDLLKSKYIQLHDFGSEILPRAVLDHSVQACIFTGYWEDVGTIKSFFDANLALTEQPSKFDFYDPKTPFFTAPRCLPPTQLDKCKMKDAFISDGCLLRECNIEHSVIGVCSRVSSGCELKDSVMMGADTYETEEEASKLLLAGKVPVGIGRNTKIRNCIIDMNARIGKNVVITNSKGIQEADHPEEGYYIRSGIVVILKNATINDGSVI

SEQ ID NO: 175289 - protein, 638 aa, Zea Mays
MGGQCCELEQCGNVGGSGDTLRERKEAGTSDYLAFCKRPNTQMLEKIYHVVKIRSAFPSANSSGRKVSKTMNGLQKVCPLILYINTSTASQLATRSLREASAISISQPPFFCSVVYLVVGGDMQFALALDTNSGPHQIRSCEGDGIDRLEKLSIGGRKQEKALRNRCFGGRVAATTQCILTSDACPETLHSQTQSSRKNYADANRVSAIILGGGTGSQLFPLTSTRATPAVPVGGCYRLIDIPMSNCFNSGINKIFVMSQFNSTSLNRHIHRTYLEGGINFADGSVQVLAATQMPEEPAGWFQGTADSIRKFIWVLEDYYSHKSIDNIVILSGDQLYRMNYMELVQKHVEDDADITISCAPVDESRASKNGLVKIDHTGRVLQFFEKPKGADLNSMRVETNFLSYAIDDAQKYPYLASMGIYVFKKDALLDLLKSKYIQLHDFGSEILPRAVLDHSVQACIFTGYWEDVGTIKSFFDANLALTEQPSKFDFYDPKTPFFTAPRCLPPTQLDKCKMKDAFISDGCLLRECNIEHSVIGVCSRVSSGCELKDSVMMGADTYETEEEASKLLLAGKVPVGIGRNTKIRNCIIDMNARIGKNVVITNSKGIQEADHPEEGYYIRSGIVVILKNATINDGSVI

SEQ ID NO: 175290 - protein, 384 aa, Zea Mays
MGGQCCELEQCGNVGGSGDTLRERKEAGTSDYLAFCKRPNTQMLEKIYHVVKIRSAFPSANSSGRKVSKTMNGLQKAKAKGKIGTLMMVGCMSLSITCKKCEPLFLSSPPVCPLILYINTSTASQLATRSLREASAISISQPPFFCSVVYLVVGGDMQFALALDTNSGPHQIRSCEGDGIDRLEKLSIGGRKQEKALRNRCFGGRVAATTQCILTSDACPETLVPVGGCYRLIDIPMSNCFNSGINKIFVMSQFNSTSLNRHIHRTYLEGGINFADGSVQVLAATQMPEEPAGWFQGTADSIRKFIWVLEDYYSHKSIDNIVILSGDQLYRMNYMELVQKHVEDDADITISCAPVDESRASKNGLVKIDHTGRVLQFFEKPKES

SEQ ID NO: 175291 - protein, 425 aa, Zea Mays
MGGQCCELEQCGNVGGSGDTLRERKEAGTSDYLAFCKRPNTQMLEKIYHVVKIRSAFPSANSSGRKVSKTMNGLQKAKAKGKIGTLMMVGCMSLSITCKKCEPLFLSSPPVCPLILYINTSTASQLATRSLREASAISISQPPFFCSVVYLVVGGDMQFALALDTNSGPHQIRSCEGDGIDRLEKLSIGGRKQEKALRNRCFGGRVAATTQCILTSDACPETLHSQTQSSRKNYADANRVSAIILGGGTGSQLFPLTSTRATPAVPVGGCYRLIDIPMSNCFNSGINKIFVMSQFNSTSLNRHIHRTYLEGGINFADGSVQVLAATQMPEEPAGWFQGTADSIRKFIWVLEDYYSHKSIDNIVILSGDQLYRMNYMELVQKHVEDDADITISCAPVDESRASKNGLVKIDHTGRVLQFFEKPKES

SEQ ID NO: 175292 - protein, 558 aa, Zea Mays
MFIAKAKGKIGTLMMVGCMSLSITCKKCEPLFLSSPPVCPLILYINTSTASQLATRSLREASAISISQPPFFCSVVYLVVGGDMQFALALDTNSGPHQIRSCEGDGIDRLEKLSIGGRKQEKALRNRCFGGRVAATTQCILTSDACPETLVPVGGCYRLIDIPMSNCFNSGINKIFVMSQFNSTSLNRHIHRTYLEGGINFADGSVQVLAATQMPEEPAGWFQGTADSIRKFIWVLEDYYSHKSIDNIVILSGDQLYRMNYMELVQKHVEDDADITISCAPVDESRASKNGLVKIDHTGRVLQFFEKPKGADLNSMRVETNFLSYAIDDAQKYPYLASMGIYVFKKDALLDLLKSKYIQLHDFGSEILPRAVLDHSVQACIFTGYWEDVGTIKSFFDANLALTEQPSKFDFYDPKTPFFTAPRCLPPTQLDKCKMKDAFISDGCLLRECNIEHSVIGVCSRVSSGCELKDSVMMGADTYETEEEASKLLLAGKVPVGIGRNTKIRNCIIDMNARIGKNVVITNSKGIQEADHPEEGYYIRSGIVVILKNATINDGSVI

SEQ ID NO: 175293 - protein, 379 aa, Zea Mays
MSNCFNSGINKIFVMSQFNSTSLNRHIHRTYLEGGINFADGSVQVLAATQMPEEPAGWFQGTADSIRKFIWVLEDYYSHKSIDNIVILSGDQLYRMNYMELVQKHVEDDADITISCAPVDESRASKNGLVKIDHTGRVLQFFEKPKGADLNSMRVETNFLSYAIDDAQKYPYLASMGIYVFKKDALLDLLKAVLDHSVQACIFTGYWEDVGTIKSFFDANLALTEQPSKFDFYDPKTPFFTAPRCLPPTQLDKCKMKDAFISDGCLLRECNIEHSVIGVCSRVSSGCELKDSVMMGADTYETEEEASKLLLAGKVPVGIGRNTKIRNCIIDMNARIGKNVVITNSKGIQEADHPEEGYYIRSGIVVILKNATINDGSVI

SEQ ID NO: 175294 - protein, 599 aa, Zea Mays
MFIAKAKGKIGTLMMVGCMSLSITCKKCEPLFLSSPPVCPLILYINTSTASQLATRSLREASAISISQPPFFCSVVYLVVGGDMQFALALDTNSGPHQIRSCEGDGIDRLEKLSIGGRKQEKALRNRCFGGRVAATTQCILTSDACPETLHSQTQSSRKNYADANRVSAIILGGGTGSQLFPLTSTRATPAVPVGGCYRLIDIPMSNCFNSGINKIFVMSQFNSTSLNRHIHRTYLEGGINFADGSVQVLAATQMPEEPAGWFQGTADSIRKFIWVLEDYYSHKSIDNIVILSGDQLYRMNYMELVQKHVEDDADITISCAPVDESRASKNGLVKIDHTGRVLQFFEKPKGADLNSMRVETNFLSYAIDDAQKYPYLASMGIYVFKKDALLDLLKSKYIQLHDFGSEILPRAVLDHSVQACIFTGYWEDVGTIKSFFDANLALTEQPSKFDFYDPKTPFFTAPRCLPPTQLDKCKMKDAFISDGCLLRECNIEHSVIGVCSRVSSGCELKDSVMMGADTYETEEEASKLLLAGKVPVGIGRNTKIRNCIIDMNARIGKNVVITNSKGIQEADHPEEGYYIRSGIVVILKNATINDGSVI

SEQ ID NO: 175295 - protein, 556 aa, Zea Mays
MNGLQKASQLATRSLREASAISISQPPFFCSVVYLVVGGDMQFALALDTNSGPHQIRSCEGDGIDRLEKLSIGGRKQEKALRNRCFGGRVAATTQCILTSDACPETLHSQTQSSRKNYADANRVSAIILGGGTGSQLFPLTSTRATPAVPVGGCYRLIDIPMSNCFNSGINKIFVMSQFNSTSLNRHIHRTYLEGGINFADGSVQVLAATQMPEEPAGWFQGTADSIRKFIWVLEDYYSHKSIDNIVILSGDQLYRMNYMELVQKHVEDDADITISCAPVDESRASKNGLVKIDHTGRVLQFFEKPKGADLNSMRVETNFLSYAIDDAQKYPYLASMGIYVFKKDALLDLLKSKYIQLHDFGSEILPRAVLDHSVQACIFTGYWEDVGTIKSFFDANLALTEQPSKFDFYDPKTPFFTAPRCLPPTQLDKCKMKDAFISDGCLLRECNIEHSVIGVCSRVSSGCELKDSVMMGADTYETEEEASKLLLAGKVPVGIGRNTKIRNCIIDMNARIGKNVVITNSKGIQEADHPEEGYYIRSGIVVILKNATINDGSVI

SEQ ID NO: 175296 - protein, 294 aa, Zea Mays
MVNQNLVAQPVFSFWLNRNPFDGEGGEIVFGGSDEQHYKGSHTYTRVTRKGYWQFEMGDFLIGGRSTGICVDGCAAIADSGTSLIAGPLVAIAQINEQIGAAGVVNQECKQVVAGYGLQIAGLLEAQQTPPSEVCSKVGLCTFDGTRGVSAAGIESVPGSVDGMAEALCNACEIVVFWTQSELSPNRSNEGTLEYVDRLCESMPDPVGSRVDCGRVGSLQTVAFSIGGRAFELRPDQYVLKVGEGFAAHCISGFTALDVPPPVGPLWILGDVFMGAYHTIFDYGKMRIGFADSA

SEQ ID NO: 175297 - protein, 118 aa, Zea Mays
MQSSSMKREISEAHNTIRFGINAGVKADLAPPHPLQSTIQSVRIRRSPSFRGSRVVSHRAARRGGQSRWPVRPPPRGATDSSSPPVWCSMEVAVSIGTTQGQACSTGCSVDNDVKPKL

SEQ ID NO: 175298 - protein, 58 aa, Zea Mays
MSSQQLVDFIREHIDTLASEYLLPIKEPLLELEMPPIFLAQMVPAPAAMDWLRKSGVH

SEQ ID NO: 175299 - protein, 94 aa, Zea Mays
MILQLLIRSEKDGILCPIPQYPLYSASIALHGGSLVPYFLDEETGWALEVDELKKQLEEARSKGISVRALVVINPGNPTGQACCSQTKPGASLD

SEQ ID NO: 175300 - protein, 1076 aa, Zea Mays
MGFDNECILSIQSLPGEYFCPVCRTLVYPNEALQTQCTHLYCKSCLAYVVATTQACPYDGYLVTEADSKPLVESNKTLAETIGKVAVYCLYNKSGCQWHGELSACVTHGTACAYGNSPVVCNRCGTQIVHRQVQEHAQVCHGLQSQTQQADGSQVQLATATTQPVIQDSSLASAGSAAAAATTLTKPSSTTATAVTDSAAATGGAAGATTAAVPSSASSISASQTPTAEQWYQQQQQLQYSQYYQQQHPGSNPYMQQHQQYDQYQQAYQQYMQPPMQVPSQNVVQGSAQPASYVQPQVQSSQVMMQAQSQPQVHPLTSQPQLQQHPVQPRPQSHPHISHVQAPSGQSQLHQPIQSAQVPQVQPSQVPLQPSGLQVQSAAHPSAPTQVGNQQFATQAMAYQVQPHVQAQPPQQQHIVAHQQHPHMQALPLQQNIQPKMQLNSQVQLQPPHVQQQAYPQSQVYPQQTHHMHSQNTTYAQQQTQGALMQPVHVSHQQTHVSHHPAPMRPPSSGHQPALQHPQAQGIQHTSQHEKHIGFHAQWPTMYSNIPSQAPPQGLSVHSSVSSQSVQSYQQGMSSSQQMHSQPGQPYTQQHVTGNTGQHVQTSAGRPMAHLAPTQQFQQQHPAMLRTESPAAGHSIGQGPLDLEKHTSKSGKLDNATIAAVGENKNSGPESVVMRPTKSQLGDENMNSEHNGFVGVRKDAVQTGIVSHNLDGSIRRDGNTDQAGNSHGPLVQGGKDHKASDASTDHEKGRLFQQASLQNAGAPGSYVPPGVVPHPSGPDKMLPQHMTNHGHMHGFSENIRPPLQQPYGVFHSGTITRPFGENQIQMPMPQPGGIRPGDGMIRPCLVGPLPGHHGAVLPSFDLERLGQPRPLGMLNSNDFGGEGFNASGGAAPPFANHRSAGLHEDFPRKQNATASHPDFLSHGAEFDHHRAIGMPNFRNPGPFAQGTSGGPGGPPKHQLGSGNLPGNLHSFEGDMHPGDPHLVAEYAQHGFPKTAAHFGLGGFLRNGNSGWCRICMFNCGSAENLDLHVQTREHQQCAMDIVLKMKQDVAKRNYGGPKSFNNKKVSGKGHFRGNRR

SEQ ID NO: 175301 - protein, 1068 aa, Zea Mays
MGFDNECILSIQSLPGEYFCPVCRTLVYPNEALQTQCTHLYCKSCLAYVVATTQACPYDGYLVTEADSKPLVESNKTLAETIGKVAVYCLYNKSGCQWHGELSACVTHGTACAYGNSPVVCNRCGTQIVHRQVQEHAQVCHGLQSQTQQADGSQVQLATATTQPVIQDSSLASAGSAAAAATTLTKPSSTTATAVTDSAAATGGAAGATTAAVPSSASSISASQTPTAEQWYQQQQQLQYSQYYQQQHPGSNPYMQQHQQYDQYQQAYQQYMQPPMQVPSQNVVQGSAQPASYVQPQVQSSQVMMQAQSQPQVHPLTSQPQLQQHPVQPRPQSHPHISHVQAPSGQSQLHQPIQSAQVPQVQPSQVPLQPSGLQVQSAAHPSAPTQVGNQQFATQAMAYQVQPHVQAQPPQQQHIVAHQQHPHMQALPLQQNIQPKMQLNSQVQLQPPHVQQQAYPQSQVYPQQTHHMHSQNTTYAQQQTQGALMQPVHVSHQQTHVSHHPAPMRPPSSGHQPALQHPQAQGIQHTSQHEKHIGFHAQWPTMYSNIPSQAPPQGLSVHSSVSSQSVQSYQQGMSSSQQMHSQPGQPYTQQHVTGNTGQHVQTSAGRPMAHLAPTQQFQQQHPAMLRTESPAAGHSIGQGPLDLEKHTSKSGKLDNATIAAVGENKNSGPESVVMRPTKSQLGDENMNSEHNGFVGVRKDAVQTGIVSHNLDGSIRRDGNTDQAGNSHGPLVQGGKDHKASDASTDHEKGRLFQQASLQNAGAPGSYVPPGVVPHPSGPDKMLPQHMTNHGHMHGFSENIRPPLQQPYGVFHSGTITRPFGENQIQMPMPQPGGIRPGDGMIRPCLVGPLPGHHGAVLPSFDLERLGQPRPLGMLNSNDFGGEGFNASGGAAPPFANHRSAGLHEDFPRKQNATASHPDFLSHGAEFDHHRAIGMPNFRNPGPFAQGTSGGPGGPPKHQLGSGDMHPGDPHLVAEYAQHGFPKTAAHFGLGGFLRNGNSGWCRICMFNCGSAENLDLHVQTREHQQCAMDIVLKMKQDVAKRQKLNYGGPKSFNNKKVSGKGHFRGNRR

SEQ ID NO: 175302 - protein, 55 aa, Zea Mays
MNKMLSNDCLGTQEPHTFCKTTETLEHSHPQEVTLDKTVAGSTLISHQNGCAFVI

SEQ ID NO: 175303 - protein, 519 aa, Zea Mays
MATGALLQPWSLLGFLAALAALWWACRVLQSTLIVPRRLGRALRSQGLRGTTYRFPFGDLKELARLAVAARAKAMPLSHDITPRVNRLYYNVIGEHVSVTWLGPTPRVIVNDPKLVREILANKLGHFQKRKHDGIVRRLASGLVNHEGEKWAAHRKLISPAFHLEKLKKMLPAFASCSDELIARWAGYVGSDGAREIDVWPEFQNLTGDVISRTAFGSSFSEGRRIFEIQCEQVQNLVKLMNTLYLPGFRFLPTQLNRRLKANAREVQALLRGIVSKRERAMKEGRANNDDLLGVLMESNIAETRQDGSSEPVMTMDDIIGELKLFYFAGMDTTAVLLTWTMVVLSAHPEWQERAREEVRRVFGNNRPDLDGIQQLKTVTMILYEVLRLYPPVVQLDRQTHNEVELGGVTYPPGVLLSLPIVFVHHDKDVWGEDADEFSPERFKDGVSRASKDSPAFFPFGWGPRICVGQNFALVEAKMALSSILQHFSFALSQSYTHAPFPVSTLQPEHGAHLMLKKL

SEQ ID NO: 175304 - protein, 232 aa, Zea Mays
MSSGGGDHHGVYHQQHGHGHGHLARADGAEYAFHGNDDMESFFFNHPASAGLDGGGSRTTGADELLAPYSSITDYLQGLLDPSGLARHLDAPLKHELSVDASHDSQGTSGAPGGEAAAMHTPNSSVSLSSSDRDGEGQQPRRCKKGRTNKAEDAEGDEKDQQDGENSTKANKSKKKAEKRQRQPRVAFLTKSEVDHLEDGYRWRKYGQKAVKNSPYPRSVYILFFVPHLCSL

SEQ ID NO: 175305 - protein, 425 aa, Zea Mays
MDKDYVTAETLVLVKDLLRKYPQWSHDCIAVVGNISSKNIQEPKGKAALIWMLGEYSQDMHDAPYILENLVENWDEEHSPEVRLHLLTAVMKCFFKRPPETQKALGATLSAGLSDTQQDVHDRALFYYRLLQYNPNVAERVVNPPKQAVSVFADTQSSETKDRIFDEFNSLSVVYQKPSYMFTDREHREPFEYSEDLTSLTVGAEDPENVISAQRYQENDNDLLLSTSDKEDNGTRASNGSSTSAYNAPSDLISPSLISSQTPAETSLVNTGGPTHSSQSNFSLDDLLGIGVTEAPAPTPPALTLNSKPVLDPGTFQRKWGQLALALSQECSLSPQGAASLMNPQSLIRHMQSNYIQCIASGGQPPNYKFFFYAQKDGATAFFLVECIVNTASAKAQLKIKADDGTAAEAFSTLFQSALSKFGLS

SEQ ID NO: 175306 - protein, 501 aa, Zea Mays
MAPTVPSAAKSASPSQPSGKSEVTDLKQQLRQLAGSRAPDADAQRRDVFKRVISCMTAGIDVSAAFGEMVLCSATSDVVTKKMCYLYVGAHARAHPDLALLTINFLQRDCQDQDPTIRGLALRSLCSLRVPNLVEYLVTPLTTGLKDPSAYVRMIAAVGAAKLYHISATACIDADLPASLKALMLSDPDAQVVANCLHALQEIWALEAAKSEAAAREIETLHSKPVVFYLLNKIKEFSEWAQCIVLELASKFLPSDNNEIFDIMNLLEDRLQHANGAVVLATIKVFLHLTMSMTDVHQQVYERIKAPLLTLVGAGSPEQSYSVLCHLHLLVMRAPMLFSSDYKSFYCQFSDPSYVKKLKLEMLTAIANESNTYEIVTELCEYAGNVDVPIARESIRAVGKIALQQYDVNAIVDRLLQFLEMDKDYVTAETLVLVKDLLRKYPQWSHDCIAVVGNISSKNIQEPKGKAALIWMLGEYSQDMHDAPYILENLVENWDEEHSPE

SEQ ID NO: 175307 - protein, 983 aa, Zea Mays
MAPTVPSAAKSASPSQPSGKSEVTDLKQQLRQLAGSRAPDADAQRRDVFKRVISCMTAGIDVSAAFGEMVLCSATSDVVTKKMCYLYVGAHARAHPDLALLTINFLQRDCQDQDPTIRGLALRSLCSLRVPNLVEYLVTPLTTGLKDPSAYVRMIAAVGAAKLYHISATACIDADLPASLKALMLSDPDAQVVANCLHALQEIWALEAAKSEAAAREIETLHSKPVVFYLLNKIKEFSEWAQCIVLELASKFLPSDNNEIFDIMNLLEDRLQHANGAVVLATIKVFLHLTMSMTDVHQQVHMLLPESWGRKGYGGAGVVAGAGGALCWGSGKPEMGSEGRESGGLALGDKGSGGRWGGGSVGGRGHKGRGGGWRQCQGQGGRRSGHDGDAPIAGKAVGEFCDTGDVLVAAAAPEVVGMVVVTGETEGWGGSSDILGSVYERIKAPLLTLVGAGSPEQSYSVLCHLHLLVMRAPMLFSSDYKSFYCQFSDPSYVKKLKLEMLTAIANESNTYEIVTELCEYAGNVDVPIARESIRAVGKIALQQYDVNAIVDRLLQFLEMDKDYVTAETLVLVKDLLRKYPQWSHDCIAVVGNISSKNIQEPKGKAALIWMLGEYSQDMHDAPYILENLVENWDEEHSPEVRLHLLTAVMKCFFKRPPETQKALGATLSAGLSDTQQDVHDRALFYYRLLQYNPNVAERVVNPPKQAVSVFADTQSSETKDRIFDEFNSLSVVYQKPSYMFTDREHREPFEYSEDLTSLTVGAEDPENVISAQRYQENDNDLLLSTSDKEDNGTRASNGSSTSAYNAPSDLISPSLISSQTPAETSLVNTGGPTHSSQSNFSLDDLLGIGVTEAPAPTPPALTLNSKPVLDPGTFQRKWGQLALALSQECSLSPQGAASLMNPQSLIRHMQSNYIQCIASGGQPPNYKFFFYAQKDGATAFFLVECIVNTASAKAQLKIKADDGTAAEAFSTLFQSALSKFGLS

SEQ ID NO: 175308 - protein, 338 aa, Zea Mays
MAPTVPSAAKSASPSQPSGKSEVTDLKQQLRQLAGSRAPDADAQRRDVFKRVISCMTAGIDVSAAFGEMVLCSATSDVVTKKMCYLYVGAHARAHPDLALLTINFLQRDCQDQDPTIRGLALRSLCSLRVPNLVEYLVTPLTTGLKDPSAYVRMIAAVGAAKLYHISATACIDADLPASLKALMLSDPDAQVVANCLHALQEIWALEAAKSEAAAREIETLHSKPVVFYLLNKIKEFSEWAQCIVLELASKFLPSDNNEIFDIMNLLEDRLQHANGAVVLATIKVFLHLTMSMTDVHQQVHMLLPERFMNVLKHPCLLWWVLAVLNSHTLCYAIYIFW

SEQ ID NO: 175309 - protein, 410 aa, Zea Mays
MNGGGGRRRYSSEQLLFDVPSNAGAGRWAQQFQVPGMYDGAQKFGYGGGLDESDMRFTANKLMSKSAVFPDGNYLKAFTEKEKAAPVAKIKVVVRKRPLNKKEVSKKEEDIIDIEQRSNSLTVHETKLKVDLTEYVEKHEFVFDAVLDEDVSNDEVYRETVEPVVPSIFNRTKATCFAYGQTGSGKTYTMRPLPLKASQDILRLMHHAYRNQGFQLHVSFFEIYGGKLFDLLNDRSKLCMREDAKQKVCIVGLQEYRVSDVETIKELIEKGSATRSTGTTGANEESSRSHAILQLAIKRRVDGNDSKPPRPVGKLSFIDLAGSERGADTSDNDKQTRIEGAEINKSLLALKECIRALDNDQTHIPFRGSKLTEVLRDSFIGDSRTVMISCISPSSGSCEHTLNTLRYADR

SEQ ID NO: 175310 - protein, 456 aa, Zea Mays
MRPLPLKASQDILRLMHHAYRNQGFQLHVSFFEIYGGKLFDLLNDRSKLCMREDAKQKVCIVGLQEYRVSDVETIKELIEKGSATRSTGTTGANEESSRSHAILQLAIKRRVDGNDSKPPRPVGKLSFIDLAGSERGADTSDNDKQTRIEGAEINKSLLALKECIRALDNDQTHIPFRGSKLTEVLRDSFIGDSRTVMISCISPSSGSCEHTLNTLRYADRVKSLSKGSNAKKDVSLAVPLRESSPSPLPSVVPSFSASEVMNDITERNNFGWPKQQYVKERPAPTFVERMPKVKDAVEFATSDGAYLKGQRSQGCMAPNIAEIPDTMYQQRRQPARKAKDTALRNNMRNSVAYPTRSVEPDEDDHLNNLLQEEEGLVSAHREQVEATLDILKEEMNILGEADQPGFQLDDYNITRLSSILSQKAAGIVDLQARLEQFQRLLDENNVLLYAQSPRL

SEQ ID NO: 175311 - protein, 167 aa, Zea Mays
MLSVSIEVPGEEPYHFQPRLFSKIIPEKCKYQVLSTKVEIRLAKAEQVTWTTLDYSGRPKTVPQKISTPAETAPRPSYPSSKAKKDWDKLEAEVKKEEKEEKLDGDAALNKFFRDIYKDADEDMRRAMMKSFVESNGTVLSTNWKDVGAKKVEGSPPDGMELKKWEY

SEQ ID NO: 175312 - protein, 353 aa, Zea Mays
MAASDLESKAKEAFVDDDFELATELYSQAIDAGPATADLYADRAQAHIKLGNYTAIELDPMMHKAYYRKGAACIKLEEYQTAKAALELGSSYASGDSRFARLLKECDERIAEESSQAPVKNVEATVAATIEDKEDFTNMENTPPVIEPPSKPKYRHDYYNSATEVVLTIFAKGVPADSVVIDFGEQMLSVSIEVPGEEPYHFQPRLFSKIIPEKCKYQVLSTKVEIRLAKAEQVTWTTLDYSGRPKTVPQKISTPAETAPRPSYPSSKAKKDWDKLEAEVKKEEKEEKLDGDAALNKFFRDIYKDADEDMRRAMMKSFVESNGTVLSTNWKDVGAKKVEGSPPDGMELKKWEY

SEQ ID NO: 175313 - protein, 387 aa, Zea Mays
MAEDDMELWKWVLLPRIRTVTTMLMRIERNKFLIDFLSWEVATTLQVVGTQKNRCTINPGDSCKPKWYSPVGRSFYSPNLGRRQKLGEGLESWRGFYQSIRPTQMGLSLNIDMSSTAFIEPLPVIDFVAQLLNRDISVRPLSDSDRVKIKKALRGVKVEVTGNMRRKYHISGLTSQATRELSFPVDDRGTVKTVVQYFMETYGFSIQHTTLPCLQVGNQQRPNYLPMEVCKIVEGQHYSKRLNEKQITALLKVTCQRPQERELDILQGLRSGLVELWEAANCRRWLVSARSGGRWQTGSRHHGRRLRWRAGGVAEMWNCRPAAVRLCRWSVERGGVGDEPPLTMASAGRRGSKQRQATATYGHFTGVLDSGSLVVVGGGPAATRSRT

SEQ ID NO: 175314 - protein, 233 aa, Zea Mays
MGNRASRHHRHATEQQPETPTLPKPQIQPPPPPTQTQQYQQAPPPPKPKPAADARAVGRVLGRPMEDVKATYTFGRELGRGQFGVTYLVTHRETGQRFACKSIATRKLVHRDDIEDVRREVQIMHHLTGHRNIVELRGAYEDRRSVNLAMELCEGGELFDRIIARGHYTERAAAALCREIVAVVHSCHSMGVFHRDLKPENFLFLNNKEDSPLKATDFGLSVFFKPDADVELT

SEQ ID NO: 175315 - protein, 355 aa, Zea Mays
MCPTRELANQLAAEARKLLKYHRSLGVQVVIGGTRLPQEQRSMQANPCQILVATPGRLKDHLENTPGFSTRIRGVKVLVLDEADRLLDMGFRRDIEKIITFIPKDRQTLLFSATVSEEIHQISHLAMRKDYDFINAVQEGDEETHAQVIVFCTTAMVTRLVAEVLSQLKLNIREIHSRKTQSARTKVSDEFRKSKGLILVSSDVSARGVDYPDVTLVMQVGLPADREQYIHRLGRTGRKGKEGQGILLLAPWEMHFLSTVNDLSISEAATPSVDSSIQAAVKDAVRRVEMKSKESAYQAWLGYYNSHKATNRDKARLVMLAEEFSQSIGLAVPPAIPKQILRKMGLSNVPGLRSS

SEQ ID NO: 175316 - protein, 227 aa, Zea Mays
MFLQKRRQEQGKQLPFWELANQLAAEARKLLKYHRSLGVQVVIGGTRLPQEQRSMQANPCQILVATPGRLKDHLENTPGFSTRIRGVKVLVLDEADRLLDMGFRRDIEKIITFIPKDRQTLLFSATVSEEIHQISHLAMRKDYDFINAVQEGDEETHAQVNQTYMVAPLGLHLPILYDVLKKHVAEDAEYKVIVFCTTAMVTRLVAEEVKGSHISQLRRICPWCRLS

SEQ ID NO: 175317 - protein, 307 aa, Zea Mays
MLLDDYWERMGLKVPIYFSAGLTIQANVYYKMLIGWTSQKIKDSHTVHNPFDFKHVCHFERSFINNPGPCVLFATPGMITGGFSLEAFKKWAPSEKNLVTLPGYCVSGTIGHKLMCGKPTRVDYEDTHIDVRCQIHQLAFSPHTDSKGIMDLTEFLSPKNVILVHGEKPQMAFLKERIESELGMPCYYPGNNESVSIPTTQNLKMSATERFITGCAVEQGKRSLHKRNLIYGTGLSEEIGSDEAAGEGVLLMQKHKSPKILCEDELLEVLGMGRHLVQFEPMVSRIVAAVESELQRAKAADLDNDGK

SEQ ID NO: 175318 - protein, 284 aa, Zea Mays
MLEDYRKVTMGQRGEEKQYSYEDILRCMKKVTPMDLKQTVQVDKDLVIRAYYAGHVIGAAMIYAKVGDAAMVYTGDYNMTPDRHLGAAQIDRLKLDVLITESTYAKSIRDSKPAREREFLKAVHKCVSGGGKVLIPTFALGRAQELCMLLDDYWERMGLKVPIYFSAGLTIQANVYYKMLIGWTSQKIKDSHTVHNPFDFKHVCHFERSFINNPGPCVLFATPGMITGGFSLEAFKKWAPSEKNLVTLPGYCVSGTIGHKLMCGKPTRVDYEDTHIDVRCQGCV

SEQ ID NO: 175319 - protein, 321 aa, Zea Mays
MVAGAGTATGTRSGRVTNHHCERGPAFEYPTKALAPFMLEDYRKVTMGQRGEEKQYSYEDILRCMKKVTPMDLKQTVQVDKDLVIRAYYAGHVIGAAMIYAKVGDAAMVYTGDYNMTPDRHLGAAQIDRLKLDVLITESTYAKSIRDSKPAREREFLKAVHKCVSGGGKVLIPTFALGRAQELCMLLDDYWERMGLKVPIYFSAGLTIQANVYYKMLIGWTSQKIKDSHTVHNPFDFKHVCHFERSFINNPGPCVLFATPGMITGGFSLEAFKKWAPSEKNLVTLPGYCVSGTIGHKLMCGKPTRVDYEDTHIDVRCQGCV

SEQ ID NO: 175320 - protein, 63 aa, Zea Mays
MLTCIGRTAVLHNEMHVNLGRYQMDEYLSSLDALLPIRLLDTWSLGCQLTLVLDSKTVLGSDS

SEQ ID NO: 175321 - protein, 620 aa, Zea Mays
MVPKEHGDIQALYHDDGVKGWPPANGSKEQQGRRPALDRKRARFAMKDTGSKPVPVVDQSKLSNISDPITFFMTLDRLEEAEEEIKRLNGEAEKRTLNFDPVDEPIRQPGLRGRKSVRSFKVIEDVGTQDPNEAPASQTATMTGSQLSQDVMHAVAGKNGRSVSSRSSEAISEKEVSLAEKDGRDDLTYILTSIQDLDESEEEEFIRKTLGIKETRKERVSLRNSILGVRSLRSNTEQKGSMKVHPPESHLPQTRQDRISELEKHLFPGGAANAKCTDDESEGSPDIVMGEPSLVHYSSDVLMTDENFTASDVDRETPNLGARAADPVLDPEPNLPDHAYERQPGGSSLGLYRDTEVGVAKENETCNRSNISVEEDDVPIDYITIGRSTNETEVSSSHPLEGSSTEELVTKPGRHAAPDGICRTSHAAEDSIQHLEAVKEGGVLQDKSSQLLEMPQEDINPLNQAQMHGGSTKKSAPDLSPTKQKKQQAVQERKRKQQSKRGKKVAGESLEIPQTNFESENQPHNDDVNIEKQTITSSTLSPNGAKGQKGAQRRNQTKKRNQRKILGDADLACQPGVRKSSRTRSRPLEYWLGERLLYGPIHDSTYTDLALVSAMHIFFL

SEQ ID NO: 175322 - protein, 94 aa, Zea Mays
MVGSRNVRDRQPLMGAEDFAFYAEAVPSTYYYFVGMYNETRGPQAPHHSPYFTINEDALPYGAAGQAALAARYLLERQQPAAATADKAETHDEL

SEQ ID NO: 175323 - protein, 314 aa, Zea Mays
MHGCGHDAHVAMLLGSAKILQEHRDELKGTVVLVFQPAEEGGGGAKKMIEDRAVENIDAIFGLHIADSVPIGVLASRPGPIMAGSGFFEAVISGKGGHAALPHHTIDPILAASNVIVSLQQLVSREADPLDSQVVTVGKFQGGGAFNVIPDSVTIGGTFRAFLKESFNQLKQRIEEVIVSQASVQRCSAAVDFLSKDRPFFPPTINSPELHDFFVNVAGEMVGSRNVRDRQPLMGAEDFAFYAEAVPSTYYYFVGMYNETRGPQAPHHSPYFTINEDALPYGAAGQAALAARYLLERQQPAAATADKAETHDEL

SEQ ID NO: 175324 - protein, 269 aa, Zea Mays
MVGVRRRIHENPELGYEEFQTSELVRRELHAMGIPYRHPFAVTGVVATVGTGGPPFVALRADMDALPLQESVEWEHKSKVPGKMHGCGHDAHVAMLLGSAKILQEHRDELKGTVVLVFQPAEEGGGGAKKMIEDRAVENIDAIFGLHIADSVPIGVLASRPGPIMAGSGFFEAVISGKGGHAALPHHTIDPILAASNVIVSLQQLVSREADPLDSQVVTVGKFQGGGAFNVIPDSVTIGGTFRAFLKESFNQLKQRIEEFQCGLSCRGD

SEQ ID NO: 175325 - protein, 320 aa, Zea Mays
MATTAASSLLKSSFAGSRLPSATRTTTPSSVAVATPRAGGGPIRASISSSPTPPYDLTSFRFSPIKESIVSREMTRRYMTDMITHADTDVVIVGAGSAGLSCAYELSKDPTVSVAIVEQSVSPGGGAWLGGQLFSAMVVRRPAHLFLDELGVGYDEAEDYVVVKHAALFTSTVMSRLLARPNVKLFNAVAVEDLIVRRGRVGGVVTNWALVSMNHDTQSCMDPNVMEALDMNAAEDEIVRLTREVVPGMIVTGMEVAEIDGAPRMGPTFGAMMISGQKAAHLALKALGRPNAVDGTIPEVSPALREEFVIASKDDEVVDA

SEQ ID NO: 175326 - protein, 218 aa, Zea Mays
MATTAASSLLKSSFAGSRLPSATRTTTPSSVAVATPRAGGGPIRASISSSPTPPYDLTSFRFSPIKESIVSREMTRRYMTDMITHADTDVVIVGAGSAGLSCAYELSKDPTVSVAIVEHAVPGMKALDMNAAEDEIVRLTREVVPGMIVTGMEVAEIDGAPRMGPTFGAMMISGQKAAHLALKALGRPNAVDGTIPEVSPALREEFVIASKDDEVVDA

SEQ ID NO: 175327 - protein, 274 aa, Zea Mays
MTRGGGGQGGKEEPGKVMGPLFPRLHVSDAGKGGGPRAPPRNKMALYEQFTVPSNRFSSPAASARAAGASLVPSTAAAQVYGYDRTLFQPFDVPSNEPPRSSEKFKGNTINGQSNSTRREPLRMSSQTKNKDVCASKSIAKCTSQHRVGNTIMSSGKKVVSDDEFMVPSICYPRFYRQSTQDHADKSKPQSTTNPHKSPAMSKSSVECYSTVNKHLDKINEADRRLMNSPKVKEKEAVQGSKAVEVKEKSSSFQASEKFKDKYAKLCQMRNKEV

SEQ ID NO: 175328 - protein, 84 aa, Zea Mays
MVGTADCALSDLALLGEEPGARGGSPLIIMTLAPNTQCRILHAPAPPCPRQRSSSARPVECKEIHPRVGGFVSPSIGKSFLVGL

SEQ ID NO: 175329 - protein, 456 aa, Zea Mays
MHIYYVQVLRVIRLMHGVSIHGSDSSKLKMDHNLSDMTILSEHAWGDEAGAVLLSPPEVGSVIEGGGGMTVLERLVLDEALAAAILELQAIQQAAPGPASCAGKQQLAAGGGGGVVGAEAAVAFPSMMAMAMAAPTPAYADADVDAGVLQRQQHHHRPHAAMGMPSPDYDLAPAAAATPAVAVTAAAPPAFTTNTNAAVDSGCSGLVVLGRSPPPPVFSASNETAATASLDCEHGGGGRGGGRRQRRPNRKRKAAAEAERSRPVRVAAAAAQEESTLCSLLASTAPTTAGGIQIAFSTAAVHQQQHAAGGAGGAKTSAKPSSLSLSSSGSSSNISFDGRNPARNVRISSDPQTVAARQRRERISDRLRVLQKLVPGGAKMDTASMLDEAASYLRFLKSQVRDLQTLDRRNYGAASSNDAAATMAAVVGSSLSYNRGTGAMPAFTFPAAGETLRGAG

SEQ ID NO: 175330 - protein, 210 aa, Zea Mays
MDTQIAYSLIQEQEQKGKKKTSDDYNYISFVSLLADKRYCGIPYPEKEEVRILLRQDPNFWTIRPLSDMMVRAATDDVRFLLNIYEKMMEKLNKVSLWRLAVRSELYCRCFCLNDNQFADWSPLPPVPDGIEADVYVPEVDILSVLDVPHGKMGRVIGRKGSTIMVVKESCNVEIHIGGAKGPPDRVFIIGSVNEVRKAEAIFRGRMLEF

SEQ ID NO: 175331 - protein, 235 aa, Zea Mays
MLLRVEKNLFKLALYFQFGIKLHNVMDTQIAYSLIQEQEQKGKKKTSDDYNYISFVSLLADKRYCGIPYPEKEEVRILLRQDPNFWTIRPLSDMMVRAATDDVRFLLNIYEKMMEKLNKVSLWRLAVRSELYCRCFCLNDNQFADWSPLPPVPDGIEADVYVPEVDILSVLDVPHGKMGRVIGRKGSTIMVVKESCNVEIHIGGAKGPPDRVFIIGSVNEVRKAEAIFRGRMLEF

SEQ ID NO: 175332 - protein, 140 aa, Zea Mays
MLSQLAENSTIPSSPSILPQIQRLQLTPTHRSAPHPSPPISFHCAPLQKLPSPNPPHSTTPRSKKTRKGSSRPQRPSSPSTPTSPTRWRPRRRRRPQGRSPRPRSGCPRPSPPARRAARRRGRRRPRRAWRPTRSTSSRC

SEQ ID NO: 175333 - protein, 239 aa, Zea Mays
MANKVVATKARTIIIVRRGEKTPKKKNSSRSRGGKEAEGQTSREEALASGTRHGGDSPELRRRRREAHVSIAILFVRTSPEAAQDQGVDKQSSAAAESSKRRKEQEQQQPAVPWAKLLSECSQKMVVFVMRQAVWNAVTNNEVVQGFRRSLHDETRLSYMLSCGSLERLLNMRNLKLWMVRMTMMKTMMMIMIQRRTRELLEGKGNRENDLQSASSSERRCALCKALELPLLQSLNLQR

SEQ ID NO: 175334 - protein, 193 aa, Zea Mays
MANKVVATKARTIIIVRRGEKTPKKKNSSRSRGGKEAEGQTSREEALASGTRHGGDSPELRRRRREAHVSIAILFVRTSPEAAQDQGVDKQSSAAAESSKRRKEQEQQQPAVPWAKLLSECSQKMVVFVMRQAVWNAVTNNEVVQGFRRSLHDEEQGNCWRGRATGKTTYKVQAAVSGGVLFAKPWSCLSCKV

SEQ ID NO: 175335 - protein, 179 aa, Zea Mays
MLSGERVLIASHDGTVKMWDVRTDTCVVTVGRCQSAVLCMEYDDSTGILAAAGRDITAHVWDIRSSKQMFKLQGHTKWIRSMRMTGETIITGSDDWTARVWSLNRGTCDAVLACHAGPVLCVEYSPSDKGIITGSADGLIRFWENEGTKSSHCLLEDHKHRRNKMRQESYTSHSIRSVH

SEQ ID NO: 175336 - protein, 532 aa, Zea Mays
MMVLLVAFTSFWDGYFEYLMENCSNKSANYVTLVTAQLILMATHMAGLGLPDIDSWNMIEKIAERNNLGYKQLIKLRALLTHLQQLRIGYWGVATGKSQPLQSYGMASPHAIDVIDESQQPAEASGLGRSWVQSMFSRDRSLRASSFNRASDGNAVAATGKTEISAAQKKTQTNMRTLRGHTGAITALHCVTRKEVWDLVGDREDAGFFISGSTDCTVKIWDPSLRGSELRATLKGHTRAIRTISSDRGKIVSGADDQSVIVWDKQTFKLLEELKGHEAPVSSVRMLSGERVLIASHDGTVKMWDVRTDTCVVTVGRCQSAVLCMEYDDSTGILAAAGRDITAHVWDIRSSKQMFKLQGHTKWIRSMRMTGETIITGSDDWTARVWSLNRGTCDAVLACHAGPVLCVEYSPSDKGIITGSADGLIRFWENEGGIKCVKNLTLHTASVLSISASDHWLAIGAADNSMSLFHRPQERFGGFSNAGSKVAGWQLYRTPQKTAAVVRCIASDLDRKRICSGGRNGLLRLWDATTSI

SEQ ID NO: 175337 - protein, 863 aa, Zea Mays
MGIDFMKINLANMGDLRAGTKSWSQEHDFQLRLIFLRFFAQILSGYRNFIDTTSATGFNSQAFLKKRSRATNQPVDSMSMIMQFLETQGFLDYLERCNTAEENAHNLLDKLQDATGRGQNPLTIFPSQVSDPEIITIANPEIEGSRLDNRHCYKRFPANARTEEQEEKRKSILALASGASKQVPSSPSIRVNGGPKAESLSPRERAAERERMVLDIKVKLQGLWLRLLRLGATEDPLSSFEYGTILALIESDAEGIGGSGFVECIREHIHSGWQCRLTDEQFIAVKELLKMAITLANSRNDLATIRDALEVSAEMYRKDPNNVQDYVQRHLLSLSVWEELRFWDGYFEYLMENCSNKSANYVTLVTAQLILMATHMAGLGLPDIDSWNMIEKIAERNNLGYKQLIKLRALLTHLQQLRIGYWGVATGKSQPLQSYGMASPHAIDVIDESQQPAEASGLGRSWVQSMFSRDRSLRASSFNRASDGNAVAATGKTEISAAQKKTQTNMRTLRGHTGAITALHCVTRKEVWDLVGDREDAGFFISGSTDCTVKIWDPSLRGSELRATLKGHTRAIRTISSDRGKIVSGADDQSVIVWDKQTFKLLEELKGHEAPVSSVRMLSGERVLIASHDGTVKMWDVRTDTCVVTVGRCQSAVLCMEYDDSTGILAAAGRDITAHVWDIRSSKQMFKLQGHTKWIRSMRMTGETIITGSDDWTARVWSLNRGTCDAVLACHAGPVLCVEYSPSDKGIITGSADGLIRFWENEGGIKCVKNLTLHTASVLSISASDHWLAIGAADNSMSLFHRPQERFGGFSNAGSKVAGWQLYRTPQKTAAVVRCIASDLDRKRICSGGRNGLLRLWDATTSI

SEQ ID NO: 175338 - protein, 854 aa, Zea Mays
MGIDFMKINLANMGDLRAGTKSWSQEHDFQLRLIFLRFFAQILSGYRNFIDTTSATGFNSQAFLKKRSRATNQPVDSMSMIMQFLETQGFLDYLERCNTAEENAHNLLDKLQDATGRGQNPLTIFPSQVSDPEIITIANPEIEGLDNRHCYKRFPANARTEEQEEKRKSILALASGASKQVPSSPSIRVNGGPKAESLSPRERAAERERMVLDIKVKLQGLWLRLLRLGATEDPLSSFEYGTILALIESDAEGIGGSGFVECIREHIHSGWQCRLTDEQFIAVKELLKMAITLANSRNDLATIRDALEVSAEMYRKDPNNVQDYVQRHLLSFFWDGYFEYLMENCSNKSANYVTLVTAQLILMATHMAGLGLPDIDSWNMIEKIAERNNLGYKQLIKLRALLTHLQQLRIGYWGVATGKSQPLQSYGMASPHAIDVIDESQQPAEASGLGRSWVQSMFSRDRSLRASSFNRASDGNAVAATGKTEISAAQKKTQTNMRTLRGHTGAITALHCVTRKEVWDLVGDREDAGFFISGSTDCTVKIWDPSLRGSELRATLKGHTRAIRTISSDRGKIVSGADDQSVIVWDKQTFKLLEELKGHEAPVSSVRMLSGERVLIASHDGTVKMWDVRTDTCVVTVGRCQSAVLCMEYDDSTGILAAAGRDITAHVWDIRSSKQMFKLQGHTKWIRSMRMTGETIITGSDDWTARVWSLNRGTCDAVLACHAGPVLCVEYSPSDKGIITGSADGLIRFWENEGGIKCVKNLTLHTASVLSISASDHWLAIGAADNSMSLFHRPQERFGGFSNAGSKVAGWQLYRTPQKTAAVVRCIASDLDRKRICSGGRNGLLRLWDATTSI

SEQ ID NO: 175339 - protein, 1029 aa, Zea Mays
MVSHVTLPTPGKNRVLFAIENCLLSAEAPPKEWLPHADISFQPLVQCLDVDKLILLFTAVLLERRILLRSNKYTLLTLVSEAICHLIYPIRWQHVYIPIIFSSGVDYIDAPTPYMMGLHSGVDTSAVTMDGVVVVDLEYNRITITEEIPPIPETEHNFLRVEILKLLQPNVMGIDFMKINLANMGDLRAGTKSWSQEHDFQLRLIFLRFFAQILSGYRNFIDTTSATGFNSQAFLKKRSRATNQPVDSMSMFLETQGFLDYLERCNTAEENAHNLLDKLQDATGRGQNPLTIFPSQVSDPEIITIANPEIEGLDNRHCYKRFPANARTEEQEEKRKSILALASGASKQVPSSPSIRVNGGPKAESLSPRERAAERERMVLDIKVKLQGLWLRLLRLGATEDPLSSFEYGTILALIESDAEGIGGSGFVECIREHIHSGWQCRLTDEQFIAVKELLKMAITLANSRNDLATIRDALEVSAEMYRKDPNNVQDYVQRHLLSLSVWEELRFWDGYFEYLMENCSNKSANYVTLVTAQLILMATHMAGLGLPDIDSWNMIEKIAERNNLGYKQLIKLRALLTHLQQLRIGYWGVATGKSQPLQSYGMASPHAIDVIDESQQPAEASGLGRSWVQSMFSRDRSLRASSFNRASDGNAVAATGKTEISAAQKKTQTNMRTLRGHTGAITALHCVTRKEVWDLVGDREDAGFFISGSTDCTVKIWDPSLRGSELRATLKGHTRAIRTISSDRGKIVSGADDQSVIVWDKQTFKLLEELKGHEAPVSSVRMLSGERVLIASHDGTVKMWDVRTDTCVVTVGRCQSAVLCMEYDDSTGILAAAGRDITAHVWDIRSSKQMFKLQGHTKWIRSMRMTGETIITGSDDWTARVWSLNRGTCDAVLACHAGPVLCVEYSPSDKGIITGSADGLIRFWENEGGIKCVKNLTLHTASVLSISASDHWLAIGAADNSMSLFHRPQERFGGFSNAGSKVAGWQLYRTPQKTAAVVRCIASDLDRKRICSGGRNGLLRLWDATTSI

SEQ ID NO: 175340 - protein, 1032 aa, Zea Mays
MVSHVTLPTPGKNRVLFAIENCLLSAEAPPKEWLPHADISFQPLVQCLDVDKLILLFTAVLLERRILLRSNKYTLLTLVSEAICHLIYPIRWQHVYIPIIFSSGVDYIDAPTPYMMGLHSGVDTSAVTMDGVVVVDLEYNRITITEEIPPIPETEHNFLRVEILKLLQPNVMGIDFMKINLANMGDLRAGTKSWSQEHDFQLRLIFLRFFAQILSGYRNFIDTTSATGFNSQAFLKKRSRATNQPVDSMSMIMQFLETQGFLDYLERCNTAEENAHNLLDKLQDATGRGQNPLTIFPSQVSDPEIITIANPEIEGLDNRHCYKRFPANARTEEQEEKRKSILALASGASKQVPSSPSIRVNGGPKAESLSPRERAAERERMVLDIKVKLQGLWLRLLRLGATEDPLSSFEYGTILALIESDAEGIGGSGFVECIREHIHSGWQCRLTDEQFIAVKELLKMAITLANSRNDLATIRDALEVSAEMYRKDPNNVQDYVQRHLLSLSVWEELRFWDGYFEYLMENCSNKSANYVTLVTAQLILMATHMAGLGLPDIDSWNMIEKIAERNNLGYKQLIKLRALLTHLQQLRIGYWGVATGKSQPLQSYGMASPHAIDVIDESQQPAEASGLGRSWVQSMFSRDRSLRASSFNRASDGNAVAATGKTEISAAQKKTQTNMRTLRGHTGAITALHCVTRKEVWDLVGDREDAGFFISGSTDCTVKIWDPSLRGSELRATLKGHTRAIRTISSDRGKIVSGADDQSVIVWDKQTFKLLEELKGHEAPVSSVRMLSGERVLIASHDGTVKMWDVRTDTCVVTVGRCQSAVLCMEYDDSTGILAAAGRDITAHVWDIRSSKQMFKLQGHTKWIRSMRMTGETIITGSDDWTARVWSLNRGTCDAVLACHAGPVLCVEYSPSDKGIITGSADGLIRFWENEGGIKCVKNLTLHTASVLSISASDHWLAIGAADNSMSLFHRPQERFGGFSNAGSKVAGWQLYRTPQKTAAVVRCIASDLDRKRICSGGRNGLLRLWDATTSI

SEQ ID NO: 175341 - protein, 1036 aa, Zea Mays
MGSSSRIFEYFVVCGLGPEIRSLDGIKGFHGVEEMYMSAFLDQFPPSNHALYPPPPPQLPTCVLPAGVRIYSSGLDTDDVSTYPRSYPIVLTEGDGSKIYVSCIAFRDPICEDIIEAYQIPANSFADKCICLVSHSPSFQVLRDALEEIFVLCFSPSGCSKPLWDIISHMVSHVTLPTPGKNRVLFAIENCLLSAEAPPKEWLPHADISFQPLVQCLDVDKLILLFTAVLLERRILLRSNKYTLLTLVSEAICHLIYPIRWQHVYIPIIFSSGVDYIDAPTPYMMGLHSGVDTSAVTMDGVVVVDLEYNRITITEEIPPIPETEHNFLRVEILKLLQPNVMGIDFMKINLANMGDLRAGTKSWSQEHDFQLRLIFLRFFAQILSGYRNFIDTTSATGFNSQAFLKKRSRATNQPVDSMSMIMQFLETQGFLDYLERCNTAEENAHNLLDKLQDATGRGQNPLTIFPSQVSDPEIITIANPEIEGSRLDNRHCYKRFPANARTEEQEEKRKSILALASGASKQVPSSPSIRVNGGPKAESLSPRERAAERERMVLDIKVKLQGLWLRLLRLGATEDPLSSFEYGTILALIESDAEGIGGSGFVECIREHIHSGWQCRLTDEQFIAVKELLKMAITLANSRNDLATIRDALEVSAEMYRKDPNNVQDYVQRHLLSLSVWEELRFWDGYFEYLMENCSNKSANYVTLVTAQLILMATHMAGLGLPDIDSWNMIEKIAERNNLGYKQLIKLRALLTHLQQLRIGYWGVATGKSQPLQSYGMASPHAIDVIDESQQPAEASGLGRSWVQSMFSRDRSLRASSFNRASDGNAVAATGKTEISAAQKKTQTNMRTLRGHTGAITALHCVTRKEVWDLVGDREDAGFFISGSTDCTVKIWDPSLRGSELRATLKGHTRAIRTISSDRGKIVSGADDQSVIVWDKQTFKLLEELKGHEAPVSSVRMLSGERVLIASHDGTVKMWDVRTDTCVVTVGRCQSAVLCMEYDDSTGILAAAGRDITAHVWDIRSSKQMFKLQGHTKWIR

SEQ ID NO: 175342 - protein, 1195 aa, Zea Mays
MGSSSRIFEYFVVCGLGPEIRSLDGIKGFHGVEEMYMSAFLDQFPPSNHALYPPPPPQLPTCVLPAGVRIYSSGLDTDDVSTYPRSYPIVLTEGDGSKIYVSCIAFRDPICEDIIEAYQIPANSFADKCICLVSHSPSFQVLRDALEEIFVLCFSPSGCSKPLWDIISHMVSHVTLPTPGKNRVLFAIENCLLSAEAPPKEWLPHADISFQPLVQCLDVDKLILLFTAVLLERRILLRSNKYTLLTLVSEAICHLIYPIRWQHVYIPIIFSSGVDYIDAPTPYMMGLHSGVDTSAVTMDGVVVVDLEYNRITITEEIPPIPETEHNFLRVEILKLLQPNVMGIDFMKINLANMGDLRAGTKSWSQEHDFQLRLIFLRFFAQILSGYRNFIDTTSATGFNSQAFLKKRSRATNQPVDSMSMIMQFLETQGFLDYLERCNTAEENAHNLLDKLQDATGRGQNPLTIFPSQVSDPEIITIANPEIEGLDNRHCYKRFPANARTEEQEEKRKSILALASGASKQVPSSPSIRVNGGPKAESLSPRERAAERERMVLDIKVKLQGLWLRLLRLGATEDPLSSFEYGTILALIESDAEGIGGSGFVECIREHIHSGWQCRLTDEQFIAVKELLKMAITLANSRNDLATIRDALEVSAEMYRKDPNNVQDYVQRHLLSLSVWEELRFWDGYFEYLMENCSNKSANYVTLVTAQLILMATHMAGLGLPDIDSWNMIEKIAERNNLGYKQLIKLRALLTHLQQLRIGYWGVATGKSQPLQSYGMASPHAIDVIDESQQPAEASGLGRSWVQSMFSRDRSLRASSFNRASDGNAVAATGKTEISAAQKKTQTNMRTLRGHTGAITALHCVTRKEVWDLVGDREDAGFFISGSTDCTVKIWDPSLRGSELRATLKGHTSSDRGKIVSGADDQSVIVWDKQTFKLLEELKGHEAPVSSVRMLSGERVLIASHDGTVKMWDVRTDTCVVTVGRCQSAVLCMEYDDSTGILAAAGRDITAHVWDIRSSKQMFKLQGHTKWIRSMRMTGETIITGSDDWTARVWSLNRGTCDAVLACHAGPVLCVEYSPSDKGIITGSADGLIRFWENEGGIKCVKNLTLHTASVLSISASDHWLAIGAADNSMSLFHRPQERFGGFSNAGSKVAGWQLYRTPQKTAAVVRCIASDLDRKRICSGGRNGLLRLWDATTSI

SEQ ID NO: 175343 - protein, 1185 aa, Zea Mays
MGSSSRIFEYFVVCGLGPEIRSLDGIKGFHGVEEMYMSAFLDQFPPSNHALYPPPPPQLPTCVLPAGVRIYSSGLDTDDVSTYPRSYPIVLTEGDGSKIYVSCIAFRDPICEDIIEAYQIPANSFADKCICLVSHSPSFQVLRDALEEIFVLCFSPSGCSKPLWDIISHMVSHVTLPTPGKNRVLFAIENCLLSAEAPPKEWLPHADISFQPLVQCLDVDKLILLFTAVLLERRILLRSNKYTLLTLVSEAICHLIYPIRWQHVYIPIIFSSGVDYIDAPTPYMMGLHSGVDTSAVTMDGVVVVDLEYNRITITEEIPPIPETEHNFLRVEILKLLQPNVMGIDFMKINLANMGDLRAGTKSWSQEHDFQLRLIFLRFFAQILSGYRNFIDTTSATGFNSQAFLKKRSRATNQPVDSMSMIMQFLETQGFLDYLERCNTAEENAHNLLDKLQDATGRGQNPLTIFPSQVSDPEIITIANPEIEGLDNRHCYKRFPANARTEEQEEKRKSILALASGASKQVPSSPSIRVNGGPKAESLSPRERAAERERMVLDIKVKLQGLWLRLLRLGATEDPLSSFEYGTILALIESDAEGIGGSGFVECIREHIHSGWQCRLTDEQFIAVKELLKMAITLANSRNDLATIRDALEVSAEMYRKDPNNVQDYVQRHLLSLSVWEELRSANYVTLVTAQLILMATHMAGLGLPDIDSWNMIEKIAERNNLGYKQLIKLRALLTHLQQLRIGYWGVATGKSQPLQSYGMASPHAIDVIDESQQPAEASGLGRSWVQSMFSRDRSLRASSFNRASDGNAVAATGKTEISAAQKKTQTNMRTLRGHTGAITALHCVTRKEVWDLVGDREDAGFFISGSTDCTVKIWDPSLRGSELRATLKGHTRAIRTISSDRGKIVSGADDQSVIVWDKQTFKLLEELKGHEAPVSSVRMLSGERVLIASHDGTVKMWDVRTDTCVVTVGRCQSAVLCMEYDDSTGILAAAGRDITAHVWDIRSSKQMFKLQGHTKWIRSMRMTGETIITGSDDWTARVWSLNRGTCDAVLACHAGPVLCVEYSPSDKGIITGSADGLIRFWENEGGIKCVKNLTLHTASVLSISASDHWLAIGAADNSMSLFHRPQERFGGFSNAGSKVAGWQLYRTPQKTAAVVRCIASDLDRKRICSGGRNGLLRLWDATTSI

SEQ ID NO: 175344 - protein, 512 aa, Zea Mays
MGSSSRIFEYFVVCGLGPEIRSLDGIKGFHGVEEMYMSAFLDQFPPSNHALYPPPPPQLPTCVLPAGVRIYSSGLDTDDVSTYPRSYPIVLTEGDGSKIYVSCIAFRDPICEDIIEAYQIPANSFADKCICLVSHSPSFQVLRDALEEIFVLCFSPSGCSKPLWDIISHMVSHVTLPTPGKNRVLFAIENCLLSAEAPPKEWLPHADISFQPLVQCLDVDKLILLFTAVLLERRILLRSNKYTLLTLVSEAICHLIYPIRWQHVYIPIIFSSGVDYIDAPTPYMMGLHSGVDTSAVTMDGVVVVDLEYNRITITEEIPPIPETEHNFLRVEILKLLQPNVMGIDFMKINLANMGDLRAGTKSWSQEHDFQLRLIFLRFFAQILSGYRNFIDTTSATGFNSQAFLKKRSRATNQPVDSMSMIMQFLETQGFLDYLERCNTAEENAHNLLDKLQDATGRGQNPLTIFPSQVSDPEIITIANPEIEGLDNRHCYKRFPANARTEEQEEKLLLLSE

SEQ ID NO: 175345 - protein, 918 aa, Zea Mays
MMGLHSGVDTSAVTMDGVVVVDLEYNRITITEEIPPIPETEHNFLRVEILKLLQPNVMGIDFMKINLANMGDLRAGTKSWSQEHDFQLRLIFLRFFAQILSGYRNFIDTTSATGFNSQAFLKKRSRATNQPVDSMSMIMQFLETQGFLDYLERCNTAEENAHNLLDKLQDATGRGQNPLTIFPSQVSDPEIITIANPEIEGLDNRHCYKRFPANARTEEQEEKRKSILALASGASKQVPSSPSIRVNGGPKAESLSPRERAAERERMVLDIKVKLQGLWLRLLRLGATEDPLSSFEYGTILALIESDAEGIGGSGFVECIREHIHSGWQCRLTDEQFIAVKELLKMAITLANSRNDLATIRDALEVSAEMYRKDPNNVQDYVQRHLLSLSVWEELRFWDGYFEYLMENCSNKSANYVTLVTAQLILMATHMAGLGLPDIDSWNMIEKIAERNNLGYKQLIKLRALLTHLQQLRIGYWGVATGKSQPLQSYGMASPHAIDVIDESQQPAEASGLGRSWVQSMFSRDRSLRASSFNRASDGNAVAATGKTEISAAQKKTQTNMRTLRGHTGAITALHCVTRKEVWDLVGDREDAGFFISGSTDCTVKIWDPSLRGSELRATLKGHTRAIRTISSDRGKIVSGADDQSVIVWDKQTFKLLEELKGHEAPVSSVRMLSGERVLIASHDGTVKMWDVRTDTCVVTVGRCQSAVLCMEYDDSTGILAAAGRDITAHVWDIRSSKQMFKLQGHTKWIRSMRMTGETIITGSDDWTARVWSLNRGTCDAVLACHAGPVLCVEYSPSDKGIITGSADGLIRFWENEGGIKCVKNLTLHTASVLSISASDHWLAIGAADNSMSLFHRPQERFGGFSNAGSKVAGWQLYRTPQKTAAVVRCIASDLDRKRICSGGRNGLLRLWDATTSI

SEQ ID NO: 175346 - protein, 1016 aa, Zea Mays
MVSHVTLPTPGKNRVLFAIENCLLSAEAPPKEWLPHADISFQPLVQCLDVDKLILLFTAVLLERRILLRSNKYTLLTLVSEAICHLIYPIRWQHVYIPIIFSSGVDYIDAPTPYMMGLHSGVDTSAVTMDGVVVVDLEYNRITITEEIPPIPETEHNFLRVEILKLLQPNVMGIDFMKINLANMGDLRAGTKSWSQEHDFQLRLIFLRFFAQILSGYRNFIDTTSATGFNSQAFLKKRSRATNQPVDSMSMIMQFLETQGFLDYLERCNTAEENAHNLLDKLQDATGRGQNPLTIFPSQVSDPEIITIANPEIEGLDNRHCYKRFPANARTEEQEEKRKSILALASGASKQVPSSPSIRVNGGPKAESLSPRERAAERERMVLDIKVKLQGLWLRLLRLGATEDPLSSFEYGTILALIESDAEGIGGSGFVECIREHIHSGWQCRLTDEQFIAVKELLKMAITLANSRNDLATIRDALEVSAEMYRKDPNNVQDYVQRHLLSLSVWEELRSANYVTLVTAQLILMATHMAGLGLPDIDSWNMIEKIAERNNLGYKQLIKLRALLTHLQQLRIGYWGVATGKSQPLQSYGMASPHAIDVIDESQQPAEASGLGRSWVQSMFSRDRSLRASSFNRASDGNAVAATGKTEISAAQKKTQTNMRTLRGHTGAITALHCVTRKEVWDLVGDREDAGFFISGSTDCTVKIWDPSLRGSELRATLKGHTRAIRTISSDRGKIVSGADDQSVIVWDKQTFKLLEELKGHEAPVSSVRMLSGERVLIASHDGTVKMWDVRTDTCVVTVGRCQSAVLCMEYDDSTGILAAAGRDITAHVWDIRSSKQMFKLQGHTKWIRSMRMTGETIITGSDDWTARVWSLNRGTCDAVLACHAGPVLCVEYSPSDKGIITGSADGLIRFWENEGGIKCVKNLTLHTASVLSISASDHWLAIGAADNSMSLFHRPQERFGGFSNAGSKVAGWQLYRTPQKTAAVVRCIASDLDRKRICSGGRNGLLRLWDATTSI

SEQ ID NO: 175347 - protein, 323 aa, Zea Mays
MVLIFLRFFAQILSGYRNFIDTTSATGFNSQAFLKKRSRATNQPVDSMSMIMQFLETQGFLDYLERCNTAEENAHNLLDKLQDATGRGQNPLTIFPSQVSDPEIITIANPEIEGLDNRHCYKRFPANARTEEQEEKRKSILALASGASKQVPSSPSIRVNGGPKAESLSPRERAAERERMVLDIKVKLQGLWLRLLRLGATEDPLSSFEYGTILALIESDAEGIGGSGFVECIREHIHSGWQCRLTDEQFIAVKELLKMAITLANSRNDLATIRDALEVSAEMYRKDPNNVQDYVQRHLLSLSVWEELRYVILSVKTIISVLN

SEQ ID NO: 175348 - protein, 571 aa, Zea Mays
MASARLVALAAFLLLLLFALGPGEARAADDGEVRALLALGAALDPTGRLLPSWAPGRDPCAPAPSGGFEGVACDARGAVANVSLQGKGLAGTLPPAVAGLRSLTGLYLHYNALRGGIPRELAALAALTDLYLDVNNFSGPIPSEIGAMASLQVVQLCYNQLTGSIPTQLGNLTRLTVLALQSNRFNGAIPASLGDLPLLARLDLSFNRLFGSIPVRLAQLPCSLVVLDVRNNSLTGSVPAELAAKLQAGFQYGNNSDLCGAGLPALRPCTPADLIDPDRPQPFSAGIAPQVTPSDGRGNGRVPSTRALAAVVVVAVALLLTTGVGLFALSWRRWHRQKVAGASPSTISGGRCSTEVVPSAAKASSARKSASSALASLEYSNAWDPLADARGGLGFVSQDVQLAQSLRISTEEVESATRYFSELNLLGGHGKKAGGLAATYRGTLRDGTSVAVKRLGKTCCRQEEADFLSGLRLLAELRHDNVVALRGFCCSRARGECFLVYDFVPNGSLSQFLDADTTAGGSGRVLQWSTRISIIRGIAKGRYRTLTRTFQCSYLFTYYESTTSCFLDNFA

SEQ ID NO: 175349 - protein, 292 aa, Zea Mays
MGDQSGSRNGPQQKYVSGAQNAWDMFSDELSQKHITTGSGDLNDILGGGIHCKEVTEIGGVPGVGKTQLGIQLAINVQIPVECGGLGGKAVYIEGSFMVERVYQIAEGCIRDILEHFPHSHEKSSSVQKQLQPERFLADIYYFRICSYTEQIAVINYMEKFLREHKDVRIVIIDSVTFHFRQDFEDLALRTRVLSGLSLKLMKIAKTYNLAVVLLNQVTTKFTEGSFQLTLALGDSWSHSCTNRLILHWNGNERYAHLDKSPSLPVASAPYAVTGKGIRDAVSSNHKRARVT

SEQ ID NO: 175350 - protein, 154 aa, Zea Mays
MFSDELSQKHITTGSGDLNDILGGGIHCKEVTEIGGVPGVGKTQLGIQLAINVQIPVECGGLGGKAVYIDTEGSFMVERVYQIAEGCIRDILEHFPHSHEKSSSVQKQLQPERFLADIYYFRICSYTEQIAVINYMEKFLREHKDDIIMHASFV

SEQ ID NO: 175351 - protein, 300 aa, Zea Mays
MPRATEAASQFTPGPGRPVAMNSRSSSGGVRSESSLSLGERLCAVFFPVIAIAEAVFFAFTDCLADLCTDSGSSHSRRFGAGASSSAARNSRSNHCQPHHRPFLRRATAGGWTSPNLRQLARLADESRCFSVNEVEALFELYKKISCSIIDDGLIHKVFYLFDEKKNGVIEFDEFIHSLSVFHPLAPIEDKIDSCISYVSVAFRLYDLRQTGFIEREEVKQMVIAILMESDLKLSDDLLEAIIDKTFEDADADKDGKINKEEWKEFALRHPNLLKNMTLPYLRDITTVFPSFVFNTAVED

SEQ ID NO: 175352 - protein, 169 aa, Zea Mays
MPRATEAASQFTPGPGRPVAMNSRSSSGGVVGARWLQCPPFSRGPRARCRWGSASARSSSPSSPSPRPFSSPSPTASRTSAPTPAPRTRAASARARPPPPPGTVGATIASPTTDLSYAAPLRVDGPPPTSASSHASPTSPDAVKKIDPSLLHLLLFLGFSASISQCRFI

SEQ ID NO: 175353 - protein, 105 aa, Zea Mays
MGNTRTVESEGQFEYGNYRKEADDLHSVVLYLCQKSYDIAAVVGHSKGGDVVILYASVHDDVGTIVNLSGRFDLRKGIEERIGEGSIDKINKEGYLDVKDKSATG

SEQ ID NO: 175354 - protein, 273 aa, Zea Mays
MAQTNGNDPFSPPVSQERVVITNKHGERLVGLLHHTASNKIVVLCHGFIATKNDSLILDLAEALTKEGISVFRFDFSGNGESEGQFEYGNYRKEADDLHSVVLYLCQKSYDIAAVVGHSKGGDVVILYASVHDDVGTIVNLSGRFDLRKGIEERIGEGSIDKINKEGYLDVKDKSGMNGGLENASYRVTKESLMERLNTDMRAASVSISKGCRFLTVHGSADKTIPVEDAHEFAKHIPNHELRVIEGANHNYTSHRKEVADAVVDFITSNVTV

SEQ ID NO: 175355 - protein, 176 aa, Zea Mays
MAQTNGNDPFSPPVSQERVVITNKHGERLVGLLHHTASNKIVVLCHGFIATKNDSLILDLAEALTKEGISVFRFDFSGNGESEGQFEYGNYRKEADDLHSVVLYLCQKSYDIAAVVGHSKGGDVVILYASVHDDVGTIVNLSGRFDLRKGIEERIGEGSIDKINKEGYLDVKDKSG

SEQ ID NO: 175356 - protein, 745 aa, Zea Mays
MLFLRRTSYVHATSRLNPLGFFASSVAIGEHSPSHSPNSWWIDGMEGGEAGGLRFLLRFDPARPGLDRALLGFSFSALFSRLVVGWSKHGQTGGGGGGGFPAIAAEGEGGEGSGNAAVSVAALAAAAAAASLCLAAMYASDQRRPRHARARRLPALASAPRSRALHAPHDGLRILSSDDPNDESPDKVIHGASIGAGDDEPDIVARVEMDATPPAVPVPNADDDDDDDETETEAEEEEEEEERQELQRLRELWLSLEEREQRLELRLQELEGLRSQEAAARELEARVAAADAEVRILQLSVSALQEENGRLRARAEDLDAARAELARAKEKLRAVKARVQGEQEAAAAALRRKVEELESGGRERVGALVAEVAELRKANAALEADNMELALRLQDAEQQAASGASASNLAPEEGMIQEMTYLRESNERLTRQIEQLHNDHCAHVEELVYLKWVNACLRHELRDHDGQPTAEQQGPSAGSRDLSALELSKSMSFRSSERAKQLMLRYGSPGLDRFDPALFSPLHESVDGDGYGYERSPAHSYEPERSPCARPATATASSSPAAAPGKKAGPRRLKLLGNIKKLLPAVGKRSHSNHGHGHAGHDGRKAPAPAPARRDEYLDKAMQWLSAHDVLDGDHSYVSTPLSSCERTPLSSATTSTTADSRARCGDGGGGRSERGEATRPEAEPTLARSKSDAGGAYGREASRYHALRPEHPGREADEPDGFRAPEKREARRQSAEELRTPAVA

SEQ ID NO: 175357 - protein, 184 aa, Zea Mays
MLIEIYEKLLTSRRDTEDDDQEHELQKAKKLSLKKKGAGSEASAERMSKADANLQLLNPAEQERHLQKQKKRRLQGREDETLAKLQKFKSSFLSKNLATNHVEEKNPSTDKAEKEDEEEDDYKGWHTNLLSFLPSSSKDGMTRKDDPDDYVVVDPLLEKGKEKFNKMQAKLKRREREWAGRSLT

SEQ ID NO: 175358 - protein, 138 aa, Zea Mays
MSKADANLQLLNPAEQERHLQKQKKRRLQGREDETLAKLQKFKSSFLSKNLATNHVEEKNPSTDKAEKEDEEEDDYKGWHTNLLSFLPSSSKDGMTRKDDPDDYVVVDPLLEKGKEKFNKMQAKLKRREREWAGRSLT

SEQ ID NO: 175359 - protein, 342 aa, Zea Mays
MSSVYVLEPPTKGKVVVQTTAGPLDIELWPKEAPKAARNFVQLCLEGYYDGTLFHRVIKNFLVQGGDPTGSGTGGESIYGAPFADEFHSRLRFNHRGLVACANAGTSHSNGSQFFITLDRCDWLDKKNTIFGKVTGDSIFNLLSLADVETDKDDRPVYVQKILSVEVLWDPFEDIVPRQLKKAESVAKADAEVKPKKKAVKQLNVLSFGDEVEEEENEAATSVQAKIKSIHDVLDDPRFLKGEPEDVQLSKEQEEMKKVTVQTVRDALISKKVESREQDNAPLSDDFPEDENEEDFDNRMRAQILKKRRELGDVCPHETSKAGGTLRTMIRSMSYKKLKNYP

SEQ ID NO: 175360 - protein, 264 aa, Zea Mays
MSSVYVLEPPTKGKVVVQTTAGPLDIELWPKEAPKAARNFVQLCLEGYYDGTLFHRVIKNFLVQGGDPTGSGTGGESIYGAPFADEFHSRLRFNHRGLVACANAGTSHSNGSQFFITLDRCDWLDKKNTIFGKVTGDSIFNLLSLADVETDKDDRPVYVQKILSVEVLWDPFEDIVPRQLKKAESVAKADAEVKPKKKAVKQLNVLSFGDEVEEEENEAATSVQAKIKSIHDVLDDPRFLKGEPEDVQLIMVICAMLRIPANGR

SEQ ID NO: 175361 - protein, 807 aa, Zea Mays
MADLDARRAEVLGRAARIIQRQIRTYIARKQFAELKRSATQLQSFVRGTLARKLYECMRQEAAAVKIQKNMRRHKARESYLQLQAAAITLQTGLRAMSARKEFRFRKETKAAVHIQAQWRRHRDYSHYKNLQGAALTYQCAWRQRLARRELRKLKMAARETGALKEAKDKLEKRVEELTWRLGLEKRLRTDLEEAKAQEIAKLQETLHDMQLQVEESKAMVVKEREAARKAIEEAPPVIKETPVLVEDTEKINSLTTEVEQLKALLLTERQATEAAKREHAESELRNEELIKKFESAEKKIEQLQETVHRLEEKATNMESENKVLRQQAVAISPTSKSLAAYPKSPFQLKTPENGNALNGEVKSSPDITPILPNPKELEAEEKPQKSLNEKQQENQDLLIKCVSQDLGFSSGKPIAACLIYRCLLHWRSFEVERTGVFDRIIQTIGSAIESQDNNDKLAYWLSNSSTLLLLLQRTLKTTGAAGFTPQRRRSSAASFGRVFSGMRASPQSAGRAFMGSRLIGGLGDLRQVEAKYPALLFKQQLTAFLEKIYGMIRDNLKKEISPLLGLCIQAPRTSRASLIKGSRSQANALAQQTLIAHWQSIVKILTNYLNVLKANYVPSVLISKVFTQIFSFINVQLFNSLLLRRECCSFSNGEYVKAGLAELEQWCIYATEEYAGSSWEELKHIRQAVGFLVIHQKPKKTLKEITNDLCPVLSIQQLYRISTMYWDDKYGTHTVSSDVISSMRVMMTEDSNNAVSSSFLLDDDSSIPFSVDDISKSMTEIEVTDVDMPPLIRENSGFTFLHQRKD

SEQ ID NO: 175362 - protein, 486 aa, Zea Mays
MAPPPPWLAALLFLLLPALLPAVGSVSGAAAAGIFRVRRKLPAGVGGDTGANISALRAHDGRRHGRLLAAADLPLGGLGLPTDTGLYFTEIKLGTPPKRYYVQVDTGSDILWVNCISCSKCPRKSGLGLDLTFYDPKASSSGSTVSCDQGFCAATYGGKLPGCTANVPCEYSVMYGDGSSTTGFFITDALQFDQVTGDGQTQPGNATITFGCGAQQGGDLGNSNQALDGILGFGQANTSMLSQLAAAGKAKKIFAHCLDTIKGGGIFAIGNVVQPKVKTTPLVADMPHYNVNLKSIDVGGTTLQLPAHVFETGEKKGTIIDSGTTLTYLPELVFKQVFSKHRDIAFHNLQDFLCFQYSGSVDDGFPTITFHFEDDLALHVYPHEYFFPNGNDIYCVGFQNGALQSKDGKDIVLMGDLVLSNKLVVYDLENQVIGWTDYNCSSSIKIKDDKTGTTYTVESHDISSGWKFHWHKSLVLLLVTMVWSYL

SEQ ID NO: 175363 - protein, 364 aa, Zea Mays
MAPPPPWLAALLFLLLPALLPAVGSVSGAAAAGIFRVRRKLPAGVGGDTGANISALRAHDGRRHGRLLAAADLPLGGLGLPTDTGLYFTEIKLGTPPKRYYVQVDTGSDILWVNCISCSKCPRKSGLGLDLTFYDPKASSSGSTVSCDQGFCAATYGGKLPGCTANVPCEYSVMYGDGSSTTGFFITDALQFDQVTGDGQTQPGNATITFGCGAQQGGDLGNSNQALDGILGFGQANTSMLSQLAAAGKAKKIFAHCLDTIKGGGIFAIGNVVQPKVKTTPLVADMPHYNVNLKSIDVGGTTLQLPAHVFETGEKKGTIIDSGTTLTYLPELVFKQVMDVVFSKHRDIAFHNLQDFLCFQYSGR

SEQ ID NO: 175364 - protein, 412 aa, Zea Mays
MAPPPPWLAALLFLLLPALLPAVGSVSGAAAAGIFRVRRKLPAGVGGDTGANISALRAHDGRRHGRLLAAADLPLGGLGLPTDTGLYFTEIKLGTPPKRYYVQVDTGSDILWVNCISCSKCPRKSGLGLDLTFYDPKASSSGSTVSCDQGFCAATYGGKLPGCTANVPCEYSVMYGDGSSTTGFFITDALQFDQVTGDGQTQPGNATITFGCGAQQGGDLGNSNQALDGILGFGQANTSMLSQLAAAGKAKKIFAHCLDTIKGGGIFAIGNVVQPKCYFVFFFAHGLLNIPLFLLVMILLSRPHYNVNLKSIDVGGTTLQLPAHVFETGEKKGTIIDSGTTLTYLPELVFKQVMDVVFSKHRDIAFHNLQDFLCFQYSGSVDDGFPTITFHFEDDLALHVYPHEYFFPNGVT

SEQ ID NO: 175365 - protein, 52 aa, Zea Mays
MLTKPFQLAGRIQHVDHHGWPLPATNLWRYTDNFSHLHISSPLSQHQQLVRL

SEQ ID NO: 175366 - protein, 69 aa, Zea Mays
MAPFTKITNILVRGTCTDPAQDASQILHKTAPRTTERTEEGMLIATEPRRYRHNSPPTLILCPILLYCS

SEQ ID NO: 175367 - protein, 134 aa, Zea Mays
MDQPEENPEFPSCDAYFEAIQSKKKLPLTLQESLTAAITQTGVVKGLQQCKGRDWFDYISALPLSDLGLPFMSIDEVITVNSDDLILEAFKCMKDNKIGGVPVVEGPKRKLVGSVSIRDIRFLLLRPNLFSNFS

SEQ ID NO: 175368 - protein, 320 aa, Zea Mays
MVKFALSTSPGVRNVFVGRKLEQMEVDIQAAFTGSQMGKNIQGAFICLSIYNENQNDNKRWHRHSRIDVAVTLTLVTGAFCLEICAVVVMVLASPWTWAILRSCKCRKLSRAAWCIFKSVRPESRPLWSNSMGQYNFISSCFSDSVVGKLMSLVGAKQLWRNFLHTKYVDVKPDMKKLLFEDQCFQAVFGTSISPGLCANPTSGVGSALDIMLRKPFEEAILSLHIYTDIFLYRCKNPTGATSCEYTDEKRLLMHRCRTLSEYVCYLLVVHPEMLPVSGSVTDVLQKASDTVATASQPGLRLQPRINFWRSWQRTVTVIA

SEQ ID NO: 175369 - protein, 246 aa, Zea Mays
MKIALGAAKGLAFLHEEAERPVIYRDFKTSNILLDADYNAKLSDFGLAKDGPEGDKTHVSTRVMGTYGYAAPEYVMTGHLTSKSDVYSFGVVLLEMMTGRRSMDKNRPNGEHNLVEWARPYLGERRRFYKLVDPRLDGNFSIKGAQKTAQLAHACLSRDPKARPLMSQVVEVLKPLQNLKDMASSSYYFQSMQHERRTALANPYGSQSMKAQSTFARNGQQPMRSLSYGPHASPYRQSPRLDSKRQ

SEQ ID NO: 175370 - protein, 296 aa, Zea Mays
MGKQQEGKRRRGEKDGKRKGRGKTAAAAVPEDAAPVAGCWIRFPRLRGCMPSRAKVDSSTSARGGGRETKPSTDDACQDQSVPPASGSATTSNTGSISPSSIVGEELKLAFQLRRFTFSELKCATRNFRPESLLGEGGFGCVFKGWIEENGTAPVKPGTGLTVAVKTLNHDGLQGHKEWVAEVDFLGNLQHPHLVKLVGYCIEDDQRLLVYEFMPRGSLENHLFRKSLPLPWAIRMKIALGAAKGLAFLHEEAERPVIYRDFKTSNILLDAMALRVIKHMCQLGSWEHMDMLHLNM

SEQ ID NO: 175371 - protein, 130 aa, Zea Mays
MHERKAEMARFADAFIALPGGYGTLEELLEVITWAQLGIHKKPVGLLNVDGFYDPLLSFIDMAVNEGFIKEDARRIVISAPTAKELVLKLEEYVPEYEVGLVWEDQMPPSAAAAHGFAPELVEPGITSSS

SEQ ID NO: 175372 - protein, 148 aa, Zea Mays
MPREVTGEPVGEVRAVSGMHERKAEMARFADAFIALPGGYGTLEELLEVITWAQLGIHKKPVGLLNVDGFYDPLLSFIDMAVNEGFIKEDARRIVISAPTAKELVLKLEEYVPEYEVGLVWEDQMPPSAAAAHGFAPELVEPGITSSS

SEQ ID NO: 175373 - protein, 228 aa, Zea Mays
MAPRQILQLNEPIEVKIYEWNTGGLLTRIEGLRAFLPKFELVDRISSFTDLKNKVGCSIRVCIARLDEETNDLIISEKKAWEMTYLKEGTLLQGTVCKIFPYGARVRIAGTNRSGLLHISNISRGNVLSVSDILKIDDEVKVIVIKSNVPDKIAVSIADLESAPGLFLSDREKVFSEAEEMAKRYREQLPVTPQNPILDDGLPGEKLPFDNETKLYANWQWFKFLHHS

SEQ ID NO: 175374 - protein, 398 aa, Zea Mays
MPTPAPALPFVPKPQPILHVAKALVPSPRQTQPQARGRGLPQPVNCANSKRLDDALSAGFVRLLNAGQVQDADSASGTCRRYDPKPGDFAVGVVVSGTEARLDVAVGADRLATLLSKELLPLDRDSSDPPTRQALPRLGSIGVVAGPSVDDDRQKRGSRTLVAPGTVVFAEVLGRTLSGRPLLSARRLFRRLAWHRARQILQLNEPIEVKIYEWNTGGLLTRIEVGCSIRVCIARLDEETNDLIISEKKAWEMTYLKEGTLLQGTVCKIFPYGARVRIAGTNRSGLLHISNISRGNVLSVSDILKIDDEVKVIVIKSNVPDKIAVSIADLESAPGLFLSDREKVFSEAEEMAKRYREQLPVTPQNPILDDGLPGEKLPFDNETKLYANWQWFKFLHHS

SEQ ID NO: 175375 - protein, 208 aa, Zea Mays
MPTPAPALPFVPKPQPILHVAKALVPSPRQTQPQARGRGLPQPVNCANSKRLDDALSAGFVRLLNAGQVQDADSASGTCRRYDPKPGDFAVGVVVSGTEARLDVAVGADRLATLLSKELLPLDRDSSDPPTRQALPRLGSIGVVAGPSVDDDRQKRGSRTLVAPGTVVFAEVLGRTLSGRPLLSARRLFRRLAWHRARQTDSATQRAN

SEQ ID NO: 175376 - protein, 125 aa, Zea Mays
MSHIQHEIDYVGTDAHVSPRVPQHPQIANPFANSVVPPGTGLYGQSAAGFAPRPSVTDQSKNTIFSNALSSPVRRSLQNSHTTQGAGNGGRNAEANLAGANREANSTSSNDTSMDMVSDTNEFYQ

SEQ ID NO: 175377 - protein, 154 aa, Zea Mays
MQCSTPKEKLYQWILRKHDEEARLTVAEIMSHIQHEIDYVGTDAHVSPRVPQHPQIANPFANSVVPPGTGLYGQSAAGFAPRPSVTDQSKNTIFSNALSSPVRRSLQNSHTTQGAGNGGRNAEANLAGANREANSTSSNDTSMDMVSDTNEFYQ

SEQ ID NO: 175378 - protein, 1025 aa, Zea Mays
MHRKVRVPPLPHLTLRCASSSSAAASVSPPPPRRLPPPVPLCDLLAHRLGPPRSPLSPPPPRPHADLLPLLRRGGDANSPENLHVELIKRGLNHDLFLCNHLVNSYAKGARLAAASQVFDEMPERNAVSWTCLVSGYVLHGIAEEAFRVFRAMLREVQAGCRPTSFTFGTLLRACQDGGPDRLGFAVQVHGLVSKTEYASNTTVCNALISMYGSCTVGPPILAQRVFDGTPIRDLITWNALMSVYAKKGDVASTFTLFKDMQRGDSRIQLRPTEHTFGSLITAASLSSGSSAVLDQVLVWVLKSGCSSDLYVGSALVSAFARHGLTDEAKDIFLSLKQKNAVTLNGLIVGLVRQDFSEEAVKIFVGTRNTVDVNADTYVVLLSALAEYSISEEGLRIGRVVHGHMLRTGLTDLKIAVSNGLVNMYAKCGAIESASKIFQLMEATDRISWNTIISALDQNGLKLLTAGQQVHCDAVKWGLDLDTSVSNVLVKMYGECGAMSDYWKVFNSMAEHDEVSWNTMMGVMASSQTPISEIVKVFNNMMRGGLIPNKVTFINLLAALSPLSVLELGKQVHAAVMKHGVMEDNVVDNALISCYAKSGDMGSCEHLFTNMSDRRDAISWNSMISGYIYNGNLQEAMDCVWLMIHSGQIMDCCTFSIILNACASVAALERGMELHAFGIRSHLESDVVVESALVDMYSKCGRVDYASKLFNSMTQRNEFSWNSMISGYARHGLGRKAIEIFEEMLRSRESPDHVTFVSVLSACSHAGLVERGLEYFEMMPDHGILPQIEHYSCVIDLLGRAGKIDKIKEYIQRMPIEPNALIWRTVLVACRQSKDGSNIDLGREASRVLLEIEPQNPVNYVLASNFHAATGMWEDTAKARTAMRQATEKKEAGRSWVTLNDGVHTFIAGDRSHPNTKEIYEKLNFLIQNIRNAGYVPLTEYALYDLEEENKEELLSYHSEKLAIAFVLTRSSSGPIRIMKNLRVCGDCHIAFRYISQMISRQIILRDSIRFHHFKDGKCSCGDYW

SEQ ID NO: 175379 - protein, 241 aa, Zea Mays
MMGRQPAATKQRAHCWIGACLQCNTRSRAGVSMDASQDVLDWDWEVVMPDHRSFSTSQSHGSKNLDDKETEEHDLLSPSGNFDDVQVECKDIGVVLDETCKSVVPSVVDPIMAPDGGEEEKAIQSPDPIMAPDGKFAQEEEEDEEDIKDGDDKVGALIGALCSFGVAAATACVFLIGGRLHHHHTQHHKFQLQFFGDDKRIQQVVRQTSRLNQKAMSFAMGAGASRHFGRARVKRSKNINY

SEQ ID NO: 175380 - protein, 246 aa, Zea Mays
MLKEKLSDLAASAQDECPQITLSGNSTMRRSNFMKLAQITPANRSTLTTKHNFVSTSTKHNLPEDQLSQDTNVDITVDLAIQGHLKEHTFKSLGLKKAKTMDRSKDAVVLDDVSSKLPQNIGSRALARYQCGGPTPESKKSTIATACGKNDGACEKTEGQESNSGPAFLKLVQEKLSPAEYTEFVEYMKALKLKTMHTKDSLEAITKLFSSPGRLPLLEGFRVFVAKNHLPLYEQLVRRHNNVSST

SEQ ID NO: 175381 - protein, 268 aa, Zea Mays
MMCSLWKRKLCKYCIAPPANKHMLKEKLSDLAASAQDECPQITLSGNSTMRRSNFMKLAQITPANRSTLTTKHNFVSTSTKHNLPEDQLSQDTNVDITVDLAIQGHLKEHTFKSLGLKKAKTMDRSKDAVVLDDVSSKLPQNIGSRALARYQCGGPTPESKKSTIATACGKNDGACEKTEGQESNSGPAFLKLVQEKLSPAEYTEFVEYMKALKLKTMHTKDSLEAITKLFSSPGRLPLLEGFRVFVAKNHLPLYEQLVRRHNNVSST

SEQ ID NO: 175382 - protein, 170 aa, Zea Mays
MLCEKQVSEGLDFADRAGRAVIVTGMPFATPTDAKVRLKREYLDKQGTPSNKNTKMLTGEEWYVQQAARAVNQAVGRVIRHRHDYGAIIYCDERFVWPNYQSQMSYWLRPHIKCYSKYGEVVQGLTRFFRDKASSDPLTLEPTDCNNCIAPPANKHMLKEKLSDLVHPLH

SEQ ID NO: 175383 - protein, 994 aa, Zea Mays
MPVYSIRGVNVDFPFDAYDCQITYMDRVIESLQQGKNALLESPTGTGKTLCLLCASLAWRRTFGEFLRVGRGGGGTKQLPYGSQPSASQQSEDSTSQKQQQSRYPVIIYASRTHSQLRQVIKELKATSYRPKMAVLGSREQMCIHDEVSKLHGRAQNNACHFLCKKRRCPHNNHVAEFIKNKPELGNEPFDIEDLINIGRHKGPCPYYISRELSKSVDILFAPYNYLIDPGNRRSLNGIPWDNAVLIFDEAHNLESICADAASFDLFPNNLTACIAEAHECIKLCSAKRSIENSADKQFDPENYAILKALLMALEKKIAELLIGSELGYTKAGSYIYDFLSELNITSDTSKKLIETIDCASLLLEEGNSAQTGPGVQAKAAVSRLESIRDMLDIIFRGGGQNHAKYYRFHVNESQQTHGDALKFLGKSSRTLSWWCFNPGLAMEEFLKLGVRSIILTSGTLSPLDSLAMELNLEFPVRLENPHVISSDQVWVGVVPVGPSGHALNSSYRTRNTIQYKQELGTAIVNFARIVPDGLLVFFPSYSMMDMCVDFWKNRNHSNSASENTIWQRICKHKQPVIEPRQSSNFQSAIEDYRAKLHDSSSGAIFFAVCRGKVSEGLDFADRAGRAVIVTGMPFATPTDAKVRLKREYLDKQGTPSNKNTKMLTGEEWYVQQAARAVNQAVGRVIRHRHDYGAIIYCDERFVWPNYQSQMSYWLRPHIKCYSKYGEVVQGLTRFFRDKASSDPLTLEPTDCNRGQQQGLFLEPIFKPAFGRSEGHVILSDFKFMQQLLCQTKLRDNMPYLLITPDCIAPPANKHMLKEKLSDLAASAQDECPQITLSGNSTMRRSNFMKLAQITPANRSTLTTKHNFVSTSTKHNLPEDQLSQDTNVDITVDLAIQGHLKEHTFKSLGLKKAKTMDRSKDAVVLDDVSSKLPQNIGSRALARYQCGGPTPESKKSTIATACGKNDGACEKTEGQESNSGPAFLKLVQEKLSPA

SEQ ID NO: 175384 - protein, 627 aa, Zea Mays
MPVYSIRGVNVDFPFDAYDCQITYMDRVIESLQQGKNALLESPTGTGKTLCLLCASLAWRRTFGEFLRVGRGGGGTKQLPYGSQPSASQQSEDSTSQKQQQSRYPVIIYASRTHSQLRQVIKELKATSYRPKMAVLGSREQMCIHDEVSKLHGRAQNNACHFLCKKRRCPHNNHVAEFIKNKPELGNEPFDIEDLINIGRHKGPCPYYISRELSKSVDILFAPYNYLIDPGNRRSLNGIPWDNAVLIFDEAHNLESICADAASFDLFPNNLTACIAEAHECIKLCSAKRSIENSADKQFDPENYAILKALLMALEKKIAELLIGSELGYTKAGSYIYDFLSELNITSDTSKKLIETIDCASLLLEEGNSAQTGPGVQAKAAVSRLESIRDMLDIIFRGGGQNHAKYYRFHVNESQQTHGDALKFLGKSSRTLSWWCFNPGLAMEEFLKLGVRSIILTSGTLSPLDSLAMELNLEFPVRLENPHVISSDQVWVGVVPVGPSGHALNSSYRTRNTIQYKQELGTAIVNFARIVPDGLLVFFPSYSMMDMCVDFWKNRNHSNSASENTIWQRICKHKQPVIEPRQSSNFQSAIEDYRAKLHDSSSGAIFFAVCRGKLVRVLILLIVLGGQ

SEQ ID NO: 175385 - protein, 909 aa, Zea Mays
MPVYSIRGVNVDFPFDAYDCQITYMDRVIESLQQGKNALLESPTGTGKTLCLLCASLAWRRTFGEFLRVGRGGGGTKQLPYGSQPSASQQSEDSTSQKQQQSRYPVIIYASRTHSQLRQVIKELKATSYRPKMAVLGSREQMCIHDEVSKLHGRAQNNACHFLCKKRRCPHNNHVAEFIKNKPELGNEPFDIEDLINIGRHKGPCPYYISRELSKSVDILFAPYNYLIDPGNRRSLNGIPWDNAVLIFDEAHNLESICADAASFDLFPNNLTACIAEAHECIKLCSAKRSIENSADKQFDPENYAILKALLMALEKKIAELLIGSELGYTKAGSYIYDFLSELNITSDTSKKLIETIDCASLLLEEGNSAQTGPGVQAKAAVSRLESIRDMLDIIFRGGGQNHAKYYRFHVNESQQTHGDALKFLGTLSPLDSLAMELNLEFPVRLENPHVISSDQVWVGVVPVGPSGHALNSSYRTRNTIQYKQELGTAIVNFARIVPDGLLVFFPSYSMMDMCVDFWKNRNHSNSASENTIWQRICKHKQPVIEPRQSSNFQSAIEDYRAKLHDSSSGAIFFAVCRGKVSEGLDFADRAGRAVIVTGMPFATPTDAKVRLKREYLDKQGTPSNKNTKMLTGEEWYVQQAARAVNQAVGRVIRHRHDYGAIIYCDERFVWPNYQSQMSYWLRPHIKCYSKYGEVVQGLTRFFRDKASSDPLTLEPTDCNNCIAPPANKHMLKEKLSDLAASAQDECPQITLSGNSTMRRSNFMKLAQITPANRSTLTTKHNFVSTSTKHNLPEDQLSQDTNVDITVDLAIQGHLKEHTFKSLGLKKAKTMDRSKDAVVLDDVSSKLPQNIGSRALARYQCGGPTPESKKSTIATACGKNDGACEKTEGQESNSGPAFLKLVQEKLSPA

SEQ ID NO: 175386 - protein, 226 aa, Zea Mays
MAAGRAVAVAMVAAAALPLLVGGAYADCYNYCFNDCMNKDKSMRDYCSYACDKTCAPDAAPRRPVAGLPINCQLACVRDSCRRRRADANDMKACYGQCYDRCETKAGLPRPLRAGGGVGIVWPAALPDHPFHKKQDAVWPAALPDHSFHKTKQGAVWPAALPDHPFHEKHDAVWPAALPDHPFHKKEDAVGPAALQVDHKMHDAVKRAGEPDPGYVMYPAWSPVRP

SEQ ID NO: 175387 - protein, 650 aa, Zea Mays
MALSKPLLSRLLPLPLRLRPQARFLCLATPPLTPTPTQIDDQPPADAAAERRRRKRRLRVEPPLSRGPAPQRAPGAPRPASNPNAPKIPEPASVLSGKRLDLHRRILTLIRENDLDEAALLTRHSIYSNCRPTVFTCNAVLAALLRQARYADLLSLHRFVTQASVAPTVATYNLLLQAYCDCRRPDVALEHFRLLLKDDSPVLPSPTTYRILARSLAENGKLDQALELKDGMLERGLIAPDTQVYAFIMGGFVNAGDGDKAVSLFEEIKEKLGGESILDGVVYGNLMKGYFLKGMEKEAMDCYAEVLGEGSKVRFGAVSYNMVLDALGRNGRLDDALNLFDRMCMEHDPPRTITVNLGSFNVMVDAYCRAERFQDAIEVFGKMAEKKCAPDALSYNNLIDWLGKNKLVGEAEGLYKEMEERGVNPDEYTYVLLIESCFKVDRVEDAVAYFNKMFDAGLRPNANAFNKVIDGLVKVDRLSEAQGFFDMMPEKEVKPNIASYELLLKAYIDAARLDDAIKVAKCILLDESVVFSDETKALLEEALDKEGRNGQMTKLYEDVEMEKAEAAARAAEEKAEAKAKEEAAARASRAAIEAVLGRKREAEKQEPVDGLNVEDAEVVESKSDTSDVSGEQNEGDEHKKQEPAEASSCS

SEQ ID NO: 175388 - protein, 63 aa, Zea Mays
MAAKLAQLRTQVTRAAEFASKHGCSYYKEVMEKNKQYVVQPPTVEKCQELSKQLFYTRLARSL

SEQ ID NO: 175389 - protein, 101 aa, Zea Mays
MAAKLAQLRTQVTRAAEFASKHGCSYYKEVMEKNKQYVVQPPTVEKCQELSKQLFYTRLARSFVRWVQCCARNVFVLATIAITLLNLNVVWMYGVICLWPV

SEQ ID NO: 175390 - protein, 242 aa, Zea Mays
MKVGKAYLVIKQTLQQIVEKQYNLSDVFSELIDEVLRAESGDNEDVYDVQKTTTKSDDILPQSAESCPDEADIDPLGKHGDVGKNMPTNTNVTPQATPHTESCSPIFDATPQIKVSVETDPATNTPQVDQISLDSEMQTVLALREYLCDTQSDTSSHYSTLRNRNDIVGTLNLLMNLYCTLLDNALPETDEMDKCKAVTIIFHFTNIIYFKWYISHCYALSFTLFIFMLFFTRSDHGSHGQH

SEQ ID NO: 175391 - protein, 181 aa, Zea Mays
MQTVLALREYLCDTQSDTSRSWFPWATLVRYGLLRFIISHSIRRTKHYERIKLILQKYSIFDNVIDSSQVTVQRGGSSRSAARSSRRSTQVTAEVEQLREELRQHQERQRVQEEYLRQHAAQQEYYATQFQQQQALIQVYETPPATLPAQQQDDGLDFVNTLFASGGSEHHSSIFPDVDRQ

SEQ ID NO: 175392 - protein, 197 aa, Zea Mays
MKVGKAYLVIKQTLQQIVEKQYNLSDVFSELIDEVLRAESGDNEDVYDVQKTTTKSDDILPQSAESCPDEADIDPLGKHGDVGKNMPTNTNVTPQATPHTESCSPIFDATPQIKVSVETDPATNTPQVDQISLDSEMQTVLALREYLCDTQSDTSRTIIDYGEYCSTASDIYESFADGKCLDNVFIQCFIQCVDDQA

SEQ ID NO: 175393 - protein, 53 aa, Zea Mays
MSSIGAGDDMQPVASVHRSTCTSISMDMHPVASAITSYTEGVSVTPPATLRAP

SEQ ID NO: 175394 - protein, 118 aa, Zea Mays
MRVRPHDKTTAPTLQWQAHVHSSLFAVESDSWGVESGEPKWRLRFYDLFLLSLVCRLPSTSVPKPLRQGEGRHGPWARRTSSISSLLAPHRGCREEGGRIAQAGDRRSGQTGHRPRRL

SEQ ID NO: 175395 - protein, 226 aa, Zea Mays
MTKQPLLLFSGKHMFTRACSRWRVIAGEWRVANPSGGYVKETRNYGAPAIGAGRGRCSFCGGRMGPRREFGEGNGNGVEGGYGGGGFGDSGFPRREEGDGKAMGRGHGPRQPYRGGGRRGGYTDSEAGDESGRPPRRAYERHSGTETVETEGAPAVAEAENKLEEAPQSEVEKGKEGESTEVEEPEDKLIPVFCVTDDGKISRLCTAASQCLTLFSEIVCHALVFW

SEQ ID NO: 175396 - protein, 65 aa, Zea Mays
MRVRPHDKTTAPTLQWQAHVHSSLFAVESDSWGVESGEPKWRLRFYDLFLLSLVCRLPSTSVPKP

SEQ ID NO: 175397 - protein, 75 aa, Zea Mays
MLALFSQIGTCWTRLLIGYIQKNVGACMNYYYYQYLCVHTMSKRLERRFFFPKLLCLRKNFCAWLATCVGVLVGT

SEQ ID NO: 175398 - protein, 335 aa, Zea Mays
MGEEDASAGGDPQRLKRIAAAAYDYENDARWAGYWSNVLVPPHLASRPDVVDHFKRKFYQRYIDPGLVVEPMSSMTSTQSSRPAAKSSATPSSENVRARDSAERTANSLQLDGRTINFSINAWVLVVASLGILPVLPNHISSKAYRLSLLGTICSSAYSLYGTYGKPRAWNMPAIQSWLQSIIVAKDFVHLMFSLMMFTSNVHFKIALLPVLCWALDHVARFLRRNFTHSSLYRKYLEDPCLWVETNNTTLSLLCSNAEITLGFLMIISLFSSRRNIIQTFMYFHLLKLMYHSPVTSGYHQSVWARIGRAVNPYIYRYAPFLNTPISAVQRWWLR

SEQ ID NO: 175399 - protein, 236 aa, Zea Mays
MGEEDASAGGDPQRLKRIAAAAYDYENDARWAGYWSNVLVPPHLASRPDVVDHFKRKFYQRYIDPGLVVEPMSSMTSTQSSRPAAKSSATPSSENVRARDSGSSTRSTGTSQHPPAERTANSLQLDGRTINFSINAWVLVVASLGILPVLPNHISSKAYRLSLLGTICSSAYSLYGTYGKPRAWNMPAIQSWLQSIIVAKDFVHLMFSLMMFTSNVHFKLLYFLCFAGRLIMLLDS

SEQ ID NO: 175400 - protein, 70 aa, Zea Mays
MEMMEIREAVSDASDSQTLEKIQSQIKAKLETWSDSFQEAFDRKDFDRAVEATQRMRYYERAVEETVKKL

SEQ ID NO: 175401 - protein, 167 aa, Zea Mays
MFVCDVEEFSTLIKRKREYNITDNNLEGKYKDWQKKLHPDLVHSKSEKERGYAAEQSALVIDAYRTLSKPLSRALYLLKLEGIHVDEEKTINDPELLMEMMEIREAVSDASDSQTLEKIQSQIKAKLETWSDSFQEAFDRKDFDRAVEATQRMRYYERAVEETVKKL

SEQ ID NO: 175402 - protein, 882 aa, Zea Mays
MALGGPGQIPSTTGNSGSTGSDLSSTQGIDKGDTERTRGNWHADELARIPRRALRGFVSVYSQGGFEVGENPDNVTPPVGVWARDEGRVRLHAPFVRVSVKGELTVMDTDDKSQIKSLSFSNHTSMIKLPAANPPRHLEIIKTDITSLSVHEHTWAPLARGRLSTVAAWAGAGPGLRAGENYAADRWSPIPPWDFKLAVRPRPSTDPTVLETSSRYPATRLSPVTLPTTDESLPRTQIKNPEIPASESFLLLSVEELVDVSARWFEHLVWDPRKFVTWNFCPEEGRAVRCWGGAAACDTQIWCEEEIRILVFVRLRPMSRKEKEAGSRSCVKIVNRKEVFLTESASENDYLRLKRGRDSHFCFDSVFPDSTTQAEVYSTSTADLVEGVLQGRNGTVFCYGATGAGKTYTMLGTMENPGVMVLAINDLFSKVTQKYHSIKLSYLEIYNETVRDLLSPGSPLNLREDKQGIVAAGLTQRSVYSTDEVMELLQKGNKNRTTEPTRVNETSSRSHAVLQVVVEYRSLDGVNVKRAGKLSLIDLAGSERALATDQRTQRSIEGANINRSLLALSSCINALVEGKKHIPYRNSKLTQLLKDSLGGACNTVMIANISPSNLSFGETQNTLHWADRAKEIKTKTQQTTVNEEVLDQPDSETMLVLELQKENRVLREQLAKQQQKLLTAEAQLLASKTSPQRSPAPSSHVSTPGSTQRKTRRSILAAGGGNYFSTLDSKRHAADNAQVRELQRKVSTLESEIEKMKKEHLLQLKRKDEFIRDLINRKDPNNNSEETATVDRRVVTRASVRKAQRDASAAVELKSPSRVFTSPAPTAKKRTFWDIGGNSPSVLAANGRKTRSHVATETPKKASSKLLQPGFARQTSTHQRFT

SEQ ID NO: 175403 - protein, 128 aa, Zea Mays
MEQRKEREGLTLIKQSMGRIPRSPKADLKKVSKVKVLSKVKLLSKIMVLSKLKLLFKLVQVEVSLPVQSPIIRTRESILQDNLIRFQMFSICGPSVCAAVQLELNQCPRLPAGPRLTDGPLELDLAWS

SEQ ID NO: 175404 - protein, 123 aa, Zea Mays
MEQRKEREGLTLIKQSMGRIPRSPKADLKKVSKVKVLSKVKLLSKIMVLSKLKLLFKLVQVEVSLPVQSPIIRTRESILQDNLISSARAEPMSQAPSWTSPHGWPPGAGPRLELSDVRSFRCL

SEQ ID NO: 175405 - protein, 381 aa, Zea Mays
MKRNLQATAKAFQAEGKVSSDPVAIDAPGGFLFEWWSVFWDIFIARTNEKHSDVAASYIETQLMKAREQQQPQTPQQRQQQPQHIQMQQMLLQRAVHQQQQQQQQQQQQQQQQQQQPQQQQQLQQQRRDGSHLLNGSANGISGNNPLMRQNQSTANVMATKMYEERLKVPSQRDSFEEASLKQRYGENAGQLLDSNEASLLKAASSAQSSGQILHGTVGGLSGTLQQVQARSPQLPGPAQGIKTEINHVLTPRGAGPEGSFIGVQGSNQAGNNLTLKGWPLTGLEQLRSGILQQKSFIQNQQQLHQQIQMLTPQQQQQLMLQAQQNMSSPTSSDVDNRRLRMMLNRNAVLGRDGQTNSGSDIIPNIGSPSQSGGDIDMLIK

SEQ ID NO: 175406 - protein, 278 aa, Zea Mays
MPVDGGIPNSFGGAEQTAKKRKKPGSSSGRANSSGTANTAGPSPSSAPSTPSTHTPGDAMSVPQLQQNGGSAKPMVMFGSDGTGSLTSPANPLDDVDRLLEDGSLDDNVESFLSQDDMDPRDNLGRCMDASKGFGFSEVAKARASAAKVVCCHFSADGKLLATGGHDKKVTLWCTDSLKPKSFLEEHSFLITDVRFSPSMSRLATSSFDKTVRVWDADNTDYSLRTFTGHSASVMSLDFHPNKEDMICSCDGDGEVRSWSINNGSCLTCVKVFKVLLR

SEQ ID NO: 175407 - protein, 883 aa, Zea Mays
MSQTNWEADKMLDVYIYDYFMKRNLQATAKAFQAEGKVSSDPVAIDAPGGFLFEWWSVFWDIFIARTNEKHSDVAASYIETQLMKAREQQQPQTPQQRQQQPQHIQMQQMLLQRAVHQQQQQQQQQQQQQQQQQQQPQQQQQLQQQRRDGSHLLNGSANGISGNNPLMRQNQSTANVMATKMYEERLKVPSQRDSFEEASLKQRYGENAGQLLDSNEASLLKAASSAQSSGQILHGTVGGLSGTLQQVQARSPQLPGPAQGIKTEINHVLTPRGAGPEGSFIGVQGSNQAGNNLTLKGWPLTGLEQLRSGILQQKSFIQNQQQLHQQIQMLTPQQQQQLMLQAQQNMSSPTSSDVDNRRLRMMLNRNAVLGRDGQTNSGSDIIPNIGSPSQSGGDIDMLIKKKLAQQQQLLQQQSNSQQLPQQHQLQQPAVSSQQSQSSNQHLQQEKLGIGSMPVDGGIPNSFGGAEQTAKKRKKPGSSSGRANSSGTANTAGPSPSSAPSTPSTHTPGDAMSVPQLQQNGGSAKPMVMFGSDGTGSLTSPANPLDDVDRLLEDGSLDDNVESFLSQDDMDPRDNLGRCMDASKGFGFSEVAKARASAAKVVCCHFSADGKLLATGGHDKKVTLWCTDSLKPKSFLEEHSFLITDVRFSPSMSRLATSSFDKTVRVWDADNTDYSLRTFTGHSASVMSLDFHPNKEDMICSCDGDGEVRSWSINNGSCLTCVKVFKAGATQMRFQPRKGKYLAAASEKAIYILDGETQHACRSPLQGHNKNIQSLCWDSAGEYLASVSEDSVRIWSFSSGRDGEFVHELNRSGNQFHSCVFHPTYQSLLVIGCYESLELWDIREKNTMTFNNAHDGLVAALAASSATGKVASVSHDRTLKLWK

SEQ ID NO: 175408 - protein, 566 aa, Zea Mays
MQSPQQFQQLQFLTPQQQQQLLLHAQQNLSSSMSSDVDTRRLRMLLNNRNVVLGQDGQTNSGGDVIPNIGSPGQSGGSRNDIDILIKKKFALLQQQQQQQSHSQQQQLQQPALSGQQSQSSNQLLHQHGKPGVGSLPIDGNLPNSFGFPEQGSKKRKKPVSSSGRANSSGTANTAGPSPSSAPSTPSTHTPGDAMSIPQLQYNGGPSKPLMMFGSDGTGSLTSPANPLGDVERLLEDGSLDENVESFLSQDDMDPRETMGRCMDSSKGLGFTEVAKARASTNKVVCCHFSLDGKLLATGGHDKKVVLWFTDVLKRKSALEEHSSLITDVRFSPGMTRLATSSFDKTVRVWDADNPDYSLRTFTGHSASVMSLDFHPNKEDIVCSCDSDGEVRCWSINNGSCVTCVRVFNGGATRLRFQPRQGKYLAAASEKGISILDAETLQVCRTPLQGHVQIIQSVCWDAAGNYLASVSEDSVRVWSFTSGNYIECIHELICSGNKFHSCVFHPNYPNLLIIGCYESLELWDIREKNTVTISNAHDGMVAALAASSASGLVASVSHDQLVKLWR

SEQ ID NO: 175409 - protein, 720 aa, Zea Mays
MQQMLLHRAAQQQQQQQRRDGSLLNAKMYEERLKLPPQRDSLDEASIKLQQRYGENVGQVIDPNQALLKAAAAGQSSGQILHGTASGLSGTPQQVQARSPQQPPTAEQNIRTEINPVLTPRAAGTEGSLIGIQGSNQAGNNLTLKGWPLTQKPFMQSPQQFQQLQFLTPQQQQQLLLHAQQNLSSSMSSDVDTRRLRMLLNNRNVVLGQDGQTNSGGDVIPNIGSPGQSGGSRNDIDILIKKKFALLQQQQQQQSHSQQQQLQQPALSGQQSQSSNQLLHQHGKPGVGSLPIDGNLPNSFGFPEQGSKKRKKPVSSSGRANSSGTANTAGPSPSSAPSTPSTHTPGDAMSIPQLQYNGGPSKPLMMFGSDGTGSLTSPANPLGDVERLLEDGSLDENVESFLSQDDMDPRETMGRCMDSSKGLGFTEVAKARASTNKVVCCHFSLDGKLLATGGHDKKVVLWFTDVLKRKSALEEHSSLITDVRFSPGMTRLATSSFDKTVRVWDADNPDYSLRTFTGHSASVMSLDFHPNKEDIVCSCDSDGEVRCWSINNGSCVTCVRVFNGGATRLRFQPRQGKYLAAASEKGISILDAETLQVCRTPLQGHVQIIQSVCWDAAGNYLASVSEDSVRVWSFTSGNYIECIHELICSGNKFHSCVFHPNYPNLLIIGCYESLELWDIREKNTVTISNAHDGMVAALAASSASGLVASVSHDQLVKLWR

SEQ ID NO: 175410 - protein, 731 aa, Zea Mays
MQQMLLHRAAQQQQQQQRRDGSLLNAKMYEERLKLPPQRDSLDEASIKLQQRYGENVGQVIDPNQALLKAAAAGQSSGQILHGTASGLSGTPQQVQARSPQQPPTAEQNIRTEINPVLTPRAAGTEGSLIGIQGSNQAGNNLTLKGWPLTGLDHFRSGILQQKPFMQSPQQFQQLQFLTPQQQQQLLLHAQQNLSSSMSSDVDTRRLRMLLNNRNVVLGQDGQTNSGGDVIPNIGSPGQSGGSRNDIDILIKKKFALLQQQQQQQSHSQQQQLQQPALSGQQSQSSNQLLHQHGKPGVGSLPIDGNLPNSFGFPEQGSKKRKKPVSSSGRANSSGTANTAGPSPSSAPSTPSTHTPGDAMSIPQLQYNGGPSKPLMMFGSDGTGSLTSPANPLGDVERLLEDGSLDENVESFLSQDDMDPRETMGRCMDSSKGLGFTEVAKARASTNKVVCCHFSLDGKLLATGGHDKKVVLWFTDVLKRKSALEEHSSLITDVRFSPGMTRLATSSFDKTVRVWDADNPDYSLRTFTGHSASVMSLDFHPNKEDIVCSCDSDGEVRCWSINNGSCVTCVRVFNGGATRLRFQPRQGKYLAAASEKGISILDAETLQVCRTPLQGHVQIIQSVCWDAAGNYLASVSEDSVRVWSFTSGNYIECIHELICSGNKFHSCVFHPNYPNLLIIGCYESLELWDIREKNTVTISNAHDGMVAALAASSASGLVASVSHDQLVKLWR

SEQ ID NO: 175411 - protein, 744 aa, Zea Mays
MQQMLLHRAAQQQQQQQRRDGSLLNGTASGFSGNDPLIRQNPANANSMAAKMYEERLKLPPQRDSLDEASIKLQQRYGENVGQVIDPNQALLKAAAAGQSSGQILHGTASGLSGTPQQVQARSPQQPPTAEQNIRTEINPVLTPRAAGTEGSLIGIQGSNQAGNNLTLKGWPLTQKPFMQSPQQFQQLQFLTPQQQQQLLLHAQQNLSSSMSSDVDTRRLRMLLNNRNVVLGQDGQTNSGGDVIPNIGSPGQSGGSRNDIDILIKKKFALLQQQQQQQSHSQQQQLQQPALSGQQSQSSNQLLHQHGKPGVGSLPIDGNLPNSFGFPEQGSKKRKKPVSSSGRANSSGTANTAGPSPSSAPSTPSTHTPGDAMSIPQLQYNGGPSKPLMMFGSDGTGSLTSPANPLGDVERLLEDGSLDENVESFLSQDDMDPRETMGRCMDSSKGLGFTEVAKARASTNKVVCCHFSLDGKLLATGGHDKKVVLWFTDVLKRKSALEEHSSLITDVRFSPGMTRLATSSFDKTVRVWDADNPDYSLRTFTGHSASVMSLDFHPNKEDIVCSCDSDGEVRCWSINNGSCVTCVRVFNGGATRLRFQPRQGKYLAAASEKGISILDAETLQVCRTPLQGHVQIIQSVCWDAAGNYLASVSEDSVRVWSFTSGNYIECIHELICSGNKFHSCVFHPNYPNLLIIGCYESLELWDIREKNTVTISNAHDGMVAALAASSASGLVASVSHDQLVKLWR

SEQ ID NO: 175412 - protein, 881 aa, Zea Mays
MMPYNRESTTITIKDVASSLYSQVIDFLTPCRLDVYIYDYFVKRNLQATAKAFQAEGKVSSDPVAIDAPGGFLFEWWSVFWDIFIARTNEKHSDVAASYIETQLIKAREQQHQQPPQQQQQQQQIQMQQMLLHRAAQQQQQQQRRDGSLLNGTASGFSGNDPLIRQNPANANSMAAKMYEERLKLPPQRDSLDEASIKLQQRYGENVGQVIDPNQALLKAAAAGQSSGQILHGTASGLSGTPQQVQARSPQQPPTAEQNIRTEINPVLTPRAAGTEGSLIGIQGSNQAGNNLTLKGWPLTGLDHFRSGILQQKPFMQSPQQFQQLQFLTPQQQQQLLLHAQQNLSSSMSSDVDTRRLRMLLNNRNVVLGQDGQTNSGGDVIPNIGSPGQSGGSRNDIDILIKKKFALLQQQQQQQSHSQQQQLQQPALSGQQSQSSNQLLHQHGKPGVGSLPIDGNLPNSFGFPEQGSKKRKKPVSSSGRANSSGTANTAGPSPSSAPSTPSTHTPGDAMSIPQLQYNGGPSKPLMMFGSDGTGSLTSPANPLGDVERLLEDGSLDENVESFLSQDDMDPRETMGRCMDSSKGLGFTEVAKARASTNKVVCCHFSLDGKLLATGGHDKKVVLWFTDVLKRKSALEEHSSLITDVRFSPGMTRLATSSFDKTVRVWDADNPDYSLRTFTGHSASVMSLDFHPNKEDIVCSCDSDGEVRCWSINNGSCVTCVRVFNGGATRLRFQPRQGKYLAAASEKGISILDAETLQVCRTPLQGHVQIIQSVCWDAAGNYLASVSEDSVRVWSFTSGNYIECIHELICSGNKFHSCVFHPNYPNLLIIGCYESLELWDIREKNTVTISNAHDGMVAALAASSASGLVASVSHDQLVKLWR

SEQ ID NO: 175413 - protein, 636 aa, Zea Mays
MGLLVVCQVLRNKFRQEAHNNHLQQNRTEINPVLTPRAAGTEGSLIGIQGSNQAGNNLTLKGWPLTQKPFMQSPQQFQQLQFLTPQQQQQLLLHAQQNLSSSMSSDVDTRRLRMLLNNRNVVLGQDGQTNSGGDVIPNIGSPGQSGGSRNDIDILIKKKFALLQQQQQQQSHSQQQQLQQPALSGQQSQSSNQLLHQHGKPGVGSLPIDGNLPNSFGFPEQGSKKRKKPVSSSGRANSSGTANTAGPSPSSAPSTPSTHTPGDAMSIPQLQYNGGPSKPLMMFGSDGTGSLTSPANPLGDVERLLEDGSLDENVESFLSQDDMDPRETMGRCMDSSKGLGFTEVAKARASTNKVVCCHFSLDGKLLATGGHDKKVVLWFTDVLKRKSALEEHSSLITDVRFSPGMTRLATSSFDKTVRVWDADNPDYSLRTFTGHSASVMSLDFHPNKEDIVCSCDSDGEVRCWSINNGSCVTCVRVFNGGATRLRFQPRQGKYLAAASEKGISILDAETLQVCRTPLQGHVQIIQSVCWDAAGNYLASVSEDSVRVWSFTSGNYIECIHELICSGNKFHSCVFHPNYPNLLIIGCYESLELWDIREKNTVTISNAHDGMVAALAASSASGLVASVSHDQLVKLWR

SEQ ID NO: 175414 - protein, 858 aa, Zea Mays
MSQTNWEADKMLDVYIYDYFVKRNLQATAKAFQAEGKVSSDPVAIDAPGGFLFEWWSVFWDIFIARTNEKHSDVAASYIETQLIKAREQQHQQPPQQQQQQQQIQMQQMLLHRAAQQQQQQQRRDGSLLNGTASGFSGNDPLIRQNPANANSMAAKMYEERLKLPPQRDSLDEASIKQRYGENVGQVIDPNQALLKAAAAGQSSGQILHGTASGLSGTPQQVQARSPQQPPTAEQNIRTEINPVLTPRAAGTEGSLIGIQGSNQAGNNLTLKGWPLTGLDHFRSGILQQKPFMQSPQQFQQLQFLTPQQQQQLLLHAQQNLSSSMSSDVDTRRLRMLLNNRNVVLGQDGQTNSGGDVIPNIGSPGQSGGSRNDIDILIKKKFALLQQQQQQQSHSQQQQLQQPALSGQQSQSSNQLLHQHGKPGVGSLPIDGNLPNSFGFPEQGSKKRKKPVSSSGRANSSGTANTAGPSPSSAPSTPSTHTPGDAMSIPQLQYNGGPSKPLMMFGSDGTGSLTSPANPLGDVERLLEDGSLDENVESFLSQDDMDPRETMGRCMDSSKGLGFTEVAKARASTNKVVCCHFSLDGKLLATGGHDKKVVLWFTDVLKRKSALEEHSSLITDVRFSPGMTRLATSSFDKTVRVWDADNPDYSLRTFTGHSASVMSLDFHPNKEDIVCSCDSDGEVRCWSINNGSCVTCVRVFNGGATRLRFQPRQGKYLAAASEKGISILDAETLQVCRTPLQGHVQIIQSVCWDAAGNYLASVSEDSVRVWSFTSGNYIECIHELICSGNKFHSCVFHPNYPNLLIIGCYESLELWDIREKNTVTISNAHDGMVAALAASSASGLVASVSHDQLVKLWR

SEQ ID NO: 175415 - protein, 473 aa, Zea Mays
MAGPSVPAAALAALLAVAALTCCAVAEPPPSERSALLAFLTATPHERRLGWNASTPACGWVGVTDNANSTVVEVRLPGVGLVGAIPPGTLGRLTNLRVLSLRSNRVLGTVPDDVLQLASLKALFLQQNLLSGPIPTGIQKLGGLERLVLSHNNLSGSIPFALNKLTALRVLKLDGNHLSGSIPSISIAGLGALNVSDNNLNGSIPKSLSHFPRESFAGNLQLCGDPLPPCSSSFFPPAPSPGLSPGPATGSSKRRKLSGAAIAGIVVGGVVVGLLLLIAVVLCAVSKRRSAGAREGPKAATSSAAAAAGSGATRGQPPPASGEGGGMTSSSKEDLGGGASGSAAAVAAAAAGGAAGEQSRLVFVGKGAGYSFDLEDLLRASAEVLGKGSVGTSYKAVLEEGTTVVVKRLKDVAVQRREFDAHMEAVGRVEHRNVLPVRAYYFSKDEKLLVYDYLPNGSLSAMLHGLCEESTIR

SEQ ID NO: 175416 - protein, 797 aa, Zea Mays
MAASLFRFIGGVSRNMIVANVFASFMLLVVMVLGGFILVRDKVKKWWIWGYWISPMMYAQNAISVNEMLGHSWDKILNSTASNETLGVQVLKSRGVFTEAKWYWIGFGAMVGFTILFNALFTVALTYLKPYGNSRPSVSEEELKEKHANIKGEVLDGNHLVSASSHRSTGVNPETDSAIMEDDSALTKRGMILPFVPLSLTFDNIKYSVDMPQEMKAQGVQEDRLELLKGVSGSFRPGVLTALMGVSGAGKTTLMDVLAGRKTGGYIEGDIRISGYPKKQDTFARVSGYCEQNDIHSPQVTVYESLLFSAWLRLPKDVDSNKRKIFIEEVMELVELKPLRNALVGLPGVNGLSTEQRKRLTIAVELVANPSIIFMDEPTSGLDARAAAIVMRTVRNTVDTGRTVVCTIHQPSIDIFEAFDELFLMKRGGEEIYAGPLGHHSSDLIKYFESLHGVSKIKDGYNPATWMLEVTTTSQEQILGVDFSDIYKKSELYQRNKALIKELSQPAPGSTDLHFPSKYAQSSITQCVACLWKQNLSYWRNPPYNTVRFFFTTIIALLLGTIFWDLGGKTYTSQDLMNAMGSMYSAVLFIGVMNCTSVQPVVAVERTVFYRERAAGMYSAFPYAFGQVVIELPYALAQDILYGVIVYSMIGFEWTAAKFFWYLFFGYFTLLYFTFYGMMAVGLTPNYHIAAIVSSAFYAIWNLFSGFIIPRPKVPIWWRWYCWICPVAWTLYGLVVSQFGDVMTPMDDGRAVKVFVEDYFDFKHSWLGWVAAVVVAFAVLFATLFGFAIMKLNFQKR

SEQ ID NO: 175417 - protein, 107 aa, Zea Mays
MKHSLKLRSVYTDVEDFEGTKDASKEPLVTSYNRKFMGTVDYIWASEGLHTVKVLDTFPIEILKKTTGFPTKVWAILDMHHPDFRCCIYCHFCHLPISQMAQEGMEL

SEQ ID NO: 175418 - protein, 53 aa, Zea Mays
MGTVDYIWASEGLHTVKVLDTFPIEILKKTTGFPTKKWGSDHIALACELAFTK

SEQ ID NO: 175419 - protein, 89 aa, Zea Mays
MKHSLKLRSVYTDVEDFEGTKDASKEPLVTSYNRKFMGTVDYIWASEGLHTVKVLDTFPIEILKKTTGFPTKKWGSDHIALACELAFTK

SEQ ID NO: 175420 - protein, 314 aa, Zea Mays
MRLASYAFLRRAAAMSSPSSYSRTGYPRPRRGYSGRPSPPPPPPPPDAASEIVSRDYHLSAVHAANESLRRGGGGDIRWPPPPYRQGPHPHQPHYGYGYGYGYGYGQTWQPGPSYGFVPYNYGHPQQQPPGPQYGYGAPNPYVHGHLQPQPHVRGAASPGFRPGAPQLTPRLADYLRRWRFAKQRPPHQAGRFIILSYNILADYLAQEHRFLYEKISPFILDWNWRKDKLLFEFGLWSPDILCLQEVDKFTDLEQEMASQGYNGTWKIRTGDAADGCAIFWRTTRFQLRYEEDIEFTKLGLRDNVAQLCVLEDT

SEQ ID NO: 175421 - protein, 372 aa, Zea Mays
MAVGPVGMDTRGFRTHRIWIRVQKLTRGSYRVGYPKYIGSVYNNISTGYPIPGGYPMGMDTVMLERHRVHRDADGDLPAAVTAPLLAHPPSPAEPWPANFGSSEITDEEIDAASAACCRICLESESEPGDVLISPCMCKGTQQFVHRSCLDHWRSVKEGTAFSHCTTCKARFHLRVEFLEDDICRRMKFRMFVARDVIIIFLLIQATIAAIGGMAYFLDKDGNFRNKFSDDWERFLSKHPVPFYYCVGVVVFFVMVGFFGLILHLSSYNNNDPCLVGSRDCCFGCGLVDLPASMEACFAFAVIFVIMLAILGVAYGFLAATVAIQRIWQRHYHILTKKELTKEYVVEDLPGGYTPPKMDPEHEQRLKVLQLM

SEQ ID NO: 175422 - protein, 252 aa, Zea Mays
MAVGPVGMDTRGFRTHRIWIRVQKLTRGSYRVGYPKYIGSVYNNISTGYPIPGGYPMGMDTVMLERHRVHRDADGDLPAAVTAPLLAHPPSPAEPWPANFGSSEITDEEIDAASAACCRICLESESEPGDVLISPCMCKGTQQFVHRSCLDHWRSVKEGTAFSHCTTCKARFHLRVEFLEDDICRRMKFRMFVARDVIIIFLLIQATIAAIGGMAYFLDKDGNFRNKFSDDWERFLSKHPVPFYYCVWLCSL

SEQ ID NO: 175423 - protein, 767 aa, Zea Mays
MRPTRLLAAASSTFRRRRLYTAAAVSTVAPSSAAPPPQSAVQPLSTQFARPSPARGHGVADDLASSLRALLASSPTVQHAFHLLRSAALDTRLPPNELVDAVLSTVDAGSPAAVTLLSHVLTCLSRAASDCAAAAAAYSRMVTRGVVPDAKSRTDLLVTTARGASAADALTLFDEMRGKGCYADAKMYDVVIRACVRGGMHCDAVRLFDEMAGAGVKPDERVYAITISGLCKLRDADRALQVLGKMREAGFEPWELTYSSVVDVLVKVGRMDEALRLKDQMLLATGKKMDVVLATMLMHGYCLHGEVGKALDLFDEVVSDGVTPTNVTYGVLIKGCDAEGMSDETYKLCRQMIEQGLLLSTYEFNLVIKGLLRDKRWKDAIGLLELVVDTGVPDVFTYGCLIHWLCKHQKLHEAVNLWDKMKEAGVKPSIVTYHSLLLGYCEKGRMDEALKLYSEMPDKGFPPNEVTYTTLMKGYIKKKAFDNAYALLNEMRQNGVSCGDYTYNILINGLYMVNRVCEVDEMLKRFLSEGFVPTTMTYNSIINGFVKAGMMGSAFGMYRQMRKKVKLLIYVRRDGIQPDIAAYNAFIDTFCKQGNMSRALHFLVLLLKDGLTPDVTVYNSFVTGYKNLKMMAEASKFYYSMIKQRVVADTEIYTTLIDGFSKVGNVAFALELYSEMMANHVIPDDKTFTALTHGLCRSGDIDGAKRLLDDMRRLDVSPNIVTYNMLINACVRDGKLQEAFQLHDEMLSSGVVPDDTTYDILPRTNNS

SEQ ID NO: 175424 - protein, 767 aa, Zea Mays
MRPTRLLAAASSTFRRRRLYTAAAVSTVAPSSAAPPPQGAVQPLSTQFARPSPARGHGVADDLASSLRALLASSPTVQHAFHLLRSAALDTRLPPNELVDAVLSTVDPGSPAAVTLLSHVLTCLSRAASDCAAAAAAYSRMVTRGVVPDAKSRTDLLVTTALGASAADALTLFDEMRGKGCYADAKMYDVVIRACVRGGMHCDAVRLFDEMAGAGVKPDERVYAITISGLCKLRDADRALQVLGKMREAGFEPWELTYSSVVDVLVKVRRMDEALRLKDQMLLATGKKMDVVLATMLMHGYCLNGEVGKALDLFDEVVSDGVTPTNVTYGVLIKGCDAEGMTDETYKLCRQMIEQGLLPSTYEFNLVIKGLLRDKRWKDAIGLLKLVVDTGVPDVFTYGCLIHWLCKHQKLHEAVNLWDKMKEAGVKPSIVTYHSLLLGYCEKGRMDEALKLYSEMPDKGFPPNEVTYTTLMKGYIKKKAFDNAYALLNEMRQNGVSCGDYTYNILINGLYMVNRVCEVDEMLKRFLSEGFVPTTMTYNSIINGFVKAGMMGSAFGMYRQMRKKVKLLIYVRRDGIQPDIAAYNAFIDTFCKQGNMSRALHFLVLLLKDGLTPDVTVYNSFVTGYKNLKMMAEASKFYYSMIKQRVVADTEIYTTLIDGFSKVGNVAFALELYSEMMANHVIPDDKTFTALTHGLCRSGDIDGAKRLLDDMRRLDVSPNIVTYNMLINACVRDGKLQEAFQLHDEMLSSGVVPDDTTYDILPRTNNS

SEQ ID NO: 175425 - protein, 95 aa, Zea Mays
MSSEGSNLLHEVFPEVNHTVLEQLSKVDCIVYAMGSLFTSVCPSLVLRGIGETIASRSIPKRDCWAVCLWFCHCNYRFSKSDLWRPSQKLKESYQ

SEQ ID NO: 175426 - protein, 299 aa, Zea Mays
MALVACPRCNITPPQASACGIRCLLRAPRSAASRPPPWRLRRSRAMAVYEGWHSAAAGADTDGGAPAPHVPPSLLVFSGGTAFNGVVEELKKVTTRVAHVLPVSDDGGSTAEIVRVLGGPAVGDIRSRCLRLSDESTAEALSVRKLLGHRLPIDPSEAKLEWYQIVEGDHTLWEGVSRPYRETIRAFLVYFHSEILRRSAEMFCFTNGSIGNFFFAGARIFFQSLDAAIFLFSRVSQIPAESLVLPVISTNDRLTLGCELWDGTIIRGQNEISHPSNGRREIVNKHTSFKDQACVLHVK

SEQ ID NO: 175427 - protein, 209 aa, Zea Mays
MALVACPRCNITPPQASACGIRCLLRAPRSAASRPPPWRLRRSRAMAVYEGWHSAAAGADTDGGAPAPHVPPSLLVFSGGTAFNGVVEELKKVTTRVAHVLPVSDDGGSTAEIVRVLGGPAVGDIRSRCLRLSDESTAEALSVRKLLGHRLPIDPSEAKLEWYQIVEGDHTLWEGVSRPYRETIRAFLVYFHSEILRRSAEMFCFTNGR

SEQ ID NO: 175428 - protein, 398 aa, Zea Mays
MALVACPRCNITPPQASACGIRCLLRAPRSAASRPPPWRLRRSRAMAVYEGWHSAAAGADTDGGAPAPHVPPSLLVFSGGTAFNGVVEELKKVTTRVAHVLPVSDDGGSTAEIVRVLGGPAVGDIRSRCLRLSDESTAEALSVRKLLGHRLPIDPSEAKLEWYQIVEGDHTLWEGVSRPYRETIRAFLVYFHSEILRRSAEMFCFTNGSIGNFFFAGARIFFQSLDAAIFLFSRVSQIPAESLVLPVISTNDRLTLGCELWDGTIIRGQNEISHPSNGRREIVNKDCNSCSTLPSRIKRVFYMSSEGSNLLHEVFPEVNHTVLEQLSKVDCIVYAMGSLFTSVCPSLVLRGIGETIASRSIPKVSNYAKTRLVCLVDVWLERCSEVASLKYTSSEWVT

SEQ ID NO: 175429 - protein, 384 aa, Zea Mays
MALVACPRCNITPPQASACGIRCLLRAPRSAASRPPPWRLRRSRAMAVYEGWHSAAAGADTDGGAPAPHVPPSLLVFSGGTAFNGVVEELKKVTTRVAHVLPVSDDGGSTAEIVRVLGGPAVGDIRSRCLRLSDESTAEALSVRKLLGHRLPIDPSEAKLEWYQIVEGDHTLWEGVSRPYRETIRAFLVYFHSEILRRSAEMFCFTNGSIGNFFFAGARIFFQSLDAAIFLFSRVSQIPAESLVLPVISTNDRLTLGCELWDGTIIRGQNEISHPSNGRREIVNKDCNSCSTLPSRIKRVFYMSSEGSNLLHEVFPEVNHTVLEQLSKVDCIVYAMGSLFTSVCPSLVLRGIGETIASRSIPKVSNYAKTRLGINFPCLVTMMF

SEQ ID NO: 175430 - protein, 183 aa, Zea Mays
MFCFTNGSIGNFFFAGARIFFQSLDAAIFLFSRVSQIPAESLVLPVISTNDRLTLGCELWDGTIIRGQNEISHPSNGRREIVNKDCNSCSTLPSRIKRVFYMSSEGSNLLHEVFPEVNHTVLEQLSKVDCIVYAMGSLFTSVCPSLVLRGIGETIASRSIPKVSNYAKTRLGINFPCLVTMMF

SEQ ID NO: 175431 - protein, 273 aa, Zea Mays
MALVACPRCNITPPQASACGIRCLLRAPRSAASRPPPWRLRRSRAMAVYEGWHSAAAGADTDGGAPAPHVPPSLLVFSGGTAFNGVVEELKKVTTRVAHVLPVSDDGGSTAEIVRVLGGPAVGDIRSRCLRLSDESTAEALSVRKLLGHRLPIDPSEAKLEWYQIVEGDHTLWEGVSRPYRETIRAFLVYFHSEILRRSAEMFCFTNGRMGLSFVAKMKYHIQAMDAEKLSTRIVIHVAHFLQGSSVCFTCQVKAATYCMRFSLKLTIQFWSS

SEQ ID NO: 175432 - protein, 418 aa, Zea Mays
MDPFSKKRKPDENGAVTASPAGGAATLGLTRDDVIRLLEPLSRDQLADIAAAAALVSSQALDAVRAAADRDPALRKLFVRGLGWETTSDSLRAIFSAYGDLEEAVVITDKPTGRSKGYGFVTFRHADSAVLALKEPSKKIDGRMTVTQLAAAGSAGGPAGGPAGSGGAPVSDVSLRKIFVGNVPADMASERLLAHFASYGEIEEGPLGFDKQTGKFRGFALFVYKTPEGAQASLVDTVKVIDGHQLVCKLALDGKKEKQGQSQQPGPGNHQQQQILPGGPQDIQGGLGLGSQMGAQYGVPGTGGAGGLGSMGGQVPSGLASAGAGAFGPGGLGGGSFGVSSQFGAAGMGAYGGLGIGGGSMYRIQQGAGGLPAGTFGDGGSYPPPGSGFRGQDPQGGMSPPGPGGRAPPMYPNVPPYF

SEQ ID NO: 175433 - protein, 99 aa, Zea Mays
MSSQEHQQAFAQGFPLWDAKVRGDDVPVLHHHCYATLHPACRAACHSPAHHKNHCCPIRPLPIHQISFPPSPSSLPKFSEGAPFSSARAPYIVGVATKI

SEQ ID NO: 175434 - protein, 112 aa, Zea Mays
MKRRLARVPRASIVGKRRAEAMVPAGRYGYGQTPPSPLYSNLSNMYPTGIEATYIQPSLVLPCWVHMLLQTTKTMYTECVHTRILSTCLTMMTQTGYVSIVMWTYMLRKNSK

SEQ ID NO: 175435 - protein, 79 aa, Zea Mays
MIWLTVLHATCFGYARMSSPEATHRSLDPKEASLLFTSWREASMLFSSLVHLLKQIPLVTPIAIARISCFGAYLLEMVG

SEQ ID NO: 175436 - protein, 135 aa, Zea Mays
MAPVQATLPFPAPIVPAVALNPAANFLQSFDFHATHVPVEPMPMIYPQRPGEIVCDFYMKTGSCKYAQNCKFHHPFDRSAPHSKENEDTQQPVALTLAGLPRREDAEACAFYMRSGTCGFGARCKFDHPPRQDDV

SEQ ID NO: 175437 - protein, 161 aa, Zea Mays
MKTGSCKYGSICRFNHPDRSVVDIAFMAPVQATLPFPAPIVPAVALNPAANFLQSFDFHATHVPVEPMPMIYPQRPGEIVCDFYMKTGSCKYAQNCKFHHPFDRSAPHSKENEDTQQPVALTLAGLPRREDAEACAFYMRSGTCGFGARCKFDHPPRQDDV

SEQ ID NO: 175438 - protein, 234 aa, Zea Mays
MMRIIILSDQGNQIYLLSSRCKFKSKCKFNHPKEMVNALGTRTDNESLIADTTILPVRPSEPVCSGEVDCSFYMKTGSCKYGSICRFNHPDRSVVDIAFMAPVQATLPFPAPIVPAVALNPAANFLQSFDFHATHVPVEPMPMIYPQRPGEIVCDFYMKTGSCKYAQNCKFHHPFDRSAPHSKENEDTQQPVALTLAGLPRREDAEACAFYMRSGTCGFGARCKFDHPPRQDDV

SEQ ID NO: 175439 - protein, 254 aa, Zea Mays
MRPSEPVCSFYAKTGKCKFGAVCKFNHPKLEDIKTPSLIAKETIYRATTDAAAHIGGTDDSVPAKTHAPIAPAEAHNAKGLPIRPGEVDCSFYMKTGSCKYGSICRFNHPDRSVVDIAFMAPVQATLPFPAPIVPAVALNPAANFLQSFDFHATHVPVEPMPMIYPQRPGEIVCDFYMKTGSCKYAQNCKFHHPFDRSAPHSKENEDTQQPVALTLAGLPRREDAEACAFYMRSGTCGFGARCKFDHPPRQDDV

SEQ ID NO: 175440 - protein, 331 aa, Zea Mays
MRTSTCLSFFTLTVLPQTFWLNIISMPSIAILPPLVLNDEDYYPERPGEPDCPYLLSSRCKFKSKCKFNHPKEMVNALGTRTDNESLIADTTILPVRPSEPVCSFYAKTGKCKFGAVCKFNHPKLEDIKTPSLIAKETIYRATTDAAAHIGGTDDSVPAKTHAPIAPAEAHNAKGLPIRPGEVDCSFYMKTGSCKYGSICRFNHPDRSVVDIAFMAPVQATLPFPAPIVPAVALNPAANFLQSFDFHATHVPFYMKTGSCKYAQNCKFHHPFDRSAPHSKENEDTQQPVALTLAGLPRREDAEACAFYMRSGTCGFGARCKFDHPPRQDDV

SEQ ID NO: 175441 - protein, 629 aa, Zea Mays
MELSPLPMLAASRFLSLSPLLAPTCPQRTAPSVRVATQTLEAPEAPKPPRPSPRRSAVAEVKGALDPIAALNRFEEVLQTQDCNIILRHCGDIRRWDDLSKVFEWMQEREMTNAASYSSYFKYLGLSRDPARVLRVYGAIKDRTLRVHVSVCNSVLGCLVKNGRLDSSFKLYDEMIREGLSPDPFTYSTLLAGCMKLKQGYTKAMGLINEMKSRGLQMDIVIYGTLLAICASHNYCEEAEVYFQKMKDEGHSPNLFHYSSLLNAYSENSDYGKAELLMKDLRSSGLTPNKVMLTTLLKVYSKGGLFEKAKGLLTELEASGFAQDEMPYCILIDGLVKGGKIQEANILFNEMKEKGVKSDGYAFSIMISALHRGGHHQESKQLAKEFESENASYDLVMLNTSLRTYCSTNDMESVMRMLKKMDESNISPDNITFNTLIRYFCNAKVCHLAYKTVEDMHAKGHQLNEELCSHVMVQLGKAGFPSEAFSVYNMLRYSKRTVHKSLHEKVLGILVPAELLKAAYIVVKFAKSFMVSGNINLINDVMKALNRSGWRISQDIFGRAIKRYIQKPDKKQLLLCLLDWMIGQGYSVDSSSRNLLLKNAQLFGEKQVIAEILSKQQIASRTIGLRHKK

SEQ ID NO: 175442 - protein, 332 aa, Zea Mays
MELSPLPMLAASRFLSLSPLLAPTCPQRTAPSVRVATQTLEAPEAPKPPRPSPRRSAVAEVKGALDPIAALNRFEEVLQTQDCNIILRHCGDIRRWDDLSKVFEWMQEREMTNAASYSSYFKYLGLSRDPARVLRVYGAIKDRTLRVHVSVCNSVLGCLVKNGRLDSSFKLYDEMIREGLSPDPFTYSTLLAGCMKLKQGYTKAMGLINEMKSRGLQMDIVIYGTLLAICASHNYCEEAEVYFQKMKDEGHSPNLFHYSSLLNAYSENSDYGKAELLMKDLRSSGLTPNKVMLTTLLKVYSKGGLFEKAKGLLTELEASGFAQDEMVMHLAS

SEQ ID NO: 175443 - protein, 365 aa, Zea Mays
MELSPLPMLAASRFLSLSPLLAPTCPQRTAPSVRVATQTLEAPEAPKPPRPSPRRSAVAEVKGALDPIAALNRFEEVLQTQDCNIILRHCGDIRRWDDLSKVFEWMQEREMTNAASYSSYFKYLGLSRDPARVLRVYGAIKDRTLRVHVSVCNSVLGCLVKNGRLDSSFKLYDEMIREGLSPDPFTYSTLLAGCMKLKQGYTKAMGLINEMKSRGLQMDIVIYGTLLAICASHNYCEEAEVYFQKMKDEGHSPNLFHYSSLLNAYSENSDYGKAELLMKDLRSSGLTPNKVMLTTLLKVYSKGGLFEKAKGLLTELEASGFAQDEMPYCILIDGLVKGGKIQEANILFNEMKEKGVKSAQMTWRA

SEQ ID NO: 175444 - protein, 746 aa, Zea Mays
MAVFAVGDFPDTQAVVELINEHFGHKAPAPHPPPVIPEFSVPSHEEPRFSCFVESEAAGSAVVISCKMPAGGIKTVKDYKDSLAESMFHCALNQRLFKISRRKDPPYFSCSSAADALVCPVKAYIMTSSCRERGTVEALESMLLEVARVRLHGFSDREISIVRALMMSEMESAYLERDQMQSTSLRDEFLQHFLREEPVVGIEYEAQLQKTLLPHISSAEVAKFAENFSTASSCVIKIVEPRAHASLEDLKAVVLKVNSMEEDKSIFPWDEEQIPEEIVAQAPEPGTIIAKVEHPGIGATEMILSNGMRICYKYTDFLDDQVVFTGFAYGGLSELSEAEYTSCSMGSTIAGEIGTFGYRPSVLMDMLAGKRAEVGTKVGAYMRTFSGDCSPSDLETALQLVYQLFTTNVEPREEEVKIVMQMAEEAIYAQERDPYTAFANRVREINYGNSYFFKPIRISDLKKVDPIRACEYFNNCFKDPSAFTVVIVGKIDPAISLPLVLQYLGGIPRVQDATQPLSRDDLRGLPFKFPATIIREVVRSPMVEAQCFVQLAFPVVLKNTMMTEDIHYVGFLSKLLETKIMQVLRFKYGQIYSVNVAVFLGGNKPSRTGDVRGDISVNFSCDPDISSKLENYFWLDRILRSYQSRLFSGDIGSTFAFQEEGRIKVRDALTPQSMQSALQRVIPFPCRKQYTVVILMPKSSCWASVKSMLSWSSNGVSRDAKILAGMAGALVLAVSLWRYSRSSLKS

SEQ ID NO: 175445 - protein, 439 aa, Zea Mays
MGSTIAGEIGTFGYRPSVLMDMLAGKRAEVGTKVGAYMRTFSGDCSPSDLETALQLVYQLFTTNVEPREEEVKIVMQMAEEAIYAQERDPYTAFANRVREINYGNSYFFKPIRISDLKKVDPIRACEYFNNCFKDPSAFTVVIVGKIDPAISLPLVLQYLGGIPRVQDATQPLSRDDLRGLPFKFPATIIREVVRSPMVEAQCFVQLAFPVVLKNTMMTEDIHYVGFLSKLLETKIMQVLRFKYGQIYSVNVAVFLGGNKPSRTGDVRGDISVNFSCDPDISSKLVDFVLEEISCLQTEGPSEEDVLSILEIEQRAHENGLQENYFWLDRILRSYQSRLFSGDIGSTFAFQEEGRIKVRDALTPQSMQSALQRVIPFPCRKQYTVVILMPKSSCWASVKSMLSWSSNGVSRDAKILAGMAGALVLAVSLWRYSRSSLKS

SEQ ID NO: 175446 - protein, 871 aa, Zea Mays
MQDSHWALLFDGSKYAERLPIGTEKVIRTVTHETVKRFYQKWYHLSNMAVFAVGDFPDTQAVVELINEHFGHKAPAPHPPPVIPEFSVPSHEEPRFSCFVESEAAGSAVVISCKMPAGGIKTVKDYKDSLAESMFHCALNQRLFKISRRKDPPYFSCSSAADALVCPVKAYIMTSSCRERGTVEALESMLLEVARVRLHGFSDREISIVRALMMSEMESAYLERDQMQSTSLRDEFLQHFLREEPVVGIEYEAQLQKTLLPHISSAEVAKFAENFSTASSCVIKIVEPRAHASLEDLKAVVLKVNSMEEDKSIFPWDEEQIPEEIVAQAPEPGTIIAKVEHPGIGATEMILSNGMRICYKYTDFLDDQVVFTGFAYGGLSELSEAEYTSCSMGSTIAGEIGTFGYRPSVLMDMLAGKRAEVGTKVGAYMRTFSGDCSPSDLETALQLVYQLFTTNVEPREEEVKIVMQMAEEAIYAQERDPYTAFANRVREINYGNSYFFKPIRISDLKKVDPIRACEYFNNCFKDPSAFTVVIVGKIDPAISLPLVLQYLGGIPRVQDATQPLSRDDLRGLPFKFPATIIREVVRSPMVEAQCFVQLAFPVVLKNTMMTEDIHYVGFLSKLLETKIMQVLRFKYGQIYSVNVAVFLGGNKPSRTGDVRGDISVNFSCDPDISSKLVDFVLEEISCLQTEGPSEEDVLSILEIEQRAHENGLQENYFWLDRILRSYQSRLFSGDIGSTFAFQEEGRIKVRDALTPQSMQSALQRVIPFPCRKQYTVVILMPKSSCWASVKSMLSWSSNGVSRDAKILAGMAGALVLANEEKSIMSRKCDIPLCCSVGFHILARTASKGSVGNRDVQERIVLKLVTFKEVFV

SEQ ID NO: 175447 - protein, 1022 aa, Zea Mays
MDLLPPPTDAPDAGGPSAGGSGRGLRRGIGFRSLKLVSVAMDETLPVDPVGATYGRLANGLTYYVRSNPKPRMRAALSLAVKVGSVVEEEDERGVAHIVEHLAFSATARYTNHDIVKFLESIGAEFGACQNALTSSDETIYELLVPVDKPGLLSQAISVLAEFSSEVRVSAEDLEKERGAVLEEYRGGRNAAGRMQDSHWALLFDGSKYAERLPIGTEKVIRTVTHETVKRFYQKWYHLSNMAVFAVGDFPDTQAVVELINEHFGHKAPAPHPPPVIPEFSVPSHEEPRFSCFVESEASAVVISCKMPAGGIKTVKDYKDSLAESMFHCALNQRLFKISRRKDPPYFSCSSAADALVCPVKAYIMTSSCRERGTVEALESMLLEVARVRLHGFSDREISIVRALMMSEMESAYLERDQMQSTSLRDEFLQHFLREEPVVGIEYEAQLQKTLLPHISSAEVAKFAENFSTASSCVIKIVEPRAHASLEDLKAVVLKVNSMEEDKSIFPWDEEQIPEEIVAQAPEPGTIIAKVEHPGIGATEMILSNGMRICYKYTDFLDDQVVFTGFAYGGLSELSEAEYTSCSMGSTIAGEIGTFGYRPSVLMDMLAGKRAEVGTKVGAYMRTFSGDCSPSDLETALQLVYQLFTTNVEPREEEVKIVMQMAEEAIYAQERDPYTAFANRVREINYGNSYFFKPIRISDLKKVDPIRACEYFNNCFKDPSAFTVVIVGKIDPAISLPLVLQYLGGIPRVQDATQPLSRDDLRGLPFKFPATIIREVVRSPMVEAQCFVQLAFPVVLKNTMMTEDIHYVGFLSKLLETKIMQVLRFKYGQIYSVNVAVFLGGNKPSRTGDVRGDISVNFSCDPDISSKLVDFVLEEISCLQTEGPSEEDVLSILEIEQRAHENGLQENYFWLDRILRSYQSRLFSGDIGSTFAFQEEGRIKVRDALTPQSMQSALQRVIPFPCRKQYTVVILMPKSSCWASVKSMLSWSSNGVSRDAKILAGMAGALVLAVSLWRYSRSSLKS

SEQ ID NO: 175448 - protein, 388 aa, Zea Mays
MLFLLPMVAASTERISHPPVAEPRECDWYNLEKSKRVKSFRCGEYDECIEKAKALARQQKRTHAEGRYVRREDAILHALEIERSHFSNNCDDFEEETGNDLCASQNMCSAKSININGLSKKSRGARSLYDTEENSAQESCQTLTLYKKPQNLSSSSTRYASSKRKKRKGHKNHEDDTVQGFQRMRDLREIGTNNVPKQKSGAGIVSDVPLLESGPSFDYDLSSANGIKKGKQSQTSIKKKRSNIGQSCDSLSKKDRHHPLSMLCEDSEVSGTYYHWDRSGQSSSEYLGGQIPNLFESSRAKTSLSTDVNNCSYSSGTSSLEILLDTSHIKHKGSVNAVTLKVADPCTTRILNDDCPDCDEFLAADTLEGDVLEEGKGAIWILMDLVHP

SEQ ID NO: 175449 - protein, 593 aa, Zea Mays
MCSAKSININGLSKKSRGARSLYDTEENSAQESCQTLTLYKKPQNLSSSSTRYASSKRKKRKGHKNHEDDTVQGFQRMRDLREIGTNNVPKQKSGAGIVSDVPLLESGPSFDYDLSSANGIKKGKQSQTSIKKKRSNIGQSCDSLSKKDRHHPLSMLCEDSEVSGTYYHWDRSGQSSSEYLGGQIPNLFESSRAKTSLSTDVNNCSYSSGTSSLEILLDTSHIKHKGSVNAVTLKVADPCTTRILNDDCPDCDEFLAADTLEGDVLEEGHLDTYGSCASIKDQISKLGNQSTGCAIGGTPSTWHNRNSEKKSITSVNLIPKESHKRDKNSLLQCEGIIKSEGTILRPAELEDNTKHTTPEHDESSETISNHSNSEKGTKSLPNYFPLQVLPPPGQQPDLKLPRCPVTSPTKRTSPTKRAHAGYRLYDVELTVQRSYKGHHVPLVSLISKWTGKPIVGYPVTVEVLEDSRPTTSRNEHRPPMGSLGSLPKSRVAEPRQARSSPASRSKSKPSGRKKASEHDLDKSWRPHIKKPASSPRKMRRLSSFAGSRRESADQKPVVVKAGGPAVACVPLRLVLSRINEALSFPLRQENPT

SEQ ID NO: 175450 - protein, 293 aa, Zea Mays
MLFLLPMVAASTERISHPPVAEPRECDWYNLEKSKRVKSFRCGEYDECIEKAKALARQQKRTHAEGRYVRREDAILHALEIERSHFSNNCDDFEEETGNDLCASQNMCSAKSININGLSKKSRGARSLYDTEENSAQESCQTLTLYKKPQNLSSSSTRYASSKRKKRKGHKNHEDDTVQGFQRMRDLREIGTNNVPKQKSGAGIVSDVPLLESGPSFDYDLSSANGIKKGKQSQTSIKKKRSNIGQSCDSLSKKDRHHPLSMLCEDSEVSGTYYHWDRSGQSSTQALQVWRYY

SEQ ID NO: 175451 - protein, 239 aa, Zea Mays
MQVFFARLLLAEMNKELKGLRCVISGSGKIAMHVLEKLLPCGAIPITVSDSKGYLLDEDGFDYMKYSLLRDIKAQQKSLKEYLKSYPHAKYIDDAKPWSQRCDVAFPCASHNEIDQGEAVAISNSGCRVLVECSNMSCTVQAVDILRKAKVIVAPAKATAAGGVALGEIELNPEFNLMQLSVEDFENRIQDAIKQTYERSVKAAQDYGIMKESPEFLVHGANICAFLNIAQAMTDQGCV

SEQ ID NO: 175452 - protein, 270 aa, Zea Mays
MGNRGYILSGNFTGPKIFWSGSSFRTEATGYGLVFFARLLLAEMNKELKGLRCVISGSGKIAMHVLEKLLPCGAIPITVSDSKGYLLDEDGFDYMKYSLLRDIKAQQKSLKEYLKSYPHAKYIDDAKPWSQRCDVAFPCASHNEIDQGEAVAISNSGCRVLVECSNMSCTVQAVDILRKAKVIVAPAKATAAGGVALGEIELNPEFNLMQLSVEDFENRIQDAIKQTYERSVKAAQDYGIMKESPEFLVHGANICAFLNIAQAMTDQGCV

SEQ ID NO: 175453 - protein, 639 aa, Zea Mays
MNSMDEINLLRQAQRQHQHHLMVRGIGEEIDLEIGPVDDPSFSGASLVAVTSTHDTVVHADDHKSLLIPCSQPGAADGLAPQQHLSQGEEHDGMLRSPSGHTKKKKKVVKKWREEWADTYKWAYVAVHDTTTRIFCSVCKEYGRKHRRNPYGNEGSRNMQMSALEEHNNSLLHKEALRLQMASKEKLQPPEIEGPVYVKALSKTAASILECVLRRDPHEAEYIQSIQEVVHSLEPVLVKNAQYIQILERLLEPERCFIFRVPWIDDRGEAHVNRGFRVQFSQALGPCRGGLRFHPSMSLSVAKFLAFEHTLKNALSLYKLGGAAGGSDFDPKGKSDNEIMRFCQSFMDELYRYLGPDQDFPAEDIGVGPREMGYLFGQYRRLSGHFQGNFTGPKIFWSGSSFRTEATGYGLVFFARLLLAEMNKELKGLRCVISGSGKIAMHVLEKLLPCGAIPITVSDSKGYLLDEDGFDYMKYSLLRDIKAQQKSLKEYLKSYPHAKYIDDAKPWSQRCDVAFPCASHNEIDQGEAVAISNSGCRVLVECSNMSCTVQAVDILRKAKVIVAPAKATAAGGVALGEIELNPEFNLMQLSVEDFENRIQVNSAAPDHLAVIFRFCFPIVIPCFWSMARTFVLSLISRKP

SEQ ID NO: 175454 - protein, 428 aa, Zea Mays
MNSMDEINLLRQAQRQHQHHLMVRGIGEEIDLEIGPVDDPSFSGASLVAVTSTHDTVVHADDHKSLLIPCSQPGAADGLAPQQHLSQGEEHDGMLRSPSGHTKKKKKVVKKWREEWADTYKWAYVAVHDTTTRIFCSVCKEYGRKHRRNPYGNEGSRNMQMSALEEHNNSLLHKEALRLQMASKEKLQPPEIEGPVYVKALSKTAASILECVLRRDPHEAEYIQSIQEVVHSLEPVLVKNAQYIQILERLLEPERCFIFRVPWIDDRGEAHVNRGFRVQFSQALGPCRGGLRFHPSMSLSVAKFLAFEHTLKNALSLYKLGGAAGGSDFDPKGKSDNEIMRFCQSFMDELYRYLGPDQTLIFWSRIFPLKILVLVQGKWVTFLGSIDVFLVIFREILQDLKFSGQGQVFEQKLLDMVWCFLHVFYLLK

SEQ ID NO: 175455 - protein, 410 aa, Zea Mays
MNSMDEINLLRQAQRQHQHHLMVRGIGEEIDLEIGPVDDPSFSGASLVAVTSTHDTVVHADDHKSLLIPCSQPGAADGLAPQQHLSQGEEHDGMLRSPSGHTKKKKKVVKKWREEWADTYKWAYVAVHDTTTRIFCSVCKEYGRKHRRNPYGNEGSRNMQMSALEEHNNSLLHKEALRLQMASKEKLQPPEIEGPVYVKALSKTAASILECVLRRDPHEAEYIQSIQEVVHSLEPVLVKNAQYIQILERLLEPERCFIFRVPWIDDRGEAHVNRGFRVQFSQALGPCRGGLRFHPSMSLSVAKFLAFEHTLKNALSLYKLGGAAGGSDFDPKGKSDNEIMRFCQSFMDELYRYLGPDQDFPAEDIGVGPREMGYLFGQYRRLSGHFQGQVFEQKLLDMVWCFLHVFYLLK

SEQ ID NO: 175456 - protein, 443 aa, Zea Mays
MNSMDEINLLRQAQRQHQHHLMVRGIGEEIDLEIGPVDDPSFSGASLVAVTSTHDTVVHADDHKSLLIPCSQPGAADGLAPQQHLSQGEEHDGMLRSPSGHTKKKKKVVKKWREEWADTYKWAYVAVHDTTTRIFCSVCKEYGRKHRRNPYGNEGSRNMQMSALEEHNNSLLHKEALRLQMASKEKLQPPEIEGPVYVKALSKTAASILECVLRRDPHEAEYIQSIQEVVHSLEPVLVKNAQYIQILERLLEPERCFIFRVPWIDDRGEAHVNRGFRVQFSQALGPCRGGLRFHPSMSLSVAKFLAFEHTLKNALSLYKLGGAAGGSDFDPKGKSDNEIMRFCQSFMDELYRYLGPDQDFPAEDIGVGPREMGYLFGQYRRLSGHFQGNFTGPKIFWSGSSFRTEATGYGLVKCYLNFRLAGDSVFCGCYSCFTSVFCTSFTC

SEQ ID NO: 175457 - protein, 395 aa, Zea Mays
MNSMDEINLLRQAQRQHQHHLMVRGIGEEIDLEIGPVDDPSFSGASLVAVTSTHDTVVHADDHKSLLIPCSQPGAADGLAPQQHLSQGEEHDGMLRSPSGHTKKKKKVVKKWREEWADTYKWAYVAVHDTTTRIFCSVCKEYGRKHRRNPYGNEGSRNMQMSALEEHNNSLLHKEALRLQMASKEKLQPPEIEGPVYVKALSKTAASILECVLRRDPHEAEYIQSIQEVVHSLEPVLVKNAQYIQILERLLEPERCFIFRVPWIDDRGEAHVNRGFRVQFSQALGPCRGGLRFHPSMSLSVAKFLAFEHTLKNALSLYKLGGAAGGSDFDPKGKSDNEIMRFCQSFMDELYRYLGPDQTLIFWSRIFPLKILVLVQGKWVTFLGSIDVFLVIFRT

SEQ ID NO: 175458 - protein, 565 aa, Zea Mays
MNSMDEINLLRQAQRQHQHHLMVRGIGEEIDLEIGPVDDPSFSGASLVAVTSTHDTVVHADDHKSLLIPCSQPGAADGLAPQQHLSQGEEHDGMLRSPSGHTKKKKKVVKKWREEWADTYKWAYVAVHDTTTRIFCSVCKEYGRKHRRNPYGNEGSRNMQMSALEEHNNSLLHKEALRLQMASKEKLQPPEIEGPVYVKALSKTAASILECVLRRDPHEAEYIQSIQEVVHSLEPVLVKNAQYIQILERLLEPERCFIFRVPWIDDRGEAHVNRGFRVQFSQALGPCRGGLRFHPSMSLSVAKFLAFEHTLKNALSLYKLGGAAGGSDFDPKGKSDNEIMRFCQSFMDELYRYLGPDQDFPAEDIGVGPREMGYLFGQYRRLSGHFQGNFTGPKIFWSGSSFRTEATGYGLVFFARLLLAEMNKELKGLRCVISGSGKIAMHVLEKLLPCGAIPITVSGSNMSCTVQAVDILRKAKVIVAPAKATAAGGVALGEIELNPEFNLMQLSVEDFENRIQDAIKQTYERSVKAAQDYGIMKESPEFLVHGANICAFLNIAQAMTDQGCV

SEQ ID NO: 175459 - protein, 276 aa, Zea Mays
MNSMDEINLLRQAQRQHQHHLMVRGIGEEIDLEIGPVDDPSFSGASLVAVTSTHDTVVHADDHKSLLIPCSQPGAADGLAPQQHLSQGEEHDGMLRSPSGHTKKKKKVVKKWREEWADTYKWAYVAVHDTTTRIFCSVCKEYGRKHRRNPYGNEGSRNMQMSALEEHNNSLLHKEALRLQMASKEKLQPPEIEGPVYVKALSKTAASILECVLRRDPHEAEYIQSIQEVVHSLEPVLVKNAQYIQILERLLEPERCFIFRVPWIDDRDFKECFVTI

SEQ ID NO: 175460 - protein, 499 aa, Zea Mays
MNSMDEINLLRQAQRQHQHHLMVRGIGEEIDLEIGPVDDPSFSGASLVAVTSTHDTVVHADDHKSLLIPCSQPGAADGLAPQQHLSQGEEHDGMLRSPSGHTKKKKKVVKKWREEWADTYKWAYVAVHDTTTRIFCSVCKEYGRKHRRNPYGNEGSRNMQMSALEEHNNSLLHKEALRLQMASKEKLQPPEIEGPVYVKALSKTAASILECVLRRDPHEAEYIQSIQEVVHSLEPVLVKNAQYIQILERLLEPERCFIFRVPWIDDRGEAHVNRGFRVQFSQALGPCRGGLRFHPSMSLSVAKFLAFEHTLKNALSLYKLGGAAGGSDFDPKGKSDNEIMRFCQSFMDELYRYLGPDQDFPAEDIGVGPREMGYLFGQYRRLSGHFQGNFTGPKIFWSGSSFRTEATGYGLVFFARLLLAEMNKELKGLRCVISGSGKIAMHVLEKLLPCGAIPITVSDSKGYLLDEDGFDYMKYSLLRDIKAQQKSLKWGVLEIISTC

SEQ ID NO: 175461 - protein, 593 aa, Zea Mays
MEPPRRSLCVVASEVSSAAGSDAEDDRYCSANSALGTPSSIATLLPSSDFWDHQMDLLDDHPATAGFPKKHQLRCLQTLASAQSWPETVSPPATAGVDDLAPQGSSPASPYIPPLPRHNQVHGFGGNDLFDDMVQEMEHILLNSGEPHGNGSFMNDRRNNALQAHHFRDGSTTASTSGTDDAFVSPVPQYSSRIDWVEVVGAKQRSGDVSFGERIVGVKKYTVYLFKVRSGEDEWEIERRYREFYALYRLLKGFFYERGLSLPAAWENVERESSKIFGNASPDVVNDRSALIQDCLRSLLVSSYPFGIPTPLVNFLSPGRPGYEYSFLKTLIPRSLQRRSNDLNSKDSDCNGGQHDDSTSMGKTISLIVEDRPQKSTRQLLELQHYNCAGCHRHLDAGRTLLQELAQTIGWNKPRFCSYTGQLFCASCHTNDTAVLPARVLHHWDFSLYPISQLAKAYLDSIYDQPMLCVSAVNPFLFSKVPALLNIMSVRKKIAAMLPCVQCPFRNSILKGLGVRRYLLDGNDFFALRDLVDLSKGAFAALPVKVLTISNRILEHITEQCLVCYDGGVPCAARQACDDPLSLIFPFQEDRGA

SEQ ID NO: 175462 - protein, 158 aa, Zea Mays
MAPQTRRERLAGEARPSSSGLTPAKPGAVEVQRRRVGSGWTSRRISIYASRVYFLLIMLQIPLFRVPCRAGTCTTPIQVTSSQLVSNDIFPAAVVKAMLYPGATVSSLTKSKTFPSWNDLFDMYNLTEAKNASAVVDLQRLEYLPEATSVLLERSLAS

SEQ ID NO: 175463 - protein, 381 aa, Zea Mays
MTEQNIEIDRFFIKEKLDNGTLELGHLRGIPQYAEGSRVEVMCDKQGRVWRPATIKNMVGGTNYVVSYGNGQSSIEVLHTMFIRRPEPIQMEVEAPNDSNMEIKNERMGMSLVVAERFHLETCTNSNDITIVSSQHPWAEPLQPVSEKSPGPSSLLHPVVMADTSAFMALAVPNSSDLSTAFSTTSLLLMPNDKMEVFQKLPQIPHFREAWNCPPELREGRALGLMVCFANMAKSIKDMRIQEEPRLYQEKMNILLEMEENGFETGPLKVRLHNLLCTRNHHMNLKSRKVRLEKEILEIEAINCGLEQRLKFLDMCIMGMEEKKYQEMKGSLDIQKTENCSLISKLQVYLCQVEESLKYAEADFCSIATAPWQPHVVPSIP

SEQ ID NO: 175464 - protein, 382 aa, Zea Mays
MTEQNIEIDRFFIKEKLDNGTLELGHLRGIPQYAEGSRVEVMCDKQGRVWRPATIKNMVGGTNYVVSYGNGQSSIEVLHTMFIRRPEPIQMEVEAPNDSNQMEIKNERMGMSLVVAERFHLETCTNSNDITIVSSQHPWAEPLQPVSEKSPGPSSLLHPVVMADTSAFMALAVPNSSDLSTAFSTTSLLLMPNDKMEVFQKLPQIPHFREAWNCPPELREGRALGLMVCFANMAKSIKDMRIQEEPRLYQEKMNILLEMEENGFETGPLKVRLHNLLCTRNHHMNLKSRKVRLEKEILEIEAINCGLEQRLKFLDMCIMGMEEKKYQEMKGSLDIQKTENCSLISKLQVYLCQVEESLKYAEADFCSIATAPWQPHVVPSIP

SEQ ID NO: 175465 - protein, 281 aa, Zea Mays
MEIKNERMGMSLVVAERFHLETCTNSNDITIVSSQHPWAEPLQPVSEKSPGPSSLLHPVVMADTSAFMALAVPNSSDLSTAFSTTSLLLMPNDKMEVFQKLPQIPHFREAWNCPPELREGRALGLMVCFANMAKSIKDMRIQEEPRLYQEKMNILLEMEENGFETGPLKVRLHNLLCTRNHHMNLKSRKVRLEKEILEIEAINCGLEQRLKFLDMCIMGMEEKKYQEMKGSLDIQKTENCSLISKLQVYLCQVEESLKYAEADFCSIATAPWQPHVVPSIP

SEQ ID NO: 175466 - protein, 338 aa, Zea Mays
MCDKQGRVWRPATIKNMVGGTNYVVSYGNGQSSIEVLHTMFIRRPEPIQMEVEAPNDSNKGFTWKPVRTCIHTLTGPKLFPAANDITIVSSQHPWAEPLQPVSEKSPGPSSLLHPVVMADTSAFMALAVPNSSDLSTAFSTTSLLLMPNDKMEVFQKLPQIPHFREAWNCPPELREGRALGLMVCFANMAKSIKDMRIQEEPRLYQEKMNILLEMEENGFETGPLKVRLHNLLCTRNHHMNLKSRKVRLEKEILEIEAINCGLEQRLKFLDMCIMGMEEKKYQEMKGSLDIQKTENCSLISKLQVYLCQVEESLKYAEADFCSIATAPWQPHVVPSIP

SEQ ID NO: 175467 - protein, 341 aa, Zea Mays
MCDKQGRVWRPATIKNMVGGTNYVVSYGNGQSSIEVLHTMFIRRPEPIQMEVEAPNDSNMEIKNERMGMSLVVAERFHLETCTNSANDITIVSSQHPWAEPLQPVSEKSPGPSSLLHPVVMADTSAFMALAVPNSSDLSTAFSTTSLLLMPNDKMEVFQKLPQIPHFREAWNCPPELREGRALGLMVCFANMAKSIKDMRIQEEPRLYQEKMNILLEMEENGFETGPLKVRLHNLLCTRNHHMNLKSRKVRLEKEILEIEAINCGLEQRLKFLDMCIMGMEEKKYQEMKGSLDIQKTENCSLISKLQVYLCQVEESLKYAEADFCSIATAPWQPHVVPSIP

SEQ ID NO: 175468 - protein, 540 aa, Zea Mays
MTLVHNRCRFSDKQIIKLQETPDEIPEGGTPHTVSVLMHDKLVDAGKPGDRVEITGIYRAMSIRIGPTQRTVKSIFKTYIDCLHIKKTDKSRLHVEDTMDIDNSNASKSTEEDFLSDKVEKLKELSKLPDIYERLTRSLAPNIWELDDVKRGLLCQLFGGNPLKLPSGASFRGDINILLVGDPGTSKSQLLQYMHKLSPRGIYTSGRGSSAVGLTAYVTKDPETGETVLESGALVLSDKGVCCIDEFDKMSDNARSMLHEVMEQQTVSIAKAGIIASLNARTSVLACANPTESRYNPRLSVIDNIHLAPTLLSRFDLIYLILDKADEQTDRRLAKHIVSLHFENPNLEELEVLDLQTLVSYISYARKYIQPQLSDEAAEELTRGYVEMRKRGNSPGSRKKVITATARQIESLIRLSEALARMRFSEVVEVRDVVEAFRLLEVAMQQSATDHATGTIDMDLIMTGISASERQRRENLVAATRNLIAEKMQLGGPSMRMIELLEELRKQSSMEIHMHELRGALGTLMTEGAVVIHGDNVRRV

SEQ ID NO: 175469 - protein, 570 aa, Zea Mays
MASDGGGSSPPRRVTEPHICQKEQCKATNSMTLVHNRCRFSDKQIIKLQETPDEIPEGGTPHTVSVLMHDKLVDAGKPGDRVEITGIYRAMSIRIGPTQRTVKSIFKTYIDCLHIKKTDKSRLHVEDTMDIDNSNASKSTEEDFLSDKVEKLKELSKLPDIYERLTRSLAPNIWELDDVKRGLLCQLFGGNPLKLPSGASFRGDINILLVGDPGTSKSQLLQYMHKLSPRGIYTSGRGSSAVGLTAYVTKDPETGETVLESGALVLSDKGVCCIDEFDKMSDNARSMLHEVMEQQTVSIAKAGIIASLNARTSVLACANPTESRYNPRLSVIDNIHLAPTLLSRFDLIYLILDKADEQTDRRLAKHIVSLHFENPNLEELEVLDLQTLVSYISYARKYIQPQLSDEAAEELTRGYVEMRKRGNSPGSRKKVITATARQIESLIRLSEALARMRFSEVVEVRDVVEAFRLLEVAMQQSATDHATGTIDMDLIMTGISASERQRRENLVAATRNLIAEKMQLGGPSMRMIELLEELRKQSSMEIHMHELRGALGTLMTEGAVVIHGDNVRRV

SEQ ID NO: 175470 - protein, 779 aa, Zea Mays
MASDGGGSSPPPASSPYGRPSSPLAVTNSSPSQPTRRSGGRRRRGSASPYASSPSLGGFETPPHPGRRTPSGAGAGAPRQPRQNSTGRFPPTPSTPMSTDDVPPSSEAGDDETDGGGGVDATPVFVWGTNISVQDVNAAILRFLRHFRDPRDAGRVDPVMDEGKYMRAIHRILELEGGESLDVDAHDVFDHDPDLYSKMVRYPLEVLAIFDIVLMDLVARIEPLFEKHIQTRIYNLKSSICLRNLNPSDIEKMVSIKGMIIRCSSVIPELKEAVFRCLVCGFYSEPVMVDRGRVTEPHICQKEQCKATNSMTLVHNRCRFSDKQIIKLQETPDEIPEGGTPHTVSVLMHDKLVDAGKPGDRVEITGIYRAMSIRIGPTQRTVKSIFKTYIDCLHIKKTDKSRLHVEDTMDIDNSNASKSTEEDFLSDKVEKLKELSKLPDIYERLTRSLAPNIWELDDVKRGLLCQVLESGALVLSDKGVCCIDEFDKMSDNARSMLHEVMEQQTVSIAKAGIIASLNARTSVLACANPTESRYNPRLSVIDNIHLAPTLLSRFDLIYLILDKADEQTDRRLAKHIVSLHFENPNLEELEVLDLQTLVSYISYARKYIQPQLSDEAAEELTRGYVEMRKRGNSPGSRKKVITATARQIESLIRLSEALARMRFSEVVEVRDVVEAFRLLEVAMQQSATDHATGTIDMDLIMTGISASERQRRENLVAATRNLIAEKMQLGGPSMRMIELLEELRKQSSMEIHMHELRGALGTLMTEGAVVIHGDNVRRV

SEQ ID NO: 175471 - protein, 845 aa, Zea Mays
MASDGGGSSPPPASSPYGRPSSPLAVTNSSPSQPTRRSGGRRRRGSASPYASSPSLGGFETPPHPGRRTPSGAGAGAPRQPRQNSTGRFPPTPSTPMSTDDVPPSSEAGDDETDGGGGVDATPVFVWGTNISVQDVNAAILRFLRHFRDPRDAGRVDPVMDEGKYMRAIHRILELEGGESLDVDAHDVFDHDPDLYSKMVRYPLEVLAIFDIVLMDLVARIEPLFEKHIQTRIYNLKSSICLRNLNPSDIEKMVSIKGMIIRCSSVIPELKEAVFRCLVCGFYSEPVMVDRGRVTEPHICQKEQCKATNSMTLVHNRCRFSDKQIIKLQETPDEIPEGGTPHTVSVLMHDKLVDAGKPGDRVEITGIYRAMSIRIGPTQRTVKSIFKTYIDCLHIKKTDKSRLHVEDTMDIDNSNASKSTEEDFLSDKVEKLKELSKLPDIYERLTRSLAPNIWELDDVKRGLLCQLFGGNPLKLPSGASFRGDINILLVGDPGTSKSQLLQYMHKLSPRGIYTSGRGSSAVGLTAYVTKDPETGETVLESGALVLSDKGVCCIDEFDKMSDNARSMLHETVSIAKAGIIASLNARTSVLACANPTESRYNPRLSVIDNIHLAPTLLSRFDLIYLILDKADEQTDRRLAKHIVSLHFENPNLEELEVLDLQTLVSYISYARKYIQPQLSDEAAEELTRGYVEMRKRGNSPGSRKKVITATARQIESLIRLSEALARMRFSEVVEVRDVVEAFRLLEVAMQQSATDHATGTIDMDLIMTGISASERQRRENLVAATRNLIAEKMQLGGPSMRMIELLEELRKQSSMEIHMHELRGALGTLMTEGAVVIHGDNVRRV

SEQ ID NO: 175472 - protein, 749 aa, Zea Mays
MASDGGGSSPPPASSPYGRPSSPLAVTNSSPSQPTRRSGGRRRRGSASPYASSPSLGGFETPPHPGRRTPSGAGAGAPRQPRQNSTGRFPPTPSTPMSTDDVPPSSEAGDDETDGGGGVDATPVFVWGTNISVQDVNAAILRFLRHFRDPRDAGRVDPVMDEGKYMRAIHRILELEGGESLDVDAHDVFDHDPDLYSKMVRYPLEVLAIFDIVLMDLVARIEPLFEKHIQTRIYNLKSSICLRNLNPSDIEKMVSIKGMIIRCSSVIPELKEAVFRCLVCGFYSEPVMVDRGRVTEPHICQKEQCKATNSMTLVHNRCRFSDKQIIKLQETPDEIPEGGTPHTVSVLMHDKLVDAGKPGDRVEITGIYRAMSIRIGPTQRTVKSIFKTYIDCLHIKKTDKSRLHVEDTMDIDNSNASKSTEEDFLSDKVEKLKELSKLPDIYERLTRSLAPNIWELDDVKRGLLCQLFGGNPLKLPSGASFRGDINILLVGDPGTSKSQLLQYMHKLSPRGIYTSGRGSSAVGLTAYVTKDPETGETVLESGALVLSDKGVCCIDEFDKMSDNARSMLHEVMEQQTVSIAKAGIIASLNARTSVLACANPTESRYNPRLSVIDNIHLAPTLLSRFDLIYLILDKADEQTDRRLAKHIVSLHFENPNLEELEVLDLQTLVSYISYARKYIQPQLSDEAAEELTRGYVEMRKRGNSPGSRKKVITATARQIESLIRLSEALARMRFSEGRGAGCCGGIQAS

SEQ ID NO: 175473 - protein, 379 aa, Zea Mays
MSIRIGPTQRTVKSIFKTYIDCLHIKKTDKSRLHVEDTMDIDNSNASKSTEEDFLSDKVEKLKELSKLPDIYERLTRSLAPNIWELDDVKRGLLCQLFGGNPLKLPSGASFRGDINILLVGDPGTSKSQLLQYMHKLSPRGIYTSGRGSSAVGLTAYVTKDPETGETVLESGALVLSDKGVCCIDEFDKMSDNARSMLHEVMEQQTVSIAKAGIIASLNARTSVLACANPTESRYNPRLSVIDNIHLAPTLLSRFDLIYLILDKADEQTDRRLAKHIVSLHFENPNLEELEVLDLQTLVSYISYARKYIQPQLSDEAAEELTRGYVEMRKRGNSPGSRKKVITATARQIESLIRLSEALARMRFSEGRGAGCCGGIQAS

SEQ ID NO: 175474 - protein, 74 aa, Zea Mays
MAWQNKTFSQSSLRFGSHDKGKTSVENNTFEIGKREGGGAGGLRRGRRNRVDRARLCWFSFLSFTKNLFIISDM

SEQ ID NO: 175475 - protein, 81 aa, Zea Mays
MSQDDLRNRTETETPAVFVWLCSSPHLSLVAGRGGGTQCLKRSCVFLSHNQLSKRRYRESNLSRPSIHWKRTALMILQEMK

SEQ ID NO: 175476 - protein, 820 aa, Zea Mays
MNPLSGSSSTISCFSTQLRSLAQVLLSGRAGSRLRRVLPAAHARAIISDGLGFLFLANLLLDGYSKLGRIHDARRLFDGMPHRNLVSWSSAISMYAQHGADGQALALFAAFRRSSDEAPNEFVLASVVRACMQSRDVPFGEQVHGKIINLGLDVNLYVGTALVNLYAKVACMDAAMRVFHALPTKNPVTWTAIITGYSRIGHGELALGLFQTMVAQGVQPDRFVLASAVSACSALAFLQGGRQIHGYAYRSAAEVDASVINALIDLYCKCSRPLVARKLFDRMKNHNLVSWTTMIAGYMQNSLDAEAIQMFWQMCQAGWQPDAFACTSILNSCGSMEAISQGTQIHAHAIKVNLENDEYVKNALIDMYAKCAHLTAARVAFDALAHDDVVSYNAMIEGYARQGDLTEAVHIFRKMKYYSIRPNLLTFVSLLGMSSLLSSIEWSKQIHGLIIKSGTSVDLYVGSALIDAYSKSSLVDDAKAVFFMMQNRDMAIWNAMIFGHTQNEQGEEAVKLFNQVRVSGMTPNEFTFVALVTVASNLASMFHGQQFHAQIIKAGCDINPHVSNALVDMYAKCGFIKEGWMLFESTCGKDVICWNSMITMYAQHGHAEEALCAFQLMREAKVEPNYVTFVGVLSACAHAGLVDEGLHHFNSMKSKYGIDPGTEHYASVVNLLGRSGKLHSAQEFIEKMPIKPAAAVWRSLLSACRLFGNVQIGRYAAEMALLEDPSDSGPYVLLSNIYASKGLWVDVQQLRLRMDYAGAVKEPGYSWIEVMKEVHMFIARGTEHPQAELIYAVLDELTGLLKDFGYHPDISELALLGETG

SEQ ID NO: 175477 - protein, 544 aa, Zea Mays
MNPLSGSSSTISCFSTQLRSLAQVLLSGRAGSRLRRVLPAAHARAIISDGLGFLFLANLLLDGYSKLGRIHDARRLFDGMPHRNLVSWSSAISMYAQHGADGQALALFAAFRRSSDEAPNEFVLASVVRACMQSRDVPFGEQVHGKIINLGLDVNLYVGTALVNLYAKVACMDAAMRVFHALPTKNPVTWTAIITGYSRIGHGELALGLFQTMVAQGVQPDRFVLASAVSACSALAFLQGGRQIHGYAYRSAAEVDASVINALIDLYCKCSRPLVARKLFDRMKNHNLVSWTTMIAGYMQNSLDAEAIQMFWQMCQAGWQPDAFACTSILNSCGSMEAISQGTQIHAHAIKVNLENDEYVKNALIDMYAKCAHLTAARVAFDALAHDDVVSYNAMIEGYARQGDLTEAVHIFRKMKYYSIRPNLLTFVSLLGMSSLLSSIEWSKQIHGLIIKSGTSVDLYVGSALIDAYSKSSLVDDAKAVFFMMQNRDMAIWNAMIFGHTQNEQGEEAVKLFNQTCMQNVASLKKDGCCLSQHVGRMLFVGTP

SEQ ID NO: 175478 - protein, 420 aa, Zea Mays
MNPLSGSSSTISCFSTQLRSLAQVLLSGRAGSRLRRVLPAAHARAIISDGLGFLFLANLLLDGYSKLGRIHDARRLFDGMPHRNLVSWSSAISMYAQHGADGQALALFAAFRRSSDEAPNEFVLASVVRACMQSRDVPFGEQVHGKIINLGLDVNLYVGTALVNLYAKVACMDAAMRVFHALPTKNPVTWTAIITGYSRIGHGELALGLFQTMVAQGVQPDRFVLASAVSACSALAFLQGGRQIHGYAYRSAAEVDASVINALIDLYCKCSRPLVARKLFDRMKNHNLVSWTTMIAGYMQNSLDAEAIQMFWQMCQAGWQPDAFACTSILNSCGSMEAISQGTQIHAHAIKVNLENDEYVKNALIDMYAKCAHLTAARVAFDALAHDDVVSYNAMIEGYARFMVSSSNQELQSTSMWEVL

SEQ ID NO: 175479 - protein, 741 aa, Zea Mays
MGTSVQVTPLSGAYGEGPLCYLLAVDGFRFLLDCGWTDLCDTSQLQPLAKVAPTVDAVLLSHPDMMHLGALPYAMKHLGLSAPVYATEPVFRLGLLTMYDHFLSRWQVSDFDLFTLDDVDAAFQNVVRLKYSQNYLLNGEGVVIAPHVAGHLLGGTVWKITKDGEDVVYAVDFNHRKERHLNGTVLGSFVRPAVLITDAYNALNNQGYRKKQDQDFIESLIKVLATGGSVLLPVDTAGRVLELLLLLDMYWDERRLQYPIYFLTNVSTSTVDYVKSFLEWMGDQIAKSFESSRANAFLLKKVTLIINKEELEKLGDAPKVVLASMASLEVGFSHDIFVEMANEARNLVLFTEKGQKIFALQFGTLARMLQVDPPPKALKVTMSKRIPLVGNELKAYEEEQERIKKEKSLKASLVKEEELKASHGSNTKASEPMVIDASSSRKSVNASHFGGNNDILIDGFVPPLTSVAPMFPFFENTAEWDDFGEVINPDDYMMKQEEMDNTLMLGPGDGLDGRIDDGSARLLLDSTPSKVISNEMTVQVKCSLVYMDFEGRSDGRSVKSIIAHVAPLKLILVHGSAEATEHLKMHCAKNLDLHVYAPQIEETIDVTSDLCAYKVQLSEKLMSNIISKKLGEHEIAWVDAEVGKEDEKLILLPPSSTPPPHKPVLVGDLKLSDFKQFLENKGWQVEFAGGALRCGEYIMVRKVGDSILKGSTGSQQIVIEGPLCEDYYKIRELLYSQFYLL

SEQ ID NO: 175480 - protein, 678 aa, Zea Mays
MGTSVQVTPLSGAYGEGPLCYLLAVDGFRFLLDCGWTDLCDTSQLQPLAKVAPTVDAVLLSHPDMMHLGALPYAMKHLGLSAPVYATEPVFRLGLLTMYDHFLSRWQVSDFDLFTLDDVDAAFQNVVRLKYSQNYLLNDKGEGVVIAPHVAGHLLGGTVWKITKDGEDVVYAVDFNHRKERHLNGTVLGSFVRPAVLITDAYNALNNQGYRKKQDQDFIESLIKVLATGGSVLLPVDTAGRVLELLLLLDMYWDERRLQYPIYFLTNVSTSTVDYVKSFLEWMGDQIAKSFESSRANAFLLKKVTLIINKEELEKLGDAPKVVLASMASLEVGFSHDIFVEMANEARNLVLFTEKGQFGTLARMLQVDPPPKALKVTMSKRIPLVGNELKAYEEEQERIKKEKSLKASLVKEEELKASHGSNTKASEPMVIDASSSRKSVNASHFGGNNDILIDGFVPPLTSVAPMFPFFENTAEWDDFGEVINPDDYMMKQEEMDNTLMLGPGDGLDGRIDDGSARLLLDSTPSKVISNEMTVQVKCSLVYMDFEGRSDGRSVKSIIAHVAPLKLILVHGSAEATEHLKMHCAKNLDLHVYAPQIEETIDVTSDLCAYKVQLSEKLMSNIISKKLGEHEIAWVDAEVGKEDEKLILLPPSSTPPPHKPVLVGDLKLSDFKQFLENKA

SEQ ID NO: 175481 - protein, 410 aa, Zea Mays
MVGGGGGGPLRRVGKYEVGRTIEEGTFAKVKFAQNTETGESVAMKVLDRSSILKNKMAEQIKREISIMKLVRHPNVVRLHEVLASRKKIFIILEFITGGELFDKIIRHGRLSEADARRYFQQLIDGVDFCHKKGVYHRDLKPENLLLDSQGNLKISDFGLSAWPAQGSFLLRTTCGTPNYVAPEVLSHKGYNGALADTWSCGVILYVLLAGYLPFDEVDLTTLYGKIESAEYSFPAWFSGGAKSLIRRILDPNPETDDNEDAFEDETGPLTLNAFDLIILSQGLNLAALFDRRQDCDKLQNRFLSRNPAKVILSSMEVVAQSMGFKTHIRNYKMRVEGLNADKTSHLSVMVEVFEVAPSIFMVELQRAAGDTSEYNTFVNNYCSKLDDIIWKFPTEKGKSRIPRLSKSHS

SEQ ID NO: 175482 - protein, 284 aa, Zea Mays
MVGGGGGGPLRRVGKYEVGRTIEEGTFAKVKFAQNTETGESVAMKVLDRSSILKNKMAEQIKREISIMKLVRHPNVVRLHEVLASRKKIFIILEFITGGELFDKIIRHGRLSEADARRYFQQLIDGVDFCHKKGVYHRDLKPENLLLDSQGNLKISDFGLSAWPAQGSFLLRTTCGTPNYVAPEVLSHKGYNGALADTWSCGVILYVLLAGYLPFDEVDLTTLYGKIESAEYSFPAWFSGGAKSLIRRILDPNPETGHEMFDRCYNMWCFVDQICFLTWNSESG

SEQ ID NO: 175483 - protein, 902 aa, Zea Mays
MNFVYLAIGAGLASTFQVSCWIITGERQAARIRALYLKAILRQDIAFFDMEMSTGQVVERMAGDTFLIQDAIGEKVGKSIQLLSTFIGGFIIAFVKGWLLALVMLSSIPPIAIAGAIVSRLMTRLSTRMQAKYGDAGNVVEQMLGAIRTVVSFNGEKQAIRTYNKFIRKAYESALQEGAVNGLGLGSVMAVLFCSYGLAVWYGSRLIVERGYNGGMVISVIMAVMIGAMSLGQATPSVTAFAEGQGAAYRMFKTIERKPDIDIYDTTGVILEDIKGDIELKDVYFSYPTRSEHLVFDGFSLQVPNGTTMALVGESGSGKSTVISLVERFYDPRAGQVLIDGVDIRRMHLGWIRGKIGLVSQEPVLFSTTIRENIAYGMENSTLEEIKRATELANAAKFIDKLPNGLDTLVGERGTQLSGGQKQRIAIARAIVKNPRILLLDEATSALDMESERVVQEALNRVMLERTTIIVAHRLSTVKNADVISVLQHGKVVEQGSHVELMKKIPEGAYSQLIHLQETRQGAEFSSVDPDIVLTNGIGSRSINSKPRSQSISRRSTSKGSSSFGHSGRHSFPAPLGLPDPMELNGSPDVEETVDKTSRAPKKAPLGRLLYLNKPEALVLALGSITAAMHGVIFPIYGTLISTAIKVFYEPPAELLKDSRFWASMFVALGACAFVLIPVEYFLFGLAGGKLVERVRSLTFQSLMRQEISWFDEPEHSSGSIGARLSTDAMNVKRLVGDNLALNVQTLSTVISGFTIATVANWKLALIITVVVPFVGFQGYAQMKFLKGLNRNAKLKYEEASQVATDAVGGIRTVASFSGEKKAVDAYERKCESPIKQGIREGVVGGLGFGFSFLAFYLTYALCFYVGAKFVEQGTATFPQVFRVSVILSSHTLDRFDVSSIV

SEQ ID NO: 175484 - protein, 930 aa, Zea Mays
MNFVYLAIGAGLASTFQVSCWIITGERQAARIRALYLKAILRQDIAFFDMEMSTGQVVERMAGDTFLIQDAIGEKVGKSIQLLSTFIGGFIIAFVKGWLLALVMLSSIPPIAIAGAIVSRLMTRLSTRMQAKYGDAGNVVEQMLGAIRTVVSFNGEKQAIRTYNKFIRKAYESALQEGAVNGLGLGSVMAVLFCSYGLAVWYGSRLIVERGYNGGMVISVIMAVMIGAMSLGQATPSVTAFAEGQGAAYRMFKTIERKPDIDIYDTTGVILEDIKGDIELKDVYFSYPTRSEHLVFDGFSLQVPNGTTMALVGESGSGKSTVISLVERFYDPRAGQVLIDGVDIRRMHLGWIRGKIGLVSQEPVLFSTTIRENIAYGMENSTLEEIKRATELANAAKFIDKLPNGLDTLVGERGTQLSGGQKQRIAIARAIVKNPRILLLDEATSALDMESERVVQEALNRVMLERTTIIVAHRLSTVKNADVISVLQHGKVVEQGSHVELMKKIPEGAYSQLIHLQETRQGAEFSSVDPDIVLTNGIGSRSINSKPRSQSISRRSTSKGSSSFGHSGRHSFPAPLGLPDPMELNGSPDVEETVDKTSRAPKKAPLGRLLYLNKPEALVLALGSITAAMHGVIFPIYGTLISTAIKVFYEPPAELLKDSRFWASMFVALGACAFVLIPVEYFLFGLAGGKLVERVRSLTFQSLMRQEISWFDEPEHSSGSIGARLSTDAMNVKRLVGDNLALNVQTLSTVISGFTIATVANWKLALIITVVVPFVGFQGYAQMKFLKGLNRNAKLKYEEASQVATDAVGGIRTVASFSGEKKAVDAYERKCESPIKQGIREGVVGGLGFGFSFLAFYLTYALCFYVGAKFVEQGTATFPQVFRPPVGSREQAQLARIAPRPMMRPRLSWKSSIESLRSTTAARRASPSQA

SEQ ID NO: 175485 - protein, 66 aa, Zea Mays
MIEPPFLSLSAVQHLWSIQSGYSASQSEVQITLSNLTRVGDLLSLDQVYLLPTNRMSLRSRSLTNR

SEQ ID NO: 175486 - protein, 916 aa, Zea Mays
MSLERPPYEWHEFFPNLRHNLGVVVTVWAPIVMVYFMDTQIWYAIFSTICGGVYGAFSRLGEIRTLGMLRSRFEAIPRAFGKKLVPDHGSHLKGDEEDKNPPFDKFADIWNAFINSLREEDLLNNREKDLLVVPSSGGQTSVFQWPPFLLASKIPIALDMAKSVKKKDDELMKRIKQDPYTEYAVIECYDTLLDILYSIIVVQSDKKVVDRIRESIKDSIHRKSLVKEFRLDELPQLSAKFDKLLNLLKEYDENDPVNRNTHIANLLQDIMEIITQDIMKNGKGILKDEGQKQQLFAKLNLDSLKHVAWREKCIRLQLLLTTKESAIYVPTNLEARRRITFFANSLFMRMPRAPPVRSMMSFSVLTPYFKEEVLFSPEDLHRKNEDGISILFYLRKIYPDEFRNFLQRIDFEVKDEEELKDKMDEICNWASYRGQTLTRTVRGMMYYRKALEIQCLQDMTDPAKVDRDRSIGSYQELQYDIEMAQAIADIKFTYVVSCQVYGMQKKSKDLNEKRRYQNILNLMIMNPSLRVAFIEEIEGLTRNGATEKTYCSVLVKGGEKYDEEIYRIKLPGNPTDIGEGKPENQNHAIIFTRGEALQAIDMNQDNYIEEAFKMRNVLEEFESRKYGKSKPTILGLREHIFTGSVSSLAWFMSNQETSFVTIGQRVLANPLKVRFHYGHPDIFDRLFHITRGGISKASKTINLSEDIFSGFNSTMRGGNVTHHEYMQVGKGRDVGMNQISSFEAKVANGNGEQTLSRDIYRLGRRFDFYRMLSFYFTTVGFYFSSMVTVLTVYVFLYGRLYLVMSGLEKSIMLDPRNQQNVKALENALASQSIFQLGLLLVLPMVMEVGLEKGFRTALGEFVIMQLQLASVFFTFQLGTKTHYYGRTILHGGAKYRPTGRGFVVYHAKFAENYQDC

SEQ ID NO: 175487 - protein, 1484 aa, Zea Mays
MDPTADFFAEPTRAKNETEQHGHVIRRRRASKTNFVEVRTFLHMFRSFDRMWAFFILGFQAMVIIAWSPSGSLSSIFEPNVFKNVLTIFITAAFLNFLQATLELILNWKAWKSLECSQRIRYILKFAVAVAWLIILPTTYSSSIQNPTGLVKFLSNWIQNLQNESIYNYAVALYMLPNIFSALFFMFLPIRRALERSNSRIIRFLLWWTQPKLYVARGMYEDTCSLLKYTTFWILLLICKLAFSYYVEIAPLVEPTRIIMSLERPPYEWHEFFPNLRHNLGVVVTVWAPIVMVYFMDTQIWYAIFSTICGGVYGAFSRLGEIRTLGMLRSRFEAIPRAFGKKLVPDHGSHLKGDEEDKNPPFDKFADIWNAFINSLREEDLLNNREKDLLVVPSSGGQTSVFQWPPFLLASKIPIALDMAKSVKKKDDELMKRIKQDPYTEYAVIECYDTLLDILYSIIVVQSDKKVVDRIRESIKDSIHRKSLVKEFRLDELPQLSAKFDKLLNLLKEYDENDPVNRNTHIANLLQDIMEIITQDIMKNGKGILKDEGQKQQLFAKLNLDSLKHVAWREKCIRLQLLLTTKESAIYVPTNLEARRRITFFANSLFMRMPRAPPVRSMMSFSVLTPYFKEEVLFSPEDLHRKNEDGISILFYLRKIYPDEFRNFLQRIDFEVKDEEELKDKMDEICNWASYRGQTLTRTVRGMMYYRKALEIQCLQDMTDPAKVDRDRSIGSYQELQYDIEMAQAIADIKFTYVVSCQVYGMQKKSKDLNEKRRYQNILNLMIMNPSLRVAFIEEIEGLTRNGATEKTYCSVLVKGGEKYDEEIYRIKLPGNPTDIGEGKPENQNHAIIFTRGEALQAIDMNQDNYIEEAFKMRNVLEEFESRKYGKSKPTILGLREHIFTGSVSSLAWFMSNQETSFVTIGQRVLANPLKVRFHYGHPDIFDRLFHITRGGISKASKTINLSEDIFSGFNSTMRGGNVTHHEYMQVGKGRDVGMNQISSFEAKVANGNGEQTLSRDIYRLGRRFDFYRMLSFYFTTVGFYFSSMVTVLTVYVFLYGRLYLVMSGLEKSIMLDPRNQQNVKALENALASQSIFQLGLLLVLPMVMEVGLEKGFRTALGEFVIMQLQLASVFFTFQLGTKTHYYGRTILHGGAKYRPTGRGFVVYHAKFAENYRMYSRSHFVKGLELLILLVVYLVYGSSYRSSNIYLFVTCSIWFLVASWLFAPFIFNPSCFEWQKTVEDWTDWRKWMDNRGGIGMSVEQSWEAWWVTEQDHLRKTSIRAFVLEIILSLRFLIYQYGIVYHLNIADHHKSIMVYGVSWVVMLLVLVVLKMVSIGRQKFGTDLQLMFRILKGLLFLGFVSVMAVLFVVLHLTISDVFASILGYLPTGWCLLLKKKCSSVLRLLQIGQACSPLIRRTLLWDSIMELGRSYENIMGLVLFLPIGFLSWFPFVSEFQTRLLFNQAFSRGLQISRILAGQKDVSEFEFK

SEQ ID NO: 175488 - protein, 1344 aa, Zea Mays
MRQQGTADHSERHVHMIRSSTVIYLRNKIFHNYNSWCRYLHLESNIRIQRDAPTQQPELLYIGLYLLIWGEASNVRFMPECLCYIFHHMARDLHDIISDTSQGSFEPPFQGEGSDDAFLQLVIQPIYSVMQKEAARSKRGKVSHSLWRNYDDLNEYFWSKKCFKKLGWPMDPTADFFAEPTRAKNETEQHGHVIRRRRASKTNFVEVRTFLHMFRSFDRMWAFFILGFQAMVIIAWSPSGSLSSIFEPNVFKNVLTIFITAAFLNFLQATLELILNWKAWKSLECSQRIRYILKFAVAVAWLIILPTTYSSSIQNPTGLVKFLSNWIQNLQNESIYNYAVALYMLPNIFSALFFMFLPIRRALERSNSRIIRFLLWWTQPKLYVARGMYEDTCSLLKYTTFWILLLICKLAFSYYVEIAPLVEPTRIIMSLERPPYEWHEFFPNLRHNLGVVVTVWAPIVMVYFMDTQIWYAIFSTICGGVYGAFSRLGEIRTLGMLRSRFEAIPRAFGKKLVPDHGSHLKGDEEDKNPPFDKFADIWNAFINSLREEDLLNNREKDLLVVPSSGGQTSVFQWPPFLLASKIPIALDMAKSVKKKDDELMKRIKQDPYTEYAVIECYDTLLDILYSIIVVQSDKKVVDRIRESIKDSIHRKSLVKEFRLDELPQLSAKFDKLLNLLKEYDENDPVNRNTHIANLLQDIMEIITQDIMKNGKGILKDEGQKQQLFAKLNLDSLKHVAWREKCIRLQLLLTTKESAIYVPTNLEARRRITFFANSLFMRMPRAPPVRSMMSFSVLTPYFKEEVLFSPEDLHRKNEDGISILFYLRKIYPDEFRNFLQRIDFEVKDEEELKDKMDEICNWASYRGQTLTRTVRGMMYYRKALEIQCLQDMTDPAKVDRDRSIGSYQELQYDIEMAQAIADIKFTYVVSCQVYGMQKKSKDLNEKRRYQNILNLMIMNPSLRVAFIEEIEGLTRNGATEKTYCSVLVKGGEKYDEEIYRIKLPGNPTDIGEGKPENQNHAIIFTRGEALQAIDMNQDNYIEEAFKMRNVLEEFESRKYGKSKPTILGLREHIFTGSVSSLAWFMSNQETSFVTIGQRVLANPLKVRFHYGHPDIFDRLFHITRGGISKASKTINLSEDIFSGFNSTMRGGNVTHHEYMQVGKGRDVGMNQISSFEAKVANGNGEQTLSRDIYRLGRRFDFYRMLSFYFTTVGFYFSSMVTVLTVYVFLYGRLYLVMSGLEKSIMLDPRNQQNVKALENALASQSIFQLGLLLVLPMVMEVGLEKGFRTALGEFVIMQLQLASVFFTFQLGTKTHYYGRTILHGGAKYRPTGRGFVVYHAKFAENYQDC

SEQ ID NO: 175489 - protein, 872 aa, Zea Mays
MLPNIFSALFFMFLPIRRALERSNSRIIRFLLWWTQPKLYVARGMYEDTCSLLKYTTFWILLLICKLAFSYYVEIAPLVEPTRIIMSLERPPYEWHEFFPNLRHNLGVVVTVWAPIVMVYFMDTQIWYAIFSTICGGVYGAFSRLGEIRTLGMLRSRFEAIPRAFGKKLVPDHGSHLKGDEEDKNPPFDKFADIWNAFINSLREEDLLNNREKDLLVVPSSGGQTSVFQWPPFLLASKIPIALDMAKSVKKKDDELMKRIKQDPYTEYAVIECYDTLLDILYSIIVVQSDKKVVDRIRESIKDSIHRKSLVKEFRLDELPQLSAKFDKLLNLLKEYDENDPVNRNTHIANLLQDIMEIITQDIMKNGKGILKDEGQKQQLFAKLNLDSLKHVAWREKCIRLQLLLTTKESAIYVPTNLEARRRITFFANSLFMRMPRAPPVRSMMSFSVLTPYFKEEVLFSPEDLHRKNEDGISILFYLRKIYPDEFRNFLQRIDFEVKDEEELKDKMDEICNWASYRGQTLTRTVRGMMYYRKALEIQCLQDMTDPAKVDRDRSIGSYQELQYDIEMAQAIADIKFTYVVSCQVYGMQKKSKDLNEKRRYQNILNLMIMNPSLRVAFIEEIEGLTRNGATEKTYCSVLVKGGEKYDEEIYRIKLPGNPTDIGEGKPENQNHAIIFTRGEALQAIDMNQDNYIEEAFKMRNVLEEFESRKYGKSKPTILGLREHIFTGSVSSLAWFMSNQETSFVTIGQRVLANPLKVRFHYGHPDIFDRLFHITRGGISKASKTINLSEDIFSGFNSTMRGGNVTHHEYMQVGKGRDVGMNQISSFEAKVANDLTSTECYLSILLQLGSILVAWLLYLLSMCFYMGGFIWL

SEQ ID NO: 175490 - protein, 1086 aa, Zea Mays
MASAGAGPSGPVRSISQTGRSRTMGRMPTRAFTIRPDGSSGEDGVDIVEEELVPSSLAPIVPILRAANEIEEENPRVAYLCRFTAFEKAHHMDQNSSGRGVRQFKTYLLHRLEKDEHETKRSLATTDAREIQKFYAQYCRKYLEQDHDKRKPEEMARYYQIASVLYDVMKTVTPGKNEYDDYAKDIENEKASFSQYNILPLNISAREQPIMKIPEIKAAVKLLEQINGLPMPRIELPQSSDRKTVSDKMDRPVVKDLLDWLRQTFGFQKDSVANQREHLILLLANIDMRQQGTADHSERHVHMIRSSTVIYLRNKIFHNYNSWCRYLHLESNIRIQRDAPTQQPELLYIGLYLLIWGEASNVRFMPECLCYIFHHEACKQLGSIIVKLQESHQPTTIKYMVFEVLQCPVAQGMARDLHDIISDTSQGSFEPPFQGEGSDDAFLQLVIQPIYSVMQKEAARSKRGKVSHSLWRNYDDLNEYFWSKKCFKKLGWPMDPTADFFAEPTRAKNETEQHGHVIRRRRASKTNFVEVRTFLHMFRSFDRMWAFFILGFQAMVIIAWSPSGSLSSIFEPNVFKNVLTIFITAAFLNFLQATLELILNWKAWKSLECSQRIRYILKFAVAVAWLIILPTTYSSSIQNPTGLVKFLSNWIQNLQNESIYNYAVALYMLPNIFSALFFMFLPIRRALERSNSRIIRFLLWWTQPKLYVARGMYEDTCSLLKYTTFWILLLICKLAFSYYVEIAPLVEPTRIIMSLERPPYEWHEFFPNLRHNLGVVVTVWAPIVMVYFMDTQIWYAIFSTICGGVYGAFSRLGEIRTLGMLRSRFEAIPRAFGKKLVPDHGSHLKGDEEDKNPPFDKFADIWNAFINSLREEDLLNNREKDLLVVPSSGGQTSVFQWPPFLLASKIPIALDMAKSVKKKDDELMKRIKQDPYTEYAVIECYDTLLDILYSIIVVQSDKKVVDRIRESIKDSIHRKSLVKEFRLDELPQLSAKFDKLLNLLKEYDENDPVNRNTHIANLLQDIMEIITQDIMKNGKGILKDEGQKQQLFAKLNLDSLKHVAWREKASIVVDNKGICHICTNELGSSA

SEQ ID NO: 175491 - protein, 1225 aa, Zea Mays
MSLERPPYEWHEFFPNLRHNLGVVVTVWAPIVMVYFMDTQIWYAIFSTICGGVYGAFSRLGEIRTLGMLRSRFEAIPRAFGKKLVPDHGSHLKGDEEDKNPPFDKFADIWNAFINSLREEDLLNNREKDLLVVPSSGGQTSVFQWPPFLLASKIPIALDMAKSVKKKDDELMKRIKQDPYTEYAVIECYDTLLDILYSIIVVQSDKKVVDRIRESIKDSIHRKSLVKEFRLDELPQLSAKFDKLLNLLKEYDENDPVNRNTHIANLLQDIMEIITQDIMKNGKGILKDEGQKQQLFAKLNLDSLKHVAWREKCIRLQLLLTTKESAIYVPTNLEARRRITFFANSLFMRMPRAPPVRSMMSFSVLTPYFKEEVLFSPEDLHRKNEDGISILFYLRKIYPDEFRNFLQRIDFEVKDEEELKDKMDEICNWASYRGQTLTRTVRGMMYYRKALEIQCLQDMTDPAKVDRDRSIGSYQELQYDIEMAQAIADIKFTYVVSCQVYGMQKKSKDLNEKRRYQNILNLMIMNPSLRVAFIEEIEGLTRNGATEKTYCSVLVKGGEKYDEEIYRIKLPGNPTDIGEGKPENQNHAIIFTRGEALQAIDMNQDNYIEEAFKMRNVLEEFESRKYGKSKPTILGLREHIFTGSVSSLAWFMSNQETSFVTIGQRVLANPLKVRFHYGHPDIFDRLFHITRGGISKASKTINLSEDIFSGFNSTMRGGNVTHHEYMQVGKGRDVGMNQISSFEAKVANGNGEQTLSRDIYRLGRRFDFYRMLSFYFTTVGFYFSSMVTVLTVYVFLYGRLYLVMSGLEKSIMLDPRNQQNVKALENALASQSIFQLGLLLVLPMVMEVGLEKGFRTALGEFVIMQLQLASVFFTFQLGTKTHYYGRTILHGGAKYRPTGRGFVVYHAKFAENYRMYSRSHFVKGLELLILLVVYLVYGSSYRSSNIYLFVTCSIWFLVASWLFAPFIFNPSCFEWQKTVEDWTDWRKWMDNRGGIGMSVEQSWEAWWVTEQDHLRKTSIRAFVLEIILSLRFLIYQYGIVYHLNIADHHKSIMVYGVSWVVMLLVLVVLKMVSIGRQKFGTDLQLMFRILKGLLFLGFVSVMAVLFVVLHLTISDVFASILGYLPTGWCLLLKKKCSSVLRLLQIGQACSPLIRRTLLWDSIMELGRSYENIMGLVLFLPIGFLSWFPFVSEFQTRLLFNQAFSRGLQISRILAGQKDVSEFEFK

SEQ ID NO: 175492 - protein, 861 aa, Zea Mays
MFLPIRRALERSNSRIIRFLLWWTQPKLYVARGMYEDTCSLLKYTTFWILLLICKLAFSYYVEIAPLVEPTRIIMSLERPPYEWHEFFPNLRHNLGVVVTVWAPIVMVYFMDTQIWYAIFSTICGGVYGAFSRLGEIRTLGMLRSRFEAIPRAFGKKLVPDHGSHLKGDEEDKNPPFDKFADIWNAFINSLREEDLLNNREKDLLVVPSSGGQTSVFQWPPFLLASKIPIALDMAKSVKKKDDELMKRIKQDPYTEYAVIECYDTLLDILYSIIVVQSDKKVVDRIRESIKDSIHRKSLVKEFRLDELPQLSAKFDKLLNLLKEYDENDPVNRNTHIANLLQDIMEIITQDIMKNGKGILKDEGQKQQLFAKLNLDSLKHVAWREKCIRLQLLLTTKESAIYVPTNLEARRRITFFANSLFMRMPRAPPVRSMMSFSVLTPYFKEEVLFSPEDLHRKNEDGISILFYLRKIYPDEFRNFLQRIDFEVKDEEELKDKMDEICNWASYRGQTLTRTVRGMMYYRKALEIQCLQDMTDPAKVDRDRSIGSYQELQYDIEMAQAIADIKFTYVVSCQVYGMQKKSKDLNEKRRYQNILNLMIMNPSLRVAFIEEIEGLTRNGATEKTYCSVLVKGGEKYDEEIYRIKLPGNPTDIGEGKPENQNHAIIFTRGEALQAIDMNQDNYIEEAFKMRNVLEEFESRKYGKSKPTILGLREHIFTGSVSSLAWFMSNQETSFVTIGQRVLANPLKVRFHYGHPDIFDRLFHITRGGISKASKTINLSEDIFSGFNSTMRGGNVTHHEYMQVGKGRDVGMNQISSFEAKVANDLTSTECYLSILLQLGSILVAWLLYLLSMCFYMGGFIWL

SEQ ID NO: 175493 - protein, 432 aa, Zea Mays
MASAGAGPSGPVRSISQTGRSRTMGRMPTRAFTIRPDGSSGEDGVDIVEEELVPSSLAPIVPILRAANEIEEENPRVAYLCRFTAFEKAHHMDQNSSGRGVRQFKTYLLHRLEKDEHETKRSLATTDAREIQKFYAQYCRKYLEQDHDKRKPEEMARYYQIASVLYDVMKTVTPGKNEYDDYAKDIENEKASFSQYNILPLNISAREQPIMKIPEIKAAVKLLEQINGLPMPRIELPQSSDRKTVSDKMDRPVVKDLLDWLRQTFGFQKDSVANQREHLILLLANIDMRQQGTADHSERHVHMIRSSTVIYLRNKIFHNYNSWCRYLHLESNIRIQRDAPTQQPELLYIGLYLLIWGEASNVRFMPECLCYIFHHMARDLHDIISDTSQGSFEPPFQGEGSDDAFLQLVIQPIYSVMQKAFNAMKLLYVIFK

SEQ ID NO: 175494 - protein, 678 aa, Zea Mays
MFGSTNPFGQSSTSPFGNNNSFGTPQGFGQSSTAANNPFAPKPFGSPTTPFGAQTGSSLFATTSTGAFGQQQSAPAFGTTSTGAFGQQQSTPTFGTPSSSQFGSSTPAFGASPTPAFGATSSGSLFGQKPSFGGFGSSPSQSSPFGSTFQQTQPTFGTTPAFGTMTTPAFGTSTPAFGTTTAPAFGATTTPAFGSTSTSLFGASSTPVFGSTAFGTSATGFGTSGTTAFGVSSTTTGFGSSSTPSFGTSASVFGFGSSPSFGQTTVSSGSTPFGTTPSPFGAPVPAFGSQTAAPAFGQPQFANQAGGTRIKPYSQTPDVDSATSGTQPAAKLDSISAMPEYKDKSHEELRWEDYQRGDKGGPNTSGTQAVAPSFPSLIQQNAPNPFSTSNPFSTNNPFAPKPAPTITSPFNTSFNNASVTSSSPFTSSPSTTMFGQTGVSTLSASNSPSLFGNTNPAPVTSSLFATSVTNNPSPFGTGSLFANTQSAPLFPSAFAQPTSSTPAFSSGSLFGSTNPGSLFSSSGPSLFSTPTFQPSAPAQTSNLFSFQPPIQPASTGGFPGFSNTTNQALMGQPTPTLSSMVMQPAPVSNPFGMLPAMPHMSIGNGGSSPSVQYGISSLPVVEKLLPSRSLSMAFPRHLAQRRIKLLPRKYNPISDGKNLQQHQRQTLFLSLERTQGIW

SEQ ID NO: 175495 - protein, 754 aa, Zea Mays
MTTPAFGTSTPAFGTTTAPAFGATTTPAFGSTSTSLFGASSTPVFGSTAFGTSATGFGTSGTTAFGVSSTTTGFGSSSTPSFGTSASVFGFGSSPSFGQTTVSSGSTPFGTTPSPFGAPVPAFGSQTAAPAFGQPQFANQAGGTRIKPYSQTPDVDSATSGTQPAAKLDSISAMPEYKDKSHEELRWEDYQRGDKGGPNTSGTQAVAPSFPSLIQQNAPNPFSTSNPFSTNNPFAPKPAPTITSPFNTSFNNASVTSSSPFTSSPSTTMFGQTGVSTLSASNSPSLFGNTNPAPVTSSLFATSVTNNPSPFGTGSLFANTQSAPLFPSAFAQPTSSTPAFSSGSLFGSTNPGSLFSSSGPSLFSTPTFQPSAPAQTSNLFSFQPPIQPGGFPGFSNTTNQALMGQPTPTLSSMVMQPAPVSNPFGMLPAMPHMSIGNGGSSPSVQYGISSLPVVEKLLPSRSLSMAFPRHLAQRRIKLLPRKYNPISDGKVPFFADDEESPATPKADAFFVPRENPRNLVIRPIEQWPSRRETDRQLTVKNATDLNKYEDASIESERGKSASAMSPSSRPPAVENDNQHEARAMAQHGNGNATSVERLLPKLPRADYFTEPSIEELAAKERAEAGYCGRVRDFVVGRHGYGSIIFLGETDVRCLDLESIVEFNNREVVVYKDDSKKPPVGEGLNKAAEVTLLNIKCVNKKTGEEYCEGTRVERYREMLMKKAEEQGAEFVSFDAAKGEWKFRVKHFSAYGLPCC

SEQ ID NO: 175496 - protein, 915 aa, Zea Mays
MFGSTNPFGQSSTSPFGNNNSFGTPQGFGQSSTAANNPFAPKPFGSPTTPFGAQTGSSLFATTSTGAFGQQQSAPAFGTTSTGAFGQQQSTPTFGTPSSSQFGSSTPAFGASPTPAFGATSSGSLFGQKPSFGGFGSSPSQSSPFGSTFQQTQPTFGTTPAFGTMTTPAFGTSTPAFGTTTAPAFGATTTPAFGSTSTSLFGASSTPVFGSTAFGTSATGFGTSGTTAFGVSSTTTGFGSSSTPSFGTSASVFGFGSSPSFGQTTVSSGSTPFGTTPSPFGAPVPAFGSQTAAPAFGQPQFANQAGGTRIKPYSQTPDVDSATSGTQPAAKLDSISAMPEYKDKSHEELRWEDYQRGDKGGPNTSGTQAVAPSFPSLIQQNAPNPFSTSNPFSTNNPFAPKPAPTITSPFNTSFNNASVTSSSPFTSSPSTTMFGQTGVSTLSASNSPSLFGNTNPAPVTSSLFATSVTNNPSPFGTGSLFANTQSAPLFPSAFAQPTSSTPAFSSGSLFGSTNPGSLFSSSGPSLFSTPTFQPSAPAQTSNLFSFQPPIQPASTGGFPGFSNTTNQALMGQPMVMQPAPVSNPFGMLPAMPHMSIGNGGSSPSVQYGISSLPVVEKLLPSRSLSMAFPRHLAQRRIKLLPRKYNPISDGKVPFFADDEESPATPKADAFFVPRENPRNLVIRPIEQWPSRRETDRQLTVKNATDLNKYEDASIESERGKSASAMSPSSRPPAVENDNQHEARAMAQHGNGNATSVERLLPKLPRADYFTEPSIEELAAKERAEAGYCGRVRDFVVGRHGYGSIIFLGETDVRCLDLESIVEFNNREVVVYKDDSKKPPVGEGLNKAAEVTLLNIKCVNKKTGEEYCEGTRVERYREMLMKKAEEQGAEFVSFDAAKGEWKFRVKHFSAYGLPCC

SEQ ID NO: 175497 - protein, 660 aa, Zea Mays
MFGSTNPFGQSSTSPFGNNNSFGTPQGFGQSSTAANNPFAPKPFGSPTTPFGAQTGSSLFATTSTGAFGQQQSAPAFGTTSTGAFGQQQSTPTFGTPSSSQFGSSTPAFGASPTPAFGATSSGSLFGQKPSFGGFGSSPSQSSPFGSTFQQTQPTFGTTPAFGTMTTPAFGTSTPAFGTTTAPAFGATTTPAFGSTSTSLFGASSTPVFGSTAFGTSATGFGTSGTTAFGVSSTTTGFGSSSTPSFGTSASVFGFGSSPSFGQTTVSSGSTPFGTTPSPFGAPVPAFGSQTAAPAFGQPQFANQAGGTRIKPYSQTPDVDSATSGTQPAAKLDSISAMPEYKDKSHEELRWEDYQRGDKGGPNTSGTQAVAPSFPSLIQQNAPNPFSTSNPFSTNNPFAPKPAPTITSPFNTSFNNASVTSSSPFTSSPSTTMFGQTGVSTLSASNSPSLFGNTNPAPVTSSLFATSVTNNPSPFGTGSLFANTQSAPLFPSAFAQPTSSTPAFSSGSLFGSTNPGSLFSSSGPSLFSTPTFQPSAPAQTSNLFSFQPPIQPGGFPGFSNTTNQALMGQPTPTLSSMVMQPAPVSNPFGMLPAMPHMSIGNGGSSPSVQYGISSLPVVEKLLPSRSLSMAFPRHLAQRRIKLLPRKYNPISDGKFLLLFI

SEQ ID NO: 175498 - protein, 247 aa, Zea Mays
MKQRFPSSSTRSKSEAAVQTRASRAPSPKVNPATPGPGPGVKARPRSAAAAAAATTMAATRRQPAVPMPVWKSETAEEEVVRLRGEVDALQKEVQRLLRLNAELRTNHDAAASNRSQPPSKISASGVVVAPPPPPPPPPPPPPPHLKQRGVRFPSAPSTSPASKATALVDMYNSLQASNKPSKRTDKSSSHSSIVDELQNRSRHLLATWKQKPSSSTISSTESTLVPTPAWNKYSPLWTGWTNNSRL

SEQ ID NO: 175499 - protein, 585 aa, Zea Mays
MHWPLHSDMQVNGIYVRVVNRQPTQKLGANGRDDGPLLTDYLKEGPNKISLSRNDTRTFCLGIRIAKRRSLEQVLNLVPKEQDGENFDDALARVRRCVGGGAEANNADSDSDIEVVADFVSVNLRCPMTASRIQIAGRFKSCAHMGCFDLEAFIEINQRSRKWQCPICLKNYSLENIIIDPYFNRITSLIKSCGDDTSEIDVKPDGSWRVKGRPKLKDLTQWHLPDGTLSLSTDTAAKPGMCIVKHEVKEEPLSEEVGCHLKLGLRKKSNGQWEISKRVDADLVPSSGNDHDHSGHDENKNCITHSSNIDDTNIADEGYNLEPATNGYPMTHVHDLDSSSADENGPPASTGQDIVVLSDSDDDAIMVLSPGAVNCGSMHNTGNLFPPNTPENLGVCSGETGGCPKETSFLALKEDFGDPGLSFWESHGSPRDASTSQIPDASTKAVDNPGEVDNYPANDQSKQGQVSGADFGVAANPVPLEDGHDSALQPCSMSERDSAMGLASLGADTQSCVDVHSDNWTSVSISGRDEVLTAAKIASRKRSNPGDRIEDLDASLVGSPNQDECSGGRCSVRPRLILEISSDSD

SEQ ID NO: 175500 - protein, 580 aa, Zea Mays
MQWLIMYSIYVRVVNRQPTQKLGANGRDDGPLLTDYLKEGPNKISLSRNDTRTFCLGIRIAKRRSLEQVLNLVPKEQDGENFDDALARVRRCVGGGAEANNADSDSDIEVVADFVSVNLRCPMTASRIQIAGRFKSCAHMGCFDLEAFIEINQRSRKWQCPICLKNYSLENIIIDPYFNRITSLIKSCGDDTSEIDVKPDGSWRVKGRPKLKDLTQWHLPDGTLSLSTDTAAKPGMCIVKHEVKEEPLSEEVGCHLKLGLRKKSNGQWEISKRVDADLVPSSGNDHDHSGHDENKNCITHSSNIDDTNIADEGYNLEPATNGYPMTHVHDLDSSSADENGPPASTGQDIVVLSDSDDDAIMVLSPGAVNCGSMHNTGNLFPPNTPENLGVCSGETGGCPKETSFLALKEDFGDPGLSFWESHGSPRDASTSQIPDASTKAVDNPGEVDNYPANDQSKQGQVSGADFGVAANPVPLEDGHDSALQPCSMSERDSAMGLASLGADTQSCVDVHSDNWTSVSISGRDEVLTAAKIASRKRSNPGDRIEDLDASLVGSPNQDECSGGRCSVRPRLILEISSDSD

SEQ ID NO: 175501 - protein, 826 aa, Zea Mays
MASPDDPVLSACKKNLSHFRIKELKDVLHQLGLSKQGKKQDLVDRVMAVLLSQQDQAFETNGLPKAKSAVKIVEDTFRKMQDPTNTVAVSRSHELGDSVTCKKKPDDSAQAVKVRCPCGDSKPNDSMIKCIDPQCNIWQHVGCVVIPDTEKSADNISPELPSCFYCEVCRLSRADPFWVTVNHLLLPILIGPSTVAADGSYTVQYTAKSFQLSRANREILQQAECNIQVWCILLSDKVPFRMHWPLHSDMQVNGIYVRVVNRQPTQKLGANGRDDGPLLTDYLKEGPNKISLSRNDTRTFCLGIRIAKRRSLEQVLNLVPKEQDGENFDDALARVRRCVGGGAEANNADSDSDIEVVADFVSVNLRCPMTASRIQIAGRFKSCAHMGCFDLEAFIEINQRSRKWQCPICLKNYSLENIIIDPYFNRITSLIKSCGDDTSEIDVKPDGSWRVKGRPKLKDLTQWHLPDGTLSLSTDTAAKPGMCIVKHEVKEEPLSEEVGCHLKLGLRKKSNGQWEISKRVDADLVPSSGNDHDHSGHDENKNCITHSSNIDDTNIADEGYNLEPATNGYPMTHVHDLDSSSADENGPPASTGQDIVVLSDSDDDAIMVLSPGAVNCGSMHNTGNLFPPNTPENLGVCSGETGGCPKETSFLALKEDFGDPGLSFWESHGSPRDASTSQIPDASTKAVDNPGEVDNYPANDQSKQGQVSGADFGVAANPVPLEDGHDSALQPCSMSERDSAMGLASLGADTQSCVDVHSDNWTSVSISGRDEVLTAAKIASRKRSNPGDRIEDLDASLVGSPNQDECSGGRCSVRPRLILEISSDSD

SEQ ID NO: 175502 - protein, 797 aa, Zea Mays
MASPDDPVLSACKKNLSHFRIKELKDVLHQLGLSKQGKKQDLVDRVMAVLLSQQDQGINEILANYRLLLPVSRKMQDPTNTVAVSRSHELGDSVTCKKKPDDSAQAVKVRCPCGDSKPNDSMIKCIDPQCNIWQHVGCVVIPDTEKSADNISPELPSCFYCEVCRLSRADPFWVTVNHLLLPILIGPSTVAADGSYTVQYTAKSFQLSRANREILQQAECNIQVWCILLSDKVPFRMHWPLHSDMQVNGIYVRVVNRQPTQKLGANGRDDGPLLTDYLKEGPNKISLSRNDTRTFCLGIRIAKRRSLEQVLNLVPKEQDGENFDDALARVRRCVGGGAEANNADSDSDIEVVADFVSVNLRCPMTASRIQIAGRFKSCAHMGCFDLEAFIEINQRSRKWQCPICLKNYSLENIIIDPYFNRITSLIKSCGDDTSEIDVKPDGSWRVKGRPKLKDLTQWHLPDGTLSLSTDTAAKPGMCIVKHEVKEEPLSEEVGCHLKLGLRKKSNGQWEISKRVDADLVPSSGNDHDHSGHDENKNCITHSSNIDDTNIADEGYNLEPATNGYPMTHVHDLDSSSADENGPPASTGQDIVVLSDSDDDAIMVLSPGAVNCGSMHNTGNLFPPNTPENLGVCSGETGGCPKETSFLALKEDFGDPGLSFWESHGSPRDASTSQIPDASTKAVDNPGEVDNYPANDQSKQGQVSGADFGVAANPVPLEDGHDSALQPCSMSERDSAMGLASLGADTQSCVDVHSDNWTSVSISGRDEVLTAAKIASRKRSNPGDRIEDLDDDFESAPI

SEQ ID NO: 175503 - protein, 233 aa, Zea Mays
MASPDDPVLSACKKNLSHFRIKELKDVLHQLGLSKQGKKQDLVDRVMAVLLSQQDQGINEILANYRLLLPVSRKMQDPTNTVAVSRSHELGDSVTCKKKPDDSAQAVKVRCPCGDSKPNDSMIKCIDPQCNIWQHVGCVVIPDTEKSADNISPELPSCFYCEVCRLSRADPFWVTVNHLLLPILIGPSTVAADGFGVSFSVTKYLLGCTGLYTLTCKLMVFMLGWLTGNPHKS

SEQ ID NO: 175504 - protein, 398 aa, Zea Mays
MQMTADQESAAKATEDDTMSGRRRVDDDHDHDVVFDAGKPPPFRIGDVRAAVPEHCWRKNPWRSLWYVARDVAVVAALGAAAAGMDSWAVWPLYWAAQGTMFWALFVLGHDCFSDSATLNSVVGHLLHSFILVPYHGWRISHRTHHQNHGHIHRDESWHPITEKLYRQLEPRTKKLRFTVPFPLLAFPVYLLYRSPGKSGSHFLPSSDLFSPKEKSDVMVSTTCWCIMLASLLAMACAFGPLQVLKMYGIPYLVFVMWLDLVTYLHHHGHHQLPLPWYRGQEWSYLRGGLTTVDRDYGWINNVHHDIGTHVIHHLFPQIPHYHLVEATKAAKPVLGRYYREPHKSGPLPLHLLVVLLRSLRVDHFVSDHGDVVYYQTDHDLNTSSAHRWANQNHHKQK

SEQ ID NO: 175505 - protein, 613 aa, Zea Mays
MEMSMHLVSMCGILAVLGCADEAKGSSKRSRVLELSRRLKHRGPDWSGLRQVGDCYLSHQRLAIIDPASGDQPLYNEDQSVVVAVNGEIYNHLDLRSRLAGAGHSFRTGSDCEVIAHLYEEHGEEFVDMLDGVFSFVLLDTRHGDRAGSSFFMAARDAIGVTPLYIGWGVDGSVWISSEMKALHDECEHFEIFPPGHLYSSNTGGFSRWYNPPWYDDDDDEEAVVTPSVPYDPLALRKAFEKAVVKRLMTDVPFGVLLSGGLDSSLVATVAVRHLARTEAARRWGTKLHSFCVGLEGSPDLKAAREVAEYLGTLHHEFHFTVQDGIDAIEDVIYHTETYDVTTIRASTPMFLMSRKIKSLGVKMVISGEGSDELFGGYLYFHKAPNKEELHRETCRKVKALHQYDCLRANKATSAWGLEARVPFLDKEFINAAMSIDPEWKMPDLGRIEKWVLRKAFDDEEQPFLPKHILYRQKEQFSDGVGYSWIDGLKAHATSNVTDKMLSNAKFIFPHNTPTTKEAYYYRMVFERFFPQKSAILTVPGGPSVACSTAKAIEWDAQWSGNLDPSGRAALGVHLAAYEHQHDPEHVPAAIAAGSGKKPRTIRVAPPGVAIEG

SEQ ID NO: 175506 - protein, 138 aa, Zea Mays
MPKSKRNRPVTLSKTKKKPGLERKGKVVAEIKDAVDKYSSAYVFTYDNMRNQKLKDLREQLKSSSRIFLAGKKVMQIALGRSPADEAKTGLHKLSKFLQGNSGLLFTNLPRDDVERMFREFEEHDFARTGSTAIDTVF

SEQ ID NO: 175507 - protein, 216 aa, Zea Mays
MNPHITIRSSPISLNPCMALYHHLNLLKLGNSRMGMMLFKPRWQLLDIKDPRFMTQADKDRGLGSVFKRDDQRLNQLREKDERERDPNFISDSYSECYPGYQEYNNEIAGSDDEDDLSKMDMGGRAKGRLHRWDFETEEEWAKYNDQKEAMPKAAFQFGVKMQDGRKTRKQNKDQKLTNDLHKINKILARKKGEKDGAEDGGHYDDDLPSSKKQRG

SEQ ID NO: 175508 - protein, 536 aa, Zea Mays
MGKATRQHLAIGYQTDLIMEYAVHVILCSLISQKSPVDEQLVVLLYCLFIGDLEHTHLVKGLGYALLHKVRSEIEKKPEAEDGKDAKSRATKEDQAVSFRTATAKSVYQWIIKPQSIIKENELFLPGRMSFIYNLEEVVTNDIPTTLHRSKADCPVQEEMVTVSVDGSVLDRIAKIMTYLRLGSSGKVLKKKKKERDIKGKNNLASGDCDESVKPSKINGSTQKHQSDMPPPPARPPQNNNFTGKEKQPVPVARADDDDIFVGDGVDYTVPNEEMSQSPVSDMDESPHNHQKQSNFIEPMYGPVPPSEPAQAWQQPNGYDAVQAQMAAAGYQGDWSSYVYAEQQLGYPEQYVQQSTQEYDVLADPSISQDPRFMTQADKDRGLGSVFKRDDQRLNQLREKDERERDPNFISDSYSECYPGYQEYNNEIAGSDDEDDLSKMDMGGRAKGRLHRWDFETEEEWAKYNDQKEAMPKAAFQFGVKMQDGRKTRKQNKDQKLTNDLHKINKILARKKGEKDGAEDGGHYDDDLPSSKKQRG

SEQ ID NO: 175509 - protein, 620 aa, Zea Mays
MLLTVSDWVSSNFSCSPFSEEKKKEEPETPRYRDRAKERREDQNPDYEPTELGSFHAVAPPGSDLRLADAHKISIEKSKYLGDAPTERNPRKTCHALSCWLYFHVFRTGSFSDRDNTKSPVDEQLVVLLYCLFIGDLEHTHLVKGLGYALLHKVRSEIEKKPEAEDGKDAKSRATKEDQAVSFRTATAKSVYQWIIKPQSIIKENELFLPGRMSFIYNLEEVVTNDIPTTLHRSKADCPVQEEMVTVSVDGSVLDRIAKIMTYLRLGSSGKVLKKKKKERDIKGKNNLASGDCDESVKPSKINGSTQKHQSDMPPPPARPPQNNNFTGKEKQPVPVARADDDDIFVGDGVDYTVPNEEMSQSPVSDMDESPHNHQKQSNFIEPMYGPVPPSEPAQAWQQPNGYDAVQAQMAAAGYQGDWSSYVYAEQQLGYPEQYVQQSTQEYDVLADPSISQDPRFMTQADKDRGLGSVFKRDDQRLNQLREKDERERDPNFISDSYSECYPGYQEYNNEIAGSDDEDDLSKMDMGGRAKGRLHRWDFETEEEWAKYNDQKEAMPKAAFQFGVKMQDGRKTRKQNKDQKLTNDLHKINKILARKKGEKDGAEDGGHYDDDLPSSKKQRG

SEQ ID NO: 175510 - protein, 658 aa, Zea Mays
MLLTVSDWVSSNFSCSPFSEEKKKEEPETPRYRDRAKERREDQNPDYEPTELGSFHAVAPPGSDLRLADAHKISIEKSKYLGDAPTERNPRKTCHALSCWLYFHVFRTGSFSDRDNTDYIAWNNVTILSHLLLLAQAVPHLTVHYLSNWSMGKATRQHLAIGYQTDLIMEYAGDLEHTHLVKGLGYALLHKVRSEIEKKPEAEDGKDAKSRATKEDQAVSFRTATAKSVYQWIIKPQSIIKENELFLPGRMSFIYNLEEVVTNDIPTTLHRSKADCPVQEEMVTVSVDGSVLDRIAKIMTYLRLGSSGKVLKKKKKERDIKGKNNLASGDCDESVKPSKINGSTQKHQSDMPPPPARPPQNNNFTGKEKQPVPVARADDDDIFVGDGVDYTVPNEEMSQSPVSDMDESPHNHQKQSNFIEPMYGPVPPSEPAQAWQQPNGYDAVQAQMAAAGYQGDWSSYVYAEQQLGYPEQYVQQSTQEYDVLADPSISQDPRFMTQADKDRGLGSVFKRDDQRLNQLREKDERERDPNFISDSYSECYPGYQEYNNEIAGSDDEDDLSKMDMGGRAKGRLHRWDFETEEEWAKYNDQKEAMPKAAFQFGVKMQDGRKTRKQNKDQKLTNDLHKINKILARKKGEKDGAEDGGHYDDDLPSSKKQRG

SEQ ID NO: 175511 - protein, 214 aa, Zea Mays
MISFSRSGKTQLAHTLCVSTQLPIHMHGGNGKVAYIDTEGTFRPERIVPIAERFGMDANAVLDNIIYARAYTYEHQYNLLLGLAAKMAEEPFKLLIVDSVIALFRVDFSGRGELAERQQKLAQMLSRLTKIAEEFNVAVYITNQVIADPGGGMFITDPKKPAGGHVLAHAATIRLMLRKGKGEQRVCKIFDAPNLPEGEAVFQVTSGGIMDVKD

SEQ ID NO: 175512 - protein, 114 aa, Zea Mays
MNQISSTALEKLKGSFVSAGLHQELFLLIITYTNQRSNPGRNSFGLLFPVNRTGPKLGGYWIRRLCCERTGKEDPPFVLGFWCYRRNCRTHERKGWISFSKQVVTLVVAVLCVL

SEQ ID NO: 175513 - protein, 205 aa, Zea Mays
MGMHLRKSSWSQLLQMKSKLKMRELSPLSWVPSSSHADLVGKIILSWLDATISCPSSCLQPEESTRYRGLDASSTGLFPIEYGCNNFKQTSNRPISSTALEKLKGSFVSAGLHQELFLLIITYTNQRSNPGRNSFGLLFPVNRTGPKLGGYWIRRLCCERTGKEDPPFVLGFWCYRRNCRTHERKGWISFSKQVVTLVVAVLCVL

SEQ ID NO: 175514 - protein, 72 aa, Zea Mays
MKLIKHPNVVRIYEVMGSKTKVYIVLEYVTGGELFDTIANQGRMREGEARSYFQQLINAVDYCHSRARKSTA

SEQ ID NO: 175515 - protein, 138 aa, Zea Mays
MSAAATKVKRRVGKYELGRTIGEGTFAKVRFAKNTETGEPVAVKILDKEKVLRHKMAEQIKREISTMKLIKHPNVVRIYEVMGSKTKVYIVLEYVTGGELFDTIANQGRMREGEARSYFQQLINAVDYCHSRARKSTA

SEQ ID NO: 175516 - protein, 247 aa, Zea Mays
MADLWSCGVILFVLLAGYLPFEDSNLMTLYKKISNAEYTFPPWTSFPAKRLLTRILDPNPMTRITIPEILEDEWFKKGYKRPEFDEKYDTPLDDVDAVFNDSEEHHVTEKKEEEPVALNAFELISRSAGLNLGNLFDSEQEFKRETRFTSKCPPKEIIRKIEEAAKPLGFGVQKKNYKLRLEKVKAGRKGNLNVATEILQVAPSLHMVQVRKAKGDTLEFQKFYKNLSKTLKDVVWKSEDLQMRAAS

SEQ ID NO: 175517 - protein, 217 aa, Zea Mays
MQIKREISTMKLIKHPNVVRIYEVMGSKTKVYIVLEYVTGGELFDTIANQGRMREGEARSYFQQLINAVDYCHSRGVYHRDLKPENLLLDSYGNLNVSDFGLSALSQQIKDDGLLHTTCGTPNYVAPEVLEDQGYDGAMADLWSCGVILFVLLAGYLPFEDSNLMTLYKKISNAEYTFPPWTSFPAKRLLTRILDPNPMTVCKSTEAARNKILPKTM

SEQ ID NO: 175518 - protein, 439 aa, Zea Mays
MSAAATKVKRRVGKYELGRTIGEGTFAKVRFAKNTETGEPVAVKILDKEKVLRHKMAEQIKREISTMKLIKHPNVVRIYEVMGSKTKVYIVLEYVTGGELFDTIANQGRMREGEARSYFQQLINAVDYCHSRGVYHRDLKPENLLLDSYGNLNVSDFGLSALSQQIKDDGLLHTTCGTPNYVAPEVLEDQGYDGAMADLWSCGVILFVLLAGYLPFEDSNLMTLYKKISNAEYTFPPWTSFPAKRLLTRILDPNPMTRITIPEILEDEWFKKGYKRPEFDEKYDTPLDDVDAVFNDSEEHHVTEKKEEEPVALNAFELISRSAGLNLGNLFDSEQEFKRETRFTSKCPPKEIIRKIEEAAKPLGFGVQKKNYKLRLEKVKAGRKGNLNVATEVAPSLHMVQVRKAKGDTLEFQKFYKNLSKTLKDVVWKSEDLQMRAAS

SEQ ID NO: 175519 - protein, 201 aa, Zea Mays
MQIKREISTMKLIKHPNVVRIYEVMGSKTKVYIVLEYVTGGELFDTIANQGRMREGEARSYFQQLINAVDYCHSRGVYHRDLKPENLLLDSYGNLNVSDFGLSALSQQIKDDGLLHTTCGTPNYVAPEVLEDQGYDGAMADLWSCGVILFVLLAGYLPFEDSNLMTLYKKISNAEYTFPPWTSFPAKRLLTRILDPNPMTG

SEQ ID NO: 175520 - protein, 169 aa, Zea Mays
MPRLLTRILDPNPMTRITIPEILEDEWFKKGYKRPEFDEKYDTPLDDVDAVFNDSEEHHVTEKKEEEPVALNAFELISRSAGLNLGNLFDSEQEFKRETRFTSKCPPKEIIRKIEEAAKPLGFGVQKKNYKLRLEKVKAGRKGNLNVATEVVKNNSSTVNNNPSKLSCA

SEQ ID NO: 175521 - protein, 192 aa, Zea Mays
MKLIKHPNVVRIYEVMGSKTKVYIVLEYVTGGELFDTIANQGRMREGEARSYFQQLINAVDYCHSRGVYHRDLKPENLLLDSYGNLNVSDFGLSALSQQIKDDGLLHTTCGTPNYVAPEVLEDQGYDGAMADLWSCGVILFVLLAGYLPFEDSNLMTLYKKISNAEYTFPPWTSFPAKRLLTRILDPNPMTG

SEQ ID NO: 175522 - protein, 96 aa, Zea Mays
MMVDSRESNKGHHMLVLLVRRVERYSIPEMPISCFGPSISPENILSRFLAASSGEVCFFLYTPSLEQTNLFMTTTSSVPFDRRDLPTRKGKPSRLA

SEQ ID NO: 175523 - protein, 487 aa, Zea Mays
MDLKQAFSGTIFCLLLLFCVGCRCRTLEIEATQTAALKVDASPQLARKIPETLFGIFFEEINHAGAGGIWAELVSNRGFEAGGSHTPSNIDPWSIIGDDSSVFVATDRTSCFSRNIVALRMEVLCDDCPAGGVGVYNPGFWGMNIEDGKAYNLVMYVQSPETKDLTVSLTSSDGLQNLASATITVSGTSNWTKVEQKLVAKGTNRTSRLQITTNKKGVVWLDQVSLMPEDTYKGHGFRTELISMLLDLKPRFLRFPGGCFVEGDWLRNAFRWRESIGPWEERPGHFGDVWHYWTDDGLGYYEFLQLAEDLGAAPIWVFNNGISHNDEVDTVAIAPFVKDVLDSLEFARGSADSTWGSVRAAMGHPEPFLVKHVAIGNEDCGKKFYRGNYLKFYNAIREAYPDIQMISNCDGSSRPLDHPADLYDFHVYTDSKTLFNMRSTFDRTSRSGPKVSLKSHFHKDSYETALFHDQSFTSIRDSWHSLVMFFG

SEQ ID NO: 175524 - protein, 485 aa, Zea Mays
MDLKQAFSGTIFCLLLLFCVGCRCRTLEIEATQTAALKVDASPQLARKIPETLFGIFFEEINHAGAGGIWAELVSNRGFEAGGSHTPSNIDPWSIIGDDSSVFVATDRTSCFSRNIVALRMEVLCDDCPAGGVGVYNPGFWGMNIEDGKAYNLVMYVQSPETKDLTVSLTSSDGLQNLASATITVSGTSNWTKVEQKLVAKGTNRTSRLQITTNKKGVVWLDQVSLMPEDTYKGHGFRTELISMLLDLKPRFLRFPGGCFVEGDWLRNAFRWRESIGPWEERPGHFGDVWHYWTDDGLGYYEFLQLAEDLGAAPIWVFNNGISHNDEVDTVAIAPFVKDVLDSLEFARGSADSTWGSVRAAMGHPEPFLVKHVAIGNEDCGKKFYRGNYLKFYNAIREAYPDIQMISNCDGSSRPLDHPADLYDFHVYTDSKTLFNMRSTFDRTSRSGPKAFVSEYAVWRSDAGRGSLLASLAEAAFLTGLEKNR

SEQ ID NO: 175525 - protein, 85 aa, Zea Mays
MAVADNEYRTEKKAKKKAYKELKEIARSEGRKPPPNPYPSAIKEIQAEEKKYVMDRLHNPKVIEIANKMKEERDRMLRDRAAGQR

SEQ ID NO: 175526 - protein, 93 aa, Zea Mays
MCQVGLFFRLTFWEFSWDVMEPIAFFTTASGLLVGYAYFLITSRDPTYQDFMERLFLSRQRKLCAAHKFDMERFMELQKHCRCPLEGHGPRGP

SEQ ID NO: 175527 - protein, 696 aa, Zea Mays
MLIKDWCYYETRILGAHHGLISTYALEILVLYIFHIFHKSLNGPLAVLYRFLDYYSQFDWDAKGISLFGPVSLSSLPDLVTDPPVIHDDGFLLREKFLRECADAFSVPPRNSEKDAQLFSRKFLNIVDPLKQSNNLGRSVSRGNFYRIRSAFDFGARKLGKILQRPVCYTVDEVNQFFGNTLKRNRIGFRQDVLVSSSDDGTLTYHATNGSLSLGLDCKRVNNCSAPLYSNPCGDFSYRFNNINISDSINHDDSIKQKQCNSIAGEKAIKSISDGLLDSEGSSHASTDDSVSVRNSGDFYEALTTISPSGRRYAPHQFYQLENGKVVVRHNTNMSHHGMPTKQFTSRSYHSFEDAKYHNEFSGSFLPPIEHNAYSSAGFVNVLATSNSACTHENSQLGGANNNILKDLTGDFETYFHNLQYAQGFQQDNPVNPFSSGRPAPPSLQCQNTCPSNGRGRKNPYSYASMNGAVPCPPYPSGYLVWSPFIQPDDPMAMRTRGTGTYFSDRKLRKNRPPTGRVERGRNQFASNNYQRFHHHVRTDMPADMGSGLELRHELPQIHIPGATDHGMPSPMSIPMSSSSLNSPRDQLKVPAHSPSSQVRRNNFHGNGFMLLQDSKLESRTFNSKLESGILGPLPLEVTSKDHASRSESASSNQVSGPVSTVSAPRNTTTTDSNLMRDGAQSYRLKDSRDFPPLSS

SEQ ID NO: 175528 - protein, 864 aa, Zea Mays
MVDIIDAYPAVPEPAPAHPDPSSIPRDAWRRFESAALGILYTIQPSATSEHLRAAIIDYVQRLLASHSGVQVFPFGSVPLKTYLPDGDIDLTTFGPAISDEKLANEVCAILKSEEHRKDSEFDVKDVQYIHAEVKLVKCVVQNIIVDISVNQIGGLCTLCFLEKVDENFGKKHLFKRSVMLIKDWCYYETRILGAHHGLISTYALEILVLYIFHIFHKSLNGPLAVLYRFLDYYSQFDWDAKGISLFGPVSLSSLPDLVTDPPVIHDDGFLLREKFLRECADAFSVPPRNSEKDAQLFSRKFLNIVDPLKQSNNLGRSVSRGNFYRIRSAFDFGARKLGKILQRPVCYTVDEVNQFFGNTLKRNRIGFRQDVLVSSSDDGTLTYHATNGSLSLGLDCKRVNNCSAPLYSNPCGDFSYRFNNINISDSINHDDSIKQKQCNSIAGEKAIKSISDGLLDSEGSSHASTDDSVSVRNSGDFYEALTTISPSGRRYAPHQFYQLENGKVVVRHNTNMSHHGMPTKQFTSRSYHSFEDAKYHNEFSGSFLPPIEHNAYSSAGFVNVLATSNSACTHENSQLGGANNNILKDLTGDFETYFHNLQYAQGFQQDNPVNPFSSGRPAPPSLQCQNTCPSNGRGRKNPYSYASMNGAVPCPPYPSGYLVWSPFIQPDDPMAMRTRGTGTYFSDRKLRKNRPPTGRVERGRNQFASNNYQRFHHHVRTDMPADMGSGLELRHELPQIHIPGATDHGMPSPMSIPMSSSSLNSPRDQLKVPAHSPSSQVRRNNFHGNGFMLLQDSKLESRTFNSKLESGILGPLPLEVTSKDHASRSESASSNQVSGPGWRSIISPQGQQRLPPTVQLNVDGGTL

SEQ ID NO: 175529 - protein, 64 aa, Zea Mays
MELRKAAAGMFCRRPVHMLACFLQQVLMCSHCGHSVKKESIERTDFCNRRKGKCGAKASLPPLM

SEQ ID NO: 175530 - protein, 723 aa, Zea Mays
MCTLCAVQRWSRRVATMLPWLVVPLIVIWAATQLLLPAAYRFEVTSPRLACVSVLLLTLFWYEILLPRLSLWRSRRSARLREERRAHALELHKLRKTATRRCRNCSNPYRDQNPGGGKFMCSYCGHVSKRPVLDLNSAGKAPTGWPCAQDCGYWLEREMLEEEERKQREEMAKLVEERRKLRDEKAEAEERSKSATPVGEKDARREVEKRCQERKKKEDKGSSKSNSDCEDIDRRLNQEGDRKRDFDRKSDLDRRESYKPRYFDANSHSNKTGESRSRYFGRVTGGFLSSSRGFGGGSFFGRSAQAPAPQVSKVSRSVVPATDQGNAIKRDVQHAATQATDKSATAGETRNAWTNFNRPVSPNVQPHPTGLKKSWHQLFIRSASVAPYPDVTTSAHDMIRKPEPNGAQINNAHTFLSQYPPLDCKPSSSQSMQYPGFPPLNGAPPSNPLFHFSAGHMPFYDDAESTLLEESEQFEDPCYDPDAIALLGPVSESLDNFPPDLDCGFFSSDVAKEPHGWPSPIESPLSRSHTVEEKLTKPSHSSVARGSGGPILPVTSSEQGTWQMWSTPLVQESLGLQGPQSQWFQQNTNQFNHSANLFSSGGRARSPLGTGLNDSDPWLQKAPFQQLPPDTSSLFLSHEMPGKLHNDLAFGSPNKSAREHPFGPPGYLLPKEELVLDGAQEGGGGHVLSPSGAHVGLFSPTSPDVQPLWPFSEKREHRTNRLL

SEQ ID NO: 175531 - protein, 625 aa, Zea Mays
MRWLLRNIFRFTLSGDGEGLNIDGKRLAKSGENGGKTEESRTNKARRKAEEKRLARLEREMLEEEERKQREEMAKLVEERRKLRDEKAEAEERSKSATPVGEKDARREVEKRCQERKKKEDKGSSKSNSDCEDIDRRLNQEGDRKRDFDRKSDLDRRESYKPRYFDANSHSNKTGESRSRYFGRVTGGFLSSSRGFGGGSFFGRSAQAPAPQVSKVSRSVVPATDQGNAIKRDVQHAATQATDKSATAGETRNAWTNFNRPVSPNVQPHPTGLKKSWHQLFIRSASVAPYPDVTTSAHDMIRKPEPNGAQINNAHTFLSQYPPLDCKPSSSQSMQYPGFPPLNGAPPSNPLFHFSAGHMPFYDDAESTLLEESEQFEDPCYDPDAIALLGPVSESLDNFPPDLDCGFFSSDVAKEPHGWPSPIESPLSRSHTVEEKLTKPSHSSVARGSGGPILPVTSSEQGTWQMWSTPLVQESLGLQGPQSQWFQQNTNQFNHSANLFSSGGRARSPLGTGLNDSDPWLQKAPFQQLPPDTSSLFLSHEMPGKLHNDLAFGSPNKSAREHPFGPPGYLLPKEELVLDGAQEGGGGHVLSPSGAHVGLFSPTSPDVQPLWPFSEKREHRTNRLL

SEQ ID NO: 175532 - protein, 140 aa, Zea Mays
MMLAPNHSPLNRRSRRSDRKRSANGMACAGTRLFSPGVGSDSTCVFCHHLLDEIMSKLKDPDAEFEIIQILVKECNKIEGHVQQCKRLVLQYIPLILVNGEKFLEKNDVCALAQACPASSRKTFSSMLKGALWSDAWLEG

SEQ ID NO: 175533 - protein, 95 aa, Zea Mays
MNTLFISRAATAVVVVFRQQESTRLPTHGRLATASLAPPSTSHGLDGNNPAHSGPLTREISRQPPHKLWARASIEEEIGFIPLKDYNFKYIALLT

SEQ ID NO: 175534 - protein, 206 aa, Zea Mays
MPNKQLTVFLSAFACSIQSEHFLCKIQIPVTPTMSRSVEPLIVGRVIGEVLDSFNPCVKMIVTYNSNKLVFNGHEIYPSAIVSKPRVEVQGGDLRSFFTLVMTDPDVPGPSDPYLREHLHWIVTDIPGTTDASFGREVISYESPRPNIGIHRFIFVLFKQKGRQTVTVPSFRDHFNTRQFAEENDLGLPVAAVYFNAQRETAARRR

SEQ ID NO: 175535 - protein, 110 aa, Zea Mays
MCKTSITESQKPGLVDTPHRGKISSSVCSFALCALFLTCKLLETKFVGHFAPTYRTINTLTAFDYYIVKQGMYRIWRCLIYQQEYRIAHWKHEKYGDINFCAPIFPSACP

SEQ ID NO: 175536 - protein, 205 aa, Zea Mays
MVNYVDEIRAQGFKLEYLNIGGGLGIDYHHTDAVLPTPMDLINTVRELVLSQDLTLIIEPGRSLIANTCCFVNRVTGVKSNGTKNFIVVDGSMAELIRPSLYGAYQHIELVSPPTPGAEVATFDIVGPVCESADFLGKDRELPTPDEGAGLVVHDAGAYCMSMASTYNLKLRPPEYWVEEDGSIVKIRHEEKLDDYMKFFDGLPA

SEQ ID NO: 175537 - protein, 159 aa, Zea Mays
MVNYVDEIRAQGFKLEYLNIGGGLGIDYHHTDAVLPTPMDLINTVRELVLSQDLTLIIEPGRSLIANTCCFVNRVTGVKSNGTKNFIVVDGSMAELIRPSLYGAYQHIELVSPPTPGAEVATFDIVGPVCESADFLGKDRELPTPDELDWLFMMQVPTA

SEQ ID NO: 175538 - protein, 282 aa, Zea Mays
MLSASLSVLSSNYPVPIVHPYVATGNKTSKFGIRNEKLQWFLNSIKSYSNEIKLVGVHCHLGSTITKVDIFRDAAVLMVNYVDEIRAQGFKLEYLNIGGGLGIDYHHTDAVLPTPMDLINTVRELVLSQDLTLIIEPGRSLIANTCCFVNRVTGVKSNGTKNFIVVDGSMAELIRPSLYGAYQHIELVSPPTPGAEVATFDIVGPVCESADFLGKDRELPTPDEGAGLVVHDAGAYCMSMASTYNLKLRPPEYWVEEDGSIVKIRHEEKLDDYMKFFDGLPA

SEQ ID NO: 175539 - protein, 944 aa, Zea Mays
MRRLPPLPRPAAAVASTSTPDIVAELGRVLSTRRWNKGSAYKRLSPSVTAAHVADLFRAPVSPLDPATALAFFECVARRPGFRHTAASHAALLQLLARRRAPANYDKLVLSMISCSGTAEDVREAVDAIQAIRRVGGKRLVLSPKCYNLALRSLLRFDMTEYMGKLYSHLVQEGLLPDTVTYNTMIMAYCKKGSLAIAHRYFCLLRESGMQMDTYTCNALLLGYCRTSDLRKACWLLMMMPLMGCRRNEYSYTILIQGLCEARCVREALVLVFMMVHDGCSLNLHTYTLLIKGLCKEGRIHDARGLLDEMPLRGVVPSVWTYNAMIDGYCKSGRMKDALGIKALMEQNGCNPDDWTYNSLIYGLCGGKLDEAEELLNGAIARGFTPTVITFTNLINGYCKAERIDDALRVKSNMISSNCKLDLQAYGVLINVLIKKCRLKEAKETLNEMFANGLAPNVVTYTSIIDGYCKVGMVGAALEVFKLMEHEGCHPNAWTYGSLIYGLIQDKKLHKAMALITKMQEDGITPGVITYTTLIQGQCKKHEFDNAFRLFEMMEQNGLTPDEQAYNVLTDALCKSGRAEEAYSFLVRKGVVLTKALCKQKKLNEALSILDQMTVSGVKCNIVAYTIIISEMIKEGKHDHAKSLFNEMISSGHKPSATTYTVFISSYCKIGRIEEAEHLIGEMERDGVTPDVVTYNIFINGCGHMGYIDRAFSTLKRMVDASCEPNCWTYWLLLKHFLKMSLINAHYVDTSGMWNWIELNMVWQLLERMMKHGLNPTVVTYSSIIAGFCKATRLEEACVLLDHMLGKDISPNEEIYTMLIKCCCDIKLFGKAVSFVTDMIEFGFQPQLESYHYLIVGLCDEGDYDRAKSLFCDLLGMDYNHNEVAWKILNDGLLKAGHVDFCSQLLAAMDNRHCRIDSESYSMLTDSIREASGSVVSELRGEAA

SEQ ID NO: 175540 - protein, 201 aa, Zea Mays
MPLPIDGRRERAVCVRGAGAGAMEINIVDKYEKLEKVGEGTYGKVYKAQDKATGQLVALKKTRLEMDEEGIPPTALREISLLNLLSHSIYIVRLLAVEQAAKNGKPVLYLVFEFLDTDLKKYLDVYRRGPSARPLPATLIKNFLYQLCKGVAHCHSHGVLHRDLKPQNLLVDKEKGILKIADLGLGRAFTVPMKSYTHESS

SEQ ID NO: 175541 - protein, 62 aa, Zea Mays
MRSLFLPIIMCFWRLWIMGIKGLEVGLDVGLGFDLEFSFLQNGRFDTFCSCQFSVVLVASKN

SEQ ID NO: 175542 - protein, 129 aa, Zea Mays
MGIREGQPSRLGREHPPRMNGAAQPWERLLGVGSNHISWAHRNPTNPADPGGYGFGTKEMEPPGGSPTTETQGQARWMQAKRLPSRAHVQVRGVRDAAMLGRNGLRGKLVGRLNSFPFPFLFRFLKFKF

SEQ ID NO: 175543 - protein, 90 aa, Zea Mays
MNMLLATQGICNQICLARVIVNLQIIILNKLQPTALPKVKILLSEYILQTLMIRVYLTLGSHNVMPPNLKCMHNGCQFQVMRGVVQFMFP

SEQ ID NO: 175544 - protein, 51 aa, Zea Mays
MLLSVADKCLHSDPANRPTMAQVVKMLEQPNNTHHHSSSSSSPAAAVESVH

SEQ ID NO: 175545 - protein, 104 aa, Zea Mays
MRNRSCIDSIDDHKSAVYLSIYRGGGLDPLQTNFRAYPMILANNHSTKLGTLICSAHARTVRPTGADRPDRGPSGLRAGQSAGSFWCQTYAPLPFGGAERTKSN

SEQ ID NO: 175546 - protein, 60 aa, Zea Mays
MPVARSGASNLPAPCIVCRIPQRQMATIAAIQTTLLKDNEVVYFLTVGKLDTTGVVNNGA

SEQ ID NO: 175547 - protein, 110 aa, Zea Mays
MSPRERAQNKSQANKKVRHGDLFYRGSVLANLLPVEEATKAGSLSTLPSFKRSTDRVSFLFSITWNTKFPQGPPQDWCLLPQFTSEFDCKEWIKKEESNPSARARKNTSK

SEQ ID NO: 175548 - protein, 113 aa, Zea Mays
MFTKMGNTRSSSYPLMNVAEDGVDGVISLDCLVDSWVWRSLFLILLVFIICISPLINAIILRWLICLIFFFINLSLFLNLGWWRCLHGGGWLILCTWRLFGFLRTHIPNGHVP

SEQ ID NO: 175549 - protein, 56 aa, Zea Mays
MYASSRDRTRIEREQHCSLPVSVVFGEVGRPTATWRRRGRAHHGGKRRRRARESIG

SEQ ID NO: 175550 - protein, 154 aa, Zea Mays
MGWLWHRRLAHVGMKNLHKLLKGEHVLGLTNVTFEKDRPCTACQAGKQVGSSYHSKNVMTTSRSLELLHMDLFGPVAFLNIGGSKYGLVIVDDFSRFTWIFFLQDKTETQGTLKRFLRRAQNEFELKVKKIRSDNGSEFKNLQVEEYLEEEGIK

SEQ ID NO: 175551 - protein, 54 aa, Zea Mays
MSRLTRDKEEDVAKDKISKTSFSNWDRRLEILDNRNNVITKVWSRDGKGQGNAK

SEQ ID NO: 175552 - protein, 59 aa, Zea Mays
MARDPLRGLYKVPLASENPLQFMGRAFVRIPRLIGITAKSTREPPYMQLPCCPCPFRVR

SEQ ID NO: 175553 - protein, 93 aa, Zea Mays
MTPPPRESVQEACMHACSRDRDALDPLLFLFFFFVTAKNRPATRTQLWPRFASGRGDQSGRGRWWQEYSTEYYLLATGSRSRYDRSIRSRPIG

SEQ ID NO: 175554 - protein, 295 aa, Zea Mays
MQQQQQQQQQQQVPLPPPPPPVPPRDKHREFMSHKPPTFASSPDPLDADDWLKSIEKMLNIAQCTDREKVLYASGRLTGPAADWWDSYTAAHDAADTITWAEFSTQFRNYHIPAGMIKIKKKEFLSLKQGNMSVSEYRDKFIQLSRYAPEEVAEDERKQEHFIEGLNGPLQYALVAHTFPSFQRLLDKALAIEHKRVQLSDLKRKAISQGQGSSSVRPRYVPPQGTPTRPGGPRPVQYAPQGSPRTPTRQATPTGTPTRSTGQKTSPTCFKCSQIGHYANACPMGNSGTPAKNKQ

SEQ ID NO: 175555 - protein, 58 aa, Zea Mays
MLQSVHGRYKKVVVAFLILLVLKFHNHMPDSLRVMNFTNCLLCSVHRQDRFRKLCCLI

SEQ ID NO: 175556 - protein, 120 aa, Zea Mays
MPPLCSRAPAVEPCSRRAQLAVVKLVAGPSASVRRSPSLEPRRSSYSPFASLGRSSVRTLTNDRVVPCPSNPARRCSSLRMNEITRLKTILKYLFSKSCFEFIVNYCCNIEMMRFGESRG

SEQ ID NO: 175557 - protein, 61 aa, Zea Mays
MIKRIYQIKHDHSSIQHRLLPLNMCMERKNTYFGLKCQLHIIRLMRTYLYHTEGEVHCVIE

SEQ ID NO: 175558 - protein, 87 aa, Zea Mays
MATTDPVSDSHSPARWSGRRRPGHERRCLLNGGVEEDGNGGERHPRAGLEHDLPCCLWYSGSGLSLSTSLCRWCLHAGAAEFWSRRH

SEQ ID NO: 175559 - protein, 113 aa, Zea Mays
MPKFGEDTSSAAEAEPAAPVAEESTVVPKVPIVKPVEAENETTRKLELEKATDLPEIPSQPIEAELSKVGKAPATSPKRRRMASVLDAVVETTRALTPAPVKKVAEAAKAHIE

SEQ ID NO: 175560 - protein, 65 aa, Zea Mays
MQAAGRGIGVGNWISVWTLGLWRSRLQICNCRCGLWNIVYGVGAHQLCGARCGGTDCHPQGRPCN

SEQ ID NO: 175561 - protein, 70 aa, Zea Mays
MYFYYKTLVCNIVVRQYFKKHLYFFVFNHGLSLPITAPSPHLVKNPYISCNTQGSSPLLQKKKKNSFISL

SEQ ID NO: 175562 - protein, 74 aa, Zea Mays
MAAPLHGFLLPLDLPPRSKDREEEEHIELKEKRGSRRCSSPSFLAEFLGETLGMDEILVPPCNYVLLEVVDHGN

SEQ ID NO: 175563 - protein, 53 aa, Zea Mays
MFHLTLALLNAGACCSSREVGSSSTSTFTLIITLLRRSHNLIRNFLSKDVVSS

SEQ ID NO: 175564 - protein, 83 aa, Zea Mays
MRTLAGPRANMTGGLPRPEQDPHHRRRVADTLLKSVSHTQHNLFSLPSVQCQQQPAQPGPLLQFAASASKCFAVLSRCSHSLS

SEQ ID NO: 175565 - protein, 61 aa, Zea Mays
MMALGPCTAHVICHNEHEEKIPSNQNTYEQCGLTRVKHLVLPWYSGSFSRKPPMADPHLVL

SEQ ID NO: 175566 - protein, 128 aa, Zea Mays
MLHVPYTRTPYPTHARETSRVDSDTTCNTPSNTWTNGTYSWQLSRIIYYPHRPTRVFCAYFVLTHAHPRKHLGRSPTPNCSNTSTLNLELFSRYASEKEDAPCWYEYTINSIKPWARISHLRNQDITI

SEQ ID NO: 175567 - protein, 90 aa, Zea Mays
MNMCELTLAVSHPHRRRTGGTRGASQRGVRLDLGGVSQLTYRRQGWILVHFIFYFVRLPRCNKYSDVIVTFISIHSVIICVVFFDAYMRC

SEQ ID NO: 175568 - protein, 89 aa, Zea Mays
MQQMADTMADMHAQIRQEHQEMRQEREEMRKEGRAQQQQAPLPPPPPPVPPRDKHREFMSHKPPMFVSSPDPLHADDWLKSVEKMLNIA

SEQ ID NO: 175569 - protein, 124 aa, Zea Mays
MGWGSWMEPGAKAESAGCAAAAAGQQQPRIGGRKQGCARWSVDRHSLDGAQPAARPRYTTTHPFKPTAPAAWFFFSSACIQQSQNFFCCPGAHTYVAAPPVASSTAVLPLLLSCPYISCTRSES

SEQ ID NO: 175570 - protein, 60 aa, Zea Mays
MRFYGRREEARVLWVPRPHPHVHARMRLEEKTVPLSSRDPQFAMGIFCGQVIQFLSHLCI

SEQ ID NO: 175571 - protein, 59 aa, Zea Mays
MFLYTYICLFAGVCSSSLRVAIKSRFVSELRGIDSQASVTKWSGSSSSTKLKTLSICLV

SEQ ID NO: 175572 - protein, 113 aa, Zea Mays
MGKNISLILSSPSIQHAPPLLDPCCVGGGNLEGGGSHGEGRGRLPTERRAREGGGGCNPIGEKVRGRLGLGRRGGAPIHRIKINGPNSLSPLSSQSPAEKKCQKIYCFLRNAS

SEQ ID NO: 175573 - protein, 58 aa, Zea Mays
MLLLFSILAAWGGGNLEGGGSHGEGRGRLPTGRRAREGGGGCNPIGEKVRGRLGLGRR

SEQ ID NO: 175574 - protein, 153 aa, Zea Mays
MLRGPCIRRRLGEAAAVAAPSSYTCMLEARRSAPRSSMGWRSPSSASCSHTSSRDGPLPCSTSASPVVRISASSKLLRGSFTSVRVAGMSVGWWLRAVQLGPGVFSSLSLGREVATVVGEGVSVQQWSWARVCRWCTCRRIWRVAAAAARGGR

SEQ ID NO: 175575 - protein, 223 aa, Zea Mays
MAGVRLHGRPISLLGSCLLVSCRCPALLPCPAVLSCSLWPAPAWPPSPMANSSLRAEVVCSSRPAQLLLLVPRVRVRPSSARILPEPEQSSVHSRRRVPDARSAVWLPRASSLFPRLAPSPKSHGARPQRRSLSPAALAPCIHGDFPLLELARPEFPVAASCRAWLRARASPCVPRCSLRAQPQFPVRALHCSLGEFLAATVVQCLARVDSHSLISPSLCCRW

SEQ ID NO: 175576 - protein, 114 aa, Zea Mays
MSIGDVCPKESEEPPNAQDQPSFSTQASPPTQNEDEAQVDEGEDQQDEPPQDDGNDQGGDANDQDKEDEEPRPPHPRVHQAIQRDHPVDTILGDIHKGVTTRSLVAHFCEHYSF

SEQ ID NO: 175577 - protein, 96 aa, Zea Mays
MRQTLRDYGYKLTKVPLLCDNESAIRMADNPVEHSRTKHIAIRYHFLRDHQQKGDIEIAYINTKDQLADIFTKPLDEQTFNKLRHELNILDSRNFS

SEQ ID NO: 175578 - protein, 52 aa, Zea Mays
MGSDRGWMIPFVVRNISSAHEPLLVYGKRKCMGRPNSDIYFWHVLRLQCKHL

SEQ ID NO: 175579 - protein, 79 aa, Zea Mays
MGTDDGGSLHSMAPGRLLARLVVVRGEARDLGLYQLALVPTHAQNQPISGGRRARLGRARLLRDYVAGIALFLGDSLWF

SEQ ID NO: 175580 - protein, 93 aa, Zea Mays
MCVANGKKESLPLLDRSTGEGTDPRWRCISWSGGPMDEDGRSQRGQGAGVGVDGGALADGAQAGGTRVGRRWRGGERAGWRWRAGGLATASGS

SEQ ID NO: 175581 - protein, 92 aa, Zea Mays
MFQVQTHVGPATVIGGWQRLLECEQEHESGRARLEWRLDWRAAVPCSLFHEQSRGSDRTVPCSPSTTKREQGRRKLGGRPARARAGPAAAVR

SEQ ID NO: 175582 - protein, 104 aa, Zea Mays
MSEEERARGVVIELATIVTLQSTDRATKLSGYPGEEVCEGGECVRLQPKREGPEKVGKIIQNHQIVFITRKTEYRGGPKITVNQVKSLLSPRRRSSKWEMSMSA

SEQ ID NO: 175583 - protein, 57 aa, Zea Mays
MGSSINRLSNWARAITVRGETVITRGTSQTLESWTGSLTRTPLLPLFLYHGFCMYFS

SEQ ID NO: 175584 - protein, 385 aa, Zea Mays
MKNLHKLLKGEHILGLTNVHFEKDRICSACQAGKQVGAHHPHKNIMTIDRPLELLHMDLFGPIAYISIGGSKYCLVIVDDFSRFTWVFFLQEKSHTQETLKGFLRRAQNEFGLRIKKIRSDNGTEFKNSQIEGFLQEEGIKHEFSSPYTPQQNGVVERKNRTLLDMARTMLDEYKTSDRFWAEVVNTACYAINRLYLHRILKKTSYELLTGKKPNISYFRVFGSKCFILVKRARKSNFAPKTVEGFLLGYDSNTRAYRVFNKSSGQVEVSCDVVFDETNGSQVEQVDLDEIGDEEAPCIAFRNMSIGNVCPKESKEPPSAQDQPSSSTQVSPPTQNEDEAQVDDGEDQANEPPQDDGNDQGGDANDQDKEDEEPRPPHPRVHQAI

SEQ ID NO: 175585 - protein, 124 aa, Zea Mays
MPSQREQYRSTVHLFIGTDRSPCKITSRPFAFANNSIVIHRGLDSLFLFKSVSSFLSSCRSSLAHSFGSVPSFVSLVLLHTVILTQVRRVQVRRYMLMYYTPETLLNHVFEDLRKPKAPNRSPF

SEQ ID NO: 175586 - protein, 151 aa, Zea Mays
MACPSLCSSVLLSCAPSHLPARSHGSPPSSPRRGASFPSRELPCADRSSPAFPTSPSSSAAVSQLPLSDCPLPMAGAWPQLAAPWNSLACSPVRALPSAAASSSLSSLPLSCAAPCSLLAARRCSSYGASSSQFSVLCTHLPVHNAVVPYA

SEQ ID NO: 175587 - protein, 131 aa, Zea Mays
MGAWLLELHRRHGSRELLLAGSKGTELGWKQPRRELAHAMDSRGKRWGARPTRLLVDHGDTLLPSAMDPGREVLLPCAHLNLRRVASRVSRERKGAMEQGKMERGAGHGEPAGGHGQRGASCRGASLGKGA

SEQ ID NO: 175588 - protein, 62 aa, Zea Mays
MYISTKHQSMSRSTFFFFFFCPVRTRSDPFLYRPRSGQKTNHGELVRHSPFTSNPVKPAFLH

SEQ ID NO: 175589 - protein, 71 aa, Zea Mays
MKTAEAETGEAETTGAEAGATEESNLEATLEVIDNILLKMTEEEATVAAVNTATEKGKEQIDEISEEEDFN

SEQ ID NO: 175590 - protein, 56 aa, Zea Mays
MRIGIGAVQIFVGGRTVVVLGISGDFSWEISDNQYENHVDLCHTFPTSTYALDSEL

SEQ ID NO: 175591 - protein, 64 aa, Zea Mays
MVRLYRYIFSIVRCPRRGTMRLHILRGMKAEVILAFADICTHEEYMKCDITMLLLWFIPARWSN

SEQ ID NO: 175592 - protein, 88 aa, Zea Mays
MNAYECNAYVLCLHTSKGMKPHRTPPRATYDAKLYRYGRTIGHDPTSYASESCNVYGMLHLSIYFTSFTYNTTSNNTSFTFRYNTNLK

SEQ ID NO: 175593 - protein, 73 aa, Zea Mays
MAALPFRERGCHFACQPDSPTLWISRVVDSAPQSVLRHLGSSLSPLWQSCTCYSSRRGPVQTSFFRWVATISC

SEQ ID NO: 175594 - protein, 80 aa, Zea Mays
MMHDLWWLSGMQVFSMSGSTRRACGRVGGPLWRFFGFHCMQIMRMGEGSPRQFLPPLFLQPHAPFFLVTACLALAGPEPP

SEQ ID NO: 175595 - protein, 67 aa, Zea Mays
MTYRSLSASDAQYLVVSVSHNTFPSVYCILASTRQLTRTLRIAPVKIILASSYFSHLQESVRHYVCL

SEQ ID NO: 175596 - protein, 86 aa, Zea Mays
MPSIDHEAVADLGEFSCLVIFPFVVVAGPATLRGWPSPVEVASKHDALLESVLDGPLMIGARLFEHLVEEVGTSGGLPRVLVLGAG

SEQ ID NO: 175597 - protein, 54 aa, Zea Mays
MSARGAGLGRSPSSGMPRRLSSEGSPSSTWKHSRLGPQSLSSRLRLPSEQSERQ

SEQ ID NO: 175598 - protein, 142 aa, Zea Mays
MVPDNNLEVDVPINIDFVTPITQLVSVYVPLVSNNHSITQDRPRSNIVLPHRYRDTNSMAHYALIAAQETNVAFEPSYSKAISCDDSSKWLVAMNDEFESLQKNGTWKLVELPEGKKPLKCKWIYEKKEGISGVEPARFKAR

SEQ ID NO: 175599 - protein, 230 aa, Zea Mays
MSHIPYSNAVGNLMYVVICTRPDLAHVVSVVSRFMHNPGKEHWNAVKWILRYLKGTSHFGLLFDKNSVNEIGVMGFVEGIIDFDFAGDLDKRRSISGYVFSLCGSVMSWRALLQSITALSTTEAKYVSTTKRVKEAIWMQGLISELGVTQDVINVYCDSHSAICLTKNDMYQFNTKHIDIKYHFIRDIVVEGKIKVDKIHTDANSADMLTKPLSNTKFKHCLDLVGVRGG

SEQ ID NO: 175600 - protein, 72 aa, Zea Mays
MAAMVNSVKPSMIMSLSKFKTAKAIWSHLKERFVQDSGALLHTLMQQTHVIEQNDMSIDEYYSAFDRLMSAL

SEQ ID NO: 175601 - protein, 119 aa, Zea Mays
MTTVFLPRYPEPRKVPTNPHWCPYAKGSSCEGQAPRSSNSVESRGPSPRASGAPLPAPLGHSPSSPLSSFRPKTSRTSFPPVHGGGCDTNAVVTVSQDPCPTRYNYNSSHKSRGVVWFF

SEQ ID NO: 175602 - protein, 107 aa, Zea Mays
MQCVSPVPSYLLEYKTTPSTNTTSMNAYVLCLHTSKGMKPHRTPSRATYDAKLYRYRRTIGHDKTSDASESCNVYGMLHLSIYFTSFTYNTTSNNTSFTFRYNTNLK

SEQ ID NO: 175603 - protein, 90 aa, Zea Mays
MDLLAALVYTKRMPRGPFIAPKEPLAIAPFHAKKISILGNKCHSEGALDCPVPSSDCLIRLRPTVIESVIGPPFASMGHRTVWCRHQTVR

SEQ ID NO: 175604 - protein, 101 aa, Zea Mays
MFCSPVAWAWRATMWSASRPEAWGASKVDEGVSWSIGGGPMTRRCAVAIWVVRVAARARSCSRARDAARSRSCEAARAAWMAAMVDASVESVEGGGEAQVA

SEQ ID NO: 175605 - protein, 154 aa, Zea Mays
MRTAAALGEERLAVWGAARRASAPAAARGATALVSGRTAWRGSMAVEGEGTTTMLLRRGASQGGGPAAQRSSAMRRRCVCCTARGGGGACACAAAGAWSCGARWPATGGAVPRRGWGWTRPAAKRARARGGDRRREMSWGRRWDEAQPPTGGSR

SEQ ID NO: 175606 - protein, 147 aa, Zea Mays
MDLGPLHHFLGITAERQSQGLFLHQRQYAIDILERAGMSDCKPCSTPVDTQAKLSEDDGPPVADATSYQSLTGALQYLTFSRPDIAYAVQQVCLHMHTPREPHLTALKRILRYLRGSLDYGLLLRPSPTSELVVYTDADWAGCPNTR

SEQ ID NO: 175607 - protein, 157 aa, Zea Mays
MKPKLQFQPSRRSWQQSPLPLPKSNANWGSLPRRWPPCPPALPRWNPPQEHRPWRCHQTAPTACLDMVDCHRLGQRSMATFHHHPSPYPHQHHHHLTSTAPAVITTFTISHSIITTIPTHHFTNPIFSPTTAHHTRCFLSTAICCCSSLPPFRVCNL

SEQ ID NO: 175608 - protein, 65 aa, Zea Mays
MYFEIRKKRKKTKTNPKPIRPMKPPLPASLDLAVAPGPWQQSSPAPLLSLLSSPCSSLAAATCLK

SEQ ID NO: 175609 - protein, 80 aa, Zea Mays
MISSIPRVSPRNSAIRDGEEHLLDPLFPFNSTCSSSSRSLLRGGRSRERRKPWREAAMGGEDDQPKGKGGRGGQVWEGGG

SEQ ID NO: 175610 - protein, 82 aa, Zea Mays
MAPTFLTLSSTGPRGRRTYVSCRRLRALHNKFDGTHVLKIKNVGTHVFNPAWVCADCTISSKVPTFLRLRTWTLFQKKNKKY

SEQ ID NO: 175611 - protein, 72 aa, Zea Mays
MPQPSRPCRAITHARSTRHPRPGAQLPACGIPSPLSLSLADRSRSSVVSSSSRLCAPLGFCVLASNRSSLLD

SEQ ID NO: 175612 - protein, 214 aa, Zea Mays
MSVLDATLPCSSVGRALHSSPPWNSLLLTMVADLVLRAPRALAAVSWRAFLSSPWLRSPCPPPIFSPSRADLAVVLVIDATQSSTCCYPRGHRFTPSLYFHHPWRRSGDVLAAAPTSSTSPQSSMLGLSACYSSALLASTTLSPVSSPVVDAQVEDTPPSIHVFVLWVMLLLGVTTGRVRDPVSLCSLSASCVRIECQDYGERKAPAHQMSGVP

SEQ ID NO: 175613 - protein, 53 aa, Zea Mays
MGRRGGCACAGKGGGGRDMGQIWPSRGKKSFFFFLFIFNNSFPFLFLFFEQII

SEQ ID NO: 175614 - protein, 78 aa, Zea Mays
MVLNGQGPGRHPLGGASCRDLDVVSSEQGSGRRFLSGALHRRPDVVTNVQGSSHLSQRVQGVRKLVESTRIRVGNWNV

SEQ ID NO: 175615 - protein, 53 aa, Zea Mays
MAQRPASSFGNPILLVISRQTDNSLLSGRQYKKSSSSVPLNTKAPFGYFSSRA

SEQ ID NO: 175616 - protein, 56 aa, Zea Mays
MLSLVIASRAPCCRVPISVCHAAPSLLGRRSCIPKKTQESGEDEVSSAIFPKRSTI

SEQ ID NO: 175617 - protein, 68 aa, Zea Mays
MRRDELDEGVVWRVGNDVCAAWTELRRGSTDGGADGDSVDELRRRRGRVGERESPREEESSGRGGRTL

SEQ ID NO: 175618 - protein, 52 aa, Zea Mays
MFYITLALLNAGACCSSREVGSSSISTFTLIITLLRRSHDLIRSFLSKDVCF

SEQ ID NO: 175619 - protein, 88 aa, Zea Mays
MCYSFFSLFLAIFFQIFFLYFFILQQHIRRKHIKFQIFCAKTHPLEFLQVCPKIGINVWKMRSSISKPNLGILKTVNTTKPERIRCKI

SEQ ID NO: 175620 - protein, 61 aa, Zea Mays
MIFCEPTLAIYKPPNRRRTCGPGGATQRGVLLDLGGVSQSTLWRQGWTLVRFIFIFYFVRL

SEQ ID NO: 175621 - protein, 58 aa, Zea Mays
MFIFPNHLFLVLPCPCFSPSRTPVPFTLFLRMKELPRREVPQALQQQERMSTVRRAQV

SEQ ID NO: 175622 - protein, 101 aa, Zea Mays
MPRRTAGPTCQPHILCSYADCLSLTLDQPRQDPSSFPSSFFQQNANPSPRARSGSPLGRWGSFRGTWDADPPSFCPGINPGTRPICHPRTLETNGRREERD

SEQ ID NO: 175623 - protein, 311 aa, Zea Mays
MNQQEAPTGVGEFLRDFGVPVVLWRLLQEVGYIETPKYQWSRTVLRGQPWYEVVVRIPKRARKPSWPHWMFHAEGMTPWEGAQVAALEALTTICYQKWEEIQATSMRLFPAVALSDPLVYHHQARLLESIPIGQDSVESESARVLMVVLELQLTRGHSRQKWQQLYTGSYAAFKMMEMAKNRACTQAQERLEETKVQAKQIIGLEHPVTGLQTQHQADQNRIKELEHQLVNAHSKSKVLSQQQEEIRLDVIAVSEDLKETLSFISHQDQAIQELNSAHPMEFQVAQRLVNHLLQTVHRLNVAFYPTPAPAD

SEQ ID NO: 175624 - protein, 86 aa, Zea Mays
MGWNCKPVWSRCQTCKYVSHAVLAPWYYLLTELWAKIRDHFAYIYSVKPALDQCPSVWVSGTSPCCSRVTPAGSVHVACSVIFVGR

SEQ ID NO: 175625 - protein, 51 aa, Zea Mays
MLLRQKRTRRRSGLGLALVLLIVDIDYPLHFNYEFVPFYFKTPIYVITPVP

SEQ ID NO: 175626 - protein, 54 aa, Zea Mays
MAVAHHFFLLPRSPPPPRSKDREEEEQDGLKRKRGSRRCSTPPPHLLQIFLGKP

SEQ ID NO: 175627 - protein, 75 aa, Zea Mays
MAVAHHFFLLPRSPPPPRSKDREEEEQDGLKRKRGSRRCSTPPSIADFPGETLGKDGILVPPYNYVLLEVVDHVD

SEQ ID NO: 175628 - protein, 113 aa, Zea Mays
MGPHCRLCLPRLSHLHNKPWRTSRVCTSHQETFAPSSGLGRTQQTPATAVGVRLLQIRVLLGAMESLGYIRARHRNTSPLHPAVVICAQREKKRVRCRQSSGLRRQLVARISC

SEQ ID NO: 175629 - protein, 118 aa, Zea Mays
MQVEKESSSDDDLDANIALMVRKTTKILKKLNREGIKFDSRKKKLFPSKRKPISEMDCYNYGELGHLAHQCNKPKKNKFKGKKNDDSDDEKKEKKFFKRKEEKHKRLHKKKKWRSIYC

SEQ ID NO: 175630 - protein, 190 aa, Zea Mays
MENASLLATSERSVPGRGLGHGDESSAPRRRSRRPGARRPGQAPGSSSAAAAQKAGTRTRAGRELRKQSAALELTRPEKLPRNCAQERGDGREVREREKHRPTESERGMSEGGERRESRGRGRARHSARAGRSSRELRGRPWRDLGRQAEQRTGRGGELREREKGAARRWGWNATPLERELGTPSLRTTA

SEQ ID NO: 175631 - protein, 71 aa, Zea Mays
MFIHCCPLIYAILQGGCCRNFIYRCQKCCLVAFWGVGGPRGVTVSKKFVMPRDETHTLNVKKVALKSMSKD

SEQ ID NO: 175632 - protein, 68 aa, Zea Mays
MLCWHNTPKRGRLKGKCALGPFLSILVIECKHKCLNVNLCPWMNKVQITSKGMFLSLSTLVLCTNILV

SEQ ID NO: 175633 - protein, 87 aa, Zea Mays
MSCTELCIRASSNISCVTRPSTSCSALGLSVARLLAQPSARLKPRRRLSAPRAYLLLRTSPHTLPYHTCALSSSSSYRASSRNPESG

SEQ ID NO: 175634 - protein, 58 aa, Zea Mays
MMKSLLAMLTRIRRAFLHYSDRLRGIETAIKAYKTSVIDVIGALSNCLQIGSKSDCKP

SEQ ID NO: 175635 - protein, 234 aa, Zea Mays
MTLEPHPLQPGWHSLDSESFGYRAEDTIEAIALHGLTTFCGFHPLELATHPIGLFPAEKEDDPMWKDRVEHAKDIWAIYPGQTAHLTVRCMNALYRLQVMRGEAMSHLMALLEATKITLDNREELVVDLSTEMVEKDLQVEQLSTDIQELEDLVGTRENTIEVLEVSSLTPSSSLPRLTSTWICITKRSRTWRPTRTSTSREEMSLPLVWTLLAQGDHLPPSRVLPRSLTRCSG

SEQ ID NO: 175636 - protein, 173 aa, Zea Mays
MAQQNEILRQLAQRQPPPQHYGGGDHQRHPAAATYQEFLSTQPPLFTMVEDPLDADVWLRVVESKFPLLHGACSEVTKVRFATQQLRGPARTWWDHFLAMQPEDREVEWREFKAAFRGHHIPAGIMDQKLNEFLALTQGNRTVLQYAQAFNDLCQYAGYHADTGEKKRDRFRR

SEQ ID NO: 175637 - protein, 90 aa, Zea Mays
MPKETAAVSSQGGLVYLKYTFRYRDQFDEPNDDWLTYVVATGDELLGAYTRAEDDAMTLAFGGRGKKRMNRVFDVIDFVYPDYTYPSQKQ

SEQ ID NO: 175638 - protein, 157 aa, Zea Mays
MLEKNVEELRESKERCFEKSLDCVRKLKTSFAKVGAYSSKEKFIRGDPEGIIDWIGEEAEAFEDILSDHGDICAFAGAWGVAAILEKAGCDHVKAVAQTETAFSTDDTKDPSAEATLVGGKFYSDVWVNGGREMTNKIIKKNEKETHDAQEEAKRAE

SEQ ID NO: 175639 - protein, 64 aa, Zea Mays
MKLPVIAYAKNKWLIMFLRNFGRRRPPTIASFMLLILWYLFLTWRDYIKGDLIYVHRSASVRKV

SEQ ID NO: 175640 - protein, 81 aa, Zea Mays
MASFLFFSFFSTSFHPSCPASMASFFFFSFFSTSFHPSCPADPNHDGAEPVTPLVLLALKLEHNIMCIDISCCLLHHECIH

SEQ ID NO: 175641 - protein, 62 aa, Zea Mays
MLPSSTNLGYGHALFISLGHNLFDSLLVTFLTGGVTLCKLSSLISLLVSREISYWLCLVLVL

SEQ ID NO: 175642 - protein, 78 aa, Zea Mays
MCGLISFDLGSDYSYKFPLRLLGKGEALELFSVEKQLISSQNRDLAFPAAEMQEFVHSLFYLIHVFPNLVDDLPGMQK

SEQ ID NO: 175643 - protein, 310 aa, Zea Mays
MTRSRPSRTRSMWPTPRASVAGNHVPPGRAEGSTDQRECHGAETTRAGVLRWGLSRPDDELAKHQRKPAAMLGVPAMGSQGRVPTECMKQRARGRLELSTGRDLRARRAEQGRGCAQADRGRDDQSVGEFDGGRHGAQGGQTPGRAAKGNFTPWERAERNGLREERAGRERVQGEKSSAREELATGTRRAGRGTAAMEMHCEGEKQGHAGAVDRALVRAGDGEGICKLQEELQLPGRTPGSLGHGDELGEMGKTGPPASRSTGGTTMAGAGAVGRAACRGVPWLGPGAWELELHGREMGAGKISAREMST

SEQ ID NO: 175644 - protein, 77 aa, Zea Mays
MRGAKQSLEHGRRRGLLGDNIGTPRGTTNAQSFKTTRARSNYCVMRLRNKRTRQRTRSTSQTTQGQEMNAFGEVATM

SEQ ID NO: 175645 - protein, 78 aa, Zea Mays
MAPTSGPCVSVTRSHAGTKTQLTDAAGPPPSLSPSTSPRLRGPLPSQAKTESVQPSTHLPCKLPRSLSFVDKANAPFF

SEQ ID NO: 175646 - protein, 65 aa, Zea Mays
MMVSRRAEDWERQPVEELIPREPRRERPTSSKLGPETRVHGLREMGCGHRGRPSEQFRATTTRKK

SEQ ID NO: 175647 - protein, 73 aa, Zea Mays
MDRSHHFIKDQGLLCKLQDLVERVSDLGWTAGLFVKSVGALMQLCSAEVRPKGYVFTCTVGSKTSGSDYIDLL

SEQ ID NO: 175648 - protein, 53 aa, Zea Mays
MRRVVFFYQDITVSSKSKWGTFWRTFTDNLSWRRYRWRNRLPFHFHFKFFFKV

SEQ ID NO: 175649 - protein, 52 aa, Zea Mays
MVINFPRKEMHQLFGTQLLSPNASNKVIKFLKHKERDNAPGLAWNKHYVSFC

SEQ ID NO: 175650 - protein, 108 aa, Zea Mays
MCRQAVVPKSAAPCTSRRQPLVCHFSPCLLVLLPLAARSELLPAMEIPAVQLAEDGARSCPLLQLLPAAVKSLRAAVPSSLCSHMALGSSSAMVPRPRRVRAFCLLNN

SEQ ID NO: 175651 - protein, 75 aa, Zea Mays
MNAYECNAYVLCLHTSKGMKPHRTPPRATYDAKLYRYGRTIGHDKTSDTNDSCNVYGMLHLSITFTSFRYNTNLK

SEQ ID NO: 175652 - protein, 67 aa, Zea Mays
MINKTWSHFTQAGHQERSDPAEWKKLQGVDMEVHRVDMYARKIDGWKGVLMETEVATATNSCMSQRI

SEQ ID NO: 175653 - protein, 75 aa, Zea Mays
MYAYECNAYVLCLHTSKGMKLHRTPSRATYDAKLYRYGRTIGHDKTSDANESCNVYGMLHLSINFTSFRYNTNLK

SEQ ID NO: 175654 - protein, 166 aa, Zea Mays
MRPLRSVQSQLPALLARAASGSLARCAPISLSCGSLVPCPSPSTLLARRPSPSLTAPHGCRCPSLARVGFQLGVPLPSLFFCRGACSCSTVRLGVRHGHRAVELCALSPARSLCSRPAEVSCECSSVGAPGSHPSSSSAVCPAPPRRWRRGILCAVPLLTAAARLR

SEQ ID NO: 175655 - protein, 53 aa, Zea Mays
MFHLTLALLNAGACCSSREVGSSSTSTFTLIITLLRHSHDLIRNFLSKDVVSN

SEQ ID NO: 175656 - protein, 79 aa, Zea Mays
MDLLLGTHNRSLNHTTPFASSQKSLSFPSKTSYQTLLIFSSSFCSSLISRSKVGSNSTVTPYVLFKNPRLSLSNSLANS

SEQ ID NO: 175657 - protein, 74 aa, Zea Mays
MWERVVGRWMQRQKSSGASVLFSHKTLGGHPFSLHPLAWPPPSPFFPWFATPSPHMAAAHHFFLLPRSPPPPRS

SEQ ID NO: 175658 - protein, 54 aa, Zea Mays
MFYDIYLYTLCYCICCLLGACMRCTRLCSLKPGVTLPMAISCRPHALELSPLSR

SEQ ID NO: 175659 - protein, 50 aa, Zea Mays
MVRAACSRWSRIRVVAGAASLRGPRISRHCGTPPKSMLRHGLPSLCVDRR

SEQ ID NO: 175660 - protein, 240 aa, Zea Mays
MVRIIQTTRINTNYIPLPRQVPVYPVVVEEIPVDLPRIRVENGVILEDSSEDFLPAPTPLAESLAFAAGSSASAPPAPAVQAPGPRGDHPDDSGDDNEDDEEEEDEENINEEANEEQQDHYVGLWPVTEHYTSMFEAGHFPNLLQDVLLALGTYVRPLYETRRVYEPPRDCYYITRIHVRVMDAGDRGFRTLSAHESLTPLSTDVALVSNAAKRTLWSLSHTYWQLLQNTKYMHLPLCIP

SEQ ID NO: 175661 - protein, 188 aa, Zea Mays
MGTWHQVPAMVGQQGHVLRLHSMSLVGINECGAKGGGNMQGSQSSDGHEHQAVNWLENTDQSAGDHWVDVARVVVDGDCKVHRRLVMGAGLGKCNSSKEGAGTGSHTSLVDVGGINKASRRWSERWACVWHGQRQQGHVWRSRRQRDRAWRKRGHQVRRLGKRRDVDRISIKEGIEVERWGGDSNGKL

SEQ ID NO: 175662 - protein, 79 aa, Zea Mays
MRHTFPIPSLTPLTASARQHVYLTLLCPLIWPTARTWSHVARSSRWQITSRRGLGIAAQCSDWIKHRPRKNTNSAWPSL

SEQ ID NO: 175663 - protein, 63 aa, Zea Mays
MRQPLCFLSLFFVCSLVLSFLFRFLFFLFFFLFLFFYVTEGEKQGNDVNSVCGVIKREMVAAR

SEQ ID NO: 175664 - protein, 54 aa, Zea Mays
MQVNHAMYMACFIYQYTSLPSHTIQPQIILHLPSDTIPTSNNTSFTFRYNTNLK

SEQ ID NO: 175665 - protein, 165 aa, Zea Mays
MGKNISLILSAPSTQYLCSSSSRSLLRGGRSRGRRKPWRGAAMGGEDSQPKGKEERGGQVWEGGKGWRPSRGKRGKRPPLGFSLREKRSDATDDSDLASNGPQPFSYIHAPKINLWQHFFGILHSTRGQLQSIGEKGRGRLGLGRRGGGLPSTGSRSMAQTRSFL

SEQ ID NO: 175666 - protein, 58 aa, Zea Mays
MGKNISLILSSPSTQCPPPLLDPCCAGGDLEGGGSRGEGLPWEERTASPREKKRGAAK

SEQ ID NO: 175667 - protein, 60 aa, Zea Mays
MLPIRGRGRFGRESATGARDLLVGESERGSRAPVLAAYRGASASTLIVRRSVVVVPCSGR

SEQ ID NO: 175668 - protein, 71 aa, Zea Mays
MCDLSDVCQGKAKVENLAAFSSDNRLCILYHPGLQFTMCRFCFPLSPRLFFFPQSRCIPYADAYMHVRTRA

SEQ ID NO: 175669 - protein, 64 aa, Zea Mays
MSCTLHHPYCILKLCRDLMVRLYRYIFSIVRCPRRGTMRLHILRGMKAEVILAFADICTHEVYI

SEQ ID NO: 175670 - protein, 91 aa, Zea Mays
MGVSRRGDTRERKSCRARSMPAHPHHVSAMDRCPRNSHGGSPTIVECIQASPRTRWSPELDKSLAGARKPLSGRSIASPALLGQQSPVRKP

SEQ ID NO: 175671 - protein, 86 aa, Zea Mays
MDLGIRFSKRVRAGEDTKGKQLDRMTKVMQRRLSIAVEEGKKRPHEPVQAAKFASEAGIIIRETMPILTRWKDYKDDQKYYNSFVS

SEQ ID NO: 175672 - protein, 134 aa, Zea Mays
MIFQSHMEALRAEPVAEGEMPASSVHLVSKVLSQSSSHHFLKSVGIKTSASSKSSSSNQSELPEQLAAEATVAVQGELDQLKKKCEEAKEQQARTQREFEEYKKITEKNNKEMEETNVLIKKLLPLHGNASSST

SEQ ID NO: 175673 - protein, 342 aa, Zea Mays
MAPAALILYPSLVSILHCRRFPSSDGVHLPIPPWLRRACSVLPARAAASSSDPGAVESRPPLLGDDMFGRRLAAILRDNGEREFMFYHNPASCRSVLQQHPAGCRVVRRACLDISCRVPSLRAAVLPLAGHGSVLRSPRSSPLNRWSRSTRQSHLGRLLILYSPWYNTAVRSDLQTVMAFIVLWSQPDPSMHSLFVHRASRVLAFVVELLNPSSLAHDFIIARALTRFVSSSARSRHDLVVVLCVIKQSQESGEDEASSMIFTKCSTTARTSCRASFSSTPSREDTLVLATRHQLNKRNPKDNWSRIEIVYIARQTCVINDVNRKSTSCFRLSHRISQGKQI

SEQ ID NO: 175674 - protein, 112 aa, Zea Mays
MQCVSPLPSYLLEYKTTPSTNTTSMNAYECNAYVLCLHTSKGMKPHRTPSRATYDAKLYRYGRTIGHDKTSDASESCNVYVMLHLSIYFTSFTYNTTSNNTSFTFRYNTNLK

SEQ ID NO: 175675 - protein, 127 aa, Zea Mays
MTSNYKCTFDLEGDESTSVTQKQMPSQREQYGGTVHLFIGTGHSPYKITFMPFTFGSNSIVIHRGLNSLFIFKSVSFSATTPKLSRSHLRRCINLRIILGFSYCDIDSSPKIPVHTLYSRNTVKSCF

SEQ ID NO: 175676 - protein, 59 aa, Zea Mays
MCCCKRKNIKKYLKKENRKKTTTRAKIRQKRKREKERAHKQKRQYSVHLCDYFAPSLFP

SEQ ID NO: 175677 - protein, 108 aa, Zea Mays
MARRASPWTNAEQERDPGWEMGRDGARPNGCQQGELLGCSITASACSISNTAAAAGTRRSASEQRGATGAARAGAGTRHGRDADLGPGAHRELRPGRGWGAQGEKAER

SEQ ID NO: 175678 - protein, 59 aa, Zea Mays
MLRLVFIETDFYFVRERVAKLFLEVRIISTKDQVVDDFTKTLTMQKLASFRDNLNLCKL

SEQ ID NO: 175679 - protein, 63 aa, Zea Mays
MSRALVRSRLLLTIASGHQCMSPSVSPCPFHVMVGLYRPSTPRSSSQPHCNVVVLPVLRERLW

SEQ ID NO: 175680 - protein, 200 aa, Zea Mays
MKSPYPHFNRTILILRARPFVLWIQSQLHDAYHTAHCHSPSPGTGSRRAGHRTAAGSLELAKSGPPERHTPNSHDPREIDDPPSLIHPSIAATIHRRTRSTVCRSSNTRYPESTHEPWLIGFYATDKLRKLTGFLIPNCAAEVLRPRWMSGGRDSVASTRNSRAPQPNSCEQRPWFASWRTEDAPRFTSEVPAMSIRLHP

SEQ ID NO: 175681 - protein, 62 aa, Zea Mays
MRSLFLPVIIGFWRLWIMGIKGLQVGFDVGLGFDLEFSFLQNGRFDSFCSCQFSVVLVASKK

SEQ ID NO: 175682 - protein, 52 aa, Zea Mays
MVPFVAARISVAWCKSSTVFGGGRKGGRKGGEPKVVDFRIVLRDLPELPVKA

SEQ ID NO: 175683 - protein, 65 aa, Zea Mays
MVPFVAARISIAWCKSSTVFGGGRKGGRKGGEPKVVDFRIVLRDLPELPVKASKYSGGCYRLVCI

SEQ ID NO: 175684 - protein, 77 aa, Zea Mays
MAAPASLLPAPRPAASLSPSARLPCIARSLLQARRQSSPAAPRALLPELAQIRQFLLCSSPSPSSTSNCFPMAFSVS

SEQ ID NO: 175685 - protein, 89 aa, Zea Mays
MYPASCNFVNCFLSSFNSSTTILYGRLEIGAVPGKRSITNSTSLSSGIPGNSSGKTSGKSLTTRMLSPTNSSGIKNIARMDEVVTAILT

SEQ ID NO: 175686 - protein, 129 aa, Zea Mays
MTHKLSVLITRWNWWWWWRQWYLLLLLLLLLFLHLLLQLLLLRPPFLTYLFSFLAQLSTYILPLLAHLLAFLLHLSTHICHSVRHLLHHPHLSCNQWVNSCWWRRWWRIHLYWLWLGLSKYPPSVSIGR

SEQ ID NO: 175687 - protein, 273 aa, Zea Mays
MTAYLPIVLGQDALQWLRHLPRHCINDWSDFSRCFTANFQSLSDKPAQPWDLKSIKRRGDETLQSYLKRFQTMRNHIPVVAEAAVIEDFYRGSNDSAFIRTILQKAPTTSEQLFQEADLYITADERAQDLIGGAKPAPAAPRRDTNQQPDKRWEKRPREEVDAAGPPASCARGGPRGGERTLDDILDAQCPYHKDMRHTLRNCRDFKHSVGHGRPFQPLPPPPPRGGPGEPRRPQQQEDGGGGAFPRVDREVNVIFGGHGSQENKRQQKVNDR

SEQ ID NO: 175688 - protein, 76 aa, Zea Mays
MPFGLKHAGVTYQRAIQTCLADHWGKRVEAYVDDVVIKIENSENFIEDLQLVFNSLRRYRWKLMWRNCPNYSNLSA

SEQ ID NO: 175689 - protein, 381 aa, Zea Mays
MPKLKGEKKEGELVRLPYYFKFKKYFKTPCQEWLDTIEVMCNEILGNYSKKEDQLMTAAFGTRPKRRLNRVLDALGFEYPDYENLNKGVGGQKRKRITEALNEDEKEPSKKKIPKKRKTSSPKQKVSDEEETPTSHSATDVEENLKVMTESLPVKLSPFGPQLTKFFQKEKEPEKTKKTTKAKRQRIIGVTEVIDKTPPRASAQKIPAAEGMTNIEITPSEVAAAEATSIEDLNLESTIEHIDKMLLDMAAEEATTTAEEAVVAASGKEKEIAAEASEDEAFIFQNLVGEKLSKTEIEELKEYAKSCGYKPGALLFGGIDDEKLDCIRNQTGAKVIGTLSKSIGFPKLETDISRYRRQHIVGSLFYSNFKVNYFSPDFYCF

SEQ ID NO: 175690 - protein, 96 aa, Zea Mays
MMLGLRKKNSKHSTSVDGVLFTAQKQQTPDERRWRAVHCAAKSSEPRGDVGAAAHFVERLASINGAGAAAHTHRKETESQGMEGMLRGICCSAPWE

SEQ ID NO: 175691 - protein, 165 aa, Zea Mays
MGDFSGRPWEVELLLLPWKKVGRRGKWSRLEEMAPWRELLFGGMELGGHGVSAPAHAQETERRGCCSATPLSRGGRAPWGLALLPAGCLLPWEPGRKKGACCRDAERRSRGPAMGERPAPWEEGRKLPALGKKGAMAAAALRKEEEGQWRLGKIEGWECKNASTC

SEQ ID NO: 175692 - protein, 92 aa, Zea Mays
MKTATEPKTLTPKKRKPAAESLEKTKTQDVLKPTASPSYSAAELSEILKVMTESFPFTPLRPLGLELTSLLQKRRYLWLQKEETGTKRNDAL

SEQ ID NO: 175693 - protein, 55 aa, Zea Mays
MGQFHSIRPNFEPTPRFARPNYVLALAGPSHTPARWRAGPSRQPLTAPATRPNYH

SEQ ID NO: 175694 - protein, 93 aa, Zea Mays
MARASRISPRASPASSASSPSWLILKILRRSPISTSTSLVAGISRSSFQCKPCSISPPFRSRTLAGDCWRKKMRLTQYQITTIEWSLLEAISS

SEQ ID NO: 175695 - protein, 93 aa, Zea Mays
MRSTGSRNCLPVCVCPPVLEAVMVTFRVSPPSGVFSATTFLQETLQSPSAFLALSLIVSLPLPLSAVFGRTRTFLPSKSIMFIGKGSVSTCIS

SEQ ID NO: 175696 - protein, 80 aa, Zea Mays
MRKPYKRGHGALISTTNYKPNVGVHTPRCSAARGCTLPRITQSSAIPRPTRSSTPPAPHARARAAPGDLPPPPPLPRPWR

SEQ ID NO: 175697 - protein, 55 aa, Zea Mays
MQCICPLLSYLLEYKTTPSANITSMNEYECNAYVLCLHTSTGMKPHRTPPRATYD

SEQ ID NO: 175698 - protein, 84 aa, Zea Mays
MIMKITLGSSFPLSFLPSSSVQTPMEDSHPHDGHQARRLHLGEEEVGGARVEGWRCNHLGKKKKDWGGCKSRRERGGAAKGVGE

SEQ ID NO: 175699 - protein, 50 aa, Zea Mays
MWLIPILDEVEVFFESRYMKCCRHDMHITSSILHFEVMSRSYGLTVPVHF

SEQ ID NO: 175700 - protein, 88 aa, Zea Mays
MNAYECNAYVLCLHTSKGMKPHRTPPRATYDAKLYRYGRTIGHDPTSDASESCNVYGMLHLSIYFTSFTYNTTSNNTSFTFRYNTNLK

SEQ ID NO: 175701 - protein, 58 aa, Zea Mays
MSISMISIKLKGKCRIHQRQGFHSTLSISFILCPPHKLSFIFNRGELKGISSFFVFGD

SEQ ID NO: 175702 - protein, 52 aa, Zea Mays
MFHLTLALLNAGACCSSRGVGSSSTYTFTLIITLPRRSHDLIRNFLSKDVCF

SEQ ID NO: 175703 - protein, 226 aa, Zea Mays
MTGEKKMFSSYEKNQDPQRAITFGDGNQGLVKGLGKIAISPDHSISNVFLVDSLDYNLLSVSQLCQMGYNCLFTDVGVTVFRRSDDSVAFKGVLEGQLYLVDFDRAELDTCLIAKTNMGWLWHRRLAHVGMKNLHKLLKGEHILGLTNVHFEKDRICSACQAGKQGCVHHPHKNIMTTNRPLELLHMDLFGPIAYISIGRSKYFLVIVDDYSRFTWVFFLQEKSHT

SEQ ID NO: 175704 - protein, 115 aa, Zea Mays
MPQDNEGYILHPAGYPESKIRRIHSRKSHSGPNHAFMYKGETSSSRQSTRAKLPKKKTPSASNDHDISFKTFDASYVLTNKSGKVVVKYVGGKHKGSKTCVWVPKVLVSNAKGPK

SEQ ID NO: 175705 - protein, 54 aa, Zea Mays
MAQNEFDLRIKKIRSDNGTEFKNSQIEGFLEEEGIKHEFSSPYTPQQNGVVKRK

SEQ ID NO: 175706 - protein, 71 aa, Zea Mays
MRCTMTRVEGCIWNVGTAWQWDLRRGMPGWVQAGVREEDGPREMDLAQVWTGELLFFFYFLFLSSFFFFNF

SEQ ID NO: 175707 - protein, 61 aa, Zea Mays
MPPGAPVAPVHVTCRIQPSDYYVRIVGLVTLPFRKLINQVVVLPHCRADDTLTHAGQLRSG

SEQ ID NO: 175708 - protein, 62 aa, Zea Mays
MFFLLRCLACKWNSLEFASPSLSHDILDCSLAMVLLKEESSRVCFFNLFFSHSSFMERILSS

SEQ ID NO: 175709 - protein, 103 aa, Zea Mays
MAILLAVAQWRSYLQLVEFYIYTDHQSLTQLNEQRLHTMWQQKVYSKLASLQYRIIYKKGSENTADALSRYPHTQGQLFHVSHCTPIWIQEVVQGYEQDDLAQ

SEQ ID NO: 175710 - protein, 67 aa, Zea Mays
MMLMSFRFQFKFFRVVWCSVGGSFVAQVLVLWSGLDASLATWEDQDALKNRFPNAPTWGQAIFEGEG

SEQ ID NO: 175711 - protein, 88 aa, Zea Mays
MNAYECNAYVLCLHTAKGMKPHRTPPRATYDAKLYRYDRTIGHDPTSDASESCNVYGMMHLSIYFTSFTYNTTSNNTSFTFRYNTNLK

SEQ ID NO: 175712 - protein, 71 aa, Zea Mays
MERVGGGCQWGGEQGREGAAAIHWGEGEGAARVGEERGGAPIHRIEINGPNSLFPLSSRPQRKNAKRSTVF

SEQ ID NO: 175713 - protein, 122 aa, Zea Mays
MAGSAAARAHGEVISSMANRELRAPNRELARAVKNDELEKLHAISARRENTKAAAAARWTGARLELGDGLGQGEATSAQGRRAGARHQAEALRRDSRELSDGTGTSGAWDARGSSHRGETGG

SEQ ID NO: 175714 - protein, 85 aa, Zea Mays
MSAGIQAGRTSWSCDGDLEQGAQGGGRRPWEGEVTAPGLGRAPGSRHGRGEREPASSVERAQGEAERGNWSSRRAGWTRAMEERR

SEQ ID NO: 175715 - protein, 63 aa, Zea Mays
MVFAGPSSCLVGAKGAEQASIWTVSLVCPAGPTDAVFVRAARGRCRRAKGGVFAFAPTPLKWH

SEQ ID NO: 175716 - protein, 52 aa, Zea Mays
MGRDIHPKTSHQSSKSNHWTYKLWDFNIYATCSEYDSKVECWLTTPSSMARA

SEQ ID NO: 175717 - protein, 120 aa, Zea Mays
MDGALVRAPDPFPPCSDSARPTQLPWCLARRRLDCGFLLQLRSAKSPAAPCFSPSISQQRPVEVLPAHVFFPVVPSAPSSPATRCEAPGVSLVFPAAPAPCPTLVRWPGRVRAVHFGAVR

SEQ ID NO: 175718 - protein, 101 aa, Zea Mays
MSVMFSATAQISVLNSWMPRLRGNRRVSSSTSVAPGAEPLASGVTHLLIVAPCASAHTRHQLRHVAVPPCVSVVGRLPALSLLVDSSTVFPRELAPMLGLC

SEQ ID NO: 175719 - protein, 69 aa, Zea Mays
MNDRTNERSEFRQHNGRKKIIWTNERTTDRTIGRTNHERSDERSNDRTNERTTKNRGTNDRRTTERSLC

SEQ ID NO: 175720 - protein, 63 aa, Zea Mays
MISTVGLPVLTALEACWDDVQSRGCSAAFRHVSRSVESKSERGGVGMQPGASNGVVKGSVGDG

SEQ ID NO: 175721 - protein, 69 aa, Zea Mays
MTSCIKGVFSWMYKEGWKGAATISIVFGRESRGGEVNTRVIFCGGMIPKNRGDDVVPVSSYFDLKPNTS

SEQ ID NO: 175722 - protein, 182 aa, Zea Mays
MLRECLVSSSMRLGVPFIAPRQLGAVESIPGRQFLPSVDWRTGQSGAPSDTVRCGFLSCFGAADRWRFGAIGAPDTVRCTPDSPVPPFRPLARPRVMRRLRGRPLARPTVGSPDSPVHTGLSGEFLPYATDEFLRAAFSPRPAWRTGHFSVHHRTVRCSQTELSLAEQSHLFSKLISPVSST

SEQ ID NO: 175723 - protein, 75 aa, Zea Mays
MNAYECNAYVLCLHTSKGMKPHRTPPRATYDAKLYRYGRTIGHDKTSDANESCNVYGMLHLSITFTSFKYNTNLK

SEQ ID NO: 175724 - protein, 89 aa, Zea Mays
MCSRPPLLFPLGRRPLPISSSLNSCSHQTLAAPPSQSPPPKVPILDARIIVVVVRVFNRFGGGKKGGRKGGESKVIFVFIPCSFALQFN

SEQ ID NO: 175725 - protein, 219 aa, Zea Mays
MLRSFTVLDPHLVNSIRENPRYTKMTPEEILGKFVSGRMMIKEARYVDEELNAPMPIHEPQTVALKATSSREGLPSKVVQVEAAGLNEIEMALIIKRFKTTLKGRKEHPNKSKTKGKRSCFKCGKIGHFIANCPDNDGDQEQGKNGKRENKKVYKKAKGEAHLGKEWDSNCSSSDSDDEGLAAMAFNKSSLFPNEHHTYPMAKEKKGKHSKYYCICFFK

SEQ ID NO: 175726 - protein, 122 aa, Zea Mays
MTSNSQKNHAFMYHDRKYSRNAHYNRSYNAFDSHAMIASSSKFNGRPRRTFVSHAPRKVCNGSTTVFHACNAKFVLSCKNEKVIAKKVGAKCKGDKTCIWVPKAIVTNLVGPNKSWVPKTQA

SEQ ID NO: 175727 - protein, 99 aa, Zea Mays
MQCVGTLSSYLWGYKTTSSANITSMNAYECNAYVLCLHTSKGMKPHRTPSRATYDAKLYRYGRTIGHDKTSYANESCNVYGMLHLSINFTSFRYNTNLK

SEQ ID NO: 175728 - protein, 145 aa, Zea Mays
MRKVVYYETDSSSASTSSSDAASVTSKRQERKKYSKIPLRYPRIPKHTPLLSVPLGKPPTFDGEDYARWSDLMRFHLTSLHKSIWDVVEFGAQVPSVGDENYDEDEVAQIEHFNSQATTILLASLSREEYNKVQGLKNAKEIWDL

SEQ ID NO: 175729 - protein, 62 aa, Zea Mays
MVTPEVLQPSPLKGISSRDFRQSPLEDATRARWCATLSYAPVSLVNCSSNVILFAISEGSPF

SEQ ID NO: 175730 - protein, 58 aa, Zea Mays
MICGIQTVLSFVSLSISLTLSILQHVISTFALHRAVLPGHPSSGFSITVCTGARTLRR

SEQ ID NO: 175731 - protein, 196 aa, Zea Mays
MSYQVAVASSGGDDTTMAKSFIIALECPALIWYSRLPPLSIDSWRSLRDKFLLNFQGYRPDTDALAELSLCRQLEKETLREYYRKFLTLKSQLPSVDDQIAIHYAISGLRAGVLYSHCIRDPPKNLQELYQLFEKYARSEELHQRKLESQRKPKDTPQSSRTWTRPSQLDSCRDGRNQQQVHNIANQHPAGEAPRR

SEQ ID NO: 175732 - protein, 96 aa, Zea Mays
MVGSASNSSCSHLRQRRPDSWSGTSKSAVRAPSSWYESISCLRVRSTSERVEASALSMRACRALNRPSHSSARWLARLPSTRAKLASACADCALAR

SEQ ID NO: 175733 - protein, 112 aa, Zea Mays
MNTRPRKFGLDMEVRWNSTYLMLKHLLPYRNTFDVFIQTHYPRAIGEPLLLSDDHWYVAEKILVFLEPFYDSTCVLSGVYYPTSSLMMHHIIQIAKHLNSYEHDRLLGTVVF

SEQ ID NO: 175734 - protein, 59 aa, Zea Mays
MLGMLLATVVTYASSPRPPASRRLRAQVPRNQAHRAAGPSLHGLLQVGLNLGLPVHEDP

SEQ ID NO: 175735 - protein, 52 aa, Zea Mays
MCAKHQKKFRESRIFSSCVSLLNVCSSSGLVKISANCSLVLIYAISISPFCW

SEQ ID NO: 175736 - protein, 59 aa, Zea Mays
MFLKYNICTGTFGLGMKLYTIWRAGSKRRLNQRRSCAQGSFGSITEKGTDLRRKRLFSP

SEQ ID NO: 175737 - protein, 86 aa, Zea Mays
MRAAQKEIWKCRWCSSGPGPLFLPSDLLFFFFLPPLLQETLDQNECPLDAGGFGKAESHLVPPWRGSEVGSGRARAGRGTKKGPCM

SEQ ID NO: 175738 - protein, 67 aa, Zea Mays
MSLKDFGYHSPLVRPRARAELPRESHMTRPRLACCRRRKSPRATTPALFLQLRRPSTSSLSPCSRRR

SEQ ID NO: 175739 - protein, 79 aa, Zea Mays
MMSAISSLLSFEASIGCLHDVDSFFSSVALNATGCASGVEGPSSSLIFFEPLTINSKLTKFPITSSGVISVYLGLPRIN

SEQ ID NO: 175740 - protein, 61 aa, Zea Mays
MFPVFSLQSTAQPHTTINISASDRIHKICQLVLNKSTCHTTKLNSWHVLIQETQARSIIRD

SEQ ID NO: 175741 - protein, 55 aa, Zea Mays
MVTCNRLSFTWIMWKMTDIIKCWRWRCRWYWIHNFFIYPLFLLFLRCRRLSNIRR

SEQ ID NO: 175742 - protein, 52 aa, Zea Mays
MGLLLSTLMYIHPCFHKTPGCLWCNLCSGKEEEEESIEEDLQEFQYFDEFED

SEQ ID NO: 175743 - protein, 54 aa, Zea Mays
MAAAHHFFLLPRSPPPLRSKDREEEEQDGLKRKRGSRRCSTPPIYCRFSWGNPR

SEQ ID NO: 175744 - protein, 73 aa, Zea Mays
MAAILHCFLPQDLPLRSKDREEEEHVELKSKRGSRRCSSPSLLAYFLGETLGMDGILVPPCNYVLLEVLDHGD

SEQ ID NO: 175745 - protein, 75 aa, Zea Mays
MSNLKICNYSRLDTNSLTYRGTPVLIAPFLAHFLFSTLRLHKIAQDTISLKRRKLCVLPLHLCIKYLNNFALCTF

SEQ ID NO: 175746 - protein, 154 aa, Zea Mays
MFIHCCPLIYAILQGGCCRNFIYRCQKCCLVAFRGVGGPRGVTFKLFQMDVKSAFLNGPIKEEVYVEQPMALRMTGIPTTSTNSLRRSMDLSKPQEHGMNALEIFSFLMLSRLGKLILLSLLRLAMVIFLYAKYMSMTLYLVLLNKSLVRSLAG

SEQ ID NO: 175747 - protein, 77 aa, Zea Mays
MPNHGSGTWIASFPALLSKHNFIGIFYSFKSLLIVCSHAKFDRPLPLFTLLSRLMMPLCSGASRGLRWTCPNHLNRG

SEQ ID NO: 175748 - protein, 554 aa, Zea Mays
MEEVENSWSQPLEVCCPLQLQRFHDKLKRLARHLQAWSQKKMGNIKQQILMANEILHRLEITRDVRNLSASEEWLRRSLKHHSLALASLERTVARVRCGLHWLKGDANTAYFHHHARHRKKKNFIGKLMVDNRVISEQQEKKEVIWDFYNKLLGTAAPRESTLNLEEFHRPALDLSALDQNFSMEEVWAAIKTLPADKAPGPDGYTGKFYKISWPIIKEDVMEALNRVLQGDVSKLHLLNSAYVTLLPKKAEALEVKDFRPISLIHSFAKIVTKILANRLASRLPEIMSANQSAFIKGRCIHDNFILVQQTAKAVQKQRVPRILLKLDIGKAFDSVSWPFLLEVLTHLGFGSVWCNIISKMLLSSSTRVLVNGEPGEIIHHHRGLRQGDPLSPMLFIIVMDVLNSLVLRAQELSLLQPVLRRGNGQRISLYVDDVVMFLQPSREELSVVKEILRIFGDASGLVTNVSKCSMTPIHCEEQDMVAAQEFFPCTEVAFPFKYLGLPLSVKKLPKNIFLELIDKIADKLTGWKSALIHTAGRLTLVKSVLTAIPIHHL

SEQ ID NO: 175749 - protein, 105 aa, Zea Mays
MRLKNCYSKTAITFWSDVRLRCSSRPRKDLQIIYDSYIDFSFFEATKTMENWHEQKLSNLSFCRKLNSGSKPNPTSNPTSNPSIPMIHNLQKPIITGRNKDLIHT

SEQ ID NO: 175750 - protein, 88 aa, Zea Mays
MDAPKFLHRRRRKAAPLPLSDATMQKGIHPLIFCSSPQTQPAYPTIQLQSNFPVFSLLCLRPHLLDVFLSLGGIHGTFPFFIEPVDWS

SEQ ID NO: 175751 - protein, 103 aa, Zea Mays
MRALDVSLANGTCLVSDCPSTPLVRAIIPLSIFFVAMADARIRVRDSRRELLGANWRGFVPQPVFGLQIPWAPHPPFLCCAAPKPSPPSNGREKCAPRALGIP

SEQ ID NO: 175752 - protein, 62 aa, Zea Mays
MMAPACSMTTVALSPLRKQGDVSKDLIAPTAILLQGLSAPPMATTSREQGCNTSPTATSACT

SEQ ID NO: 175753 - protein, 52 aa, Zea Mays
MFHLTLALLNAGACCPSRGVGSSSTYTFTLIIMLLRRSHDLIRNFLSKDVCF

SEQ ID NO: 175754 - protein, 52 aa, Zea Mays
MFHLTLALLNAGACCPSRGVVSSSTYTFTLIIMLPRRSHDLIRKFLSKDVCF

SEQ ID NO: 175755 - protein, 106 aa, Zea Mays
MEAYCDEVRRREDKFYGLELNHVARRYNETADELAKIASGRTTVPLDVFSRDLHQPSVKTDDTPEPKKASALPEAPSAQPEAPLAAEGEALRIEEERNGVPPNRNW

SEQ ID NO: 175756 - protein, 172 aa, Zea Mays
MGSVPRPPGRRLGASATTGRSRAPQAHSSLGGAIHHRQDFEARNIQAGQQSRQGLQQRLEHPTATSLLPLRCFQVVHIPRLHTQIKSNHQGRVSLASAKPDPPSGARRGEPPLRQNFPRKKSFCQNIFRALRLLRWRDPENDGVHISGKADRAEELLRLRDTDTSLITFCDK

SEQ ID NO: 175757 - protein, 82 aa, Zea Mays
MGAIQVKAPPTQGTRSRLARAHPRAGTVDPSRFTPRPRASSSKERTFDSLEAQLGQASPRSNLGQIATPTDHIAGAFNARID

SEQ ID NO: 175758 - protein, 210 aa, Zea Mays
MVSQRKISDLQAFEIETADDSGIGPKASHELACRQVGGPLNLSYTLHDHKNYLRGKRQREMAYGHAGSMLKYFQNKMVENPLFQYATQMDIEEKIANIIWADAKMVVDYTHFGDVVSFDTTFGTNRESRPFGVFVGFNQFRETVIFGAALMYDETFESFKWIFETFLKAHNGKQPKTFYTDQDFAMGKAVEQVFHEAWHGLCTFHIMQSS

SEQ ID NO: 175759 - protein, 95 aa, Zea Mays
MIFVEIIFSCIKNHIPMHHANFSSMKNQIVRLCIRLLVCGCECYYGPTSPSGPSYMGSLRHQLLSPDEGDGTSLSCLGTAQWQLEPTKQCHRVGT

SEQ ID NO: 175760 - protein, 50 aa, Zea Mays
MLHRIIHNMFAQVFSHRSGGVSQEAPKSANNHRNHINLAVVVARARSPAS

SEQ ID NO: 175761 - protein, 144 aa, Zea Mays
MPRYYAPVHSPLPLVDRPCHVLTLQPSAVEFAECRRPTARLLRSPSLADAAPTSPRLASLDLRTQSLFVIVFWSQSDRSVRSLFVHRVSCVLAFTVESSNPSSSAQTPPHQLASNTISSSNFASALARRSRSPDVRSEILFGDC

SEQ ID NO: 175762 - protein, 144 aa, Zea Mays
MPRYYAPVHSPLPLVDRPCHVLTLQPSAVEFAECRRPTARLLRSPSLADAAPTSPCLASLDLRTQSLFVIVFWSQSDQSVRSLFVHRVSYVLAFTVESSNPSSSAQTPHHRLVSNTISSSSFASALARRSRSPDIRSEILFGDC

SEQ ID NO: 175763 - protein, 119 aa, Zea Mays
MDEYIRADNDFRQRREEAFRFSEMTRGFGGRFHPRHVRSIHNSTQNDDRGSQQQRPQYSSQASGSSKALFGRQRQGAEVPGASGEDLEISQERFTAYSVVKTRATLPGCVTLPSRSKRR

SEQ ID NO: 175764 - protein, 80 aa, Zea Mays
MDSIVRFRLAQEYSRMLFAQFGLARKAASCAAQRIDLSGAMDHWSAVGRRVVCRNCHIRGCFFATTTTISSRLRVSEASI

SEQ ID NO: 175765 - protein, 56 aa, Zea Mays
MPCTCWLFCSSESSVHLFLYFALLSVRLYERQGWVILTIHVHNFLLNNLCLFILVL

SEQ ID NO: 175766 - protein, 95 aa, Zea Mays
MLRACALQDQSGWDKRLPYAEFSYNNSYQASLKMSPFQALYGRSCRTPLQWDQPGEKQVFGPDILLEAEENIKMVRENLKIAQSRQRSYVDTRRR

SEQ ID NO: 175767 - protein, 68 aa, Zea Mays
MGRKHLIGPSPFSPSSAHRPTSHLHRSHHSTETWGQPVCRTGVISTRDLASQSLPFPHSPTGTWTSSF

SEQ ID NO: 175768 - protein, 57 aa, Zea Mays
MSGGPRNKSASKLEKVEVASTSSFGADVDPRAKDLAMRIAERMLLKMKEDEAKNKIE

SEQ ID NO: 175769 - protein, 77 aa, Zea Mays
MVTSQESWLKYCISYIFVYLLIMSNSFNWYNFTFSYFICTKVQIVELNPLASQVQVHKLNKYSSLVYTHLGGEWSII

SEQ ID NO: 175770 - protein, 259 aa, Zea Mays
MKMGKGSEDPKGYLDSQGNEDEEFNDSEDDLLDSQELDEFIKDDDFIPSPAQDKKKLHMSIVEDASKIAGGKKSGPMEMETSEGVRRSSRLESSEEVKIADKAAARAMAKDAFINKGMSYNPFSVLNTDNDVLFDVANRLGVELGSSFDDAVENLNLIKSLELSRKNLVVQSVKINVDNSNADCMVSDDDNIIHKDNLEDNFSELKDVMILRKGRKIQHRKKTVRKKNNSSLTGKSPNNRKNPIKRKGQLVGQPPICSE

SEQ ID NO: 175771 - protein, 101 aa, Zea Mays
MAQCNMEQLSDDDRSFLTAPFSVEEIKKVIFELKHNSAPGPDGFPAEFFQTFWEIIHLDIIQLFNDFYNDSLKIERLNFGVVTLLPKVDKAADMKNFRPIC

SEQ ID NO: 175772 - protein, 54 aa, Zea Mays
MDPTSKAISSNLPIHILIFKLHSMNSALYSAKLCRTVFWVTIWVNCWTRSKRLG

SEQ ID NO: 175773 - protein, 139 aa, Zea Mays
MFIRYPSARSCCLVLVVLVVGVPQHDSSAAPPAPLPRQLVEHHAMAVGAEVPRRDALRGLGHDIRVQRMLIWFGTWKEHHGHGVYGSLRRRDAVVGSQSVGYDLSDLHAQSHSHASGWRTRTRCSMICFTDCLETCFRC

SEQ ID NO: 175774 - protein, 69 aa, Zea Mays
MRAGSLFHVPFFFFFSAVVHANKVLSRQKTRHHVVVHVGRIAHIVYLCMCLERPGREIPACTDRQRQHC

SEQ ID NO: 175775 - protein, 69 aa, Zea Mays
MAGCASRQPATEMRSASHSTGSQLLRLSPSFINCTTAAGWAVGAAPVAASSLAAPTRPSSSRSSPCVTL

SEQ ID NO: 175776 - protein, 57 aa, Zea Mays
MHGVADPSLENEGGQHPWSLHACICLRSHSAGRIVPNRALQSYLSHHRYLSYHIFYF

SEQ ID NO: 175777 - protein, 85 aa, Zea Mays
MIMSLGGVGKQFWFPLRRSGQHCPLVHTFLFPFSLCLLAFNMMPAPAVFLLGNIVFIILDLCSWSLIHWVILKFLGLTNGFITEF

SEQ ID NO: 175778 - protein, 70 aa, Zea Mays
MKKRNCQHIHKRQSNKDSREKYQVLVQRFFLDRTKRFFDEWKYRCTFGPGLVGRPEARKKSTAQARHDPK

SEQ ID NO: 175779 - protein, 53 aa, Zea Mays
MNVCELTLAVSPPHTGQEQVPQDEVHEGCCDVFVRGLGRRLPVNCGLLDRFLI

SEQ ID NO: 175780 - protein, 53 aa, Zea Mays
MEQSKKGFLLKDYGEATLAHNKIFDPIKPRTTAAIGHGITTRRVEQQKTSRCR

SEQ ID NO: 175781 - protein, 85 aa, Zea Mays
MYCPTVEYIRPRGHPFRKNRTHHLAVHPSFLRIRESPCNSPYTTFSPGRRVLRTSKRPEPVNHCPLSLVQLARTIELQLTTPSYS

SEQ ID NO: 175782 - protein, 222 aa, Zea Mays
MSFGLKNAGATYQRAIQTCLADHWGKRVEAYVDDVVIKTENSENFIEDLQLVFNSLRRYRWKLNPEKCVFGVPAGKLLGFIVSHRGIEANPEKIEAIMRMEAPRSQKKVQRLTGCMAALSRFISRLGEKGLLFYKLLKKVDKFQWTSEAQEALEALKKFLTTPPVLKPPRRATPTQLAEDLLLYISCTTHMVSSALVVERAEEGHAYPVQHPVYFISEVLGP

SEQ ID NO: 175783 - protein, 249 aa, Zea Mays
MYFDGSLKLQGAGAGILFTAPGGEHLKYALQLLFLASNNAAEYEALIHGLNIAISLGIKRLMVYEDSMVVISQINKEWDCSNDSMGKYCTAVRKLEDKFEGMEFHHVERDRNTAADMLSKLGSSRTQVPPGVFVQEISHPSISPGQAEECNTLSQPESDSDDWRRPIIRYIKNEEEPDDKNAAERIARQSAHYTLIGETLYRRGASGVLMKCILSATGKQLLDEVHARQCGVHAASRTLVGKVFRSGFY

SEQ ID NO: 175784 - protein, 168 aa, Zea Mays
MEKVRLRNNRHMVTCERQLTVGIDGGNDSSGRTRSFPLRRHLNLAGEQSGSRIANRQRGSGSRKARTRARYVETRNSAVHIGFSRARCHFQKVPSHHPAVISKNAGVPRHHSAAISKKAGVPCHHSAVDSKTANTAQIDSAVVSKNADFTRLLLLKRRRRRQSLGRCL

SEQ ID NO: 175785 - protein, 60 aa, Zea Mays
MSANVVGLNTPLIQVAPDEVVFDQNVLVVLTEDEILHQCLGKLILHPELYCFSACQGDHH

SEQ ID NO: 175786 - protein, 64 aa, Zea Mays
MPNLHTCSGLDSHSEQKHWHSKCHYKRNSGSVPTDMNSLHSGEPAGRRAPGDPPATSAAAAMVP

SEQ ID NO: 175787 - protein, 51 aa, Zea Mays
MITMEFQEYLMKFHSSIFHTFAFVITNSGLLLLTHLIAQKGHDMDLKFTQY

SEQ ID NO: 175788 - protein, 71 aa, Zea Mays
MRVVQVADFANRTASGALTAAVSTEVERLRTQHADAVREKSAADSKCRKLADKVTALEGEKADLRRQLARE

SEQ ID NO: 175789 - protein, 78 aa, Zea Mays
MGAARPVPHVVGKSEGQANATPPTVFDRIRGRGVVASGSGFCRLACAVLVRCVLAWDVDLSVCFSQPNRRCRNVILPR

SEQ ID NO: 175790 - protein, 111 aa, Zea Mays
MSETTMPSGGGGGGHQGRRRRRAGGGWPERVEGPRAVTAGEGSPGGQILHRETRGVKFDGTRVVSGETTNRKEIMSDVGGYENVVEVERSRENRGTYRGDGQSGTVPNDDR

SEQ ID NO: 175791 - protein, 120 aa, Zea Mays
MNLNINRVDSNNLTCGSISNNNLTSMRLDIIRKSISMRTYMKNASEIENLRRALIKRGNKQSFSIIQSFNKTGFRRRLIQFFFFLSSLFLTLGALRNMMSIFSAITIIKVGFIISRSPNN

SEQ ID NO: 175792 - protein, 62 aa, Zea Mays
MVLSISIRVRFFLSTTSFCCCEQGDDDSCLIPSSSRNSSTCAFLNSVPLSLLIFLIIKLNSF

SEQ ID NO: 175793 - protein, 52 aa, Zea Mays
MFHLTLALLNAGACCSSRGVGSSSTSTFTLIIMLPRHSHDLIRNFMSKDVCF

SEQ ID NO: 175794 - protein, 86 aa, Zea Mays
MISQWLSSRSYQNPKGMIQYWWSWTDSRSTPILWLSSNLLLLPRSHRCYWIRWSSYMDCLSLLVVTVTEFLPVPSGPSCSSCWGPS

SEQ ID NO: 175795 - protein, 80 aa, Zea Mays
MGPWTNPSRFPAAEICANSDHFPARPVPKTAGPHPTRGHAIRRSETPLNKKKKKTHTHTHTNPIKRSKSLLLFQDQNLDL

SEQ ID NO: 175796 - protein, 52 aa, Zea Mays
MGQRTLAFTKLLLLRVFSCNSLRFHERPDIYASANIHPTFLNRQKTIHHTTI

SEQ ID NO: 175797 - protein, 177 aa, Zea Mays
MPLLPPPLPDKQPAESSKDLQSVDALLILPNRRILLHTYIHRPTEGRCGLFLGKLKAQRARPGDRQPHRSTTRWESATGSAGTVLAKKSCMGTSTFSAWARVRQRRLCESYVDGRTGKAIPPDEMPLRRKREIEIERVAALLAEPQPVPFGEPRALQSRNGISLHIAGLTGERLHKT

SEQ ID NO: 175798 - protein, 142 aa, Zea Mays
MQEELNNFTRNEVWHLVPRPNQNVVETKWVFCNKQDEHGVVTRNKARLVAKGYSQVEGLDFGETYAPVARLEPIRILLAYATYHGFKLYQMDVKSATMDQSRRRSMLSNLPALKIVSTLIMSINSLRRFMGSRKPQEYGMNA

SEQ ID NO: 175799 - protein, 97 aa, Zea Mays
MCFQVYFMLSHRLKGKWSLQRRQGFHSTPSYYFSFAVTPHRSSLWYNPSLINYLPKGEKVQRAYISLTSIRFLRFMPKGEKVLAQSKWTAPPPISKM

SEQ ID NO: 175800 - protein, 89 aa, Zea Mays
MGIRKKPEYVWKEYLENGMEKCSMAVYLGQSRNYLNHPSFQVTFTGYRFPDTCQNVARKALRQLCQSYNKVIFETPLRYFPPSNKNTPA

SEQ ID NO: 175801 - protein, 65 aa, Zea Mays
MKPPLILLGSISLFCSLDQISHEVMGFSMLISLVHMRCLMECPSAMSCIAAIFLFSPCEFSAQSV

SEQ ID NO: 175802 - protein, 106 aa, Zea Mays
MALVAHLRACYPCAEAQGRIYDRGCLGCSPGRGPVTGERFRAQLCLVPITQPRTTAPNLNQPPAVEDRRRSSRPPGRQPWRTGRDPGTHRGIVPPSRRPRPHARTA

SEQ ID NO: 175803 - protein, 97 aa, Zea Mays
MAHRTVRCTPDSPVPLPRHHCRWILTVGASDLWAPLDVRCTPDMYCLMSGAPAWASLTSARAARALNAPQGAVGAAGSRCSAGTPDSPVYTGQSGEF

SEQ ID NO: 175804 - protein, 153 aa, Zea Mays
MPYLVPREIVELLLHRHHPIRILKCFLYPVWLNRGNKRVMFTKMSNTRSSGYPLMNIAEDGVDGVISLYCLVDSWVWRSWFFLILLFLINCISPLIIAIILRWLIFLILPFINLSFILILSWWGCLHGGGRLILCIWRLFGFLRTHIPNGHVL

SEQ ID NO: 175805 - protein, 57 aa, Zea Mays
MEDSHPHDGHQAGRLHLGEEEGGARVEGWRCNHLGKKERDWGGCKSGRERGGAAKGV

SEQ ID NO: 175806 - protein, 85 aa, Zea Mays
MIMKITLGSSFPPSFLPSSSLQTPMEDSHPHDGHQVGRLHLGEEEVGRGARVEGWRCNHLGKKERDWGGCKSGRERGGTAKGVGE

SEQ ID NO: 175807 - protein, 85 aa, Zea Mays
MIMKITLGSSFPPSFLPSSSLQTPMEDSHPHDGHQVGRLHLGEEEVGRGARVEGWRCNHLGKKKRDWGGCKSGRERGGAAKGVGE

SEQ ID NO: 175808 - protein, 60 aa, Zea Mays
MLGSSCMVVARPRGSPDPRFYELIDFFYQKLLCLPKTGLPHLFLFLFYLPSSDQYMPAQN

SEQ ID NO: 175809 - protein, 55 aa, Zea Mays
MLRPKSLDFGRHNCREGPRRCAVGEVSHLQNTRKTTPKKNKKKQKKTESSSTDLT

SEQ ID NO: 175810 - protein, 638 aa, Zea Mays
MGHWARECPSRHKKEQAHVVQDEEEATLLVAKTFPVKISTLKPCCKMSSSHLEIREEKVFLQHEEEEKLEEGTWILDTGVTNHMSGSRAVFTDLDTRVLGTVRFGDNSVAQIEGRGTIKFMCKNGETRSFVGAYFIPRLTTNIISIGQLDEAKYKIHVDDGVMHIREPDGRLLARIVWAENRLYLLHLKIQQSVCLAVRGREDEVAWRWHERFGHVNMAALRKLEKEELVRGLPKLGQVERVCEACQAGKQKHTSFPAQAEYRAKQRLELVHGDLCGPIAPMTPRGNKYFLLLVDDLSRYMWMAAISSKDQAIDAVKRIQMQAERESGLKLKTLRTDRGGEFTSGEFAEYCMASGIHRQHTAPYSPQQNGVVERRNGTVVATARSMLKAKKLSGWFWGEAVKTAVYVLNRCPTKSVDGMTPFEAWHGKKPAVHHLKTFGCIVYVRNIVPHLKKLEDRGRKMIFIGYEEGTKAYRAYDPITKRVHISRDVIFDEQAQWDWETQEDISSENEDQDVFTMEYAIRKQTHPEGDEKTAGESEDEHSAGGLSPRTPHVDTGHVSEEEDEMQEVEFASPPEGNIDEYLDAYRAEDDPLRFRKVDGLLESKTPPGYATRRLLDEELHAVSADEPVSFGEAERSPS

SEQ ID NO: 175811 - protein, 199 aa, Zea Mays
MLILFVAEDPLGSYNILVRTWNQMPYLIHCEVVELLLHRQHPIQILKCFLYPMWLNRGNKRVMFTKMSNTRSSGYPLMNIAEDGVHGVISLDCLVDSWVWRPWIFIIFFVLIISISPLIIVLLLRWLIFLIFSFIILSLILILGWWGCLHGGRWLILFLWRLFGFLRTHIPQWTCSLARCTEPLHHQIHQDQLALLESR

SEQ ID NO: 175812 - protein, 51 aa, Zea Mays
MHRIRVKHQLNRYTTEISAYHYSPLIYQIKTILKHQNHMNIYYRINTVDTK

SEQ ID NO: 175813 - protein, 69 aa, Zea Mays
MVRERRTRTNTMSKNTRDTRFIPRFGHTTKVSYFLVEAPTKSRASFNPNPPFSDHKGQAHTLIFAHTSG

SEQ ID NO: 175814 - protein, 61 aa, Zea Mays
MLIGASPLAAQYSTPVRCGNTKTFLPDALTGRRTTQPQISPALKWRAKQPICMVPETLTVP

SEQ ID NO: 175815 - protein, 217 aa, Zea Mays
MLISQIAQMKPLDGSNYHSWREDIDMITTVGEIDYALRFDKPVEPTVGTPNYDHRWMQYSIDKVKWERSNDKCMIILKRSIKEPLKSSIPECETAKEYLERVASHHQGSSKAYACSLMTEFVNAKYDGNGVRPFIQKMISIVAKINKYLGSPLHEEFVVFMIMKSLPKEFETFHIQYNTSVTDKWNIDQLLAQCVQEEERLKQTGDSVNLIKGNIPR

SEQ ID NO: 175816 - protein, 56 aa, Zea Mays
MGLGWAARCWVSTWPASQDMDHGEDWGRAGLFLFSLSLFVFFVFFFIFCYQIYLQY

SEQ ID NO: 175817 - protein, 53 aa, Zea Mays
MGTKHPKVVKQRVFQFLLKKNVWLYNSNSIRSILEPIQIQDHTSFLIEINAKP

SEQ ID NO: 175818 - protein, 50 aa, Zea Mays
MNSTKYSCSAMLNGYSCMNNSCIKLSQNWFLHHIYMAGQCIYLCHDPFLP

SEQ ID NO: 175819 - protein, 150 aa, Zea Mays
MTCTSHHPSCILKLCRDLMVRPYRYIFSIVRCPRRGTMRLHILRGMKAEVILAFADICTHEVYMKCDITMLLLWFLPARCGDYVCCTLYTCCTVVIRKLWNQVVVKQCSYVVKQFDIILLAEMCHLTLALLNAYMLGMRGVAARPLSLSQ

SEQ ID NO: 175820 - protein, 69 aa, Zea Mays
MRLAFRLLVGLLLLPLPGSFISLVIFIIGTLDNKVTSLTALKAGTLSLCFVLVRVLLASFQCGLEALYD

SEQ ID NO: 175821 - protein, 56 aa, Zea Mays
MPKLFCAQLRDHLILRHNHLSSRSGFVLTMLLYTHDPILKIAVHIFHLENIVKSCF

SEQ ID NO: 175822 - protein, 78 aa, Zea Mays
MTDRDHVPPHLAPLAPRWPPSPTAHRGTRRAWTGSPAPPDPTGPAPARRGEAARWAPERERERAPSEEEQDNAAAGPR

SEQ ID NO: 175823 - protein, 126 aa, Zea Mays
MDAEDFPHVHPDYPIDTQGWTYPKRRFSMAEYYSRRTVNHYTLPSDTNIQFFHTQLQFDVFWGTLVDTNFHKHQVIDWSFLLSQSVMEGLIPKFETCGLYQFMEQRTDFNDMAVKQFLATSKIDIE

SEQ ID NO: 175824 - protein, 84 aa, Zea Mays
MICNMSTLVCYYWVTWELDYVRLGGPFIAPNEPLVVAPSFQRRCQILEKTALFAGASDRSGALLDRVHVPLVRDLISPFLLWNG

SEQ ID NO: 175825 - protein, 146 aa, Zea Mays
MVFQRLREHQLYAKLSKCEFWISEVLFLGHIINKEGLAVDPKKVADILNWKAPTDARGIKSFIGMAGYYRRFIEGFSKIAKPMIALLGNKVEFKWTQKCQEAFEALKEKLTTSPVLILPDVHKPFSVYCDACYTGLGCVLMQEGRV

SEQ ID NO: 175826 - protein, 56 aa, Zea Mays
MYVCARIENDPVEEPEEFAGEAPEQQSVSGGKCPLTYLCPIHYLIHLPLYTFMPKD

SEQ ID NO: 175827 - protein, 50 aa, Zea Mays
MPKGEKIRPKQEMDQLPLRIFEKVELEFLFVKILLVASYCQKLVSCGAKV

SEQ ID NO: 175828 - protein, 77 aa, Zea Mays
MRIWMDLRTDGVALLKMRLWLKMVSTAAAEQRWLASITWGCEFVRLRNRLRRTGSFWALARREEANAATTPSLVKIA

SEQ ID NO: 175829 - protein, 50 aa, Zea Mays
MIPLNHRSNLGWRCRLRFFPHHMIILCSPLITHLLLMNLFIVLSWGMHHS

SEQ ID NO: 175830 - protein, 75 aa, Zea Mays
MLANCLAPALSQQINSFRNKLLTELKEGFTPSKTTLFRVSHMHHDPKIMRLLKPFLLLLAPFSTIQQKIFHQQHG

SEQ ID NO: 175831 - protein, 59 aa, Zea Mays
MQGSVIQPIVVVRGNEMILVILGLLSSISTSISDLDCDSFKMLINSICGLNISSEQLAC

SEQ ID NO: 175832 - protein, 89 aa, Zea Mays
MKEWYYVKNDLKTREDIKDIILRPMWQHFGLRKSKVEIDEAAEGCRRAFGTICSFIGTRDLIQEHIAFRVWPLLEKSEMPKETVTKTGE

SEQ ID NO: 175833 - protein, 57 aa, Zea Mays
MVGQLISSDELPDNYPVPTRVVSVIRFLPARIITRSCPVSVPNLNYPYPVPYTRKIH

SEQ ID NO: 175834 - protein, 95 aa, Zea Mays
MLACELSTCHDSISKLKSINDDLNAKLVEAHKSNSCVEHVEICTRCKDVDINACSEHLVSISKLNDELASLNAQLKTSKSDFDKLKFARDAYTVG

SEQ ID NO: 175835 - protein, 68 aa, Zea Mays
MLCWHKSPKRGRLKGKCAFGPFLSILVIECQHMCLNVNICPWMNKVQITSKGMFLSLSTLVLCTNIFV

SEQ ID NO: 175836 - protein, 222 aa, Zea Mays
MAAPMSAIDSAWQKKSNTSAYQNRCVLRLILYHVCVNLPVMIFSYPAFKFMGLRSSLPLPHWSVVVSQVLFYFVLEDFIFYWGHRALHTKWLYKHVHSVHHEYATPFGLTSEYAHPAEILFLGFATVVGPALTGPHLFTLWLWMVLRVLETVEAHSGYHFPWSPSNFLPLYGGSDFHDYHHRVLYTKSGNYASTFVYMDWLFGTDKDYRKAKTIEEKEGKNL

SEQ ID NO: 175837 - protein, 276 aa, Zea Mays
MNSSSATAMDQIGKYWGMWGARRSSSSSSTIPISAWAAAYGGSSEPSWEEQAFARDAAEHLGGCVWPPRSYSCTFCQREFRSAQALGGHMNVHRRDRALLRLGGSSSPEDVHATTNDQPHPQQGDGDANTTTTTTYLSRIIKESKNKRFMPMPDHSVAGMREDQAAAIDDHRHNEDGDSWRSASAAKKRRRLDHPLATAAALLIFVQPAPKAATNVAACESQGGADHETKVPHTTTLTSPSSSSPLLLDQRHELDLELRLGTTPKVTYIHGNDTRS

SEQ ID NO: 175838 - protein, 85 aa, Zea Mays
MIQSLKKWYPTALSRTEKKNSAEIDRPPPPPAFPRRHRHGCRCPPCILLPRACFGCAASLRKHSFFRCFVPQVEEGSGMATPLCC

SEQ ID NO: 175839 - protein, 77 aa, Zea Mays
MLCRFGYVVTSIHISQWTYHWSNFFVFQIDYLVSILMFCLPIPHFLFSGSGHCQKQCTTVCGSFKGKPPHRLYCQGT

SEQ ID NO: 175840 - protein, 401 aa, Zea Mays
MHPPPHPSMKPGGEEEEDVQVLVVRSHHHSDQSSTRSHHHQQVVIRARPYYRRWSPWLVSGATVACVAIFLVTMYVNDCPTHNSNCAAAGFLGRFAFQPLRENPLLGPSSATLVKMGALDVAKVVHGRQGWRLITCMWLHAGVVHLLINMLCLLVVGIRLEQEFGFVRIGLVYLISGFGGSLMSALFIQSSSVSVGASGALFGLIGSMLSELITNWSLYANKVAALLTLLLVILSNLALGLLPRVDNFAHIGGLVSGFLLGFVVFVRPHLDWLTQQQRSGGGGQGQQQAPPPVAAARKRKHRTYQYVLWLAAAALLVAGLTAATVLLFRGYDANQHCPWCHYLSCVPTRRWRCDGSPTTCTATTQENNTLSVVCEGGSNRTYVVAAASQDRIKDLCNQLCT

SEQ ID NO: 175841 - protein, 219 aa, Zea Mays
MSALFIQSSSVSVGASGALFGLIGSMLSELITNWSLYANKVAALLTLLLVILSNLALGLLPRVDNFAHIGGLVSGFLLGFVVFVRPHLDWLTQQQRSGGGGQGQQQAPPPVAAARKRKHRTYQYVLWLAAAALLVAGLTAATVLLFRGYDANQHCPWCHYLSCVPTRRWRCDGSPTTCTATTQENNTLSVVCEGGSNRTYVVAAASQDRIKDLCNQLCT

SEQ ID NO: 175842 - protein, 123 aa, Zea Mays
MFTCQEIITLGSPSSLVSHMRPAGGRDRRGAGSILHSLVDVEWICGGRLPPLRAGTQAPASWAADRLGSYCCGFAPEVRKGNAVHRRWQYITETRITDGFTPIQRRIRDDISSRHGYVNGQEP

SEQ ID NO: 175843 - protein, 406 aa, Zea Mays
MQFFSLNGFPCPRLRSPSDHFLRTINKDFDEETVVESSDKAKRKTAADEAIEILATAYRSSIYLDKTTDQIVEMKSMVINLSFIYLDRAVHGNCGNEIPYWLQDGASFRRREHASFGTKLLVLTRRSFLNMHRDVGYYWMRLAIYMGIGVCLGTIFYQLGYSTYSSIQSRCEVIMYTIALLTFMSIGGFPSFVEDVKVFRKERLSGHYGVSEFVISNTISATPYLSVVSLLPGAMLYYLTGLSKGADHFVYFVMVLCVCCLLVESMMMVIAAVVPDFLMGIIVGAGVQGVMMLNGGFFRLPNELPKPVWKYPCYYLSFHKYAVQGLYKNEFVGLSFPSDQLVDSNVTVSGLQVLEYKLQVEMGYSKWVNLAILCGMMLVYRMIFFAIVKISEEVRQKRGGKRGCVR

SEQ ID NO: 175844 - protein, 742 aa, Zea Mays
MYFTVRSYMPSRVKQILPSFCKDMFRILDSLNFNSLIEDGSTMKLKIAKRCLIIFCALVTRHRKHTDNQMPHIVNCAIKISKQSIHLSKLDSLPNRIVSLAFDVISRVLETGPGWRLVSPHFSSLLDSAIFPALALNEKDIEEWEEDTDEYMQKNLPSELDDISGWTEDLFTARKSAINLLGVIALSKGPPVASAASKRKKGDKNKGKSEMSSIGELLVTPFLSKFPIPSHGEDASSVAVRNYFGVLMAYGGLQDFLTEKKDLTITLIRNRILPLYSLDPCSPYLISTANWVIGQLAICLPEDMSSSIYESLMKALTMEYVEDITCYPVCASASGAIAELIENSYVPPDWLILLQVVLKRISTGDENESALLFKLLGTIVEGGQEKVLSHIPEIVSNIASTVMELLPPVPDPWPQVVEQGFAALVAMVQAWESSAPDENKTPEKRFWQSGQSAIAQTISLLLQKAWLLQADNMEGSALPPPSCVNDASVLLEFVMSSVTCMEETANLKVFELVATWADAIANWDSWEEMEDQGVFNTIKEAVNFHQRFDLDGLFLKTLPSQSENGSQSSVIGRVSNFVTRAIAAYPSATWRACSCVHTLLHAPKFSLGAQDTRKTISESFAQAAFSRFKSVSDSPAGLWKPLLLAISSCYICYPDAIEQVLNNVDGNGFAIWASALAQVSSSLFNPGLSSESEIKLAVLTLSTVINHLVSLSTGGTKFVARLLCITDGVLHSAEGSSGRWGQ

SEQ ID NO: 175845 - protein, 269 aa, Zea Mays
MGSALPPPSCVNDASVLLEFVMSSVTCMEETANLKVFELVATWADAIANWDSWEEMEDQGVFNTIKEAVNFHQRFDLDGLFLKTLPSQSENGSQSSVIGRVSNFVTRAIAAYPSATWRACSCVHTLLHAPKFSLGAQDTRKTISESFAQAAFSRFKSVSDSPAGLWKPLLLAISSCYICYPDAIEQVLNNVDGNGFAIWASALAQVSSSLFNPGLSSESEIKLAVLTLSTVINHLVSLSTGGTKFVARLLCITDGVLHSAEGSSGRWGQ

SEQ ID NO: 175846 - protein, 112 aa, Zea Mays
MVAAGVLVTLRSSFLSLMWLVEPLHPLLLTASSLCRHRWPLQILRHLLRRTLQRCLLSFVHKQLIRRAGKVTGPWMEVWEVARHCHTAKDFVQCIFCLKILPSRIKRFKQHL

SEQ ID NO: 175847 - protein, 77 aa, Zea Mays
MFESEFIIASAVWFNHDSSTLAEKDIAALSPELRAQATDPKSRQGHRTLDGSLGGGQTLSHCKGLCSVYFLFEDSSF

SEQ ID NO: 175848 - protein, 262 aa, Zea Mays
MRACSHPETDRAPCTHRARSTSAPGSRARSPLDVRARKPRQEPARRPCQEATRSRARKPPGARSTSAPGSRARRSTPCPCSAPRRCILQLAPSPDLSCLGPSRHSHLASSPYCCSGGEERNSSASHTLCLTKCLNQNLSSHPQFGLIMRSMVAAGVLVTLRSSFLSLMWLVEPLHPLLLTASSLCRHRWPLQILRHLLRRTLQRCLLSFVHKQLIRRAGKVTGPWMEVWEVARHCHTAKDFVQCIFCLKILPSRIKRFKQHL

SEQ ID NO: 175849 - protein, 218 aa, Zea Mays
MRACSHPETDRAPCTHRARSTSAPGSRARSPLDVRARKPRQEPARRPCQEATRSRARKPPGARSTSAPGSRARRSTPCPCSAPRRCILQLAPSPDLSCLGPSRHSHLASSPYCCSGGEERNSSASHTLCLTKCLNQNLSSHPQFGLIMILRHLLRRTLQRCLLSFVHKQLIRRAGKVTGPWMEVWEVARHCHTAKDFVQCIFCLKILPSRIKRFKQHL

SEQ ID NO: 175850 - protein, 121 aa, Zea Mays
MFESEFIIASAVWFNHEIHGSRRGAGNVEVIFPESHVVGGAPASSVADSIEPVSTSLAAADSSTLAEKDIAALSPELRAQATDPKSRQGHRTLDGSLGGGQTLSHCKGLCSVYFLFEDSSF

SEQ ID NO: 175851 - protein, 1188 aa, Zea Mays
MAEVKVMRARADGPEAVKGECWVLTDGSEQPGDQPQWLMRLGHALVQGCGGVDRVVGVVEDWRDTRLIVEDVHEVRCSRQVCYGGGGHETMELGASVSMSILEKLVQSCSFPDSWRGPPDAEVQALIGYLEELRSSVLDLSKEDEDEDDSATSSSTLKMSLTSQLQELCYDAEDYLEMAQHSRGGCSWQISWVRSKATRQRPALISAKDLSGLISRVNPAKEIAQAYIKSASSRTTTKENGPRPQEEPAKSSSRRAVYSDDTLQPDSHDEQLVRLLALESDQQLKTVAILGLPGVGKTTLARRLYHCYEGRFHCGAFLRASRNLQDTTRLLATMLSKIKGQQGCRYWGGSGDEQDLIDSIRQHLQGKSYFIVIDDLWATSVWDFLSRAFPKDNCGSRIVITTQVTEVAFACCNNHTVDIFNMKPLDDDQSLQLFYSRVKHINGYNAEECKAISHGIVSNCGNLSPLAIINIAGMLAGWADFNMNDWEYVSKCCTSTANLTTEEATERFLNLMYNKLPAKLKTCLLYLSMYPEGCVIGKDDLVRQWAAEGIFSQVVEPKGREHEVGFIYFDELLKRGLIQPVDTDYNDQVLSCIVHQVVLEFITKKSMQENFITVVDYRETGTVLDDNKVHRLSARFEGAKSAQIPRSFRVRQVRSFMFSGFIKSLPSLLKYCLVRVLILHVWSDDQGKTVVLDLSPVGNMLHVRYLKVVSNMIVKLPLIIRGLRHLETLEVDAEEVAVPLDVFILKSLLHLRLPSKAYQPDSDIQRIDLTNTFPLRFLPFVRALSMLGRFLLSHGHRIRHLTSLQSLGYFDLSTCSRYTVWQLGKLTNLRDLHLTCSAVRSRHRISNIQCLASVLGKCTSLESLTIRGEASSNQSISFDGLSSLSSPPYNLVSFVLSPRIFKMAKLPKWIGQLSRLSTLKIAVGELSSEDVDILKGLSALTALSLYVRRNPKKGSWILFSKGFAVLKYFKFTCTALCVKFSEQAMPAVQRLIVCFNANTMQQYRPEDAGIWYLSGLQVISARIGAAGIDQASREAAKSRLLDAILSNHPKPPPIRNVQMVDWVIHGDTEECSTGVMIRKDESSREHTRSFLSQFPFRRRPLLPSIFTRRGQDDEQHKIEENDVLQDSIILRKSSSLMQKPGLPYRYNGAPYRCYSGSGRWWGIGEGFRGNRCTGWRYRGEENTDVTRE

SEQ ID NO: 175852 - protein, 887 aa, Zea Mays
MHVTVTCKAASIGNIEREMRVAMVGSGLSGLVAAHELARSGGVRVTVYEKEDHLGGAKTVAVDGGAEEGRVLVDLGPVVFNPVTSPNLMEWFERLGVEMCTSDMSFSASMRLNKSSESFEWGSRSGMSGVLAQKSNLLSPRFWLVVHEIFKFKNHALKYLEDHRSGPNRNETLGQFILSHRYSQLFQDAYLIPMCACIWPSPSHEILGFPALFVLSFFRDNQLLEILSGSKWLTVKGGSGSYVNKIREELESNGCQIKIGCEVNSISKSNDGYQILEVDGSVETYDRIIIGINAHDALKVLGAEATNEELKNLGAFHFIRSIAYLHSDESLMPRNSSAWSARNFLGTTSSGVCVTSWLNILENIESAGPLLVTLNPPRVPNHVLLKCHISHPIPSIAAAKANLQLNSIQGKRGIWFCGSYQGYGYHEDSVKAGKAAALGLLGRKCDLLSNPKPMVSSWTEAGARLLVARSLDQYITIGNFCILEEGGTTFSFGKACEKCHVKSAIRVHDPQFYWKAATEGDLGFASAYINGQISFVDHRKGLVNLVRIILANRGEFKRLSSTASGNTRKAWWSPLLGITGVSFAKYFLRHALRKNSVSKARKNISEHYDLSNDFFALYLDPSMTYSSGIFKVAEESLETAQLRKLDSLINKAKVEPGHHVLDIGCGWGTLAIRLVKQTGCKYTGITLSEEQLKYAKRKVKESGLEDRITLLLCDYRQLPAGDKFDRIISCEMIEHVGHEYMDDFFGCCEYHLAEHGLLVLQSIALPEELYDKMRMRPEFLKTYIFPGGCLPSLGRIVSAMSNASRLNIQHLENIGDHYYTTLMNWRDNFVANREKASALGFDDKFIRTWEYYLSYAAALFKSRTAIDYQIVFARPGDSKLPSYVAIA

SEQ ID NO: 175853 - protein, 883 aa, Zea Mays
MHVTVTCKAASIGNIEREMRVAMVGSGLSGLVAAHELARSGGVRVTVYEKEDHLGGAKTVAVDGGAEEGRVLVDLGPVVFNPVTSPNLMEWFERLGVEMCTSDMSFSASMRLNKSSESFEWGSRSGMSGVLAQKSNLLSPRFWLVVHEIFKFKNHALKYLEDHRSGPNRNETLGQFILSHRYSQLFQDAYLIPMCACIWPSPSHEILGFPALFVLSFFRDNQLLEILSGSKWLTVKGGSGSYVNKIREELESNGCQIKIGCEVNSISKSNDGYQILEVDGSVETYDRIIIGINAHDALKVLGAEATNEELKNLGAFHFIRSIAYLHSDESLMPRNSSAWSARNFLGTTSSGVCVTSWLNILENIESAGPLLVTLNPPRVPNHVLLKCHISHPIPSIAAAKANLQLNSIQGKRGIWFCGSYQGYGYHEDSVKAGKAAALGLLGRKCDLLSNPKPMVSSWTEAGARLLVARSLDQYITIGNFCILEEGGTTFSFGKACEKCHVKSAIRVHDPQFYWKAATEGDLGFASAYINGQISFVDHRKGLVNLVRIILANRGEFKRLSSTARKAWWSPLLGITGVSFAKYFLRHALRKNSVSKARKNISEHYDLSNDFFALYLDPSMTYSSGIFKVAEESLETAQLRKLDSLINKAKVEPGHHVLDIGCGWGTLAIRLVKQTGCKYTGITLSEEQLKYAKRKVKESGLEDRITLLLCDYRQLPAGDKFDRIISCEMIEHVGHEYMDDFFGCCEYHLAEHGLLVLQSIALPEELYDKMRMRPEFLKTYIFPGGCLPSLGRIVSAMSNASRLNIQHLENIGDHYYTTLMNWRDNFVANREKASALGFDDKFIRTWEYYLSYAAALFKSRTAIDYQIVFARPGDSKLPSYVAIA

SEQ ID NO: 175854 - protein, 888 aa, Zea Mays
MHVTVTCKAASIGNIEREMRVAMVGSGLSGLVAAHELARSGGVRVTVYEKEDHLGGAKTVAVDGGAEEGRVLVDLGPVVFNPVTSPNLMEWFERLGVEMCTSDMSFSASMRLNKSSESFEWGSRSGMSGVLAQKSNLLSPRFWLVVHEIFKFKNHALKYLEDHRSGPNRNETLGQFILSHRYSQLFQDAYLIPMCACIWPSPSHEILGFPALFVLSFFRDNQLLEILSGSKWLTVKGGSGSYVNKIREELESNGCQIKIGCEVNSISKSNDAGYQILEVDGSVETYDRIIIGINAHDALKVLGAEATNEELKNLGAFHFIRSIAYLHSDESLMPRNSSAWSARNFLGTTSSGVCVTSWLNILENIESAGPLLVTLNPPRVPNHVLLKCHISHPIPSIAAAKANLQLNSIQGKRGIWFCGSYQGYGYHEDSVKAGKAAALGLLGRKCDLLSNPKPMVSSWTEAGARLLVARSLDQYITIGNFCILEEGGTTFSFGKACEKCHVKSAIRVHDPQFYWKAATEGDLGFASAYINGQISFVDHRKGLVNLVRIILANRGEFKRLSSTASGNTRKAWWSPLLGITGVSFAKYFLRHALRKNSVSKARKNISEHYDLSNDFFALYLDPSMTYSSGIFKVAEESLETAQLRKLDSLINKAKVEPGHHVLDIGCGWGTLAIRLVKQTGCKYTGITLSEEQLKYAKRKVKESGLEDRITLLLCDYRQLPAGDKFDRIISCEMIEHVGHEYMDDFFGCCEYHLAEHGLLVLQSIALPEELYDKMRMRPEFLKTYIFPGGCLPSLGRIVSAMSNASRLNIQHLENIGDHYYTTLMNWRDNFVANREKASALGFDDKFIRTWEYYLSYAAALFKSRTAIDYQIVFARPGDSKLPSYVAIA

SEQ ID NO: 175855 - protein, 560 aa, Zea Mays
MRVAMVGSGLSGLVAAHELARSGGVRVTVYEKEDHLGGAKTVAVDGGAEEGRVLVDLGPVVFNPVTSPNLMEWFERLGVEMCTSDMSFSASMRLNKSSESFEWGSRSGMSGVLAQKSNLLSPRFWLVVHEIFKFKNHALKYLEDHRSGPNRNETLGQFILSHRYSQLFQDAYLIPMCACIWPSPSHEILGFPALFVLSFFRDNQLLEILSGSKWLTVKGGSGSYVNKIREELESNGCQIKIGCEVNSISKSNDGYQILEVDGSVETYDRIIIGINAHDALKVLGAEATNEELKNLGAFHFIRSIAYLHSDESLMPRNSSAWSARNFLGTTSSGVCVTSWLNILENIESAGPLLVTLNPPRVPNHVLLKCHISHPIPSIAAAKANLQLNSIQGKRGIWFCGSYQGYGYHEDSVKAGKAAALGLLGRKCDLLSNPKPMVSSWTEAGARLLVARSLDQYITIGNFCILEEGGTTFSFGKACEKCHVKSAIRVHDPQFYWKAATEGDLGFASAYINGQISFVDHRKGLVNLVRWQYKESLVVAVAWNYWSLICKILFASCLAEE

SEQ ID NO: 175856 - protein, 657 aa, Zea Mays
MRVAMVGSGLSGLVAAHELARSGGVRVTVYEKEDHLGGAKTVAVDGGAEEGRVLVDLGPVVFNPVTSPNLMEWFERLGVEMCTSDMSFSASMRLNKSSESFEWGSRSGMSGVLAQKSNLLSPRFWLVVHEIFKFKNHALKYLEDHRSGPNRNETLGQFILSHRYSQLFQDAYLIPMCACIWPSPSHEILGFPALFVLSFFRDNQLLEILSGSKWLTVKGGSGSYVNKIREELESNGCQIKIGCEVNSISKSNDGYQILEVDGSVETYDRIIIGINAHDALKVLGAEATNEELKNLGAFHFIRSIAYLHSDESLMPRNSSAWSARNFLGTTSSGVCVTSWLNILENIESAGPLLVTLNPPRVPNHVLLKCHISHPIPSIAAAKANLQLNSIQGKRGIWFCGSYQGYGYHEDSVKAGKAAALGLLGRKCDLLSNPKPMVSSWTEAGARLLVARSLDQYITIGNFCILEEGGTTFSFGKACEKCHVKSAIRVHDPQFYWKAATEGDLGFASAYINGQISFVDHRKGLVNLVRIILANRGEFKRLSSTASGNTRKAWWSPLLGITGVSFAKYFLRHALRKNSVSKARKNISEHYDLSNDFFALYLDPSMTYSSGIFKVAEESLETAQLRKLDSLINKVRPRIIKSICCNLLKYYCIINNLT

SEQ ID NO: 175857 - protein, 556 aa, Zea Mays
MPRNSSAWSARNFLGTTSSGVCVTSWLNILENIESAGPLLVTLNPPRVPNHVLLKCHISHPIPSIAAAKANLQLNSIQGKRGIWFCGSYQGYGYHEDSVKAGKAAALGLLGRKCDLLSNPKPMVSSWTEAGARLLVARSLDQYITIGNFCILEEGGTTFSFGKACEKCHVKSAIRVHDPQFYWKAATEGDLGFASAYINGQISFVDHRKGLVNLVRIILANRGEFKRLSSTASGNTRKAWWSPLLGITGVSFAKYFLRHALRKNSVSKARKNISEHYDLSNDFFALYLDPSMTYSSGIFKVAEESLETAQLRKLDSLINKAKVEPGHHVLDIGCGWGTLAIRLVKQTGCKYTGITLSEEQLKYAKRKVKESGLEDRITLLLCDYRQLPAGDKFDRIISCEMIEHVGHEYMDDFFGCCEYHLAEHGLLVLQSIALPEELYDKMRMRPEFLKTYIFPGGCLPSLGRIVSAMSNASRLNIQHLENIGDHYYTTLMNWRDNFVANREKASALGFDDKFIRTWEYYLSYAAALFKSRTAIDYQIVFARPGDSKLPSYVAIA

SEQ ID NO: 175858 - protein, 164 aa, Zea Mays
MHASGLTPRQARGEADLAHRPQISFQTRRQQPGKGRPCMVGGPFPQRTQFHPLPYLAVMACTTPPSSPSFQIQPSTVHAPTSIDCYCLNRQCYCSGWLELEEVRRGGGEFAIHFSVVGQRAAVAGFRSRITELLGAQGHFLKSARSGSRTDRVISKSDIMDRRH

SEQ ID NO: 175859 - protein, 336 aa, Zea Mays
MTMLPRGAADKIISHTLAGAMLSGLGIWHLFNHMRLLVSLAPTAPSSSSSRVAVLAPAAWFPAPRVRRLEPIAMLAAGAYGLATQMLAYSPMPFRADGSIPPERLPNHEHAIIYASLLVYAGSAIYLDDDDDRAGPRHAAPAPTTLCMLLLAALFAQELFVFHVHSSTDDHAGVEARLHWFLQASAAACLAAALLGAARLPADLQLAAGLVRSASLAFQGLWCVVIGVAWVPGMLPAGCYLDGSGVHLRCRGEDSLRHAIAVVNLQFGWCMVLVVGIYVYVCKRYPAGAWSHGEVYGRLPEAEAADEDDDSHHHDMKTPNCGFDGTACKAFHKAPY

SEQ ID NO: 175860 - protein, 329 aa, Zea Mays
MGLPRRGAAGGSGLVPSSPLCPVARACSHSLDPVVCPAVSGCVSSALSVGLVSGKDCSEGDCDPVADRVEQFAQERIPAAEKMKWGLDGSLGSLQDFNAPDSLQDFIVPGDLKACCDLSRRYGVLGGVLTAQQPRLAVPSKVCSAEHLGFSDVVLSQKSIEIAFPNPDTILNPLQILDSARETAAPILLNQQIAYSSPDTSLSALQIIDSVRVPAAPNSLSQPLVAESHVPPHSNINSASVMPCNPDLFTSSLSCSIPDPSSINIDEFVASISKAPDAPLIRSPPSSSLASNSLVVGCSFQPAVAAGVDLMEQLARHFIRPLTKDQMEA

SEQ ID NO: 175861 - protein, 1254 aa, Zea Mays
MGEQQGIEQVLGKLVELLTAKKDETPSSGKEIVSYMEPVQKIELMPNDIKLEGIRNYLPWSRRAMLLLKAKRLEGFVTGESIEPEDKSSNDWKTWEAINSLVAAWLLSSLSPTIAGSVDTITSAAGIWEALSKMYSGAGNVMLLAETEDRISTMKQGDLSLMDYVAALKRLWADVDHFDPIELPHTECVVWIKKWIEKRRVLQFLRGLNPDFEARRASMFHQSSLPSLEEAIAAMAQEDTRLKLIKGDTSSPPPPAFVMTRIQETRTCYNCGEQGHLSRDCPQQRRPYRGRGRSSDRRAMRGSGSRGGRSGGYRANVAIPEGDEDLITIPASELKELRKLKENKNDSTSDDQGAVSTSTDNLDPGIKNHALISMRKSNSSWILDSGASKHVTGRSSEFASYKLYPSSYKKTVQTADGTFQPIRGVGTVKCTPSITLSSVLYVPSFGVNLVSISSLVDQLDCQIFLDRENCIIQERKTGRRLGTGVRHNGLWYLDKRRTDEVVCRALSAVASEEEAKVMLLHCRLGHISFDVMSRMFPYEMSKVNKQRLVCDACEFGKHTRTSYVTRGLRSESPFMLVHSDVWTSPIVSVSGVKYFVSFIDCYSRMTWLYLMKHKNEVLDCFKDFCALVKNQYNTHVKIIRSDNGTEYVNTEFRSFLSKEGILHQTSCPDTPPQNGVAERKNRHLLEVARSLMYTMNVPKFLWSEAVMTATHLINRMPSRILGMKTPCELLYGKNEFIVPPKVFGCTCFVRDHRPSVGKLDPRAVKCIFVGYSCGQKGYRCWNPSERRMFVSLDVTFREAIPFYGERSDLSDLFATLDTPSGDGVTSEGENENEQDDVDEGQTKHEGVISSPVPQERREVSDESILPQAQNSRGESIHDRVISKVYTRRKYMTRTNTEDMAQSTPIQESGQEEIEEARAPEIEVEDLPSDDMPIALRKEPRTGAGVPPQRYGFDHDISNYVSYTSLSSEYNVFLASLQSVTIPKDWREAKLDPKWKEAMLEELTALEKNKTWDLVPYPLGKKIVGCKWIYTVKQNPDGKIERYKARLVAKGYSQTYGIDYDETFSPVAKMSTVRTLISCAANYDWPLYQLDVKNAFLHGDLQEEVYLEVPPGFATDQTKGKVLKLKKSLYGLKQSPRAWFDRLRRAMCNMGYKQCNSDHTVFYYHSGGSVTILAVYVDDMIITGNDPLNISQLKKNLSKEFEVKDLGQLRYFLGIEIARSHKGIILSQRKYVLDLLHETGMLGCRPASSPIEQKS

SEQ ID NO: 175862 - protein, 629 aa, Zea Mays
MELSKILEKIENIVTEAHKILQLLNLPSGSNVDKRQIVAENSRGAVTTVAPPRLVIGRDEDRVKVISMLRETLDDGQQDRSGAKPYSTIGIYGIPGSGKSTLAQYVCAHEEDNIHFDIVIWVHVSQKFSVRAVLREMIEQGFEGESIETEESFRCIFPRRHWLDPEYLVRLWVAEGFVTSRNTGEELEAVGRGYFDELVSASFLQPVDGDKERYTIHDLLHDLVSKVAGSDCFRADNGWEGEFPQDVRHLWVENCKLDLIAHKITRLKKLRTLIISAGENDTPVEEKALLENIFTGVTTLRVLQITPWTAGTLSFPASVGRLKHLRYLSVGSLNVPNIGRIVSLRTLRCFRVKKKAGYELWQLKHLNKLEKKLVIRGLQNAGRKGEAPEANLAAKERLTSLALEWDSDAPLSCGADLQAEVLEGLCPPLHLEKLRLCWYGGSRYPDWIVGVRCLCLYRCSRLGAFHGCSPRLVKLKILECGWDALPDNMEHLASLRKLVIDGCKDLRSLPELPRSLLHLKISGCDGEVMRSCKTVGHPNRKRIQHVRTVIIGWESLPRAELLDHFESEPVVPEKEKEIAALVKKLLVMLGLLLLCMFSVIARLLVGSFLLPAPLVVVILLLVVWIILTL

SEQ ID NO: 175863 - protein, 282 aa, Zea Mays
MADPVTIAAVGWGIAAVGWLVSPIITRLLNKAFSYLGVDGAKKLKELETKVLQLELLMEAVEESPRRNQLERLFQDLRSAFYEAEDILDDVEYCSLERQALSLSHPGDKLDSQSMPSSGKNWGIISSPMVKLIETFAVFCKSQRTAYREKVLIEAEKQFLHDFTFFKEKLSVDFGQIVDVECIDSTCQVLCDKVRGCCSICKSRCTEAIIDSLKILAEAMTIKHQKFLNSNNLLAKDMDIKSDEKATKIDTNVQPVDVKSNEKGAGVDIVEASHGKAHVVFS

SEQ ID NO: 175864 - protein, 324 aa, Zea Mays
MLRETLDDGQQDRSGAKPYSTIGIYGIPGSGKSTLAQYVCAHEEDNIHFDIVIWVHVSQKFSVRAVLREMIEQGFEGESIETEESFRCIFPRRHWLDPEYLVRLWVAEGFVTSRNTGEELEAVGRGYFDELVSASFLQPVDGDKERYTIHDLLHDLVSKVAGSDCFRADNGWEGEFPQDVRHLWVENCKLDLIAHKITRLKKLRTLIISAGENDTPVEEKALLENIFTGVTTLRVLQITPWTAGTLSFPASVGRLKHLRYLSVGRHIGGTKVILPSTVVLGLYHLQLLDCPSVAFSSCEDIVKGLFGCTGMSQDSFQLIKIYIN

SEQ ID NO: 175865 - protein, 574 aa, Zea Mays
MVTVDNCGNDFLASLADATQPTDDWDDLKGIETEACGNLNDMMMKNVPDCNGGVAIDSRYTSREPNSSSQRAPNHLEAFKFASDDSDFEMDNLPDKSCSMQRQTQSRNSGMQTRSSAKSTVTRETSRYEPTTPTSNREMPPAAFHQRRELLSYEQLCCLDDVNFANAVIFGNKGFRPLQYEACRAAMDNQDCFILMPTGGGKSLCYQLPATLHPGVTVVVSPLLSLIQDQIVALTYRFAVPAAFLNSQQTSAQASAVIQELRCGKPAFKLLYVTPERIVTNYSFMETLRGLDQRGLLARFVIDEAHCVSQWGHDFRPDYRGLGCLKQNFPRVPIMALTATATESVRKDVLGALRIPNAVVLKRSFDRLNLNYEVIGKTKTFQKQLGDLLKERFMNESGIVYCLSKNECADTAKFLREKYKIKCAHYHASLAARQRTSVQEKWHSGEVKVICATIAFGMGIDKPDVRFVIHNTLSKSIESYYQESGRAGRDELPAHCIVLYQKKDFSRIVCMLRNGENFRSESFRVAMEQAKKMQAYCELKTECRRQALLQHFGEQYDRRRCRDGPSPCDNCLKT

SEQ ID NO: 175866 - protein, 495 aa, Zea Mays
MASLEQEVVVAMASLEQEAVVAAAVVENVTPQQQGGGCGGAGGGGDTVSAWRNVDIAWLKAKEASIRRYEAANWLRRYVGVVCAKDLAEEPSEDEFLVGLRNGIILCTALNKIQPGAVPKVVEVPSDSTAPADATALCAFQYFENVRNFLTGLQGLGLPTFEASDLQKGGQGVRVVDCVLALKSFCDAKQVGKQSSFKFGGIVKPLSGKYATRKNNEPSVKAMIRSHSAELLRDGVSLEQIGLDFSPELTETTAPDSIRMLVQTVLSDKKPEEIQSVVESLLSKVINELEHRIASQSELVKETMDTNGCNSVLRMESPCNTNDSKSLSRVDPPQVELTSCSDLEKVKETMDTNGCNSVLRMESPCNTNDSKSLSRVDPPQVELTSCSDLEKATENIKMDEVDENALSLTEDVSTLVHAPLSNDNVNKNMPKPVRNFDREEKQIQDLKSNMSTVKCCMEQLKLLYSEDLKKLVCSGKPQALQPNTRPYSQVKRGRR

SEQ ID NO: 175867 - protein, 367 aa, Zea Mays
MADIVIRDLERVVKVALAIKKAVETAKQNKEDCVKIGERAAEVSTHMKRLKENTKAMEDPLMSDTLKSMEETLQRALKLVNECQRKHVVLHYLNAGGMSKKLRQVQEDISYKLWNGVLATVVDTRIALEKQIQSAIDAPLHQHQQRAGQVETSQSSHSRTDQASEKGKAMLARVKREQSELLSGVPQFSLSQLNAATNEFSEGCVVERGYYKGVLHDGLDVAIKKLAVSDDTQERRLQLELNIRAKLEHGNILKLLGYCLDAQEKEKLYFLVEEYIPNVESLEKFINVSRLDWSSCFKIIQGIAKGLHCLHKHHILYMDLNPANILVRSDMNPVVINFGSSIVLDRDDDKGLCRSRKTYGSLCINDV

SEQ ID NO: 175868 - protein, 292 aa, Zea Mays
MLARVKREQSELLSGVPQFSLSQLNAATNEFSEGCVVERGYYKGVLHDGLDVAIKKLAVSDDTQERRLQLELNIRAKLEHGNILKLLGYCLDAQEKEKLYFLVEEYIPNVESLEKFINVSRLDWSSCFKIIQGIAKGLHCLHKHHILYMDLNPANILVRSDMNPVVINFGSSIVLDRDDDKVTGDAVAGTLGYVAPEKLMEAYASMMSDVFSFGIIIIEIITGRRASPFVDLPEWGSVDEMITSAKGLFDPALANESQLMKINRCREVGLKCIERDPKRRPTMGNVLEMLSS

SEQ ID NO: 175869 - protein, 518 aa, Zea Mays
MAGKRRHPAIGIDLGTTYSCIGVWQNDRVEIIANDQGNRTTPSYVAFTGSRRLIGDAAKNQAEMNPSNTIFGGCHSKRLIGRRFSDASVQSDIKHWPFKVISGPDDKPLIVVQYRGVEHQFAAEEISSMVLVKMRETAEAYLGTTIRDAVVTVPACSTDLQRQATWNAGVLASLNVMRIIPEPTAAALAYGLDRKSAQVQGLYNVLVFDLGGGTFDVSVLDKVEGVFEVLATAGAAHLGGEDFDNRMVNHFVQEFKRKTKEDISGNPRALRRLRTACERAKRTLSSTLEATIEIDCLYEDINFYSTITRARFEELNMDLFRKCIDIVEDCLSDAKMDVGSVHDVVLVGGSSRIPKVQQFLQELFNGKKLFKSINPDEAVAYGATIQAAIMSGEDEIQDYLMNDATPLSLGLATDGGVMTVLIPKNATIPTRKEVVLSTDSDNQPCIRIQVYEGEGAMARDNNLLGEFEFSIPPAPKGVPQITITFHIDADCILDVAAEDKTTGEKMRKTITKRFRLKH

SEQ ID NO: 175870 - protein, 319 aa, Zea Mays
MAGKRRHPAIGIDLGTTYSCIGVWQNDRVEIIANDQGNRTTPSYVAFTGSRRLIGDAAKNQAEMNPSNTIFDSKRLIGRRFSDASVQSDIKHWPFKVISGPDDKPLIVVQYRGVEHQFAAEEISSMVLVKMRETAEAYLGTTIRDAVVTVPACSTDLQRQATWNAGVLASLNVMRIIPEPTAAALAYGLDRKSAQVQGLYNVLVFDLGGGTFDVSVLDKVEGVFEVLATAGAAHLGGEDFDNRMVNHFVQEFKRKTKEDISGNPRALRRLRTACERAKRTLSSTLEATIEIDCLYEDINFYSTITRARFEELNMDLFRK

SEQ ID NO: 175871 - protein, 471 aa, Zea Mays
MAGKRRHPAIGIDLGTTYSCIGVWQNDRVEIIANDQGNRTTPSYVAFTGSRRLIGDAAKNQAEMNPSNTIFDSKRLIGRRFSDASVQSDIKHWPFKVISGPDDKPLIVVQYRGVEHQFAAEEISSMVLVKMRETAEAYLGTTIRDAVVTVPACSTDLQRQATWNAGVLASLNVMRIIPEPTAAALAYGLDRKSAQVQGLYNVLVFDLGGGTFDVSVLDKVEGVFEVLATAGAAHLGGEDFDNRMVNHFVQEFKRKTKEDISGNPRALRRLRTACERAKRTLSSTLEATIEIDCLYEDINFYSTITRARFEELNMDLFRKCIDIVEDCLSDAKMDVGSVHDVVLVGGSSRIPKVQQFLQELFNGKKLFKSINPDEAVAYGATIQAAIMSGEDEIQDYLMNDATPLSLGLATDGGVMTVLIPKNATIPTRKEVVLSTDSDNQPCIRIQVYEAEDKTTGEKMRKTITKRFRLKH

SEQ ID NO: 175872 - protein, 684 aa, Zea Mays
MVETRRSSAAAAGKRTSPSPSSSSVPPPKRSKAESSGSPTASAPGRAEEDSVAGAAPARSAGSVDDAAAVAQKDQGVDKPSSAAAESSKRRKEQEQQQPAVPWAKLLSECSQTPHYPISVDQISVGQSKNCNLWLKDQPVSKVLCKLRRLEQGGPCELEVIGKKGMVQLNGRSVSPGTKVPLTGGDEVIFSSCGKHTYIFLYPLNDKVPKTVLSSAVSLLEAPVASVKRIRTDKRTGDTSAVAGTEMMTSTSNQKDVAAVPPASAGENSQRVVRPLASSASDKLKGRAVSPEKEFANGENANEVNSNIEDSPMVVAAAPISPDAAANDTCQQNGFVSDSHLGAEIGKTATYKIRPVLRMITGSTISEFDLTGDDLFKALEDQRDHIIRELNASTNVPPSRCQAFKDGMKQGIINPSDIDVTFENFPYYLSENTKNVLLSSAFIHLKKKEFIKQFVEISSINQRILLSGPAGSEIYQETLVKALAKHFSARLLVVDSLLLPGAPSKDPEFQKDVGKADKSGDKAAAEKFAIYQKHRSSLADTVHFRRPAAPTSSVNADIVGTSTLHSASLPKQESSTATSKSYTFREGDRVRYVGPAQPCSLSQRGPSYGYRGRVMLAFEDNGSSKIGVRFDKQIPDGNDLGGLCEEDHGFFCSAELLRPDFSAGEEVERLAMTELIEKRTNLDL

SEQ ID NO: 175873 - protein, 519 aa, Zea Mays
MVQLNGRSVSPGTKVPLTGGDEVIFSSCGKHTYIFLYPLNDKVPKTVLSSAVSLLEAPVASVKRIRTDKRTGDTSAVAGTEMMTSTSNQKDVAAVPPASAGENSQRVVRPLASSASDKLKGRAVSPEKEFANGENANEVNSNIEDSPMVVAAAPISPDAAANDTCQQNGFVSDSHLGAEIGKTATYKIRPVLRMITGSTISEFDLTGDDLFKALEDQRDHIIRELNASTNVPPSRCQAFKDGMKQGIINPSDIDVTFENFPYYLSENTKNVLLSSAFIHLKKKEFIKQFVEISSINQRILLSGPAGSEIYQETLVKALAKHFSARLLVVDSLLLPGAPSKDPEFQKDVGKADKSGDKAAAEKFAIYQKHRSSLADTVHFRRPAAPTSSVNADIVGTSTLHSASLPKQESSTATSKSYTFREGDRVRYVGPAQPCSLSQRGPSYGYRGRVMLAFEDNGSSKIGVRFDKQIPDGNDLGGLCEEDHGFFCSAELLRPDFSAGEEVERLAMTELIEKRTNLDL

SEQ ID NO: 175874 - protein, 955 aa, Zea Mays
MMTSTSNQKDVAAVPPASAGENSQRVVRPLASSASDKLKGRAVSPEKEFANGENANEVNSNIEDSPMVVAAAPISPDAAANDTCQQNGFVSDSHLGAEIALEDQRDHIIRELNASTNVPPSRCQAFKDGMKQGIINPSDIDVTFENFPYYLSENTKNVLLSSAFIHLKKKEFIKQFVEISSINQRILLSGPAGSEIYQETLVKALAKHFSARLLVVDSLLLPGAPSKDPEFQKDVGKADKSGDKAAAEKFAIYQKHRSSLADTVHFRRPAAPTSSVNADIVGTSTLHSASLPKQESSTATSKSYTFREGDRVRYVGPAQPCSLSQRGPSYGYRGRVMLAFEDNGSSKIGVRFDKQIPDGNDLGGLCEEDHGFFCSAELLRPDFSAGEEVERLAMTELIEVISEENKSGPLIVLLKDVEKSFTGVTESLSSLRSKLESLPPGVLIIGSHTQMDSRKEKAHPGGFLFTKFASSSQTLFDLFPDSFGSRLHERSKESPKTMKHLNKLFPNKILIQLPQDEALLTDWKQQLDRDVETLKAKSNIGSIRMFLSRNGIECNDLEELFIKDQSLSNENVDKIVGYAVSYHLNQNKIETSKDAKLVLTTESLKHGLNMLQSMQNDNKSSKKSLKDVVTENEFEKRLLADVIPPNDIGVTFDDIGALENVKDTLKELVMLPLQRPELFCKGQLTKPCKGILLFGPPGTGKTMLAKAVATEAGANFINISMSSITSKWFGEGEKYVKAVFSLASKIAPSVIFIDEVDSMLGRRENPGEHEAMRKMKNEFMVNWDGLRTKDKERVLVLGATNRPFDLDEAVIRRFPRRLMVNLPDASNREKILKVILAKEELGSDVDMDSLANMTDGYSGSDLKNLCVTAAHYPIREILEKEKKEKNLAKTEGRPEPALYGSEDIRPLSIDDFKSAHEQVCASVSSDSANMNELLQWNDLYGEGGSRKKKALSYFM

SEQ ID NO: 175875 - protein, 633 aa, Zea Mays
MSTRGPSYGYRGRVMLAFEDNGSSKIGVRFDKQIPDGNDLGGLCEEDHGFFCSAELLRPDFSAGEEVERLAMTELIEVISEENKSGPLIVLLKDVEKSFTGVTESLSSLRSKLESLPPGVLIIGSHTQMDSRKEKAHPGGFLFTKFASSSQTLFDLFPDSFGSRLHERSKESPKTMKHLNKLFPNKILIQLPQDEALLTDWKQQLDRDVETLKAKSNIGSIRMFLSRNGIECNDLEELFIKDQSLSNENVDKIVGYAVSYHLNQNKIETSKDAKLVLTTESLKHGLNMLQSMQNDNKSSKKSLKDVVTENEFEKRLLADVIPPNDIGVTFDDIGALENVKDTLKELVMLPLQRPELFCKGQLTKPCKGILLFGPPGTGKTMLAKAVATEAGANFINISMSSITSKWFGEGEKYVKAVFSLASKIAPSVIFIDEVDSMLGRRENPGEHEAMRKMKNEFMVNWDGLRTKDKERVLVLGATNRPFDLDEAVIRRFPRRLMVNLPDASNREKILKVILAKEELGSDVDMDSLANMTDGYSGSDLKNLCVTAAHYPIREILEKEKKEKNLAKTEGRPEPALYGSEDIRPLSIDDFKSAHEQVCASVSSDSANMNELLQWNDLYGEGGSRKKKALSYFM

SEQ ID NO: 175876 - protein, 169 aa, Zea Mays
MAGAATPPPSSSSSASCGTDAAYLLFRGETLLPDGVHASLYAVALAYCFVGLSAVTARFFKSMEQIMRHSREVVVGVDPRTGAPVVRRDKVWNYTVADIALLAFGTSFPQISLATIDAIRNLGQLTAGVREVRGLKIGFHQKMFLLFITPNVMALTRHSLWVLTGTMGL

SEQ ID NO: 175877 - protein, 359 aa, Zea Mays
MAGAATPPPSSSSSASCGTDAAYLLFRGETLLPDGVHASLYAVALAYCFVGLSAVTARFFKSMEQIMRHSREVVVGVDPRTGAPVVRRDKVWNYTVADIALLAFGTSFPQISLATIDAIRNLGQLTAGGLGPGTLVGSAAFDLFPIHAVCVLMPRAGSKKKISDLGVWLVELFWSFWAYIWLYVILEVWTPRVITLWEASLTVLQYGLLLLHAYAQDKRCPFVSIPFARGERPEDWVPPEDVSAVYYAKCDGIDETLPMGADGNDGIVDIFSAHSYYDAAEYSQLAEEDMEGSSTMDQVVKNTQDNMSWLSIWWQQFVDASMLESPESMKMDSVCLRSKSICYCIHSTGRWNLMARSSC

SEQ ID NO: 175878 - protein, 297 aa, Zea Mays
MAGAATPPPSSSSSASCGTDAAYLLFRGETLLPDGVHASLYAVALAYCFVGLSAVTARFFKSMEQIMRHSREVVVGVDPRTGAPVVRRDKVWNYTVADIALLAFGTSFPQISLATIDAIRNLGQLTAGGLGPGTLVGSAAFDLFPIHAVCVLMPRAGSKKKISDLGVWLVELFWSFWAYIWLYVILEVWTPRVITLWEASLTVLQYGLLLLHAYAQDKRCPFVSIPFARGERPEDWVPPEDVSAVYYAKCDGIDETLPMGADGNDGIVDIFSAHSYYDAAVNLQKRIWKDRQQWIKL

SEQ ID NO: 175879 - protein, 349 aa, Zea Mays
MAGAATPPPSSSSSASCGTDAAYLLFRGETLLPDGVHASLYAVALAYCFVGLSAVTARFFKSMEQIMRHSREVVVGVDPRTGAPVVRRDKVWNYTVADIALLAFGTSFPQISLATIDAIRNLGQLTAGGLGPGTLVGSAAFDLFPIHAVCVLMPRAGSKKKISDLGVWLVELFWSFWAYIWLYVILEVWTPRVITLWEASLTVLQYGLLLLHAYAQDKRCPFVSIPFARGERPEDWVPPEDVSAVYYAKCDGIDETLPMGADGNDGIVDIFSAHSYYDAAEYSQLAEEDMEGSSTMDQVVKNTQDNMSWLSIWWQQFVDASMLESPESMKMDSVCLSTGRWNLMARSSC

SEQ ID NO: 175880 - protein, 341 aa, Zea Mays
MASNMYGTTVACRMCYRDQYRPPPRDFTCEARKSEARRWGNGYHLIPRLCQWKPRGSKSDGSLLGDGHGGRDARCHSCGSHNSCECETRDCDAMEDAAASSYRDFKQHSRGNPQFSDDQVSSKNKSAYASQGLAEACKFVYNDAKFVNERAQNDILLLSRGITRLNKRACQDAAVLGLGFLKLDARARKDTQKIDHTVKERAALLNHFARAFKERAQSDLKKAADKHWSDGALEADLRRADLVVKRRAMEDAFMALKFVQDIHDMMVNRLYEQLPKDGSSSRTNSTGFITLEKNGKALELFPGEVSADQIYAIEKHTRVWHLPFLKLMVLTTQILRSLNCW

SEQ ID NO: 175881 - protein, 277 aa, Zea Mays
MASNMYGTTVACRMCYRDQYRPPPRDFTCEARKSEARRWGNGYHLIPRLCQWKPRGSKSDGSLLGDGHGGRDARCHSCGSHNSCECETRDCDAMEDAAASSYRDFKQHSRGNPQFSDDQVSSKNKSAYASQGLAEACKFVYNDAKFVNERAQNDILLLSRGITRLNKRACQDAAVLGLGFLKLDARARKDTQKIDHTVKERAALLNHFARAFKERAQSDLKKAADKHWSDGALEADLRRADLVVKRRAMEDAFMALKFVQDIHDMMVNRLYEQVYYA

SEQ ID NO: 175882 - protein, 374 aa, Zea Mays
MASNMYGTTVACRMCYRDQYRPPPRDFTCEARKSEARRWGNGYHLIPRLCQWKPRGSKSDGSLLGDGHGGRDARCHSCGSHNSCECETRDCDAMEDAAASSYRDFKQHSRGNPQFSDDQVSSKNKSAYASQGLAEACKFVYNDAKFVNERAQNDILLLSRGITRLNKRACQDAAVLGLGFLKLDARARKDTQKIDHTVKERAALLNHFARAFKERAQSDLKKAADKHWSDGALEADLRRADLVVKRRAMEDAFMALKFVQDIHDMMVNRLYEQLPKDGSSSRTNSTGFITLEKNGKALELFPGEVSADQIYAIEEAYQSMASAFSEADGIDYTDPEELELLVATLIDLDAMDGKRSVSLIAECSSSPDVNTSPS

SEQ ID NO: 175883 - protein, 339 aa, Zea Mays
MASNMYGTTVACRMCYRDQYRPPPRDFTCEARKSEARRWGNGYHLIPRLCQWKPRGSKSDGSLLGDGHGGRDARCHSCGSHNSCECETRDCDAMEDAAASSYRDFKQHSRGNPQFSDDQVSSKNKSAYASQGLAEACKFVYNDAKFVNERAQNDILLLSRGITRLNKRACQDAAVLGLGFLKLDARARKDTQKIDHTVKERAALLNHFARAFKERAQSDLKKAADKHWSDGALEADLRRADLVVKRRAMEDAFMALKFVQDIHDMMVNRLYEQLPKDGSSSRTNSTGFITLEKNGKALELFPGEVSADQIYAIEEAYQSMASAFSEADGIDYTDPEEQL

SEQ ID NO: 175884 - protein, 215 aa, Zea Mays
MASNMYGTTVACRMCYRDQYRPPPRDFTCEARKSEARRWGNGYHLIPRLCQWKPRGSKSDGSLLGDGHGGRDARCHSCGSHNSCECETRDCDAMEDAAASSYRDFKQHSRGNPQFSDDQVSSKNKSAYASQGLAEACKFVYNDAKFVNERAQNDILLLSRGITRLNKRACQDAAVLGLGFLKLDARARKDTQKIDHTVKERAALLNHFARVCICI

SEQ ID NO: 175885 - protein, 450 aa, Zea Mays
MASNMYGTTVACRMCYRDQYRPPPRDFTCEARKSEARRWGNGYHLIPRLCQWKPRGSKSDGSLLGDGHGGRDARCHSCGSHNSCECETRDCDAMEDAAASSYRDFKQHSRGNPQFSDDQVSSKNKSAYASQGLAEACKFVYNDAKFVNERAQNDILLLSRLNKRACQDAAVLGLGFLKLDARARKDTQKIDHTVKERAALLNHFARAFKERAQSDLKKAADKHWSDGALEADLRRADLVVKRRAMEDAFMALKFVQDIHDMMVNRLYEQLPKDGSSSRTNSTGFITLEKNGKALELFPGEVSADQIYAIEEAYQSMASAFSEADGIDYTDPEELELLVATLIDLDAMDGKRSVSLIAECSSSPDVNTRKALANALATAPSMWTLGNAGMGALQRLAQDPNYAVARAASRAIDELKKQWELEEGDSLRFVMNQNLASRDTEDDNSPADDAA

SEQ ID NO: 175886 - protein, 122 aa, Zea Mays
MPTSKFVQDIHDMMVNRLYEQLPKDGSSSRTNSTGFITLEKNGKALELFPGEVSADQIYAIEEAYQSMASAFSEADGIDYTDPEELELLVATLIDLDAMDGKRSVSLIAECSSSPDVNTSPS

SEQ ID NO: 175887 - protein, 198 aa, Zea Mays
MPTSKFVQDIHDMMVNRLYEQLPKDGSSSRTNSTGFITLEKNGKALELFPGEVSADQIYAIESMASAFSEADGIDYTDPEELELLVATLIDLDAMDGKRSVSLIAECSSSPDVNTRKALANALATAPSMWTLGNAGMGALQRLAQDPNYAVARAASRAIDELKKQWELEEGDSLRFVMNQNLASRDTEDDNSPADDAA

SEQ ID NO: 175888 - protein, 433 aa, Zea Mays
MSHDTGAGVESLSLDLLAHALAAVRDPRDRKSCRLASRAFARAEAASRRAARVLRRDALPRALRAFPALSSLDLSACAGLDDASLAAALPEEPLPVRRVRLARASGVGWRGLDALVAACPSLEAVDLSHCVAAGDREMAALAAAAGLRDLVMDKCLGVTDVGLAKVAVGCPGLQSLSLKWCREISDIGVDLLAKKCPQLRSLDISYLKVTNESLRSLSTLEKLEDIAMVSCLFVDDDGLQMLSMCSSLQSIDVARCHHVSSLGLASLMDGQRSLRKINVAHSLHEIEACVLSKLSTIGETLTVLRLDGLEIFASNLQAIGSTCKNLVEIGLSKCNGVTDDGIVSLVARCRDLRTIDVTCCHLLTNAALAAIAENCRKIECLRLESCPFVSEKGLESIATLCSDLKEIDLTDCRINDAVGKLLGTADLEAWPML

SEQ ID NO: 175889 - protein, 434 aa, Zea Mays
MSHDTGAGVESLSLDLLAHALAAVRDPRDRKSCRLASRAFARAEAASRRAARVLRRDALPRALRAFPALSSLDLSACAGLDDASLAAALPEEPLPVRRVRLARASGVGWRGLDALVAACPSLEAVDLSHCVAAGDREMAALAAAAGLRDLVMDKCLGVTDVGLAKVAVGCPGLQSLSLKWCREISDIGVDLLAKKCPQLRSLDISYLKVTNESLRSLSTLEKLEDIAMVSCLFVDDDGLQMLSMCSSLQSIDVARCHHVSSLGLASLMDGQRSLRKINVAHSLHEIEACVLSKLSTIGETLTVLRLDGLEIFASNLQAIGSTCKNLVEIGLSKCNGVTDDGIVSLVARCRDLRTIDVTCCHLLTNAALAAIAENCRKIECLRLESCPFVSEKGLESIATLCSDLKEIDLTDCRINDAAVGKLLGTADLEAWPML

SEQ ID NO: 175890 - protein, 646 aa, Zea Mays
MSHDTGAGVESLSLDLLAHALAAVRDPRDRKSCRLASRAFARAEAASRRAARVLRRDALPRALRAFPALSSLDLSACAGLDDASLAAALPEEPLPVRRVRLARASGVGWRGLDALVAACPSLEAVDLSHCVAAGDREMAALAAAAGLRDLVMDKCLGVTDVGLAKVAVGCPGLQSLSLKWCREISDIGVDLLAKKCPQLRSLDISYLKVTNESLRSLSTLEKLEDIAMVSCLFVDDDGLQMLSMCSSLQSIDVARCHHVSSLGLASLMDGQRSLRKINVAHSLHEIEACVLSKLSTIGETLTVLRLDGLEIFASNLQAIGSTCKNLVEIGLSKCNGVTDDGIVSLVARCRDLRTIDVTCCHLLTNAALAAIAENCRKIECLRLESCPFVSEKGLESIATLCSDLKEIDLTDCRINDAALQQLASCSELLILKLGLCSSISDEGLVYISANCGKLVELDLYRAVTDDGLAAVASGCKKMRMLNLCYCTQITDGGLKHVGGLEELANLELRCLVRVTGVGITSIAVGCSSLVELDLKRCYSVDDAGLWALSRYSQNLRQLTVSYCQVTGLGLCHLLGSLRCLQDVKMVHLSWVSIEGFEMALRAACGRLKKLKLLGGLRSVLSTELLLTLQACGCRVRWVDKPLVYKG

SEQ ID NO: 175891 - protein, 135 aa, Zea Mays
MNGGRALIATAGDLVVTDGGRPGIGAGRRARPGHGPGPGARPAAAGPPGAAGPAPAQRHHHRVRRRRGRQDAQHGPLPERRLLRPLLRRQGRRAAVRAQGPLAHRQLQPHQPPHPLPGGRRRHRRRKGLITMADR

SEQ ID NO: 175892 - protein, 335 aa, Zea Mays
MKRLVVVLALVLAAALGPATAPAPARAQLRRDHQAPPGPRPHSVTITEFGAVGDGRTLNTVPFQNAVFYVRSFADKGGAQLYVPRGRWLTGSFNLTSHLTLYLEEGAVIVGAKDSSQWLIVEPLPSYGQGLDLPGPRHQSLISGYNLTDVVITGNNGVIDGQGLVWWQWLRSHELNHSRPNLLEFLYSEDIVISNLTFLNSPAWSIHPVYCSNVKVHNVTIKTSLDAPLTDGIVPDSCSNLCIEDSTISVSHEAISLKSGWDRYGISFGRPTSDIRISRVDLLSSSGAALAFGSEMSGGISDIHVNHLRIHDSSKDGQMFYGDCEHCLYPASGND

SEQ ID NO: 175893 - protein, 72 aa, Zea Mays
MQSGARCATQHRDPLLGSTLRQRPPGRPGQQHCASWCCSGRWRPVDGEPPKTLYQLHRCHESARRLTPYGCE

SEQ ID NO: 175894 - protein, 509 aa, Zea Mays
MALQAAYEYLQQAVGHGAWSSTQTLTLLLIAVPTVLLLLASLAKSTSSSGRGKPPLPPSPPGTLPIVGHLHHIGPQTHISLQELVAKYGHNGFLFLRAGAVPTLIVSSPSAAEAVMRTHDHIFASRPWSMASHILRYNTCDVAFSPLGEYWQQTRKLMNTHLLSNKKVYSFRHGREEEVCLVVDNLREAAAKSPSTAVDMSEVLAAYTNDVVSRSVLGSTHRKKGRNTLFREMTMTNVDLLVGFNLEYYIPRWPLTDLLFRLVCWKVTRHLKRWDALLEEVIHEHVEMRKLSGDKEKESDDFIDIFLSRYEEYGFTMDNVKSLLMNVFEAAIETSYLVLESAMAELMNHRRVMKKLQAEVRAYGAEKKLDMIREDDLSSLPYLKASMKEALRLHPPGPLLLPHYSTADCQIDGYHIPANTRVLVNGWAKSNSYSGQDFRYLPFGSGRRICPGANFALATMEIMLANLMYHFDWEVPNEKEDGGGKVSMDETFGLMLRRNEPLYLVPRAV

SEQ ID NO: 175895 - protein, 61 aa, Zea Mays
MGLCCRGSAPVRRAQGHATATNIRWRTGLGTLDASEFSILCKRIRVVLIFALQTPNVMVAG

SEQ ID NO: 175896 - protein, 134 aa, Zea Mays
MRRDGDLGSELQRRPPPPPPPPPPPHRSPPWPWLGWPPGDLSSLPQTTPPSPRISFSFSPFQTFRSRRCQPPFARRVSRRSSRRILTCLHRAKESRWLCALAPLLGGHHRPSTTQTPWMRGCSCLMWLMTCGQC

SEQ ID NO: 175897 - protein, 128 aa, Zea Mays
MRRDGDLGSELQRRPPPPPPPPPPPHRSPPWPWLGWPPGDLSSLPQTTPPSPRISFSFSPFQTFRSRRCQPPFARRVSRRSSRRILTCLHRAKESRWLCALAPLLGGHHRPSTTHANMIVRVGCTREP

SEQ ID NO: 175898 - protein, 169 aa, Zea Mays
MAPSSDLALFLSAQLPDAFSSLCRTLCSPGVRIRRLLSVPRFGGCTHLHPWMSPSLRPAPCLLLADFPCATSRSSFHGRGFQLAGVRTALLPPARRASPCIHGHCARPLLHRGGFLLPVPSPAKPLHAAVDQPPCSSHRGHHRPWTSDSPMRSTCSLFCSTRGQWHSPL

SEQ ID NO: 175899 - protein, 226 aa, Zea Mays
MLAHDTLEKCRMAQAREGMLREASPSIEYDDDDDDNEGMEVRLGFSLEAELWSALASAGPFIGADVPTQGLTASLSEARTSAKSDPILIAIDEAWAMEERPLPCLRCLPWGSWRKKSSYRSKCPPRGKGAQGAGSRGWTWMSYLGPGTKRRAHKPTLTATNAVKRNIRTSTRATSRSHVWLDAAKERRPSNRVPKRPGLSSVGRPGRMLLSQRRPWPLRRHWSRPS

SEQ ID NO: 175900 - protein, 77 aa, Zea Mays
MNKKKKERKSSMIRSYLKLECPCAFSCKNSASRVQFLITDEKPKANQYGNQPSQREREREREREREQRRRRRRTGHG

SEQ ID NO: 175901 - protein, 263 aa, Zea Mays
MAAAERDRERWILPGATALVTGGSKGIGHAIVEELAALGARVHTCSRNAAELEECRRRWAEKGGGLLQQVTVSVCDVAVRADREALMATVRDVFGGKLDILVNNAAQVVFKPAVECTGEEYTRIMATNLESCFHLSQLAHPLLRDASLAGGGSVVHISSTAGLLGFRGAVLYSTAKGGVNQLTRSLAAEWACDKIRVNSVAPGIVMTDMVKNQARRPSSKKLHGFRCGGPASRQRWRPWCRFCACRRPPTSPAKSSTLTVAEP

SEQ ID NO: 175902 - protein, 296 aa, Zea Mays
MCRNSKLTQILSDSLGDGSKVVMVVHVSLSEDDVGETVCSLNLAKRARSIEPNREIPQDLKTLKQKRVAELDREIRAAEEELKRLDEQIRRAEEKEISLEEEEEEEEEKKLFASSVCQALSDDEKGSPRSTLVVVGHTDAAESPRATTEKAKGRRPPPARGHGGSAAPHFMSSTVCSRQRRCAGGYHSVGNGKPRLTAVSVNRYPPPAAELSGSQNAAARASRSASVALSSGVHKLRCLRVNKSDQVNVISNSSVDSTAASAPPPRRRESCFGSRPVLQRAAAPLHLHRRRMSSLT

SEQ ID NO: 175903 - protein, 290 aa, Zea Mays
MCRNSKLTQILSDSLGDGSKVVMVVHVSLSEDDVGETVCSLNLAKRARSIEPNREIPQQKRVAELDREIRAAEEELKRLDEQIRRAEEKEISLEEEEEEEEEKKLFASSVCQALSDDEKGSPRSTLVVVGHTDAAESPRATTEKAKGRRPPPARGHGGSAAPHFMSSTVCSRQRRCAGGYHSVGNGKPRLTAVSVNRYPPPAAELSGSQNAAARASRSASVALSSGVHKLRCLRVNKSDQVNVISNSSVDSTAASAPPPRRRESCFGSRPVLQRAAAPLHLHRRRMSSLT

SEQ ID NO: 175904 - protein, 482 aa, Zea Mays
MEGTGGNKLGVVPRAIQELFSRASEDGSCAYSFSMSMLEVYLGSLRDLLAAPRQPLFRRTECKAAACSSSLSILATKGGAVEVEGLTDVSTPDLKNASQWYRRGRRARSTAWTNVNDASSRSHCLTRITIRRRMRHGGGGGVSKLWLVDLGGSERLLKTGASGLTMDEGKAINLSLSALGDVIAALRRKRPHVPYRNSKLTQILSDSLGDGSKVVMVVHVSLSEDDVGETVCSLNLAKRARSIEPNREIPQKRVAELDREIRAAEEELKRLDEQIRRAEEKEISLEEEEEEEEEKKLFASSVCQALSDDEKGSPRSTLVVVGHTDAAESPRATTEKAKGRRPPPARGHGGSAAPHFMSSTVCSRQRRCAGGYHSVGNGKPRLTAVSVNRYPPPAAELSGSQNAAARASRSASVALSSGVHKLRCLRVNKSDQVNVISNSSVDSTAASAPPPRRRESCFGSRPVLQRAAAPLHLHRRRMSSLT

SEQ ID NO: 175905 - protein, 314 aa, Zea Mays
MKKETMEGHVPLPLPLLPDGETAVGYSKDDASSPLQEEISSLRSRQRRVDRRRREALDRLVELKGSVRVFCRVRPLAHTNSLHAQSSPVTVEQERITVKQPGSRGSSALIGFSARSPRKEGTGGNKLGVVPRAIQELFSRASEDGSCAYSFSMSMLEVYLGSLRDLLAAPRQPLFRRTECKAAACSSSLSILATKGGAVEVEGLTDVSTPDLKNASQWYRRGRRARSTAWTNVNDASSRSHCLTRITIRRRMRHGGGGGVSKLWLVDLGGSERLLKTGASGLTMDEGKAINLSLSALGDVIAALRRKRPHVPYR

SEQ ID NO: 175906 - protein, 274 aa, Zea Mays
MCRNSKLTQILSDSLGDGSKVVMVVHVSLSEDDVGETVCSLNLAKRARSIEPNREIPQDLKTLKQKRVAELDREIRAAEEELKRLDEQIRRAEEKEISLEEEEEEEEEKKLFASSVCQALSDDEKGSPRSTLVVVGHTDAAESPRATTEKAKGRRPPPARGHGGSAAPHFMSSTVCSRQRRYPPPAAELSGSQNAAARASRSASVALSSGVHKLRCLRVNKSDQVNVISNSSVDSTAASAPPPRRRESCFGSRPVLQRAAAPLHLHRRRMSSLT

SEQ ID NO: 175907 - protein, 607 aa, Zea Mays
MKKETMEGHVPLPLPLLPDGETAVGYSKDDASSPLQEEISSLRSRQRRVDRRRREALDRLVELKGSVRVFCRVRPLAHTNSLHAQSSPVTVEQERITVKQPGSRGSSALIGFSARSPRKEGTGGNKLGVVPRAIQELFSRASEDGSCAYSFSMSMLEVYLGSLRDLLAAPRQPLFRRTECKAAACSSSLSILATKGGAVEVEGLTDVSTPDLKNASQWYRRGRRARSTAWTNVNDASSRSHCLTRITIRRRMRHGGGGGVSKLWLVDLGGSERLLKTGASGLTMDEGKAINLSLSALGDVIAALRRKRPHVPYRNSKLTQILSDSLGDGSKVVMVVHVSLSEDDVGETVCSLNLAKRARSIEPNREIPQDLKTLKQKRVAELDREIRAAEEELKRLDEQIRRAEEKEISLEEEEEEEEEKKLFASSVCQALSDDEKGSPRSTLVVVGHTDAAESPRATTEKAKGRRPPPARGHGGSAAPHFMSSTVCSRQRRCAGGYHSVGNGKPRLTAVSVNRYPPPAAELSGSQNAAARASRSASVALSSGVHKLRCLRVNKSDQVNVISNSSVDSTAASAPPPRRRESCFGSRPVLQRAAAPLHLHRRRMSSLT

SEQ ID NO: 175908 - protein, 489 aa, Zea Mays
MEGTGGNKLGVVPRAIQELFSRASEDGSCAYSFSMSMLEVYLGSLRDLLAAPRQPLFRRTECKAAACSSSLSILATKGGAVEVEGLTDVSTPDLKNASQWYRRGRRARSTAWTNVNDASSRSHCLTRITIRRRMRHGGGGGVSKLWLVDLGGSERLLKTGASGLTMDEGKAINLSLSALGDVIAALRRKRPHVPYRNSKLTQILSDSLGDGSKVVMVVHVSLSEDDVGETVCSLNLAKRARSIEPNREIPQDLKTLKQKRVAELDREIRAAEEELKRLDEQIRRAEEKEISLEEEEEEEEEKKLFASSVCQALSDDEKGSPRSTLVVVGHTDAAESPRATTEKAKGRRPPPARGHGGSAAPHFMSSTVCSRQRRCAGGYHSVGNGKPRLTAVSVNRYPPPAAELSGSQNAAARASRSASVALSSGVHKLRCLRVNKSDQVNVISNSSVDSTAASAPPPRRRESCFGSRPVLQRAAAPLHLHRRRMSSLT

SEQ ID NO: 175909 - protein, 226 aa, Zea Mays
MDALDIEKWKIVGQTYSPVKSIALSSTILALVLVSRAAFVFPLSFVSNLTKKTPNGKISFRQQVIVWWAGLMRGAVSIALAYNKFTRSGHTQQPSNAIMITSTISVVLFSTIVFGLLTKPLIRLLIPSRHLSREPSALSEPSSPKSFFEQLAANSPGHPDLENGISLRRPASLRFLLVSPARSVHHYWRKFDDSFMRPVFGGRGFVPFVPGSPTESSLPLLPGNEN

SEQ ID NO: 175910 - protein, 924 aa, Zea Mays
MIDMVSAVEELSGLSSKELNEMLKESDNFVLQSKAEGGGPKQTLVDMEKLVSSLPLHLIAVCLELRQGPDLTYVLRGMRFLHSLSDLASRHTRLEQVLLDDVKLSEQVMDLIFFLLSILAEQKKENNVGASPLVHASLVAASLHLLTSYFSSQWHELVHILLAHPKVDIFVDVAFDSLHEDVRLLNIRLSSMDFGIFPVGSLESRLAHFICQQCEASLQFLLLLCQQKLFRDRILRNKELSRNGGILSLSHTILKLAVPECLKQSTDLVASISRLKAKILSILLQLCEAESVSYLDEVATNSNSMRLGQTLALEVLNLLKIAFGKKKYITSDSHDKVKIYPMGSMLISALRLVDVFSDDSNFRSSFLTNTVPFLTQILATPHGEFVSSWCSVNLPAIEEDASLDYDPFVASEVALLASNNVLTEAKADYSCPFRPSLPSVAYAQTRTSCVVKIIANLHVFIPNICEEQERDLFLQNFQKYLVSGSSKLSADQPASSDFDATKVCRNLGSLSDYAKTLVPNLLNGEDLLLLSDFSDKLQSWCKSQVAVKVVQNDIPPESMEDMHPMQQPLPTRASTPDSKMNNFPKNMEVSAPIPPINREGNDKDETPKNTVSRNGGFLQNAVGQDLVHLGVARTASGGSSAVTSVVSTGHQRSKMDLDPASGSVDNFKTPELTKENGLQGDDKGESSVYDERQPKRRKRNIMNSEQIDELEKALVDEPEMHRNPVLLQGWSEKLSLQGPEITSSQLKNWLNNRKAKLARIAKERGTFEGDNADKPSTPHPGESSESAGEDNYIPPARVMTAPSKGRLVSPDGNEKTSQAELSPNTMLIRPFTRSFSLEPGRLVSLVDSDGKEVGRGKIFQAPGKSPAPVESRICTVDVTELRTEKWRELPHPSEASGRTFQEAEARNGGIMRVSWDSGRLLPVV

SEQ ID NO: 175911 - protein, 743 aa, Zea Mays
MIDMVSAVEELSGLSSKELNEMLKESDNFVLQSKAEGGGPKQTLVDMEKLVSSLPLHLIAVCLELRQGPDLTYVLRGMRFLHSLSDLASRHTRLEQVLLDDVKLSEQVMDLIFFLLSILAEQKKENNVGASPLVHASLVAASLHLLTSYFSSQWHELVHILLAHPKVDIFVDVAFDSLHEDVRLLNIRLSSMDFGIFPVGSLESRLAHFICQQCEASLQFLLLLCQQKLFRDRILRNKELSRNGGILSLSHTILKLAVPECLKQSTDLVASISRLKAKILSILLQLCEAESVSYLDEVATNSNSMRLGQTLALEVLNLLKIAFGKKKYITSDSHDKVKIYPMGSMLISALRLVDVFSDDSNFRSSFLTNTVPFLTQILATPHGEFVSSWCSVNLPAIEEDASLDYDPFVASEVALLASNNVLTEAKADYSCPFRPSLPSVAYAQTRTSCVVKIIANLHVFIPNICEEQERDLFLQNFQKYLVSGSSKLSADQPASSDFDATKVCRNLGSLSDYAKTLVPNLLNGEDLLLLSDFSDKLQSWCKSQVAVKVVQNDIPPESMEDMHPMQQPLPTRASTPDSKMNNFPKNMEVSAPIPPINREGNDKDETPKNTVSRNGGFLQNAVGQDLVHLGVARTASGGSSAVTSVVSTGHQRSKMDLDPASGSVDNFKTPELTKENGLQGDDKGESSVYDERQPKRRKRNIMNSEQIDELEKALVDEPEMHRNPVLLQGWSEKLSLQAEQSES

SEQ ID NO: 175912 - protein, 875 aa, Zea Mays
MIDMVSAVEELSGLSSKELNEMLKESDNFVLQSKAEGGGPKQTLVDMEKLVSSLPLHLIAVCLELRQGPDLTYVLRGMRFLHSLSDLASRHTRLEQVLLDDVKLSEQVMDLIFFLLSILAEQKKENNVGASPLVHASLVAASLHLLTSYFSSQWHELVHILLAHPKVDIFVDVAFDSLHEDVRLLNIRLSSMDFGIFPVGSLESRLAHFICQQCEASLQFLLLLCQQKLFRDRILRNKELSRNGGILSLSHTILKLAVPECLKQSTDLVASISRLKAKILSILLQLCEAESVSYLDEVATNSNSMRLGQTLALEVLNLLKIAFGKKKYITSDSHDKVKIYPMGSMLISALRLVDVFSDDSNFRSSFLTNTVPFLTQILATPHGEFVSSWCSVNLPAIEEDASLDYDPFVASEVALLASNNVLTEAKADYSCPFRPSLPSVAYAQTRTSCVVKIIANLHVFIPNICEEQERDLFLQNFQKYLVSGSSKLSADQPASSDFDATKVCRNLGSLSDYAKTLVPNLLNGEDLLLLSDFSDKLQSWCKSQVAVKVVQNDIPPESMEDMHPMQQPLPTRASTPDSKMNNFPKDVQNMEVSAPIPPINREGNDKDETPKNTVSRNGGFLQNAVGQDLVHLGVARTASGGSSAVTSVVSTGHQRSKMDLDPASGSVDNFKTPELTKENGLQGDDKGESSVYDERQPKRRKRNIMNSEQIDELEKALVDEPEMHRNPVLLQGWSEKLSLQGPEITSSQLKNWLNNRKAKLARIAKERGTFEGDNADKPSTPHPGESSESAGEDNYIPPARVMTAPSKGRLLTATGRRLAGARYSKRQGRAQPQWRAASARLMSPSSGPRSGGSSHTLLRHLGGPSRRRRRGMVES

SEQ ID NO: 175913 - protein, 881 aa, Zea Mays
MEKLVSSLPLHLIAVCLELRQGPDLTYVLRGMRFLHSLSDLASRHTRLEQVLLDDVKLSEQVMDLIFFLLSILAEQKKENNVGASPLVHASLVAASLHLLTSYFSSQWHELVHILLAHPKVDIFVDVAFDSLHEDVRLLNIRLSSMDFGIFPVGSLESRLAHFICQQCEASLQFLLLLCQQKLFRDRILRNKELSRNGGILSLSHTILKLAVPECLKQSTDLVASISRLKAKILSILLQLCEAESVSYLDEVATNSNSMRLGQTLALEVLNLLKIAFGKKKYITSDSHDKVKIYPMGSMLISALRLVDVFSDDSNFRSSFLTNTVPFLTQILATPHGEFVSSWCSVNLPAIEEDASLDYDPFVASEVALLASNNVLTEAKADYSCPFRPSLPSVAYAQTRTSCVVKIIANLHVFIPNICEEQERDLFLQNFQKYLVSGSSKLSADQPASSDFDATKVCRNLGSLSDYAKTLVPNLLNGEDLLLLSDFSDKLQSWCKSQVAVKVVQNDIPPESMEDMHPMQQPLPTRASTPDSKMNNFPKDVQNMEVSAPIPPINREGNDKDETPKNTVSRNGGFLQNAVGQDLVHLGVARTASGGSSAVTSVVSTGHQRSKMDLDPASGSVDNFKTPELTKENGLQGDDKGESSVYDERQPKRRKRNIMNSEQIDELEKALVDEPEMHRNPVLLQGWSEKLSLQGPEITSSQLKNWLNNRKAKLARIAKERGTFEGDNADKPSTPHPGESSESAGEDNYIPPARVMTAPSKGRLVSPDGNEKTSQAELSPNTMLIRPFTRSFSLEPGRLVSLVDSDGKEVGRGKIFQAPGKSPAPVESRICTVDVTELRTEKWRELPHPSEASGRTFQEAEARNGGIMRVSWDSGRLLPVV

SEQ ID NO: 175914 - protein, 730 aa, Zea Mays
MDFGIFPVGSLESRLAHFICQQCEASLQFLLLLCQQKLFRDRILRNKELSRNGGILSLSHTILKLAVPECLKQSTDLVASISRLKAKILSILLQLCEAESVSYLDEVATNSNSMRLGQTLALEIAFGKKKYITSDSHDKVKIYPMGSMLISALRLVDVFSDDSNFRSSFLTNTVPFLTQILATPHGEFVSSWCSVNLPAIEEDASLDYDPFVASEVALLASNNVLTEAKADYSCPFRPSLPSVAYAQTRTSCVVKIIANLHVFIPNICEEQERDLFLQNFQKYLVSGSSKLSADQPASSDFDATKVCRNLGSLSDYAKTLVPNLLNGEDLLLLSDFSDKLQSWCKSQVAVKVVQNDIPPESMEDMHPMQQPLPTRASTPDSKMNNFPKDVQNMEVSAPIPPINREGNDKDETPKNTVSRNGGFLQNAVGQDLVHLGVARTASGGSSAVTSVVSTGHQRSKMDLDPASGSVDNFKTPELTKENGLQGDDKGESSVYDERQPKRRKRNIMNSEQIDELEKALVDEPEMHRNPVLLQGWSEKLSLQGPEITSSQLKNWLNNRKAKLARIAKERGTFEGDNADKPSTPHPGESSESAGEDNYIPPARVMTAPSKGRLVSPDGNEKTSQAELSPNTMLIRPFTRSFSLEPGRLVSLVDSDGKEVGRGKIFQAPGKSPAPVESRICTVDVTELRTEKWRELPHPSEASGRTFQEAEARNGGIMRVSWDSGRLLPVV

SEQ ID NO: 175915 - protein, 824 aa, Zea Mays
MEKLVSSLPLHLIAVCLELRQGPDLTYVLRGMRFLHSLSDLASRHTRLEQVLLDDVKLSEQVMDLIFFLLSILAEQKKENNVGASPLVHASLVAASLHLLTSYFSSQWHELVHILLAHPKVDIFVDVAFDSLHEDELSRNGGILSLSHTILKLAVPECLKQSTDLVASISRLKAKILSILLQLCEAESVSYLDEVATNSNSMRLGQTLALEVLNLLKIAFGKKKYITSDSHDKVKIYPMGSMLISALRLVDVFSDDSNFRSSFLTNTVPFLTQILATPHGEFVSSWCSVNLPAIEEDASLDYDPFVASEVALLASNNVLTEAKADYSCPFRPSLPSVAYAQTRTSCVVKIIANLHVFIPNICEEQERDLFLQNFQKYLVSGSSKLSADQPASSDFDATKVCRNLGSLSDYAKTLVPNLLNGEDLLLLSDFSDKLQSWCKSQVAVKVVQNDIPPESMEDMHPMQQPLPTRASTPDSKMNNFPKDVQNMEVSAPIPPINREGNDKDETPKNTVSRNGGFLQNAVGQDLVHLGVARTASGGSSAVTSVVSTGHQRSKMDLDPASGSVDNFKTPELTKENGLQGDDKGESSVYDERQPKRRKRNIMNSEQIDELEKALVDEPEMHRNPVLLQGWSEKLSLQGPEITSSQLKNWLNNRKAKLARIAKERGTFEGDNADKPSTPHPGESSESAGEDNYIPPARVMTAPSKGRLVSPDGNEKTSQAELSPNTMLIRPFTRSFSLEPGRLVSLVDSDGKEVGRGKIFQAPGKSPAPVESRICTVDVTELRTEKWRELPHPSEASGRTFQEAEARNGGIMRVSWDSGRLLPVV

SEQ ID NO: 175916 - protein, 545 aa, Zea Mays
MGPPLVIFFGLMIDMVSAVEELSGLSSKELNEMLKESDNFVLQSKAEGGGPKQTLVDMEKLVSSLPLHLIAVCLELRQGPDLTYVLRGMRFLHSLSDLASRHTRLEQVLLDDVKLSEQVMDLIFFLLSILAEQKKENNVGASPLVHASLVAASLHLLTSYFSSQWHELVHILLAHPKVDIFVDVAFDSLHEDELSRNGGILSLSHTILKLAVPECLKQSTDLVASISRLKAKILSILLQLCEAESVSYLDEVATNSNSMRLGQTLALEVLNLLKIAFGKKKYITSDSHDKVKIYPMGSMLISALRLVDVFSDDSNFRSSFLTNTVPFLTQILATPHGEFVSSWCSVNLPAIEEDASLDYDPFVASEVALLASNNVLTEAKADYSCPFRPSLPSVAYAQTRTSCVVKIIANLHVFIPNICEEQERDLFLQNFQKYLVSGSSKLSADQPASSDFDATKVCRNLGSLSDYAKTLVPNLLNGEDLLLLSDFSDKLQSWCKSQVAVKVVQNDIPPESMEDMHPMQQPLPTRASTPDSKMNNFPKAEQSES

SEQ ID NO: 175917 - protein, 602 aa, Zea Mays
MGPPLVIFFGLMIDMVSAVEELSGLSSKELNEMLKESDNFVLQSKAEGGGPKQTLVDMEKLVSSLPLHLIAVCLELRQGPDLTYVLRGMRFLHSLSDLASRHTRLEQVLLDDVKLSEQVMDLIFFLLSILAEQKKENNVGASPLVHASLVAASLHLLTSYFSSQWHELVHILLAHPKVDIFVDVAFDSLHEDVRLLNIRLSSMDFGIFPVGSLESRLAHFICQQCEASLQFLLLLCQQKLFRDRILRNKELSRNGGILSLSHTILKLAVPECLKQSTDLVASISRLKAKILSILLQLCEAESVSYLDEVATNSNSMRLGQTLALEVLNLLKIAFGKKKYITSDSHDKVKIYPMGSMLISALRLVDVFSDDSNFRSSFLTNTVPFLTQILATPHGEFVSSWCSVNLPAIEEDASLDYDPFVASEVALLASNNVLTEAKADYSCPFRPSLPSVAYAQTRTSCVVKIIANLHVFIPNICEEQERDLFLQNFQKYLVSGSSKLSADQPASSDFDATKVCRNLGSLSDYAKTLVPNLLNGEDLLLLSDFSDKLQSWCKSQVAVKVVQNDIPPESMEDMHPMQQPLPTRASTPDSKMNNFPKAEQSES

SEQ ID NO: 175918 - protein, 938 aa, Zea Mays
MGPPLVIFFGLMIDMVSAVEELSGLSSKELNEMLKESDNFVLQSKAEGGGPKQTLVDMEKLVSSLPLHLIAVCLELRQGPDLTYVLRGMRFLHSLSDLASRHTRLEQVLLDDVKLSEQVMDLIFFLLSILAEQKKENNVGASPLVHASLVAASLHLLTSYFSSQWHELVHILLAHPKVDIFVDVAFDSLHEDVRLLNIRLSSMDFGIFPVGSLESRLAHFICQQCEASLQFLLLLCQQKLFRDRILRNKELSRNGGILSLSHTILKLAVPECLKQSTDLVASISRLKAKILSILLQLCEAESVSYLDEVATNSNSMRLGQTLALEVLNLLKIAFGKKKYITSDSHDKVKIYPMGSMLISALRLVDVFSDDSNFRSSFLTNTVPFLTQILATPHGEFVSSWCSVNLPAIEEDASLDYDPFVASEVALLASNNVLTEAKADYSCPFRPSLPSVAYAQTRTSCVVKIIANLHVFIPNICEEQERDLFLQNFQKYLVSGSSKLSADQPASSDFDATKVCRNLGSLSDYAKTLVPNLLNGEDLLLLSDFSDKLQSWCKSQVAVKVVQNDIPPESMEDMHPMQQPLPTRASTPDSKMNNFPKDVQNMEVSAPIPPINREGNDKDETPKNTVSRNGGFLQNAVGQDLVHLGVARTASGGSSAVTSVVSTGHQRSKMDLDPASGSVDNFKTPELTKENGLQGDDKGESSVYDERQPKRRKRNIMNSEQIDELEKALVDEPEMHRNPVLLQGWSEKLSLQGPEITSSQLKNWLNNRKAKLARIAKERGTFEGDNADKPSTPHPGESSESAGEDNYIPPARVMTAPSKGRLVSPDGNEKTSQAELSPNTMLIRPFTRSFSLEPGRLVSLVDSDGKEVGRGKIFQAPGKSPAPVESRICTVDVTELRTEKWRELPHPSEASGRTFQEAEARNGGIMRVSWDSGRLLPVV

SEQ ID NO: 175919 - protein, 878 aa, Zea Mays
MGPPLVIFFGLMIDMVSAVEELSGLSSKELNEMLKESDNFVLQSKAEGGGPKQTLVDMEKLVSSLPLHLIAVCLELRQGPDLTYVLRGMRFLHSLSDLASRHTRLEQVLLDDVKLSEQVMDLIFFLLSILAEQKKENNVGASPLVHASLVAASLHLLTSYFSSQWHELVHILLAHPKVDIFVDVAFDSLHEDELSRNGGILSLSHTILKLAVPECLKQSTDLVASISRLKAKILSILLQLCEAESVSYLDEVATNSNSMRLGQTLALEVLNLLKIAFGKKKYITSDSHDKVKIYPMGSMLISALRLVDVFSDDSNFRSSFLTNTVPFLTQILATPHGEFVSSWCSVNLPAIEEDASLDYDPFVASEVALLASNNVLTEAKADYSCPFRPSLPSVAYAQTRTSCVVKIIANLHVFIPNICEEQERDLFLQNFQKYLVSGSSKLSADQPASSDFDATKVCRNLGSLSDYAKTLVPNLLNGEDLLLLSDFSDKLQSWCKSQVAVKVVQNDIPPESMEDMHPMQQPLPTRASTPDSKMNNFPKNMEVSAPIPPINREGNDKDETPKNTVSRNGGFLQNAVGQDLVHLGVARTASGGSSAVTSVVSTGHQRSKMDLDPASGSVDNFKTPELTKENGLQGDDKGESSVYDERQPKRRKRNIMNSEQIDELEKALVDEPEMHRNPVLLQGWSEKLSLQGPEITSSQLKNWLNNRKAKLARIAKERGTFEGDNADKPSTPHPGESSESAGEDNYIPPARVMTAPSKGRLVSPDGNEKTSQAELSPNTMLIRPFTRSFSLEPGRLVSLVDSDGKEVGRGKIFQAPGKSPAPVESRICTVDVTELRTEKWRELPHPSEASGRTFQEAEARNGGIMRVSWDSGRLLPVV

SEQ ID NO: 175920 - protein, 757 aa, Zea Mays
MGPPLVIFFGLMIDMVSAVEELSGLSSKELNEMLKESDNFVLQSKAEGGGPKQTLVDMEKLVSSLPLHLIAVCLELRQGPDLTYVLRGMRFLHSLSDLASRHTRLEQVLLDDVKLSEQVMDLIFFLLSILAEQKKENNVGASPLVHASLVAASLHLLTSYFSSQWHELVHILLAHPKVDIFVDVAFDSLHEDVRLLNIRLSSMDFGIFPVGSLESRLAHFICQQCEASLQFLLLLCQQKLFRDRILRNKELSRNGGILSLSHTILKLAVPECLKQSTDLVASISRLKAKILSILLQLCEAESVSYLDEVATNSNSMRLGQTLALEVLNLLKIAFGKKKYITSDSHDKVKIYPMGSMLISALRLVDVFSDDSNFRSSFLTNTVPFLTQILATPHGEFVSSWCSVNLPAIEEDASLDYDPFVASEVALLASNNVLTEAKADYSCPFRPSLPSVAYAQTRTSCVVKIIANLHVFIPNICEEQERDLFLQNFQKYLVSGSSKLSADQPASSDFDATKVCRNLGSLSDYAKTLVPNLLNGEDLLLLSDFSDKLQSWCKSQVAVKVVQNDIPPESMEDMHPMQQPLPTRASTPDSKMNNFPKDVQNMEVSAPIPPINREGNDKDETPKNTVSRNGGFLQNAVGQDLVHLGVARTASGGSSAVTSVVSTGHQRSKMDLDPASGSVDNFKTPELTKENGLQGDDKGESSVYDERQPKRRKRNIMNSEQIDELEKALVDEPEMHRNPVLLQGWSEKLSLQAEQSES

SEQ ID NO: 175921 - protein, 74 aa, Zea Mays
MLFFFNLRSTNRQLCPALLNITRNIIRVQTICHHTPNYSRDRAIEKRVIHRFHMFTKAARSIPIPIPSYQIIFG

SEQ ID NO: 175922 - protein, 323 aa, Zea Mays
MAPTAHHQAARDDELEKSRRKPGGGGKAAAVRCHPVLAEERKASIRGVVGDLLAMAGGGRRSLISLGVGDASSHACFRRGGEFAAEAVAHAALSGAFDCYAPSFGFPDARRAVAAHLSTGAVHRTHEADVFMTAGGTGAITAIATVLGGAPGANVLLPRPGFAPYEAACEVAGAEPRFYDLLPRRGWEADLAGVRALADAATAALVVINPNNPCGAVYSAHHLRQLAETARELGIPIVADEVYAHMVFGGSRFVPMASLAHIAPVVSIGALSKRFMLPGWRLGWLAFCDPNGALKHGCDRDAAQRDFWPCLHSPGGGSQDPFS

SEQ ID NO: 175923 - protein, 1499 aa, Zea Mays
MVVSTLCSRLPLLPNIIVLLLFTTISDSTNSNSDLNALLSFKSLITKDPMGALSSWDGDASNRSAPHFCRWNGVTCSSDQHGSHVTALRLRAFGLEGNISQSLGNLSHLQTLDLSNNNLEGEIPSSIGNLFALHFLNLSVNHLSGNVPQSIGRLSELEILNFRDNDIVGSIPSSVLNLTGLTMLSATENYMTGRIPDWLGNLTDLTDLNLAWNNFSGQIPQALGKLPNLARLTMQGNQLEGLISPTLFNISSLENLNLGYNKLSGSLPPDIGFTLPNIVAFSVCYNKFEGPVPSSLSNISVLQQLILHGNRFHGRIPPNIGVHGSLTNLELGNNQLQVVDTKDWDFLTPLVNCSHLKYLNLELNNISGILPNAVSNLSYELEALLMGGNQITGTVPSGIGRLQKLQILDLSDNLFTGAVPSSIGKLSSLDSLVLFSNKFDGEIPSSLGNLTKLTELVLHSNDLHGSMPPSLGNMTILESIDLSYNRLSGQIPQEILSMYSLTKFLNLSNNFFSGPISQQIRLLISLGTMDLSSNNLSGLMHFPDVIQQFERTCRNASESIRSAATGKLRVVEEKLMQQNAQLLLDEAASWSLWHIYGKEHEELSGELLVPPITSHQEACRFVAADITAQLCLRIILWLEGLASEALDLEKKVRGPHVGSYLPSSGVWHRTQRYLKRNNADSTIVKHVDFDAPTREGAQLLPDDKTCSPLPTHWAAALCPCIGSGALHRWMFLPNIVTGNDAITAGILLDIKPVQAVQHPQRWWNWVRQLVPHEEQQPQPREWRKKQDELLLEDIWTLLRAGRLEEASDLCRSAGQAWRVATLCPFGGINMFPSLNALHKNGKYRTLQAMELESGVGRQWRLWKWASYCASEKIAEQDGGRYEMAVYALQCSNLKRVLPICTDWESACWAMARSWLDVQVDLELSQYQTSRPEKQLDDDMNGAQSSVGPESWPYHVLDQQPHDLTALLQKLHSSDLVHETVSRACREQHRQIQMNLMSGNISHLLDLLWSWLSPAEENHNNTARPLDDPEMIRFGAHIVLVLRHLFSDGMDDELDEKLVTVGDLIINMYVRYLFSEDQEELVGIYASQLQHDLCITLFVEMMELRLNSSLHTMYKLFLSAVEYLPFSSDNVSKACFEEIIERVLSRSRQTKPTKYDGDFSDVAHQHHLQSLQKAMVIQWLCFTPPSSIPDFQMISWKLLIRALTHSNTLFREFSLISMRRVPELPAGPHKLLAILAEPLKQKENLISREDPEHEYYSLDATYRSWLKIEMMNAAVSPEMLSAEEKGQAVAAAKETLNLACSLLRNATSCTALTSALYSTVSEDDVLHRLLKVDVQVSSRDPCCIEVALRCLAAEGDGYGLHEANDGGLLAAVMAAGFKGELSRFQPGVSMAISRLDAWYSDRSGSVESTAAYIIRGLCRRCCLPETILRSMQACIALSAAGDDLDYSLDKCDELVELVGSAESGMMHLFSQQQLQEFLIFEREYLICTMEFEEDRLPCDG

SEQ ID NO: 175924 - protein, 491 aa, Zea Mays
MPATASGGARPEEEEEEVSPAPSPSTSASACMGTRAEELTARLAATGPRPGAGRGAAAAGGEEVEHERVRALREIKNQIIGNRTKKLLYLRLGAVPSVVAALAEPGASPAALVQAAAAAGSFACGVDDGARAVLAAGAVGHLTRLLAHPDEKVVDASARALRMIYQSRLAPKFDVNSGENVDFVLSLLDSENENVTELAAAIVSHSCESSAEQLSLCSAGVPQKLVSLFGCSMNLRDACLGSIIAVIQNNQDVASRFASTDHGKGFRSVVGLIHDRSPRTRLLACLCLIALGHASPDHFQDNQIKTKLIMVLLELIEEPGHVGDEAPLALTTLIKDSFELQRQALTTNAVEKLSSHLLANPLGTRRAVTILLALSELCSKLEESRSQLMSVEVSTLLLEALKHDWADIRVAACSCLKNISRSPKILSGGRLSCDTVIGPLVQLLNDSSTSVQEISSSSLRGCLTTCSFVKVHGSNVEAKICMCSQEYYVPS

SEQ ID NO: 175925 - protein, 483 aa, Zea Mays
MPATASGGARPEEEEEEVSPAPSPSTSASACMGTRAEELTARLAATGPRPGAGRGAAAAGGEEVEHERVRALREIKNQIIGNRTKKLLYLRLGAVPSVVAALAEPGASPAALVQAAAAAGSFACGVDDGARAVLAAGAVGHLTRLLAHPDEKVVDASARALRMIYQSRLAPKFDVNSGENVDFVLSLLDSENENVTELAAAIVSHSCESSAEQLSLCSAGVPQKLVSLFGCSMNLRDACLGSIIAVIQNNQDVASRFASTDHGKGFRSVVGLIHDRSPRTRLLACLCLIALGHASPDHFQDNQIKTKLIMVLLELIEEPGHVGDEAPLALTTLIKDSFELQRQALTTNAVEKLSSHLLANPLGTRRAVTILLALSELCSKLEESRSQLMSVEVSTLLLEALKHDWADIRVAACSCLKNISRSPKILSGGRLSCDTVIGPLVQLLNDSSTSVQVAALGAICNIAINLTPRKSVLLHSGEYYVPS

SEQ ID NO: 175926 - protein, 442 aa, Zea Mays
MPATASGGARPEEEEEEVSPAPSPSTSASACMGTRAEELTARLAATGPRPGAGRGAAAAGGEEVEHERVRALREIKNQIIGNRTKKLLYLRLGAVPSVVAALAEPGASPAALVQAAAAAGSFACGVDDGARAVLAAGAVGHLTRLLAHPDEKVVDASARALRMIYQSRLAPKFDVNSGENVDFVLSLLDSENENVTELAAAIVSHSCESSAEQLSLCSAGVPQKLVSLFGCSMNLRDACLGSIIAVIQNNQDVASRFASTDHGKGFRSVVGLIHDRSPRTRLLACLCLIALGHASPDHFQDNQIKTKLIMVLLELIEEPGHVGDEAPLALTTLIKDSFELQRQALTTNAVEKLSSHLLANPLGTRRAVTILLALSELCSKLEESRSQLMSVEVSTLLLEALKHDWADIRVAACSCLKNISRSPKWRSIILRYSYRSPGPAFK

SEQ ID NO: 175927 - protein, 179 aa, Zea Mays
MFLLSPKDKDFIVKELTLSTLSSLICDSEHFVQEQTLALVHNLVDGYVVSANYVIGEDGMVMDAIARQLNNASAPGVCIQGMYVLANIAAGNEWNKEAVMNVLLPHRADRIKPSFAVNFLKSKDRQLRVATLWCVLNLIYPKCEASSGRAVRLQSAGVILQVKRMINDPCLDCKSSYGA

SEQ ID NO: 175928 - protein, 333 aa, Zea Mays
MAIPLVLVVLPLGLLFLLSGLIVNTIQVQLHADEETYRSMGKEHALVISNHRSDIDWLIGWILAQRSGCLGSTLAVMKKSSKFLPVIGWSMWFAEYLFLERSWAKDEKTLKWGLQRLKDFPRPFWLALFVEGTRFTPAKLLAAQEYAASQGLPAPRNVLIPRTKGFVSAVSIMRDFVPAIYDTTVIVPKDSPQPTMLRILKGQSSVIHVRMKRHAMSEMPKSDDDVSKWCKDIFVAKDALLDKHLATGTFDEEIRPIGRPVKSLLVTLFWSCLLLFGAIEFFKWTQLLSTWRGVAFTAAGMALVTGLMHVFIMFSQAERSSSAKAARNRVKKE

SEQ ID NO: 175929 - protein, 278 aa, Zea Mays
MRMRKLTDQWRSGCLGSTLAVMKKSSKFLPVIGWSMWFAEYLFLERSWAKDEKTLKWGLQRLKDFPRPFWLALFVEGTRFTPAKLLAAQEYAASQGLPAPRNVLIPRTKGFVSAVSIMRDFVPAIYDTTVIVPKDSPQPTMLRILKGQSSVIHVRMKRHAMSEMPKSDDDVSKWCKDIFVAKDALLDKHLATGTFDEEIRPIGRPVKSLLVTLFWSCLLLFGAIEFFKWTQLLSTWRGVAFTAAGMALVTGLMHVFIMFSQAERSSSAKAARNRVKKE

SEQ ID NO: 175930 - protein, 243 aa, Zea Mays
MWFAEYLFLERSWAKDEKTLKWGLQRLKDFPRPFWLALFVEGTRFTPAKLLAAQEYAASQGLPAPRNVLIPRTKGFVSAVSIMRDFVPAIYDTTVIVPKDSPQPTMLRILKGQSSVIHVRMKRHAMSEMPKSDDDVSKWCKDIFVAKDALLDKHLATGTFDEEIRPIGRPVKSLLVTLFWSCLLLFGAIEFFKWTQLLSTWRGVAFTAAGMALVTGLMHVFIMFSQAERSSSAKAARNRVKKE

SEQ ID NO: 175931 - protein, 110 aa, Zea Mays
MSRGRSPEPLDFFIWTVQDVGLWLEEINLGSYRQAFEENGVNGEYLESLSVFTTEQILRFIRRCHMKWGDFITLCKELRRIKDGCCLKWPPFCLATREKRWHCWEQQSVD

SEQ ID NO: 175932 - protein, 98 aa, Zea Mays
MSRGRSPEPLDFFIWTVQDVGLWLEEINLGSYRQAFEENGVNGEYLESLSVFTTEQILRFIRRCHMKWGDFITLCKELRRIKATREKRWHCWEQQSVD

SEQ ID NO: 175933 - protein, 66 aa, Zea Mays
MCLSVLERCSRVTVVVCCQACVCFSLICLFSSRIARGCGFEFEMVRCCNVDDEYTYALRVVQMAAV

SEQ ID NO: 175934 - protein, 88 aa, Zea Mays
MTTSRRLADRKTAKFQKNITRRGSVPETAVKKGKGNGYAAGPVVLGFFVFVVIGSYHQDRDQWRHGLRTRPRCRAERSVCRLYMHASS

SEQ ID NO: 175935 - protein, 299 aa, Zea Mays
MTQQATRHARRVYVGGLPPTANEQTVAIFFNGVMAAIGGNTAGPGDAVLNVYINHDKKFAFVEMRSVEEASNAMALDGIMFEGAPVKVRRPTDYNPSLAAALGPSQPNPNLNLAAVGLTPGSAGGLEGPDRIFVGGLPYYFTEAQVRELLESFGPLRGFDLVKDRETGNSKGYAFCVYQDLNVTDIACAALNGIKMGDKTLTVRRANQGASQPRPEQESILLQAQQQVQMQKLVYQVGGALPTKVVCLTQVVTADELRDDEEYNDIVEDMREEGRKYVPHNAIAECFIVRPYAILAIGL

SEQ ID NO: 175936 - protein, 390 aa, Zea Mays
MHFLLLLLVLSLLPGITAPIPGVGVLPNLYNLAAGQFNPLVIQPQAMTQQATRHARRVYVGGLPPTANEQTVAIFFNGVMAAIGGNTAGPGDAVLNVYINHDKKFAFVEMRSVEEASNAMALDGIMFEGAPVKVRRPTDYNPSLAAALGPSQPNPNLNLAAVGLTPGSAGGLEGPDRIFVGGLPYYFTEAQVRELLESFGPLRGFDLVKDRETGNSKGYAFCVYQDLNVTDIACAALNGIKMGDKTLTVRRANQGASQPRPEQESILLQAQQQVQMQKLVYQVGGALPTKVVCLTQVVTADELRDDEEYNDIVEDMREEGRKYGNLVKVVIPRPDPSDAPVAGVGKVFLEYADVEGSTKAKTGMHGRKFGGNQVVAVFYPEDKFAAEQYD

SEQ ID NO: 175937 - protein, 104 aa, Zea Mays
MGDKTLTVRRANQGASQPRPEQESILLQAQQQVQMQKLVYQVGGALPTKVVCLTQVVTADELRDDEEYNDIVEDMREEGRKYVPHNAIAECFIVRPYAILAIGL

SEQ ID NO: 175938 - protein, 197 aa, Zea Mays
MHAMVSTVMHFLLTNLTSPQCGLKLGVASSRNLLGPSANGRLKILHLLDLYKRVVLLSITTCTMEEQILGALLGVPSSQQAMIMMLQLMNMVGVQTSQMQMCGDDASSMTWKRYDEEVYSLAAAPLLTTTSLLEQLNVTRDNSDYLWYITSVDISSSENFLQGGGKPLSLSVQSAGHALHVFVNGQLQGSAYGTRED

SEQ ID NO: 175939 - protein, 163 aa, Zea Mays
MQEAHVFQSPSGCAAFLANYNSNSYANVVFNNEQYSLPHWSISILPDCKNVVFNSVTVGVQTSQMQMCGDDASSMTWKRYDEEVYSLAAAPLLTTTSLLEQLNVTRDNSDYLWYITSVDISSSENFLQGGGKPLSLSVQSAGHALHVFVNGQLQGSAYGTRED

SEQ ID NO: 175940 - protein, 326 aa, Zea Mays
MAMQGFTQKIVGMMKSENLFASQGVPIILSQIENEYGPEGREFRPAGQAYINKAAKMAVGLGTGVPWVMWKEEDAPDPVINACNGFYCDAFSPNKPYKPTMWTEAWSGYTMEEQILGALLGVPSSQQAMIMMLQLMNMDFLENQSTVILKNSTELLSYASRLWFLLTQQLLPLYHARAFLANYNSNSYANVVFNNEQYSLPHWSISILPDCKNVVFNSVTVGVQTSQMQMCGDDASSMTWKRYDEEVYSLAAAPLLTTTSLLEQLNVTRDNSDYLWYITSVDISSSENFLQGGGKPLSLSVQSAGHALHVFVNGQLQGSAYGTRED

SEQ ID NO: 175941 - protein, 162 aa, Zea Mays
MMQQAQTAPAPAVVDAEPRPRPPQLDIWCGERATASPQQHIISFHEAAAPAAALAKECNLELTLATGRASSSSSSDAERRQGIIKRLKAAPSNSDSGATAVSSTSTDSELAPFREVVEDVATPVRFRGEVSGRRRMDEVGQGPWLYQPQPEYGVMTMLYSTS

SEQ ID NO: 175942 - protein, 203 aa, Zea Mays
MAGLISLRAGPRSSPSLARSSSAWASPPASHVAVRLPSPLFRCAKLRRSRSLLAAALEISKDGSAAVLANSLPSQGAIETLRNADAVCFDVDSTVILDEGIDELADFCGAGKAVAEWTAKAMTGTVPFEEALAARLSLIKPSLSQVEECLEKRPPSQWHLSLAFLLKTSLQTNCYLAHWGSTPDLIPQSPLHAVGVKQKQCSK

SEQ ID NO: 175943 - protein, 141 aa, Zea Mays
MISPGMADLVKKLKSNNIDVFLVSGGFRHMIKPVAFELGIPPENITANQLLFGTLGEYAGFDPTEPTSRSGGKAKAVQQIKQDHGYKTVVMIGDGATDLEARQPGGADLFICYAGVQMREPVAAQADWVVFDFQELITKLP

SEQ ID NO: 175944 - protein, 72 aa, Zea Mays
MAGPRGHGRLRLRDRRRGGHRQGLPSELGRGYSGADAGAGRVGARRRPRRLLPAAVGRRHARLTTDGTHELS

SEQ ID NO: 175945 - protein, 507 aa, Zea Mays
MDGEQAARWAAAQEGVPVGADLVAAALRQLRFLAAVDRRRWLYDEGPLLDRAIRRYKACWLPLLDKHTKGVVVDGPLVVPLDCEWIWHCHRLNPVQYIRDCKKVYGRILNNNNVESSTQTKSTLESEKVWKELYPEEPFELLFTRTFDTAVDVNPAGAEEDITYDLVSAVKRQSSFYYQVGTPTMHDPRFLQEALARYKAFLYLIKMNQEKGLQRFRVPTYDVDLLWHTHQLHPITYRNDMVKLLGKVLEHDDTDADRSEGKKLDVGFTETTEQFESTFGVRYWKAGCMYRGNVPSPVTSTPQTFSAEVGTGSYICKAQKDLNALDVTVVELYLQIVDIKNLPSAVQKENVYVRFAKNQSDMFISDGGRLDISTVTGKNTGVCLQCEPTGELILAVMVDQLSKKPEPIGKVSFPLHDLTGPDSKLSFEKWFELKAHGGHAASPPVSLRVAASATVPSSAQKVFTMVRMEPFSLKSCLLPHSIKDQNTGSWTRFVNDCGTELIRLQIR

SEQ ID NO: 175946 - protein, 80 aa, Zea Mays
MFFLCFYSELNWSSHDHASIPNGSDSSNASASLHEHALAHQSSSATYYNKHTLSTDMILIPANFNVLLCSIIRSRVRSAL

SEQ ID NO: 175947 - protein, 266 aa, Zea Mays
MATKILSLLALLALFASATNAFIIPQCSLAPSSIITQFLPPVTSMGFEHPAVQAYRLQQAIAASVLQQPISQLQQQSLAHLTIQTIATQQQQQFLPALSHLAMVNPAAYLQQQLLASNPLALANVVANQPQQQLQQFLPALSQLAMVNPAAYLQQQQLLSSSPLAVANAPTYLQQQLLQQIVPALTQLVVANPAAYLQQLLPFNQLTMSNSAAYLQQRQQLLNPLAVANPLVAAFLQQQQLLPYNQFSLMNPALSWQQPIVGGAIF

SEQ ID NO: 175948 - protein, 80 aa, Zea Mays
MTPSENPPLTFVNCKILLTPQLPLSCHSCGSHPADPTPLTCHHYVTVISIYSLSCSLMLASIMQHHTISHTRFVPFSERI

SEQ ID NO: 175949 - protein, 401 aa, Zea Mays
MHHQQRMKQAAAAAAAAQQQQLMQQALLLQQQQQSQAQPPLFPGHHPHPGLLAAPQIEPIVSGNLPPGFDSSTCRSVYVGNIHLQVTDTVLQEVFQSIGPVEGCKLIRKEKSSFGFIDYYDRRYAALAILSLNGRQLYGQPIKVNWAYTSTPREDTSGHFNIFVGDLCPEVTDATLFAFFSGYSTCSDARVMWDQKTGRSRGFGFVSFRNQQDAQSAINDLNGKWLGNRQIRCNWATKGANAGEEKQILDTKVDLSNGSSESGKENPNEDGPENNPQFTTVYVGNLPHEATMNDVHLFFHSLGAGSIEEVRVTRDKGFGFVRYSTHEEAALAIQMGNGQLIGGRQIKVPQDHVWVQGDNIFASNDSRQFGAVPYGLITGKIFCRVWPPESFGAIDDATKQS

SEQ ID NO: 175950 - protein, 381 aa, Zea Mays
MHHQQRMKQAAAAAAAAQQQQLMQQALLLQQQQQSQAQPPLFPGHHPHPGLLAAPQIEPIVSGNLPPGFDSSTCRSVYVGNIHLQVTDTVLQEVFQSIGPVEGCKLIRKEKSSFGFIDYYDRRYAALAILSLNGRQLYGQPIKVNWAYTSTPREDTSGHFNIFVGDLCPEVTDATLFAFFSGYSTCSDARVMWDQKTGRSRGFGFVSFRNQQDAQSAINDLNGKWLGNRQIRCNWATKGANAGEEKQILDTKVDLSNGSSESGKENPNEDGPENNPQFTTVYVGNLPHEATMNDVHLFFHSLGAGSIEEVRVTRDKGFGFVRYSTHEEAALAIQMGNGQLIGGRQIKSSKHELQLLSTLSATFRSCTWTSTHLNHRLRWCL

SEQ ID NO: 175951 - protein, 420 aa, Zea Mays
MHHQQRMKQAQPPLFPGHHPHPGLLAAPQIEPIVSGNLPPGFDSSTCRSVYVGNIHLQVTDTVLQEVFQSIGPVEGCKLIRKEKSSFGFIDYYDRRYAALAILSLNGRQLYGQPIKVNWAYTSTPREDTSGHFNIFVGDLCPEVTDATLFAFFSGYSTCSDARVMWDQKTGRSRGFGFVSFRNQQDAQSAINDLNGKWLGNRQIRCNWATKGANAGEEKQILDTKVDLSNGSSESGKENPNEDGPENNPQFTTVYVGNLPHEATMNDVHLFFHSLGAGSIEEVRVTRDKGFGFVRYSTHEEAALAIQMGNGQLIGGRQIKCSWGSKPTPQGTASLPLPPPALAPFSTGVSATDLLAYQRLALSKMASNHPALMGQHSLKQVAALGIGGGASQSIYDGGFQGINTVTGTTSAQQQQQLMYY

SEQ ID NO: 175952 - protein, 337 aa, Zea Mays
MSSFGFIDYYDRRYAALAILSLNGRQLYGQPIKVNWAYTSTPREDTSGHFNIFVGDLCPEVTDATLFAFFSGYSTCSDARVMWDQKTGRSRGFGFVSFRNQQDAQSAINDLNGKWLGNRQIRCNWATKGANAGEEKQILDTKVDLSNGSSESGKENPNEDGPENNPQFTTVYVGNLPHEATMNDVHLFFHSLGAGSIEEVRVTRDKGFGFVRYSTHEEAALAIQMGNGQLIGGRQIKCSWGSKPTPQGTASLPLPPPALAPFSTGVSATDLLAYQRLALSKMASNHPALMGQHSLKQVAALGIGGGASQSIYDGGFQGINTVTGTTSAQQQQQLMYY

SEQ ID NO: 175953 - protein, 198 aa, Zea Mays
MWDQKTGRSRGFGFVSFRNQQDAQSAINDLNGKWLGNRQIRCNWATKGANAGEEKQILDTKVDLSNGSSESGKENPNEDGPENNPQFTTVYVGNLPHECSWGSKPTPQGTASLPLPPPALAPFSTGVSATDLLAYQRLALSKMASNHPALMGQHSLKQVAALGIGGGASQSIYDGGFQGINTVTGTTSAQQQQQLMYY

SEQ ID NO: 175954 - protein, 205 aa, Zea Mays
MPGFAQRLAGIPWRSIARQGLSRVFLVAKAYCVIHVVNDHLCSVTLVRGASMLPSLNLAGDAVAVDRVSVRLGRVAPGDIVLMISPEDPRKSVVKRVVGMQGDSVTYLVDPGKSDSSRTVVVPQDHVWVQGDNIFASNDSSLGGLLQPLEQTFLLYGTIKPGGTQCKQLSIVDFAEKEKKLPCFLRLKVWPPESFGAIDDATKQS

SEQ ID NO: 175955 - protein, 94 aa, Zea Mays
MTQRSSLNAEEEPRRAHGPILFARPQRFYNSQLQGGPSLSSRAFDDLPQRISTAKQRALCVLIDVPCFYSFGVTSSETRVFTTTLQLHMLIRNI

SEQ ID NO: 175956 - protein, 304 aa, Zea Mays
MATTLAMSSSSSNGHGRRHEASTTSSSSSSSTASAQKRRGESQQQAAVVPATPGPALQFLASPAHHHNHPQTQLVAPRRSVPSKWEDAEKWLRQSSSSSGSDHHLHGNARAAFSRQRSGGLGHRGGAGGGGGDEKSAAVAVRRSVDALRDAHSLALYAAPAAETSSPTMRSRPRRASCSGARAARLLNRRRAPTTTTTVAASGGGTSARRRRRWAARVTRRSRARPRRGTTRRRAGRRARWCRTPAAAAGRTSRSWRDSASPSWTWARGSAPTPRSSAGAPRRRKRTTRTCPRASGTSRPPSAG

SEQ ID NO: 175957 - protein, 397 aa, Zea Mays
MATTLAMSSSSSNGHGRRHEASTTSSSSSSSTASAQKRRGESQQQAAVVPATPGPALQFLASPAHHHNHPQTQLVAPRRSVPSKWEDAEKWLRQSSSSSGSDHHLHGNARAAFSRQRSGGLGHRGGAGGGGGDEKSAAVAVRRSVDALRDAHSLALYAAPAAEVLLKDKFTDNEEPSKESFVFRSSCCEAAEPAKGADDDDDGRCQRRRDVGTETTPLGSSCHTPLKSASPARHNTPASRSSGPLVPYAGGGGGTDISELAGFRLAKLDLGARFGAHATLVGWSSKEEEEDDEDVSKSLRHFEATVGGIACDRRGGDCRWDDDDRAKSCIRYQREEAKIQAWVNLESAKAEAQSRKLEVKLNQVQYHLWAGFFFVFIGKCHWLHSPPPLDSSFGLIW

SEQ ID NO: 175958 - protein, 460 aa, Zea Mays
MATTLAMSSSSSNGHGRRHEASTTSSSSSSSTASAQKRRGESQQQAAVVPATPGPALQFLASPAHHHNHPQTQLVAPRRSVPSKWEDAEKWLRQSSSSSGSDHHLHGNARAAFSRQRSGGLGHRGGAGGGGGDEKSAAVAVRRSVDALRDAHSLALYAAPAAEVLLKDKFTDNEEPSKESFVFRSSCCEAAEPAKGADDDDDGRCQRRRDVGTETTPLGSSCHTPLKSASPARHNTPASRSSGPLVPYAGGGGGTDISELAGFRLAKLDLGARFGAHATLVGWSSKEEEEDDEDVSKSLRHFEATVGGIACDRRGGDCRWDDDDRAKSCIRYQREEAKIQAWVNLESAKAEAQSRKLEVKIQKMRCNLEEKLMRRMTTVQRRAGEWRATARAQHLQQLRRAAAHGDGDGRRLRATATSTAHHHRHLPGSSEAPSCACFPCSTSTSGGGNNVVSGGLLSYY

SEQ ID NO: 175959 - protein, 69 aa, Zea Mays
MSWFALFNVCSCYTYWLAELKPANSASCNGKSNPFSTLGRTEQDLFKKKRGRGSVSAMADKIDDRYYLR

SEQ ID NO: 175960 - protein, 84 aa, Zea Mays
MTVAAGELEDEDGVRGRSRGPCRQSRSGSGWRSVGAARPGCSAAETSLLLPRPSRPRTRAAGAGPRTRCSWPPVRGAGTRPRRA

SEQ ID NO: 175961 - protein, 177 aa, Zea Mays
MQQQMPMPPAPAAAAAAAPPAAGITTEQIQKYLDENKQLILAILENQNLGKLAECAQYQAQLQKNLLYLAAIADAQPQPPQNPAGRPQMMQPGIVPGAGHYMSQVPMFPPRTPLTPQQMQEQQQQQQFQQQQQQVQALTFPGQMVMRPGTINGMQQAKNNALYTSNERKKESLNDSY

SEQ ID NO: 175962 - protein, 101 aa, Zea Mays
MGSDAGSQGGSESQRKSDGEQRERGRADDTRFDRRFVWSKSAETTMGMKTRRFSWRSSPCGSYHPREFWRHRVVCTVWSGGNETTRSRRCVRVSIDCRAMF

SEQ ID NO: 175963 - protein, 141 aa, Zea Mays
MFSVVEIYCLRFILAFIVNKLLFFPSFLAGRILCFSTLRQHCFPYLCSSKVQTLSSELLRPTILEEEIQVSQTPTFEDKTINELVEIDPDIFHVITLTSYFVELIHYINYNSILFIVNFFREMQPQGYRCTNRYITPHTGR

SEQ ID NO: 175964 - protein, 215 aa, Zea Mays
MFSVVEIYCLRFILAFIVNKLLFFPSFLAGRILCFSTLRQHCFPYLCSSKVQTLSSELLRPTILEEEIQVSQTPTFEDKTINELVEIDPDIFHEGRWWFPSCTKCNKSSIQTSTKYRCIRVIGQKLNLDTINMFAFSVTNRVFFVLSVLTNHGRKRSAPCTIQNYQQQELVTQDDILASQPHKTLQQHRLQSYPLLVTIKMWHVTALHILMHYMI

SEQ ID NO: 175965 - protein, 59 aa, Zea Mays
MFSVVEIYCLRFILAFIVNKLLFFPSFLAGRILCFSTLRQHCFPYLCSSKVQTLSSEKS

SEQ ID NO: 175966 - protein, 125 aa, Zea Mays
MARHLLVLSFPRHSSAPAAPLLQIHGTQHLERPCRCSSTGISSSTRRPGLSHRGCPSSISSLPTRLPRFHGRRRPSHLPGGRPRPCPSHSSPFGPAAASTQPLPWHTPHLQHRRPPTRSFLALSF

SEQ ID NO: 175967 - protein, 87 aa, Zea Mays
MGSVLTEIDTKTSIKDLTISSDEKFLAVNRSSGPCRVWDLQSSEVVASLPRETGEIFGFCRFSNKADNSHVLFITVMEGDIKAIMEK

SEQ ID NO: 175968 - protein, 738 aa, Zea Mays
MYAQNAIAVNEFLGNSWQVVMQPTAENNDTLGVQILKARGIFVGPKWYWIGVGALLGYIMIFNLLFVLFLDWLGPLRKGQTVVSEEELREKHVNRTGENVELALLGTDCQNSPSDGSGEISRADTKNKKGMVLPFTPLSITFNNIKYSVDMPQEMKDKDITEDRLLLLKGVSGAFRPGTLTALMGVSGAGKTTLLDVLAGRKTSGYIEGDIYISGYPKKQETFARIAGYCEQSDIHSPHVTVYESLLFSAWLRLPPEVDLEARKMHVEDVAELVELIPLRGALVGLPGVNGLSTEQRKRLTIAVELVANPSIIFMDEPTSGLDATAAAIVMRTVRNTVDTGRTVVCTIHQPSIDIFEAFDELFLLKWGGEEIYVGPLGHKSCHLIKYFEGLQGVKKIKDGCNPATWMLEVTTVAQEAILGCNFAEVYRNSYLYRKNKILVSELSTPPPGSKDLYFPTQYSQSFITQCMACLWKQHKSYWRNPSYTANRIFFTALIAFVFGTIFLSLGKKVGKRQDLFDALGSMYAAVLLIGVQNGLTVQPIVDVERTVFYREKAAGMYSALPYAFAQVVIEIPHIFLQTVVYGLIIYTLIGFDWTVQKFFWYMFFMYFTFMYFTFYGMMAVAMTPNSDIAALASTAFYAIWNIFAGFIIPRPRIPIWWRWYSWACPVAWTLYGLVASQFGDITDVKLEDGEIVKDFIDRFFGFTHDHLGYAATAVVGFTVLFSFMFAFSIKVFNFQIR

SEQ ID NO: 175969 - protein, 735 aa, Zea Mays
MYAQNAIAVNEFLGNSWQVDRAENNDTLGVQILKARGIFVGPKWYWIGVGALLGYIMIFNLLFVLFLDWLGPLRKGQTVVSEEELREKHVNRTGENVELALLGTDCQNSPSDGSGEISRADTKNKKGMVLPFTPLSITFNNIKYSVDMPQEMKDKDITEDRLLLLKGVSGAFRPGTLTALMGVSGAGKTTLLDVLAGRKTSGYIEGDIYISGYPKKQETFARIAGYCEQSDIHSPHVTVYESLLFSAWLRLPPEVDLEARKMHVEDVAELVELIPLRGALVGLPGVNGLSTEQRKRLTIAVELVANPSIIFMDEPTSGLDATAAAIVMRTVRNTVDTGRTVVCTIHQPSIDIFEAFDELFLLKWGGEEIYVGPLGHKSCHLIKYFEGLQGVKKIKDGCNPATWMLEVTTVAQEAILGCNFAEVYRNSYLYRKNKILVSELSTPPPGSKDLYFPTQYSQSFITQCMACLWKQHKSYWRNPSYTANRIFFTALIAFVFGTIFLSLGKKVGKRQDLFDALGSMYAAVLLIGVQNGLTVQPIVDVERTVFYREKAAGMYSALPYAFAQVVIEIPHIFLQTVVYGLIIYTLIGFDWTVQKFFWYMFFMYFTFMYFTFYGMMAVAMTPNSDIAALASTAFYAIWNIFAGFIIPRPRIPIWWRWYSWACPVAWTLYGLVASQFGDITDVKLEDGEIVKDFIDRFFGFTHDHLGYAATAVVGFTVLFSFMFAFSIKVFNFQIR

SEQ ID NO: 175970 - protein, 112 aa, Zea Mays
MNIRHHNIVLFVGYCAETQEVVVRQEGKHIFAEKRERLLCFEYLHNGSLHKHLTGICLGLHYLHDKNIIHLDLKPDNILLDDDMVPKITDFGLSRLLGNGKSHTITQTRIGT

SEQ ID NO: 175971 - protein, 323 aa, Zea Mays
MNIRHHNIVLFVGYCAETQEVVVRQEGKHIFAEKRERLLCFEYLHNGSLHKHLTAEPCGLPWHICYQIIKGICLGLHYLHDKNIIHLDLKPDNILLDDDMVPKITDFGLSRLLGNGKSHTITQTRIGTWGYMAPEYLDDGVITMKTDIYSLGVIIRHMVKGRNSADTTDEEVLANWLIRLEKDPSQMMRQQTTRLLFETEYKEQIKACMDISWRCTLRKPMDRPTTQHILLTLEETEAKIKSVVGPTPPNAGQLQIAKFGPWGGDGGKTRDIRMTPCHLHSVTISSGTIIDSIGFSFTDHYGQHHTTGPWGGKEGTNKVSIKE

SEQ ID NO: 175972 - protein, 758 aa, Zea Mays
MNIRHHNIVLFVGYCAETQEVVVRQEGKHIFAEKRERLLCFEYLHNGSLHKHLTAEPCGLPWHICYQIIKGICLGLHYLHDKNIIHLDLKPDNILLDDDMVPKITDFGLSRLLGNGKSHTITQTRIGTWGYMAPEYLDDGVITMKTDIYSLGVIIRHMVKGRNSADTTDEEVLANWLIRLEKDPSQMMRQQTTRLLFETEYKEQIKACMDISWRCTLRKPMDRPTTQHILLTLEETEAKIKSVVGPTPPNAGQIAKFGPWGGDGGKTRDIRMTPCHLHSVTISSGTIIDSIGFSFTDHYGQHHTTGPWGGKEGTNKIELGPSEFLTGVSGTSGPFKNLTNVVTSLTFVTNTRSYGPFGKGRGTPFHIQTQNNGRIVGFFGRSGQYLYAIGVYTNQDARVARIGRPLGGDEGVLHGITDLSGQQRSRGGGPSGECGDSDDEPNGDFAKFGPWGGDGGQPQDIGTLPCRLDRIKISSGLIIDSIEFSYAGPDSQYRTAGPWGGHGGDNSSFQLAGSEFLTGVSGSIGTFNGHANVITSLTFVTNARSYGPFGRGRGTSFHIPVQGNGCIVGFFGRSGRYLNAIGVYTAPKPEPKAVGKQDGGDEAVVARIGPWGGVGNALHDIAERPHRLHRVTIFSGTIVNSLEYLYSDGDGQQHTTGPWGGCGGTGRKIHLAPEEFIVEVTGTFHPCAWDRTIPSVVSSLTLVTSTGKTHGPFGTQLGAAFQVPVQSDSRIVGFFAHGDNYIEAIGAYVKKLTESSNR

SEQ ID NO: 175973 - protein, 778 aa, Zea Mays
MNIRHHNIVLFVGYCAETQEVVVRQEGKHIFAEKRERLLCFEYLHNGSLHKHLTAEPCGLPWHICYQIIKGICLGLHYLHDKNIIHLDLKPDNILLDDDMVPKITDFGLSRLLGNGKSHTITQTRIGTWGYMAPEYLDDGVITMKTDIYSLGVIIRHMVKGRNSADTTDEEVLANWLIRLEKDPSQMMRQQTTRLLFETEYKEQIKACMDISWRCTLRKPMDRPTTQHILLTLEETEAKIKSVVGPTPPNAGQLQIAKFGPWGGDGGKTRDIRMTPCHLHSVTISSGTIIDSIGFSFTDHYGQHHTTGPWGGKEGTNKLGGLHPNTFQHSMHIQIRVASMMIELGPSEFLTGVSGTSGPFKNLTNVVTSLTFVTNTRSYGPFGKGRGTPFHIQTQNNGRIVGFFGRSGQYLYAIGVYTNQDARVARIGRPLGGDEGVLHGITDLSGQQRSRGGGPSGECGDSDDEPNGDFAKFGPWGGDGGQPQDIGTLPCRLDRIKISSGLIIDSIEFSYAGPDSQYRTAGPWGGHGGDNSSFQLAGSEFLTGVSGSIGTFNGHANVITSLTFVTNARSYGPFGRGRGTSFHIPVQGNGCIVGFFGRSGRYLNAIGVYTAPKPEPKAGGDEAVVARIGPWGGVGNALHDIAERPHRLHRVTIFSGTIVNSLEYLYSDGDGQQHTTGPWGGCGGTGRKIHLAPEEFIVEVTGTFHPCAWDRTIPSVVSSLTLVTSTGKTHGPFGTQLGAAFQVPVQSDSRIVGFFAHGDNYIEAIGAYVKKLTESSNR

SEQ ID NO: 175974 - protein, 231 aa, Zea Mays
MAASSVSLGAPDGTSTRSVSTRRRNPNQKQLGNKMCAVLIYFSYNLCLCFFLLVCSVLVLFDSNWFLLLAQGGDEAVVARIGPWGGVGNALHDIAERPHRLHRVTIFSGTIVNSLEYLYSDGDGQQHTTGPWGGCGGTGRKIHLAPEEFIVEVTGTFHPCAWDRTIPSVVSSLTLVTSTGKTHGPFGTQLGAAFQVPVQSDSRIVGFFAHGDNYIEAIGAYVKKLTESSNR

SEQ ID NO: 175975 - protein, 675 aa, Zea Mays
MNIRHHNIVLFVGYCAETQEVVVRQEGKHIFAEKRERLLCFEYLHNGSLHKHLTAEPCGLPWHICYQIIKGICLGLHYLHDKNIIHLDLKPDNILLDDDMVPKITDFGLSRLLGNGKSHTITQTRIGTWGYMAPEYLDDGVITMKTDIYSLGVIIRHMVKGRNSADTTDEEVLANWLIRLEKDPSQMMRQQTTRLLFETEYKEQIKACMDISWRCTLRKPMDRPTTQHILLTLEETEAKIKSVVGPTPPNAGQLQIAKFGPWGGDGGKTRDIRMTPCHLHSVTISSGTIIDSIGFSFTDHYGQHHTTGPWGGKEGTNKARVARIGRPLGGDEGVLHGITDLSGQQRSRGGGPSGECGDSDDEPNGDFAKFGPWGGDGGQPQDIGTLPCRLDRIKISSGLIIDSIEFSYAGPDSQYRTAGPWGGHGGDNSSFQLAGSEFLTGVSGSIGTFNGHANVITSLTFVTNARSYGPFGRGRGTSFHIPVQGNGCIVGFFGRSGRYLNAIGVYTAPKPEPKAGGDEAVVARIGPWGGVGNALHDIAERPHRLHRVTIFSGTIVNSLEYLYSDGDGQQHTTGPWGGCGGTGRKIHLAPEEFIVEVTGTFHPCAWDRTIPSVVSSLTLVTSTGKTHGPFGTQLGAAFQVPVQSDSRIVGFFAHGDNYIEAIGAYVKKLTESSNR

SEQ ID NO: 175976 - protein, 402 aa, Zea Mays
MNIRHHNIVLFVGYCAETQEVVVRQEGKHIFAEKRERLLCFEYLHNGSLHKHLTAEPCGLPWHICYQIIKGICLGLHYLHDKNIIHLDLKPDNILLDDDMVPKITDFGLSRLLGNGKSHTITQTRIGTWGYMAPEYLDDGVITMKTDIYSLGVIIRHMVKGRNSADTTDEEVLANWLIRLEKDPSQMMRQQTTRLLFETEYKEQIKACMDISWRCTLRKPMDRPTTQHILLTLEETEAKIKSVVGPTPPNAGQLQIAKFGPWGGDGGKTRDIRMTPCHLHSVTISSGTIIDSIGFSFTDHYGQHHTTGPWGGKEGTNKIELGPSEFLTGVSGTSGPFKNLTNVVTSLTFVTNTRSYGPFGKGRGTPFHIQTQNNGRIVGFFGRSGQYLYAIGVYTNQDVLQI

SEQ ID NO: 175977 - protein, 372 aa, Zea Mays
MFSFKHLLISPVHFQARVARIGRPLGGDEGVLHGITDLSGQQRSRGGGPSGECGDSDDEPNGDFAKFGPWGGDGGQPQDIGTLPCRLDRIKISSGLIIDSIEFSYAGPDSQYRTAGPWGGHGGDNSSFQLAGSEFLTGVSGSIGTFNGHANVITSLTFVTNARSYGPFGRGRGTSFHIPVQGNGCIVGFFGRSGRYLNAIGVYTAPKPEPKAGGDEAVVARIGPWGGVGNALHDIAERPHRLHRVTIFSGTIVNSLEYLYSDGDGQQHTTGPWGGCGGTGRKIHLAPEEFIVEVTGTFHPCAWDRTIPSVVSSLTLVTSTGKTHGPFGTQLGAAFQVPVQSDSRIVGFFAHGDNYIEAIGAYVKKLTESSNR

SEQ ID NO: 175978 - protein, 192 aa, Zea Mays
MAPEYLDDGVITMKTDIYSLGVIIRHMVKGRNSADTTDEEVLANWLIRLEKDPSQMMRQQTTRLLFETEYKEQIKACMDISWRCTLRKPMDRPTTQHILLTLEETEAKIKSVVGPTPPNAGQLQIAKFGPWGGDGGKTRDIRMTPCHLHSVTISSGTIIDSIGFSFTDHYGQHHTTGPWGGKEGTNKVSIKE

SEQ ID NO: 175979 - protein, 514 aa, Zea Mays
MNIRHHNIVLFVGYCAETQEVVVRQEGKHIFAEKRERLLCFEYLHNGSLHKHLTAEPCGLPWHICYQIIKGICLGLHYLHDKNIIHLDLKPDNILLDDDMVPKITDFGLSRLLGNGKSHTITQTRIGTWGYMAPEYLDDGVITMKTDIYSLGVIIRHMVKGRNSADTTDEEVLANWLIRLEKDPSQMMRQQTTRLLFETEYKEQIKACMDISWRCTLRKPMDRPTTQHILLTLEETEAKIKSVVGPTPPNAGQIAKFGPWGGDGGKTRDIRMTPCHLHSVTISSGTIIDSIGFSFTDHYGQHHTTGPWGGKEGTNKIELGPSEFLTGVSGTSGPFKNLTNVVTSLTFVTNTRSYGPFGKGRGTPFHIQTQNNGRIVGFFGRSGQYLYAIGVYTNQDARVARIGRPLGGDEGVLHGITDLSGQQRSRGGGPSGECGDSDDEPNGDFAKFGPWGGDGGQPQDIGTLPCRLDRIKISSGLIIDSIEFSYAGPDSQYRTAGPWGGHGGDNSSVSVMNI

SEQ ID NO: 175980 - protein, 725 aa, Zea Mays
MNIRHHNIVLFVGYCAETQEVVVRQEGKHIFAEKRERLLCFEYLHNGSLHKHLTDLKPDNILLDDDMVPKITDFGLSRLLGNGKSHTITQTRIGTWGYMAPEYLDDGVITMKTDIYSLGVIIRHMVKGRNSADTTDEEVLANWLIRLEKDPSQMMRQQTTRLLFETEYKEQIKACMDISWRCTLRKPMDRPTTQHILLTLEETEAKIKSVVGPTPPNAGQIAKFGPWGGDGGKTRDIRMTPCHLHSVTISSGTIIDSIGFSFTDHYGQHHTTGPWGGKEGTNKIELGPSEFLTGVSGTSGPFKNLTNVVTSLTFVTNTRSYGPFGKGRGTPFHIQTQNNGRIVGFFGRSGQYLYAIGVYTNQDARVARIGRPLGGDEGVLHGITDLSGQQRSRGGGPSGECGDSDDEPNGDFAKFGPWGGDGGQPQDIGTLPCRLDRIKISSGLIIDSIEFSYAGPDSQYRTAGPWGGHGGDNSSFQLAGSEFLTGVSGSIGTFNGHANVITSLTFVTNARSYGPFGRGRGTSFHIPVQGNGCIVGFFGRSGRYLNAIGVYTAPKPEPKAVGKQDGGDEAVVARIGPWGGVGNALHDIAERPHRLHRVTIFSGTIVNSLEYLYSDGDGQQHTTGPWGGCGGTGRKIHLAPEEFIVEVTGTFHPCAWDRTIPSVVSSLTLVTSTGKTHGPFGTQLGAAFQVPVQSDSRIVGFFAHGDNYIEAIGAYVKKLTESSNR

SEQ ID NO: 175981 - protein, 471 aa, Zea Mays
MLSLFKLGGLHPNTFQHSMHIQIRVASMMIELGPSEFLTGVSGTSGPFKNLTNVVTSLTFVTNTRSYGPFGKGRGTPFHIQTQNNGRIVGFFGRSGQYLYAIGVYTNQDARVARIGRPLGGDEGVLHGITDLSGQQRSRGGGPSGECGDSDDEPNGDFAKFGPWGGDGGQPQDIGTLPCRLDRIKISSGLIIDSIEFSYAGPDSQYRTAGPWGGHGGDNSSFQLAGSEFLTGVSGSIGTFNGHANVITSLTFVTNARSYGPFGRGRGTSFHIPVQGNGCIVGFFGRSGRYLNAIGVYTAPKPEPKAVGKQDGGDEAVVARIGPWGGVGNALHDIAERPHRLHRVTIFSGTIVNSLEYLYSDGDGQQHTTGPWGGCGGTGRKIHLAPEEFIVEVTGTFHPCAWDRTIPSVVSSLTLVTSTGKTHGPFGTQLGAAFQVPVQSDSRIVGFFAHGDNYIEAIGAYVKKLTESSNR

SEQ ID NO: 175982 - protein, 224 aa, Zea Mays
MVPKITDFGLSRLLGNGKSHTITQTRIGTWGYMAPEYLDDGVITMKTDIYSLGVIIRHMVKGRNSADTTDEEVLANWLIRLEKDPSQMMRQQTTRLLFETEYKEQIKACMDISWRCTLRKPMDRPTTQHILLTLEETEAKIKSVVGPTPPNAGQLQIAKFGPWGGDGGKTRDIRMTPCHLHSVTISSGTIIDSIGFSFTDHYGQHHTTGPWGGKEGTNKVSIKE

SEQ ID NO: 175983 - protein, 486 aa, Zea Mays
MPAGIACSCCRLPRILSSSGLTGSLSPSIAKLTTLQQLILDNNNITGGIPPEFGNLSGLTILNLGRNNLNGSIPDSLGQLSKLQNLDLSHNYLTGNIPSSFSNLLSLSDINLAYNNIRGAIPQHLLQVAQYNYAGNHLNCGQNLSACERGSTLTGGSKNFKLNVVIGSIAGAVTFSVTVVLVLLWWQRMRYRPEIFIDVSGQNDHMLEFGQIKRFSWRELQIATSNFSEQNVLGKGGFGKVYKGVLPGPNSIKIAVKRLLNVDSRDGEMAFLREVELISIAVHKNILRLIGFCTTPTERLLVYPFMENLSVASRLRDIKLNEPALDWSTRMRIALGAACGLEYLHEHCNPKIIHRDVKAANVLLDGNFEAVVGDFGLAKMVDIGRNTVTTGVRGTMGHVAPEYIKTGRPSVKTDIFGYGVMLLEIVTGERAIAFHPDRIEEAGEILLTDQVKLWMEEGRLLDLVDRNLDAGRRDCPSRAVGGVAAG

SEQ ID NO: 175984 - protein, 369 aa, Zea Mays
MRYRPEIFIDVSGQNDHMLEFGQIKRFSWRELQIATSNFSEQNVLGKGGFGKVYKGVLPGPNSIKIAVKRLLNVDSRDGEMAFLREVELISIAVHKNILRLIGFCTTPTERLLVYPFMENLSVASRLRDIKLNEPALDWSTRMRIALGAACGLEYLHEHCNPKIIHRDVKAANVLLDGNFEAVVGDFGLAKMVDIGRNTVTTGVRGTMGHVAPEYIKTGRPSVKTDIFGYGVMLLEIVTGERAIAFHPDRIEEAGEILLTDQVKLWMEEGRLLDLVDRNLGGVYNLEELEKVTQIALLCTHMDPEQRPTMSEVVQMLEGEIVPAERWEEWQLAELQRRQQHEMRQQGKLFNFSEESQNIQEAIELSAGR

SEQ ID NO: 175985 - protein, 156 aa, Zea Mays
MRIALGAACGLEYLHEHCNPKIIHRDVKAANVLLDGNFEAVVGDFGLAKMVDIGRNTVTTGVRGTMGHVAPEYIKTGRPSVKTDIFGYGVMLLEIVTGERAIAFHPDRIEEAGEILLTDQVKLWMEEGRLLDLVDRNLDAGRRDCPSRAVGGVAAG

SEQ ID NO: 175986 - protein, 88 aa, Zea Mays
MPSIFFFTNCLTTDSSFIHMCCRIQVGRISNVTSPLAVSVSVATCLHDEEGFYGYYYQYFSIMNNLLLGKSLVGHDLQCWIRCTSPAG

SEQ ID NO: 175987 - protein, 81 aa, Zea Mays
MAQEDTNSAVDKMGTSQAPRQHLSQNRASLTSKILLKAKAPRKKKTTMYPVLAAALKFHKDDDVCPAAAGVKQQQQHNKEM

SEQ ID NO: 175988 - protein, 57 aa, Zea Mays
MAQEDTNSAILLKAKAPRKKKTTMYPVLAAALKFHKDDDVCPAAAGVKQQQQHNKEM

SEQ ID NO: 175989 - protein, 140 aa, Zea Mays
MVRLGASVGEAIAAVVERYAREGRSPRLDPAAAESFQLHHSHFSLESLNKKDRIGDVGGRNFYLHKNDSSNDGLYLQGQEEPGADPSGGDISRHSSSGVGQASGGATSQHQVLTIVISKLDKIGRRTRRIWRFITCNNCA

SEQ ID NO: 175990 - protein, 120 aa, Zea Mays
MLACDRNHSGLIKLANHSGFLEIELQSLNKKDRIGDVGGRNFYLHKNDSSNDGLYLQGQEEPGADPSGGDISRHSSSGVGQASGGATSQHQVLTIVISKLDKIGRRTRRIWRFITCNNCA

SEQ ID NO: 175991 - protein, 186 aa, Zea Mays
MAQVPVIVDGRFKLFERYPTDLFSRAKIESILDWHHSNLHFGAGTFVYYTALAPFLGFRPRPETTKHAEKSLMQSLARIESVWLKGDAKFLLGRSHPSIADLILVCSIMHLEVLDDDMRNRFLGGRKRILAWIDNVKKATSPHFEEAHVFLLEVKAQMQSKAAAAATAAKQGGSEASSELKFSSKL

SEQ ID NO: 175992 - protein, 402 aa, Zea Mays
MKAPSAGRPQRGGGMGMRTAYPSALILSPTRELSMQIHEEARKFSYQTGVRVVVAYGGAPITQQLRELERGVDILVATPGRLVDLLERARVSLQSIRYLALDEADRMLDMGFEPQVRRIVEQMDMPLPGARQTMLFSATFPKEIQKMASDFLDNYIFLAVGRVGSSTDLIAQRVEFVQEADKRSHLMDLLHAQRDTGKQTLTLVFVETKRGADSLESWLCMNGFPATSIHGDRNQQEREYALRSFKSGQTPILVATDVAARGLDIPHVAHVVNFDLPNDIDDYVHRIGRTGRAGKSGLATAFFNDNNSSLARSLADLMQESNQEVPAWLLRYAARPSYGGGGGGRNRRSGGGSRFGGRDFRNDSSSFGKGGSRGGGDYYGGGSSGGYGGGGHGGAGAPSAWD

SEQ ID NO: 175993 - protein, 296 aa, Zea Mays
MLDMGFEPQVRRIVEQMDMPLPGARQTMLFSATFPKEIQKMASDFLDNYIFLAVGRVGSSTDLIAQRVEFVQEADKRSHLMDLLHAQRDTGKQTLTLVFVETKRGADSLESWLCMNGFPATSIHGDRNQQEREYALRSFKSGQTPILVATDVAARGLDIPHVAHVVNFDLPNDIDDYVHRIGRTGRAGKSGLATAFFNDNNSSLARSLADLMQESNQEVPAWLLRYAARPSYGGGGGGRNRRSGGGSRFGGRDFRNDSSSFGKGGSRGGGDYYGGGSSGGYGGGGHGGAGAPSAWD

SEQ ID NO: 175994 - protein, 61 aa, Zea Mays
MSPSLAQLERSLFESIIHVGPVLRRRRSSRKKRPSAEAVCIRWPKVPLHEASILQTDLKIE

SEQ ID NO: 175995 - protein, 65 aa, Zea Mays
MFILCCSLFYAILQRGCCRNFIYGRRKCSTVAYRVVCGTWSVTHCPFSQGVRYDDASIIFLNHVS

SEQ ID NO: 175996 - protein, 55 aa, Zea Mays
MFILCCSLFYAILQRGCCRNFIYGRRKCSTVAYRVVCGTWSVTHCPFSQGVRCSN

SEQ ID NO: 175997 - protein, 56 aa, Zea Mays
MFILCCSLFYAILQRGCCRNFIYGRRKCSTVAYRVVCGTWSVTHCPFSQGVRRCSN

SEQ ID NO: 175998 - protein, 160 aa, Zea Mays
MGAAGKPPPLVCFKWPWGPNPIPSASSSPSPCGDLELPWLFKSIRTLAQGLLIAGDIPSPASSPSGGVRGVQRRTGAAVVEVDRGDAEQRALAASLASGRPATVLEFYSPRCRLCASLQGLVRELQDGASGSASFVLADAEDDRWLPEIRPLLRAPGQAR

SEQ ID NO: 175999 - protein, 225 aa, Zea Mays
MAKRLSTPNPRTYIGSGKVSEIRTAIQALDVETVILDDELSPGQLRNLEKSFGGSVRVCDRTALILDIFNQRAATHEASLQVTLAQMEYQLPRLTKMWSHLERQAGGQVKGMGEKQIEVDKRILRTQISALRKELESVRKHRKLYRNRRQSVPIPVVSLVGYTNAGKSTLLNRLTGADVLAEDKLFATLDPTTRRVLMKNGTEFLLTDTVGFIQKLPTMLHLEQH

SEQ ID NO: 176000 - protein, 333 aa, Zea Mays
MSAAACLFAAAVSLSFPSTSAPSSARRRRLRSPTTLLRCSPTRRRGPVRRTLDERLLEAAPAETEDVQTAVDVEDGGGIAEGDEVGTEEMEELEQRPPTRAFVKSRRQRQEEEEAAAGQDRFKLINGKEIFQEKAYLVGVECKRTGGNLFGIEESLKELEQLADTAGLLVVGSTYQKLSTPNPRTYIGSGKVSEIRTAIQALDVETVILDDELSPGQLRNLEKSFGGSVRVCDRTALILDIFNQRAATHEASLQVTLAQMEYQLPRLTKMWSHLERQAGGQVKDKCLEERIGICTETPKVVPQPSPISSYSCCFSGRIYKCWKKYTPEPLNWS

SEQ ID NO: 176001 - protein, 105 aa, Zea Mays
MGIHLSPPALAFCLSAPTRFQWPLRGGARAHRGAPGARHWRRRQQHSLVVLERRRGGVAASRQAAVALRRFLERRRGGVRWHSETCVTVGGRRARHPRQIALLAI

SEQ ID NO: 176002 - protein, 102 aa, Zea Mays
MGIHLSPPALAFCLSAPTRFQWPLRGGARAHRGAPGARHWRRRQQHSLVVLERRRGGVAASRQAAVALRRFLERRRGGVRWHSETCVTVGGRRARLDSIQDK

SEQ ID NO: 176003 - protein, 152 aa, Zea Mays
MGIHLSPPALAFCLSAPTRFQWPLRGGARAHRGAPGARHWRRRQQHSLVVLERRRGGVAASRQAAVALRRFLERRRGGVRWHSETCVTVGGRRARIASKTNSVVGDLRQLVGSLGLGAREPEREGWEHVISKSSDDVSYKAWCDKPTFSAMR

SEQ ID NO: 176004 - protein, 77 aa, Zea Mays
MQMEPLFWQQLKFFSIPMTVVHQQRRRKTSQTKQKTRRTDVSMFMLPLLKCIFNIACSAPICCFNVDLKEELVVVGF

SEQ ID NO: 176005 - protein, 114 aa, Zea Mays
MENLEDDVCSFGYILLEVLMGPKLHEKGGPFILKDLVVSMSTLEERDQVVDPVIIGTCSQDSLSIVVSIMIKCLSIECSARPSMEEVLWNLQYAAQVQTMADSDQRSEVSSQAC

SEQ ID NO: 176006 - protein, 69 aa, Zea Mays
MTVSTADIPVLHSAEAAHLYPQVMLPISHGVVRAPYTSTKKAKQSNTTRPLQSSTSFRNPATVSREHNI

SEQ ID NO: 176007 - protein, 71 aa, Zea Mays
MSTAAWYSARVRIFGESMETTSSARNPSWSRRSSSLPWQTSSGRTSVLCRPGSSRSRSVSPLSPTSTATLD

SEQ ID NO: 176008 - protein, 313 aa, Zea Mays
MSDKKDVEAGTSPPAAPRVAAAAPKPSTYVPMFALRGEECANLLALVSAVSRPLEDAVVDFLARVPPERRFRFGSAISFVLEDKMMLQPAERLVAFAILHQGYSSQSANPFLPLLINVACDETSEAADQAFLQLLLSSSNGDNSEVLKQSAVDYLNGSDYASQVLLPREHLEKQCSYDAARPLPFSSNFRDATVRSVIPDPYVFQSFGSSSEVSSIIPNRDDMVATLLQQTSLGLPPQWIRPSPPRLEIFEGELQWLNIDNNHELLWDGTMCADTSRGAVIRDLFEQACKGPLSMAQRECNCWPPEALSIMCC

SEQ ID NO: 176009 - protein, 286 aa, Zea Mays
MSDKKDVEAGTSPPAAPRVAAAAPKPSTYVPMFALRGEECANLLALVSAVSRPLEDAVVDFLARVPPERRFRFGSAISFVLEVACDETSEAADQAFLQLLLSSSNGDNSEVLKQSAVDYLNGSDYASQVLLPREHLEKQCSYDAARPLPFSSNFRDATVRSVIPDPYVFQSFGSSSEVSSIIPNRDDMVATLLQQTSLGLPPQWIRPSPPRLEIFEGELQWLNIDNNHELLWDGTMCADTSRGAVIRDLFEQACKGPLSMAQREKCIVMPPMDAFLGKVYNSAIEN

SEQ ID NO: 176010 - protein, 136 aa, Zea Mays
MSDKKDVEAGTSPPAAPRVAAAAPKPSTYVPMFALRGEECANLLALVSAVSRPLEDAVVDFLARVPPERRFRFGSAISFVLEDKMMLQPAERLVAFAILHQGYSSQSANPFLPLLINVACDETSEAADQAFLQLLF

SEQ ID NO: 176011 - protein, 249 aa, Zea Mays
MDLIMHLRVSSIIPNRDDMVATLLQQTSLGLPPQWIRPSPPRLEIFEGELQWLNIDNNHELLWDGTMCADTSRGAVIRDLFEQACKGPLSMAQREKIIEYLRKDGKLLNHCGMTPQKLPDLVEHNPLIAVDVLSKLINSPDVDAYFDAIVHMDMSLHSMEVVNRLTTAVVLPPGFVHDYISNCIRSCEDIKDKYMQNRLVRLVCVFLQSLIRNKIIDVQDLFIEVQAFCIAFSRIREAVGLFRLLKSVE

SEQ ID NO: 176012 - protein, 80 aa, Zea Mays
MVATLLQQTSLGLPPQWIRPSPPRLEIFEGELQWLNIDNNHELLWDGTMCADTSRGAVIRDLFEQACKGPLSMAQRESSR

SEQ ID NO: 176013 - protein, 955 aa, Zea Mays
MPETYVDEQPKGVSRNRPPAHMNGDEEKVYPGQLPVLTWEHKLTHVRHDLPPFRLTWREIMQLAGIGLRLSRHILEETSKGRIAVIDPMKKRAARSGQGVPLGGIGAGSIGRSYKGDFQRWQLFPGSCEDNAVLANQFSAFISRQDGKKYSTVLHPGKPDLPKGSDISGIGSWDWNMSGQQSTYHALYPRAWTVYDGEPDPELNIVCRQISPIIPHNYQQSSYPVAVFTFTVTNSGHTAADVTLLFTWANSVGGKSELTGYHSNSSMIEKDGVHGILLHHRTADGQPHVTFVIAAQEKEDILISECPYFVISGSSASDEFTAKDMWNSVKEHGSFDHLDPIKTSMCSRPGSSIGAAIAASVKLAPKATQDISFSLAWACPEVKFSSGKTYHRRYTKFYGTDGDAAAALAHDAILEHASWERQIEEWQDPILQDERFPAWYPVTLFNELYYLNAGGTIWTDGLPPIQSLTAVGWKKFSLDMLNGESDDFNEMVRQNNTASDILHRMASVFERMHASIASNSAIGTTLLQGEENIGQFLYLEGIEYYMWNTYDVHFYASFSLIMLFPKLQLSVQRDFAAAVMMHDPEKLRILHDGKWAARKVLGAVPHDLGLYDPWFKVNAYTLYNTDRWKDLNPKFVLQVYRDVVATGDKSFARAVWPSVYIAMAYMEQFDKDKDGMIENEDFPDQTYDVWSMAGISAYCGGLWVAALQAASALAREVGDKASEKLFWDKYEKAKFVYSKLWNGSYFSYDDGDNKMSTSIQADQLAGQWYAKACGLFPIVDKDKAQSALEKVYSFNVMKFKGGTRGAMNGMWPDGTVDMSAMQSREIWPGVTYALAASMIQEGMVEQGFKTAEGVYHAAWSPGGLGYSFQTPEAWNNDDEYRSLCYMRPLAIWAMQWALSKPKLHNTPQADIPQDSFPKNQFAYARITKLLQLPEDESSKSFVRVVYEIIRNRFRS

SEQ ID NO: 176014 - protein, 779 aa, Zea Mays
MSGQQSTYHALYPRAWTVYDGEPDPELNIVCRQISPIIPHNYQQSSYPVAVFTFTVTNSGHTAADVTLLFTWANSVGGKSELTGYHSNSSMIEKDGVHGILLHHRTADGQPHVTFVIAAQEKEDILISECPYFVISGSSASDEFTAKDMWNSVKEHGSFDHLDPIKTSMCSRPGSSIGAAIAASVKLAPKATQDISFSLAWACPEVKFSSGKTYHRRYTKFYGTDGDAAAALAHDAILEHASWERQIEEWQDPILQDERFPAWYPVTLFNELYYLNAGGTIWTDGLPPIQSLTAVGWKKFSLDMLNGESDDFNEMVRQNNTASDILHRMASVFERMHASIASNSAIGTTLLQGEENIGQFLYLEGIEYYMWNTYDVHFYASFSLIMLFPKLQLSVQRDFAAAVMMHDPEKLRILHDGKWAARKVLGAVPHDLGLYDPWFKVNAYTLYNTDRWKDLNPKFVLQVYRDVVATGDKSFARAVWPSVYIAMAYMEQFDKDKDGMIENEDFPDQTYDVWSMAGISAYCGGLWVAALQAASALAREVGDKASEKLFWDKYEKAKFVYSKLWNGSYFSYDDGDNKMSTSIQADQLAGQWYAKACGLFPIVDKDKAQSALEKVYSFNVMKFKGGTRGAMNGMWPDGTVDMSAMQSREIWPGVTYALAASMIQEGMVEQGFKTAEGVYHAAWSPGGLGYSFQTPEAWNNDDEYRSLCYMRPLAIWAMQWALSKPKLHNTPQADIPQDSFPKNQFAYARITKLLQLPEDESSKSFVRVVYEIIRNRFRS

SEQ ID NO: 176015 - protein, 819 aa, Zea Mays
MLYWQINFLPSFPAKMVKNIPQCCILGNQICRRIGSWDWNMSGQQSTYHALYPRAWTVYDGEPDPELNIVCRQISPIIPHNYQQSSYPVAVFTFTVTNSGHTAADVTLLFTWANSVGGKSELTGYHSNSSMIEKDGVHGILLHHRTADGQPHVTFVIAAQEKEDILISECPYFVISGSSASDEFTAKDMWNSVKEHGSFDHLDPIKTSMCSRPGSSIGAAIAASVKLAPKATQDISFSLAWACPEVKFSSGKTYHRRYTKFYGTDGDAAAALAHDAILEHASWERQIEEWQDPILQDERFPAWYPVTLFNELYYLNAGGTIWTDGLPPIQSLTAVGWKKFSLDMLNGESDDFNEMVRQNNTASDILHRMASVFERMHASIASNSAIGTTLLQGEENIGQFLYLEGIEYYMWNTYDVHFYASFSLIMLFPKLQLSVQRDFAAAVMMHDPEKLRILHDGKWAARKVLGAVPHDLGLYDPWFKVNAYTLYNTDRWKDLNPKFVLQVYRDVVATGDKSFARAVWPSVYIAMAYMEQFDKDKDGMIENEDFPDQTYDVWSMAGISAYCGGLWVAALQAASALAREVGDKASEKLFWDKYEKAKFVYSKLWNGSYFSYDDGDNKMSTSIQADQLAGQWYAKACGLFPIVDKDKAQSALEKVYSFNVMKFKGGTRGAMNGMWPDGTVDMSAMQSREIWPGVTYALAASMIQEGMVEQGFKTAEGVYHAAWSPGGLGYSFQTPEAWNNDDEYRSLCYMRPLAIWAMQWALSKPKLHNTPQADIPQDSFPKNQFAYARITKLLQLPEDESSKSFVRVVYEIIRNRFRS

SEQ ID NO: 176016 - protein, 555 aa, Zea Mays
MAQTVMQQQPLLTMPFLSMLPGRDKLRSGRILFCKMRGFLLVTLFNELYYLNAGGTIWTDGLPPIQSLTAVGWKKFSLDMLNGESDDFNEMVRQNNTASDILHRMASVFERMHASIASNSAIGTTLLQGEENIGQFLYLEGIEYYMWNTYDVHFYASFSLIMLFPKLQLSVQRDFAAAVMMHDPEKLRILHDGKWAARKVLGAVPHDLGLYDPWFKVNAYTLYNTDRWKDLNPKFVLQVYRDVVATGDKSFARAVWPSVYIAMAYMEQFDKDKDGMIENEDFPDQTYDVWSMAGISAYCGGLWVAALQAASALAREVGDKASEKLFWDKYEKAKFVYSKLWNGSYFSYDDGDNKMSTSIQADQLAGQWYAKACGLFPIVDKDKAQSALEKVYSFNVMKFKGGTRGAMNGMWPDGTVDMSAMQSREIWPGVTYALAASMIQEGMVEQGFKTAEGVYHAAWSPGGLGYSFQTPEAWNNDDEYRSLCYMRPLAIWAMQWALSKPKLHNTPQADIPQDSFPKNQFAYARITKLLQLPEDESSKSFVRVVYEIIRNRFRS

SEQ ID NO: 176017 - protein, 476 aa, Zea Mays
MLNGESDDFNEMVRQNNTASDILHRMASVFERMHASIASNSAIGTTLLQGEENIGQFLYLEGIEYYMWNTYDVHFYASFSLIMLFPKLQLSVQRDFAAAVMMHDPEKLRILHDGKWAARKVLGAVPHDLGLYDPWFKVNAYTLYNTDRWKDLNPKFVLQVYRDVVATGDKSFARAVWPSVYIAMAYMEQFDKDKDGMIENEDFPDQTYDVWSMAGISAYCGGLWVAALQAASALAREVGDKASEKLFWDKYEKAKFVYSKLWNGSYFSYDDGDNKMSTSIQADQLAGQWYAKACGLFPIVDKDKAQSALEKVYSFNVMKFKGGTRGAMNGMWPDGTVDMSAMQSREIWPGVTYALAASMIQEGMVEQGFKTAEGVYHAAWSPGGLGYSFQTPEAWNNDDEYRSLCYMRPLAIWAMQWALSKPKLHNTPQADIPQDSFPKNQFAYARITKLLQLPEDESSKSFVRVVYEIIRNRFRS

SEQ ID NO: 176018 - protein, 867 aa, Zea Mays
MKKRAARSGQGVPLGGIGAGSIGRSYKGDFQRWQLFPGSCEDNAVLANQFSAFISRQDGKKYSTVLHPGKPDLPKGSDISGIGSWDWNMSGQQSTYHALYPRAWTVYDGEPDPELNIVCRQISPIIPHNYQQSSYPVAVFTFTVTNSGHTAADVTLLFTWANSVGGKSELTGYHSNSSMIEKDGVHGILLHHRTADGQPHVTFVIAAQEKEDILISECPYFVISGSSASDEFTAKDMWNSVKEHGSFDHLDPIKTSMCSRPGSSIGAAIAASVKLAPKATQDISFSLAWACPEVKFSSGKTYHRRYTKFYGTDGDAAAALAHDAILEHASWERQIEEWQDPILQDERFPAWYPVTLFNELYYLNAGGTIWTDGLPPIQSLTAVGWKKFSLDMLNGESDDFNEMVRQNNTASDILHRMASVFERMHASIASNSAIGTTLLQGEENIGQFLYLEGIEYYMWNTYDVHFYASFSLIMLFPKLQLSVQRDFAAAVMMHDPEKLRILHDGKWAARKVLGAVPHDLGLYDPWFKVNAYTLYNTDRWKDLNPKFVLQVYRDVVATGDKSFARAVWPSVYIAMAYMEQFDKDKDGMIENEDFPDQTYDVWSMAGISAYCGGLWVAALQAASALAREVGDKASEKLFWDKYEKAKFVYSKLWNGSYFSYDDGDNKMSTSIQADQLAGQWYAKACGLFPIVDKDKAQSALEKVYSFNVMKFKGGTRGAMNGMWPDGTVDMSAMQSREIWPGVTYALAASMIQEGMVEQGFKTAEGVYHAAWSPGGLGYSFQTPEAWNNDDEYRSLCYMRPLAIWAMQWALSKPKLHNTPQADIPQDSFPKNQFAYARITKLLQLPEDESSKSFVRVVYEIIRNRFRS

SEQ ID NO: 176019 - protein, 926 aa, Zea Mays
MEKVYPGQLPVLTWEHKLTHVRHDLPPFRLTWREIMQLAGIGLRLSRHILEETSKGRIAVIDPMKKRAARSGQGVPLGGSIGRSYKGDFQRWQLFPGSCEDNAVLANQFSAFISRQDGKKYSTVLHPGKPDLPKGSDISGIGSWDWNMSGQQSTYHALYPRAWTVYDGEPDPELNIVCRQISPIIPHNYQQSSYPVAVFTFTVTNSGHTAADVTLLFTWANSVGGKSELTGYHSNSSMIEKDGVHGILLHHRTADGQPHVTFVIAAQEKEDILISECPYFVISGSSASDEFTAKDMWNSVKEHGSFDHLDPIKTSMCSRPGSSIGAAIAASVKLAPKATQDISFSLAWACPEVKFSSGKTYHRRYTKFYGTDGDAAAALAHDAILEHASWERQIEEWQDPILQDERFPAWYPVTLFNELYYLNAGGTIWTDGLPPIQSLTAVGWKKFSLDMLNGESDDFNEMVRQNNTASDILHRMASVFERMHASIASNSAIGTTLLQGEENIGQFLYLEGIEYYMWNTYDVHFYASFSLIMLFPKLQLSVQRDFAAAVMMHDPEKLRILHDGKWAARKVLGAVPHDLGLYDPWFKVNAYTLYNTDRWKDLNPKFVLQVYRDVVATGDKSFARAVWPSVYIAMAYMEQFDKDKDGMIENEDFPDQTYDVWSMAGISAYCGGLWVAALQAASALAREVGDKASEKLFWDKYEKAKFVYSKLWNGSYFSYDDGDNKMSTSIQADQLAGQWYAKACGLFPIVDKDKAQSALEKVYSFNVMKFKGGTRGAMNGMWPDGTVDMSAMQSREIWPGVTYALAASMIQEGMVEQGFKTAEGVYHAAWSPGGLGYSFQTPEAWNNDDEYRSLCYMRPLAIWAMQWALSKPKLHNTPQADIPQDSFPKNQFAYARITKLLQLPEDESSKSFVRVVYEIIRNRFRS

SEQ ID NO: 176020 - protein, 625 aa, Zea Mays
MHGSFDHLDPIKTSMCSRPGSSIGAAIAASVKLAPKATQDISFSLAWACPEVKFSSGKTYHRRYTKFYGTDGDAAAALAHDAILEHASWERQIEEWQDPILQDERFPAWYPVTLFNELYYLNAGGTIWTDGLPPIQSLTAVGWKKFSLDMLNGESDDFNEMVRQNNTASDILHRMASVFERMHASIASNSAIGTTLLQGEENIGQFLYLEGIEYYMWNTYDVHFYASFSLIMLFPKLQLSVQRDFAAAVMMHDPEKLRILHDGKWAARKVLGAVPHDLGLYDPWFKVNAYTLYNTDRWKDLNPKFVLQVYRDVVATGDKSFARAVWPSVYIAMAYMEQFDKDKDGMIENEDFPDQTYDVWSMAGISAYCGGLWVAALQAASALAREVGDKASEKLFWDKYEKAKFVYSKLWNGSYFSYDDGDNKMSTSIQADQLAGQWYAKACGLFPIVDKDKAQSALEKVYSFNVMKFKGGTRGAMNGMWPDGTVDMSAMQSREIWPGVTYALAASMIQEGMVEQGFKTAEGVYHAAWSPGGLGYSFQTPEAWNNDDEYRSLCYMRPLAIWAMQWALSKPKLHNTPQADIPQDSFPKNQFAYARITKLLQLPEDESSKSFVRVVYEIIRNRFRS

SEQ ID NO: 176021 - protein, 947 aa, Zea Mays
MPETYVDEQPKGVSRNRPPAHMNGDEEKVYPGQLPVLTWEHKLTHVRHDLPPFRLTWREIMQLAGIGLRLSRHILEETSKGRIAVIDPMKKRAARSGQGVPLGGSIGRSYKGDFQRWQLFPGSCEDNAVLANQFSAFISRQDGKKYSTVLHPGKPDLPKGSDISGIGSWDWNMSGQQSTYHALYPRAWTVYDGEPDPELNIVCRQISPIIPHNYQQSSYPVAVFTFTVTNSGHTAADVTLLFTWANSVGGKSELTGYHSNSSMIEKDGVHGILLHHRTADGQPHVTFVIAAQEKEDILISECPYFVISGSSASDEFTAKDMWNSVKEHGSFDHLDPIKTSMCSRPGSSIGAAIAASVKLAPKATQDISFSLAWACPEVKFSSGKTYHRRYTKFYGTDGDAAAALAHDAILEHASWERQIEEWQDPILQDERYPVTLFNELYYLNAGGTIWTDGLPPIQSLTAVGWKKFSLDMLNGESDDFNEMVRQNNTASDILHRMASVFERMHASIASNSAIGTTLLQGEENIGQFLYLEGIEYYMWNTYDVHFYASFSLIMLFPKLQLSVQRDFAAAVMMHDPEKLRILHDGKWAARKVLGAVPHDLGLYDPWFKVNAYTLYNTDRWKDLNPKFVLQVYRDVVATGDKSFARAVWPSVYIAMAYMEQFDKDKDGMIENEDFPDQTYDVWSMAGISAYCGGLWVAALQAASALAREVGDKASEKLFWDKYEKAKFVYSKLWNGSYFSYDDGDNKMSTSIQADQLAGQWYAKACGLFPIVDKDKAQSALEKVYSFNVMKFKGGTRGAMNGMWPDGTVDMSAMQSREIWPGVTYALAASMIQEGMVEQGFKTAEGVYHAAWSPGGLGYSFQTPEAWNNDDEYRSLCYMRPLAIWAMQWALSKPKLHNTPQADIPQDSFPKNQFAYARITKLLQLPEDESSKSFVRVVYEIIRNRFRS

SEQ ID NO: 176022 - protein, 1237 aa, Zea Mays
MAADRAWMYNGWSRNGRHSDDWVAKTKEFVDHVFALSLTGTVRCPCRHHENSIFLNKERVSLDLCQFGFMPGYEVWEHHGEVVPNRNVEEEENNDWAGDDAMHEMLDSLRPEFNLSSEDPATPEEEEDDEEEVQHHEEEDEQAHEEDDEEEVQHHEEEDEQAHEGIDAEADDDTTEAPVVRRRGTRKGHFVLPPSAPAQSEARVLIIPVGDSQWEDTSFDGRGHHRQVNQVLGKRRYRVEPEAQEHADRVLEKNAKKVCRDAFSNARLQVGNAYMKRRGHSINNFRQYSDVYLTVDEYMEVTLPWMEHRPQAYKALCEIWASPEWIEKSNRNRHRQRHQQDEDDDEVVVNHTYGADGHIRLAKRMEAQTGVVPSPIDVYRRGHRAKNNEISDELCSQAVVERMETYGQEMVKKYGEDYDWRGAPTIDAEVVHSLGGKAHGRYSMFTGVIDSTELRSRGGSSSQAGCGSSRHSRRSVSSMEEAMREQQEKFREELRQQQMAFLQQQSEYMVAYNAQAQQAMNSWFPQQAQQQPFVFPQFQLSMPQWGLHAPTPPPPHQGSRVIGHNTPSLVISAPGGAYAGEGAYAGEDPNPSHGFVNQFLASEASKCLGGASGLNSTQMVTLKVDASPKLARKIPDTFLGVFFEEMGHGGAGGIWAELVSNRGFEAGGPNTPSNIDPWLIVGDDSSVYVETDRSSCFSRNIVALRMEVLCNDCPAGGVGIYNPGFWGMPYVWTRRGSLIIQALLKYWFCRVAGDSKWIKVEKKLVAKGTNRTSRLQITSKKKGTVWLDQVSLMPADTYKGHGFRKGLVSMLMDLKPRFLRFPGGCFVEGGWLRNAFRWRQSIGPWEERPGHFGDCWQYWTDDGLGYYEFLLLSEDIGAAPIWVFNNGISYNDEVNTATIAPFVKNLLEAVRIRHGALLEPKWGIPKPFPVKYVAIGNEDCERKFYRGNYLKFYNAIREVYPDIQLISNCDGSSGPLDHPADIYDFHVYADAKTLFSMKSTFDKSPRSGPKAFVSEYAVWKTDAGRGTLLAALAEAAFLTGLEKNSDAVEMACHAPLFVNDDIEKKWNPDVIVFNTWQHYGTPSYWMQKLFRESSGAMVHPTTTISSGSSADSLAASAITWKDSENNDSFLRVKARLRSVLIPEALVQIVNFGSDAIRVAISTAGLQATIDVLRSTATVLTSTAVMDENSFSNPNKVMPVKSQLFDAGAQMQVTLSPHSLTSFDLALATSKLVTLSDA

SEQ ID NO: 176023 - protein, 581 aa, Zea Mays
MHSVKWKGINVLLSHLCPKCSKKHDDTTSGSQTTGCTCWQWFFTPSTSNDTANVASANGGNTSQVEEKVLAPSYKLDNAETSVSAVGHHTKSSMHHRLKIWISSGHNGIMGKYGNKLELGMPHEARPLLLDEHAKPGWPDWLINVAPEAVRGWFPRRQDSFEKLDKVGQGTYSSVYKARDLKTDKFVALKKVRFVNVDPESVRFMAREILILRKLNHPNIIKLEGIVTSSVSRSLYLVFEYMEHDLVGLAATPGLKFTEPQVKCLFQQLLSGLDHCHSNGVLHRDLKCSNLLIDNNGVLKIADFGLATSFDPDNQQPLTSRVATLWYRPPELLLGATKYGPSVDLWSTGCIFAELLAGKPILPGRTEVEQLHKIFKLCGSPPDDYWSKLEVPQAGMFKPSRQYSGCIAETFKDFPNSVVLLDNLLALQPYARGTAAETLRSDFFRQKPLACSPSSLPKCPPSKEYDARLRMEEARRKRKAAESVSGFGSIETEDVNPLASGNTKVAMIRPESADARNAILGSQNNNLGLKGPAVNKGKSRIYQHSGSMITAKGNVEQMLKEHEKNIQEAVRKARLSKHREL

SEQ ID NO: 176024 - protein, 517 aa, Zea Mays
MHSVKWKGINVLLSHLCPKCSKKHDDTTSGSQTTGCTCWQWFFTPSTSNDTANVASANGGNTSQVEEKVLAPSYKLDNAETSVSAVGHHTKSSMHHRLKIWISSGHNGIMGKYGNKLELGMPHEARPLLLDEHAKPGWPDWLINVAPEAVRGWFPRRQDSFEKLDKVGQGTYSSVYKARDLKTDKFVALKKVRFVNVDPESVRFMAREILILRKLNHPNIIKLEGIVTSSVSRSLYLVFEYMEHDLVGLAATPGLKFTEPQVKCLFQQLLSGLDHCHSNGVLHRDLKCSNLLIDNNGVLKIADFGLATSFDPDNQQPLTSRVATLWYRPPELLLGATKYGPSVDLWSTGCIFAELLAGKPILPGRTEVEQLHKIFKLCGSPPDDYWSKLEVPQAGMFKPSRQYSGCIAETFKDFPNSVVLLDNLLALQPYARGTAAETLRSDFFRQKPLACSPSSLPKCPPSKEYDARLRMEEARRYHFSKYFLFASGLRGCNQEELLVMLMYCLLVSIGKERQLRV

SEQ ID NO: 176025 - protein, 384 aa, Zea Mays
MVGLNSCRSAGSTRLLKGPQPARKPKGFPVLNTFTSASVSPANNGDQGSDGSSGDPRCCPACLGRNSIAKAASAVGPAVVNISSMHDMHGWVNEQSIGSGTIIDPDGTILTCAHVVADFQSTKAIVRRKVSVTLQDGREFEGVVLNADRLSDIAVVKIKSMTPLPAARLGSSSQLQPGDWVVALGCPLSLQNTVTAGIVSCVDRKSSDLGLGGLRREYLQTDCAINQGNSGGPLVNLDGEIIGVNVMKVRNADGLSFAVPIDSVIKIVDNFNKNGRVVRPWLGLKMLDLNPMIIAQLKEKSSTFPDVRKGVLVPMVTPASPAEQAGFRPGDVVVEFGGKPVESIKEIIDIMGDKVGIPFKVLVKRANNVTVTLTVIPEEADASR

SEQ ID NO: 176026 - protein, 215 aa, Zea Mays
MLLRVGRRAALLLAATAAFSRLRDPDTAVYVSASPPQPPRQAFSSSAAAEGLRSGTCLFSPYLLPYPFQGFPVLNTFTSASVSPANNGDQGSDGSSGDPRCCPACLGRNSIAKAASAVGPAVVNISSMHDMHGWVNEQSIGSGTIIDPDGTILTCAHVVADFQSTKAIVRRKVSVTLQDGREFEGLDHHLNFSQVTGLLLWAVHFLFRTQLQLLC

SEQ ID NO: 176027 - protein, 285 aa, Zea Mays
MLLRVGRRAALLLAATAAFSRLRDPDTAVYVSASPPQPPRQAFSSSAAAEGLRSGTCLFSPYLLPYPFQGFPVLNTFTSASVSPANNGDQGSDGSSGDPRCCPACLGRNSIAKAASAVGPAVVNISSMHDMHGWVNEQSIGSGTIIDPDGTILTCAHVVADFQSTKAIVRRKVSVTLQDGREFEGVVLNADRLSDIAVVKIKSMTPLPAARLGSSSQLQPGDWVVALGCPLSLQNTVTAAVLTGKAVIWVLEDYEGSIFKQIVLLIREILEDLLLTLMVRLLELM

SEQ ID NO: 176028 - protein, 262 aa, Zea Mays
MLLRVGRRAALLLAATAAFSRLRDPDTAVYVSASPPQPPRQAFSSSAAAEGLRSGTCLFSPYLLPYPFQGFPVLNTFTSASVSPANNGDQGSDGSSGDPRCCPACLGRNSIAKAASAVGPAVVNISSMHDMHGWVNEQSIGSGTIIDPDGTILTCAHVVADFQSTKAIVRRKVSVTLQDGREFEGLDHHLNFSQVTGLLLWAVHFLFRTQLQLVLSAVLTGKAVIWVLEDYEGSIFKQIVLLIREILEDLLLTLMVRLLELM

SEQ ID NO: 176029 - protein, 399 aa, Zea Mays
MLLRVGRRAALLLAATAAFSRLRDPDTAVYVSASPPQPPRQAFSSSAAAEGLRSGTCLFSPYLLPYPFQGFPVLNTFTSASVSPANNGDQGSDGSSGDPRCCPACLGRNSIAKAASAVGPAVVNISSMHDMHGWVNEQSIGSGTIIDPDGTILTCAHVVADFQSTKAIVRRKIKSMTPLPAARLGSSSQLQPGDWVVALGCPLSLQNTVTAGIVSCVDRKSSDLGLGGLRREYLQTDCAINQGNSGGPLVNLDGEIIGVNVMKVRNADGLSFAVPIDSVIKIVDNFNKNGRVVRPWLGLKMLDLNPMIIAQLKEKSSTFPDVRKGVLVPMVTPASPAEQAGFRPGDVVVEFGGKPVESIKEIIDIMGDKVGIPFKVLVKRANNVTVTLTVIPEEADASR

SEQ ID NO: 176030 - protein, 284 aa, Zea Mays
MLLRVGRRAALLLAATAAFSRLRDPDTAVYVSASPPQPPRQAFSSSAAAEGLRSGTCLFSPYLLPYPFQGFPVLNTFTSASVSPANNGDQGSDGSSGDPRCCPACLGRNSIAKAASAVGPAVVNISSMHDMHGWVNEQSIGSGTIIDPDGTILTCAHVVADFQSTKAIVRRKVSVTLQDGREFEGVVLNADRLSDIAVVKIKSMTPLPAARLGSSSQLQPGDWVVALGCPLSLQNTVTAGIVSCVDRKSSDLGLGGLRREYLQTDCAINQGNSGGPLVNLDGEL

SEQ ID NO: 176031 - protein, 138 aa, Zea Mays
MKVRNADGLSFAVPIDSVIKIVDNFNKNGRVVRPWLGLKMLDLNPMIIAQLKEKSSTFPDVRKGVLVPMVTPASPAEQAGFRPGDVVVEFGGKPVESIKEIIDIMGDKVGIPFKVLVKRANNVTVTLTVIPEEADASR

SEQ ID NO: 176032 - protein, 586 aa, Zea Mays
MDEPDAPESGDMIVDGNNGSSRESPLQPMDSKNSKGCAVKKPTSVSSDFGEELDLDLGGEKSGTQQERKLSRQDRVELCRSFQLAVSSHDWESAEGLVGMADAQGLNDVLCVAVDAIWFLSDRDELLAIVGLIKRVVSEGAKDFTRAALRTSFLASCVSACRGRSTSLADAVSFMGQKLHERLQESQGDEVLKAEASAKVHRFTEWALKCIGLHSRVRENRGKGNHDTVIEVQLQLSAFKIFLDLADNELTGKDFTEAFDAACFPLTLFSTTFDQGWASGISAAAVQGLLELLVEGGADNVNQCFLEAARYGSTELVRILLQVAQRNSLDIDVDLALGFAAHYGKIETMGCLVEEGNAIGFLGPLMRAAERGCLQVVEWFVNHGCREMELCLALTAATSNSQIAVAAYLLPLVPQHVLAPLSIEIIKAAGERTTGSLQGVDFLLRSDFLNDPAATYAVADSIARCTDEAVDAKLRSFMNEHWSEAAFCAGFESAQQHFVNFMRIMERGESPIRLGDLPLELVIAMAYLPLYKECMNSNGRLLPQRLRGQLVEAASRLEDRQVERDSQSRELLAILEHHIPRFMIQT

SEQ ID NO: 176033 - protein, 414 aa, Zea Mays
MLITYKLHERLQESQGDEVLKAEASAKVHRFTEWALKCIGLHSRVRENRGKGNHDTVIEVQLQLSAFKIFLDLADNELTGKDFTEAFDAACFPLTLFSTTFDQGWASGISAAAVQGLLELLVEGGADNVNQCFLEAARYGSTELVRILLQVAQRNSLDIDVDLALGFAAHYGKIETMGCLVEEGNAIGFLGPLMRAAERGCLQVVEWFVNHGCREMELCLALTAATSNSQIAVAAYLLPLVPQHVLAPLSIEIIKAAGERTTGSLQGVDFLLRSDFLNDPAATYAVADSIARCTDEAVDAKLRSFMNEHWSEAAFCAGFESAQQHFVNFMRIMERGESPIRLGDLPLELVIAMAYLPLYKECMNSNGRLLPQRLRGQLVEAASRLEDRQVERDSQSRELLAILEHHIPRFMIQT

SEQ ID NO: 176034 - protein, 259 aa, Zea Mays
MSSIHHREARPPGSIFGSDRPPSGLSSARSGVNSLHMLLVCHDCYFCRLMKGLPCFIFIENKANHNLSLQGQFLTKNEVSKEYFLKTVRNIVGDKLLKQAASRYQMQAQRSPQTNPSNYSLSGQVSGQQTAPSGSVTGDEQKGYPWAHTIPMRQAIASTRPICIRLMKWETFGGPAAPFRPQMADSNPRAHLIRGAVTTVSGSVPTRSIVSGNAPVNQALGSSKVSAGMESQSQQLSAPKAFSCNKLKSDSISWHSRRA

SEQ ID NO: 176035 - protein, 411 aa, Zea Mays
MTGDWLEHLTFAVYLLPFFLLQLNLVLMFAYRETVLEEAHRGMELREHCRHIVDNDDRHYRFHSLCVHQGSSSSTTGAIVGGVAAGAALLFAVPAISFAYWRHRKPQEHFFNVSGFKTTAWATREDDGQASVDGAGTGDSMAGVSAAARRVHPGGVREKLVGAQDTEILLLLANWREAQTIHRVLATQLFFMFLPLSDKSRLGCKIARFISKYVIEYFPVTLHVEDYGAFDPNRAYVFGYEPHSVLPIAVGILGDLVGFMPLPKLKILASSAVFYTPFLRQIWTWLGLAPASRKSFYSYLGAGYSCIIVPGGFVKIAIEMGCPVVPVFAFGQLIDRPEGGYLTADLPMPRGEIVIGGPNIIKGYFKNEAKTNEVYKQGIKYSDFSDLCQKQEAVKEVLGSLAKIPFFSITY

SEQ ID NO: 176036 - protein, 680 aa, Zea Mays
MEHCTAFICTSAQWPHSITTTRRVAYHRSANSSFSAPQRRRRSTLYVMNAASTSAPISPQNITQLPRTNSTVIKSISSDKPSSAMEQLDIERGVCIPFRKYTPEMVRKKVLDSRGSILSLASRGVEIIWKLGFYWSSLVYDFLVGQDEEIVPYRARQLRNLLCDLGPSFIKAGQVLANRPDIIREDYMNELCILQDDVPPFPNQVAFSIIEEELGQPIERLFSKISSETIAAASLGQVYRATLRETGEDVAIKVQRPGIEPIIYRDLFLFRTLASFLNGISLQKLGCNAELIVDEFGEKLLEELDYTLEATNIEDFLENFKDDPTVKIPQVYKQLSGSRVLVMEWIDGIRCTDPQAIKEAGIDMEGFLTVGVSAALRQLLEFGLFHGDPHPGNIFAMRDGRIAYVDFGNVAVLSQQNKQILIDAVVHAVNEDYAEMANDFTRLGFLASGTDVAPIIPALESIWQNSAGKGLADFNFRSVTGKFNQLVYNFPIRIPERFSLVIRSLLTQEGICFTLKPDFKFLEVAYPYVAKRLLTDPNPALRERLIQVLFKDGAFQWKRLENLIVLAKENVSKMSSNPALKKNSLQAVRNRQLESKLDLTETIKDGARMFLIDAGIRRQLILAFTEDSRLHVEELIDVYRLVEDQIDMPSVAVEVLQDLPSVARDFMLSWSDSILSDRQY

SEQ ID NO: 176037 - protein, 508 aa, Zea Mays
MEHCTAFICTSAQWPHSITTTRRVAYHRSANSSFSAPQRRRRSTLYVMNAASTSAPISPQNITQLPRTNSTVIKSISSDKPSSAMEQLDIERGVCIPFRKYTPEMVRKKVLDSRGSILSLASRGVEIIWKLGFYWSSLVYDFLVGQDEEIVPYRARQLRNLLCDLGPSFIKAGQVLANRPDIIREDYMNELCILQDDVPPFPNQVAFSIIEEELGQPIERLFSKISSETIAAASLGQVYRATLRETGEDVAIKVQRPGIEPIIYRDLFLFRTLASFLNGISLQKLGCNAELIVDEFGEKLLEELDYTLEATNIEDFLENFKDDPTVKIPQVYKQLSGSRVLVMEWIDGIRCTDPQAIKEAGIDMEGFLTVGVSAALRQLLEFGLFHGDPHPGNIFAMRDGRIAYVDFGNVAVLSQQNKQILIDAVVHAVNEDYAEMANDFTRLGFLASGTDVAPIIPALESIWQNSAGKGLADFNFRSVTGAIQGWGIPVETTRKPYSSCQGECVQDE

SEQ ID NO: 176038 - protein, 338 aa, Zea Mays
MEWIDGIRCTDPQAIKEAGIDMEGFLTVGVSAALRQLLEFGLFHGDPHPGNIFAMRDGRIAYVDFGNVAVLSQQNKQILIDAVVHAVNEDYAEMANDFTRLGFLASGTDVAPIIPALESIWQNSAGKGLADFNFRSVTGKFNQLVYNFPIRIPERFSLVIRSLLTQEGICFTLKPDFKFLEVAYPYVAKRLLTDPNPALRERLIQVLFKDGAFQWKRLENLIVLAKENVSKMSSNPALKKNSLQAVRNRQLESKLDLTETIKDGARMFLIDAGIRRQLILAFTEDSRLHVEELIDVYRLVEDQIDMPSVAVEVLQDLPSVARDFMLSWSDSILSDRQY

SEQ ID NO: 176039 - protein, 203 aa, Zea Mays
MEDLWKHIDEDKKSAYAYLDSLWFNMYYHGSNKPNVLKWIKAKRIFSRQYVFVPIVCFGHWSLLVLCHFGDANCSDIKKGPRMMVLDSLNTTDPTRLRSAIRKFIIDIYKTEEREESKQFINKICLEFPKVPQQNGDECGIYVLYFIRCFLLNKKLTEVLENKKLEEKFTQLFDDGWFNPEELENFRKDIHSFQANRNNKVAE

SEQ ID NO: 176040 - protein, 155 aa, Zea Mays
MPRCRRDKGQALIDLDSDAEDECQSKGSQTSRTTTLKTSGRLKNVLTTTLKTSGRRSKNVLPSFYDNLPQGRASRHATSRRNKTNQDKLNTDIFELYMEDLWKHIDEDKKSAYAYLDSLWFNMYYHGSNKPNVLKWIKAKRIFSRQYVFVPIVCL

SEQ ID NO: 176041 - protein, 201 aa, Zea Mays
MPRCRRDKGQALIDLDSDAEDECQSKGSQTSRTTTLKTSGRLKNVLTTTLKTSGRRSKNVLPSFYDNLPQGRASRHATSRRNKTNQDKLNTDIFELYMEDLWKHIDEDKKSAYAYLDSLWFNMYYHGSNKPNVLKWIKAKRIFSRQYVFVPIVCFGHWSLLVLCHFGDANCSDIKKGPRMMVLDSLNTTDPTRLRSAIRKS

SEQ ID NO: 176042 - protein, 166 aa, Zea Mays
MPRCRRDKGQALIDLDSDAEDECQSKGSQTSRTTTLKTSGRLKNVLTTTLKTSGRRSKNVLPSFYDNLPQGRASRHATSRRNKTNQDKLNTDIFELYMDGHWSLLVLCHFGDANCSDIKKGPRMMVLDSLNTTDPTRLRSAIRKLFHNDIVGIRVTEVVRVVGLRF

SEQ ID NO: 176043 - protein, 269 aa, Zea Mays
MPRCRRDKGQALIDLDSDAEDECQSKGSQTSRTTTLKTSGRLKNVLTTTLKTSGRRSKNVLPSFYDNLPQGRASRHATSRRNKTNQDKLNTDIFELYMDGHWSLLVLCHFGDANCSDIKKGPRMMVLDSLNTTDPTRLRSAIRKFIIDIYKTEEREESKQFINKICLEFPKVPQQNGDECGIYVLYFIRCFLLNKKLTEVLENKKLEEKFTQLFDDGWFNPEELENFRKDIHSFQALLSFIFLCGSFRGHLKAVEDMLYFRFIHGRGST

SEQ ID NO: 176044 - protein, 156 aa, Zea Mays
MYQIFTFFNGSGHWSLLVLCHFGDANCSDIKKGPRMMVLDSLNTTDPTRLRSAIRKFIIDIYKTEEREESKQFINKICLEFPKVPQQNGDECGIYVLYFIRCFLLNKKLTEVLENKKLEEKFTQLFDDGWFNPEELENFRKDIHSFQANRNNKVAE

SEQ ID NO: 176045 - protein, 355 aa, Zea Mays
MAASWRAVALAVAAVGWLLAGAARAFPAEDLVARLPGQPPVTFRQFAGYVDVDAKAGRSLFYYFAEAREDAAAKPLTLWLNGGPGCSSVGGGAFTELGPFYPRGDGRGLRLNKKSWNRASNLLFVESPAGVGWSYSNTSSDYSTGDVRTAHDMYQFLLGWYAKFPEYRSRALFLTGESYAGHYIPQLADVLITHNEKSKGFKFNIKGVAIGNPLLKLDRDVPATYEYFWSHGMISDEIFLAISHSCDFEDYTFNDPHNESKSCNDAIAEANSVVGDYVNNYDVILDVCYPSIVMQELRLREYVCYCLLLRLRCSSSFDWLFLVAGDEDQYWRGCLHVLREVFLLQSTGGAAGSAC

SEQ ID NO: 176046 - protein, 490 aa, Zea Mays
MAASWRAVALAVAAVGWLLAGAARAFPAEDLVARLPGQPPVTFRQFAGYVDVDAKAGRSLFYYFAEAREDAAAKPLTLWLNGGPGCSSVGGGAFTELGPFYPRGDGRGLRLNKKSWNRASNLLFVESPAGVGWSYSNTSSDYSTGDVRTAHDMYQFLLGWYAKFPEYRSRALFLTGESYAGHYIPQLADVLITHNEKSKGFKFNIKGVAIGNPLLKLDRDVPATYEYFWSHGMISDEIFLAISHSCDFEDYTFNDPHNESKSCNDAIAEANSVVGDYVNNYDVILDVCYPSIVMQELRLREYATKISIGVDVCMSYERFFYFNLPEVQQALHANRTHLKHHWSMCSEFWLSSQCQTLTRVICTIMCQYPELQQHRRQHQHTAYTSKNRRAQDTTLGVQRRPRLRRALAGHPNPCARARSRHGAACHRPLQHLVPQRPGWRVGDGVWQLPDLRHSARCVSHGALCTARPGSRAVSIHCTRTKTTEHDESTH

SEQ ID NO: 176047 - protein, 356 aa, Zea Mays
MEQRSNLLFVESPAGVGWSYSNTSSDYSTGDVRTAHDMYQFLLGWYAKFPEYRSRALFLTGESYAGHYIPQLADVLITHNEKSKGFKFNIKGVAIGNPLLKLDRDVPATYEYFWSHGMISDEIFLAISHSCDFEDYTFNDPHNESKSCNDAIAEANSVVGDYVNNYDVILDVCYPSIVMQELRLREYATKISIGVDVCMSYERFFYFNLPEVQQALHANRTHLKHHWSMCSDILNYSNTDGNINILPTLQRIVEHKIPLWVFSGDQDSVVPLLGTRTLVRELAHAMGLHVTVPYSTWFHKGQVGGWVTEYGNFLTFATVRGASHMVPFAQPDRALGLFRSIVLGQRLPNTTNPHID

SEQ ID NO: 176048 - protein, 71 aa, Zea Mays
MCAYHSKYYMLEGIRLNVGLAGQIRVTKIILFSCYMIPVFFFGHGIMISPLPIYSYILAPLSQMLCLFLQP

SEQ ID NO: 176049 - protein, 160 aa, Zea Mays
MLYEPRYKHSVSRLERESGVKFEHISAPQPTDVAQSAGSEAADAIASVSDSVIPIFRQQAEQLLSSSSLSAADLLAKALAKAVVCYNIPVILFLHRRGHICSHWCYLQFDVGNVVMVTGGRNTGRVGVIKNWEKHKGIFEENIEWNSNLVVAKVWRLEFI

SEQ ID NO: 176050 - protein, 769 aa, Zea Mays
MVRLLGLRSLSFGPEDSPREIPSTADVAPPVGSSGWLVRFFDSAFFCEWIAVSYLYKHDHAGVRDYLCNRMYTLPLPGLEAYLFQVCYMLVHKPSPSLDRFVIDTCAKSLRIALKVHWLLAAELELEDADDLDGIDKVQEQCQVAATVQGEWPPLVRPSPPSPAASPRGNPMLSRIRSSKQRLLSLASSPSLGLSPPAGGGVNVAEDAMGTGGKQPATPSSEDNKLLKRLSIGPKMRDALLFRRSGEKDEEQDRDGFFKRLLRDSRDKEEEDGDREGFFKRLLSREKDNEEEESDRDGFFRRLLRDSKEEDMELTPSSDGLLKRLFRDKEDRQGEDDEKEGFFRRMFKDKNEERRDSSHARHGNEERLGKSVEDDDREGFFRKIFKDKNEERKDEGHQKPDEREKVGANIEDDKRDGFFRQLFKEKNDEKKEGSTPSKKEEDDKGHKNADDDNFFRRLFKDKNEEKKGIVHDRNEDDKCEEGDKENFFRKLFKDKHEERRTEGPDKNDDYGKGSSGIEEEDNPEFLSFRRLFRVHPEDSKSGHIESSQSNNLSEGSPGSESFFKRLFRDRDRSLEDSEIFGSKMAKEKHPGTTGINEKQSGKPPLPINAVAELRKGSYYASLELVQALCDTSYGLVDIFPIEDRKIALRESLTEINSQIASAEKNGGVCFPMGKGIYRVVHIPEDESVLLNSREKAPYLICVEVLKAEAPSHSKGSSDGHKLSKGGIPLANGDVQLPKPPPWAYPLWSRHETQNYETDRMLKSTSQAAT

SEQ ID NO: 176051 - protein, 691 aa, Zea Mays
MVRLLGLRSLSFGPEDSPREIPSTADVAPPVGSSGWLVRFFDSAFFCEWIAVSYLYKHDHAGVRDYLCNRMYTLPLPGLEAYLFQVCYMLVHKPSPSLDRFVIDTCAKSLRIALKVHWLLAAELELEDADDLDGIDKVQEQCQVAATVQGEWPPLVRPSPPSPAASPRGNPMLSRIRSSKQRLLSLASSPSLGLSPPAGGGVNVAEDAMGTGGKQPATPSSEDNKLLKRLSIGPKMRDALLFRRSGEKDEEQDRDGFFKRLLRDSRDKEEEDGDREGFFKRLLSREKDNEEEESDRDGFFRRLLRDSKEEDMELTPSSDGLLKRLFRDKEDRQGEDDEKEGFFRRMFKDKNEERRDSSHARHGNEERLGKSVEDDDREGFFRKIFKDKNEERKDEGHQKPDEREKVGANIEDDKRDGFFRQLFKEKNDEKKEGSTPSKKEEDDKGHKNADDDNFFRRLFKDKNEEKKGIVHDRNEDDKCEEGDKENFFRKLFKDKHEERRTEGPDKNDDYGKGSSGIEEEDNPEFLSFRRLFRVHPEDSKSGHIESSQSNNLSEGSPGSESFFKRLFRDRDRSLEDSEIFGSKMAKEKHPGTTGINEKQSGKPPLPINAVAELRKGSYYASLELVQALCDTSYGLVDIFPIEDRKIALREVGQTHYHVTSWLFISQPFSHPVPIIALSLFFSHFNLYPALQ

SEQ ID NO: 176052 - protein, 1147 aa, Zea Mays
MVRLLGLRSLSFGPEDSPREIPSTADVAPPVGSSGWLVRFFDSAFFCEWIAVSYLYKHDHAGVRDYLCNRMYTLPLPGLEAYLFQVCYMLVHKPSPSLDRFVIDTCAKSLRIALKVHWLLAAELELEDADDLDGIDKVQEQCQVAATVQGEWPPLVRPSPPSPAASPRGNPMLSRIRSSKQRLLSLASSPSLGLSPPAGGGVNVAEDAMGTGGKQPATPSSEDNKLLKRLSIGPKMRDALLFRRSGEKDEEQDRDGFFKRLLRDSRDKEEEDGDREGFFKRLLSREKDNEEEESDRDGFFRRLLRDSKEEDMELTPSSDGLLKRLFRDKEDRQGEDDEKEGFFRRMFKDKNEERRDSSHARHGNEERLGKSVEDDDREGFFRKIFKDKNEERKDEGHQKPDEREKVGANIEDDKRDGFFRQLFKEKNDEKKEGSTPSKKEEDDKGHKNADDDNFFRRLFKDKNEEKKGIVHDRNEDDKCEEGDKENFFRKLFKDKHEERRTEGPDKNDDYGKGSSGIEEEDNPEFLSFRRLFRVHPEDSKSGHIESSQSNNLSEGSPGSESFFKRLFRDRDRSLEDSEIFGSKMAKEKHPGTTGINEKQSGKPPLPINAVAELRKGSYYASLELVQALCDTSYGLVDIFPIEDRKIALRESLTEINSQIASAEKNGGVCFPMGKGIYRVVHIPEDESVLLNSREKAPYLICVEVLKAEAPSHSKGSSDGHKLSKGGIPLANGDVQLPKPPPWAYPLWSRHETQNYETDRMLKSTSQVIDQAMAQLWETKVKFVNVSFSIEKLGRSRSIVLSETGRRLRHDATDSHDPPGDSQTVADQPIEWVKVTLSAVPGVNMEDVDDNEPTRKKDHRRVPSTIAIEEVKAAALKGEAPPGLPLKGVAQSTQNLDPKATDGGDPKPTDALAGELWAVKRERIRRSSVHGKSPGWDLRSIIVKSGDDCRQEHLAVQLVAHFYDIYQEAGLPLWLRPYEVIVTSAYTALIETIPDTASIHSVKSRFPNISSLRDYYVAKYEENSPNFKLAQRNFVESMAGYSILCYLLQVKDRHNGNLLIDEEGHIIHIDFGFILSNSPGGVNFESAPFKLTRELLEVMDSDAEGTPSEFFDYFKVLCIQGFLTCRKHAERIILLVEMLQVTYFICVA

SEQ ID NO: 176053 - protein, 1095 aa, Zea Mays
MVRLLGLRSLSFGPEDSPREIPSTADVAPPVGSSGWLVRFFDSAFFCEWIAVSYLYKHDHAGVRDYLCNRMYTLPLPGLEAYLFQVCYMLVHKPSPSLDRFVIDTCAKSLRIALKVHWLLAAELELEDADDLDGIDKVQEQCQVAATVQGEWPPLVRPSPPSPAASPRGNPMLSRIRSSKQRLLSLASSPSLGLSPPAGGGVNVAEDAMGTGGKQPATPSSEDNKLLKRLSIGPKMRDALLFRRSGEKDEEQDRDGFFKRLLRDSRDKEEEDGDREGFFKRLLSREKDNEEEESDRDGFFRRLLRDSKEEDMELTPSSDGLLKRLFRDKEDRQGEDDEKEGFFRRMFKDKNEERRDSSHARHGNEERLGKSVEDDDREGFFRKIFKDKNEERKDEGHQKPDEREKVGANIEDDKRDGFFRQLFKEKNDEKKEGSTPSKKEEDDKGHKNADDDNFFRRLFKDKNEEKKGIVHDRNEDDKCEEGDKENFFRKLFKDKHEERRTEGPDKNDDYGKGSSGIEEEDNPEFLSFRRLFRVHPEDSKSGHIESSQSNNLSEGSPGSESFFKRLFRDRDRSLEDSEIFGSKMAKEKHPGTTGINEKQSGKPPLPINAVAELRKGSYYASLELVQALCDTSYGLVDIFPIEDRKIALRESLTEINSQIASAEKNGGVCFPMGKGIYRVVHIPEDESVLLNSREKAPYLICVEVLKAEAPSHSKGSSDGHKLSKGGIPLANGDVQLPKPPPWAYPLWSRHETQNYETDRMLKSTSQAAALKGEAPPGLPLKGVAQSTQNLDPKATDGGDPKPTDALAGELWAVKRERIRRSSVHGKSPGWDLRSIIVKSGDDCRQEHLAVQLVAHFYDIYQEAGLPLWLRPYEVIVTSAYTALIETIPDTASIHSVKSRFPNISSLRDYYVAKYEENSPNFKLAQRNFVESMAGYSILCYLLQVKDRHNGNLLIDEEGHIIHIDFGFILSNSPGGVNFESAPFKLTRELLEVMDSDAEGTPSEFFDYFKVLCIQGFLTCRKHAERIILLVEMLQDSGFPCFKGGPRTIQNLRKRFHLSLTEEQCVSLVLSLISSSMDAWRTRQYDYYQRVLNGIL

SEQ ID NO: 176054 - protein, 939 aa, Zea Mays
MVRLLGLRSLSFGPEDSPREIPSTADVAPPVGSSGWLVRFFDSAFFCEWIAVSYLYKHDHAGVRDYLCNRMYTLPLPGLEAYLFQVCYMLVHKPSPSLDRFVIDTCAKSLRIALKVHWLLAAELELEDADDLDGIDKVQEQCQVAATVQGEWPPLVRPSPPSPAASPRGNPMLSRIRSSKQRLLSLASSPSLGLSPPAGGGVNVAEDAMGTGGKQPATPSSEDNKLLKRLSIGPKMRDALLFRRSGEKDEEQDRDGFFKRLLRDSRDKEEEDGDREGFFKRLLSREKDNEEEESDRDGFFRRLLRDSKEEDMELTPSSDGLLKRLFRDKEDRQGEDDEKEGFFRRMFKDKNEERRDSSHARHGNEERLGKSVEDDDREGFFRKIFKDKNEERKDEGHQKPDEREKVGANIEDDKRDGFFRQLFKEKNDEKKEGSTPSKKEEDDKGHKNADDDNFFRRLFKDKNEEKKGIVHDRNEDDKCEEGDKENFFRKLFKDKHEERRTEGPDKNDDYGKGSSGIEEEDNPEFLSFRRLFRVHPEDSKSGHIESSQSNNLSEGSPGSESFFKRLFRDRDRSLEDSEIFGSKMAKEKHPGTTGINEKQSGKPPLPINAVAELRKGSYYASLELVQALCDTSYGLVDIFPIEDRKIALRESLTEINSQIASAEKNGGVCFPMGKGIYRVVHIPEDESVLLNSREKAPYLICVEVLKAEAPSHSKGSSDGHKLSKGGIPLANGDVQLPKPPPWAYPLWSRHETQNYETDRMLKSTSQVIDQAMAQLWETKVKFVNVSFSIEKLGRSRSIVLSETGRRLRHDATDSHDPPGDSQTVADQPIEWVKVTLSAVPGVNMEDVDDNEPTRKKDHRRVPSTIAIEEVKAAALKGEAPPGLPLKGVAQSTQNLDPKATDGGDPKPTDALAGELWAVKRERIRRSSVHGKSPDYCQEW

SEQ ID NO: 176055 - protein, 621 aa, Zea Mays
MVRLLGLRSLSFGPEDSPREIPSTADVAPPVGSSGWLVRFFDSAFFCEWIAVSYLYKHDHAGVRDYLCNRMYTLPLPGLEAYLFQVCYMLVHKPSPSLDRFVIDTCAKSLRIALKVHWLLAAELELEDADDLDGIDKVQEQCQVAATVQGEWPPLVRPSPPSPAASPRGNPMLSRIRSSKQRLLSLASSPSLGLSPPAGGGVNVAEDAMGTGGKQPATPSSEDNKLLKRLSIGPKMRDALLFRRSGEKDEEQDRDGFFKRLLRDSRDKEEEDGDREGFFKRLLSREKDNEEEESDRDGFFRRLLRDSKEEDMELTPSSDGLLKRLFRDKEDRQGEDDEKEGFFRRMFKDKNEERRDSSHARHGNEERLGKSVEDDDREGFFRKIFKDKNEERKDEGHQKPDEREKVGANIEDDKRDGFFRQLFKEKNDEKKEGSTPSKKEEDDKGHKNADDDNFFRRLFKDKNEEKKGIVHDRNEDDKCEEGDKENFFRKLFKDKHEERRTEGPDKNDDYGKGSSGIEEEDNPEFLSFRRLFRVHPEDSKSGHIESSQSNNLSEGSPGSESFFKRLFRDRDRSLEDSEIFGSKMAKEKHPGTTGINEKQSGKPPLPINAVAELRKVSYRDQ

SEQ ID NO: 176056 - protein, 352 aa, Zea Mays
MELVVLIVGAGPAGLATAACLSQRSIPYLIVEREDCSASLWRYRTYDRVKLHLSKEFSCLPYMPHEEDTPTYIPKAEFLKYLDCYREHFGIKPRYCTSVVSAAYDEGTGRWVVAARDTVEGTEIRYAARFLVVATGENGAGRIPEIQGLESFCGEAIHSSTYKSGRSYAGRRVLVVGAGNSGMEIAYDLANHGADTSIVVRSPFHNLRLSIALEVGRSGSTAGRSCQLVHIMPKELIRLGMTFVQYMPVTIVDLFLVKLADFIFGDLSNYGIVRPGVGPLQLKSKTGRSSVIDVGTAGLIKKGVVKVFKRISKITGNKVQFECGKDCEFDAIVFATGYKSSANLWLKTTSAW

SEQ ID NO: 176057 - protein, 221 aa, Zea Mays
MLNDKGNFSQRGHLQRPDHTDMRYKFRTYARLLQHIKSLDKSCMMPLRKAYCHSLNMIIRRESRDFSNELRNSSKASKSSTPLFEGPAGANQPASITDSPADAYSKMITVFVPLLVDEEDFYALVDWAFKLDPLSCISMHGLTDRYLSGQKAEVSGYVQVLLDDLETRITILFSRCSLLMMPATRLRNMSVMCVKLELCPIFPGSHNLQHVWSSISMDPGI

SEQ ID NO: 176058 - protein, 177 aa, Zea Mays
MGALNECIQELLDGIQEDFYALVDWAFKLDPLSCISMHGLTDRYLSGQKAEVSGYVQVLLDDLETRITILFSRFVDDACYQIEKYERNVRQIGVVPYIPRFSQLAARMEQYINGSRDLVDQAYTKIVTIMFVILEKIAQVEPKYVDIVLLENYAAFQHSLYDLANVVPTLAKYYSSS

SEQ ID NO: 176059 - protein, 241 aa, Zea Mays
MITVFVPLLVDESAFLAHFMCFEVSALPQSDASSSNPNAESTITSSVALEASASIGKTSNNPAEMGALNECIQELLDGIQEDFYALVDWAFKLDPLSCISMHGLTDRYLSGQKAEVSGYVQVLLDDLETRITILFSRFVDDACYQIEKYERNVRQIGVVPYIPRFSQLAARMEQYINGSRDLVDQAYTKIVTIMFVILEKIAQVEPKYVDIVLLENYAAFQHSLYDLANVVPTLAKYYSSS

SEQ ID NO: 176060 - protein, 291 aa, Zea Mays
MLNDKGNFSQRGHLQRPDHTDMRYKFRTYARLLQHIKSLDKSCMMPLRKAYCHSLNMIIRRESAFLAHFMCFEVSALPQSDASSSNPNAESTITSSVALEASASIGKTSNNPAEMGALNECIQELLDGIQEDFYALVDWAFKLDPLSCISMHGLTDRYLSGQKAEVSGYVQVLLDDLETRITILFSRFVDDACYQIEKYERNVRQIGVVPYIPRFSQLAARMEQYINGSRDLVDQAYTKIVTIMFVILEKIAQVEPKYVDIVLLENYAAFQHSLYDLANVVPTLAKYYSSS

SEQ ID NO: 176061 - protein, 63 aa, Zea Mays
MLAEKHEGFTCFLTWWLHMHVHHACPWISGCYNINYVNDLVAGRLTGLICEQKRVPCETEKDN

SEQ ID NO: 176062 - protein, 63 aa, Zea Mays
MTPRPTIHSFTGQRQPARRLTPTRVAKCQHSSLQVEAPRVQPKLSEPFLGFTQTAEIWNSRLA

SEQ ID NO: 176063 - protein, 592 aa, Zea Mays
MAQYRQQYGVGFSDSRGHHHQVLPDWHRPHHASAKSSSRIRRPGKPAPRRRSPAAAAAVAAALLLAAVFLLSRRISRSPAEISQDSSARETLPDWNQSKSWKELKFGHGGGGRSARDSRYWDRDDRRRDEDYTEDEKEKISGGSGTSGDAGGSSDKGTTSEGGGEDKGLTTGSDAKDVPEVSEGGKGGTLYNEGGRKELEQYEAAAMGATGTGVKEVDPDDEYDDGIDTQDEMEDAHLHSSDGGRKLGGGSHEGAEKKDEVATERHTEAGGGIAGSHDISSPDKKKVSGTGDKKHGPKKKPKRKKSGSICQMKFLNSTAQLVEPVRNEKFASFKLEYVEVEERPIGSEFWEPRFAGHQSLQEREESYKAHDQQLTCAFVKGPNGTSTGFDISDDDRKYMSKCHIAVSSCIFGNSDRLRTPFGKTITSLSKKTVCFAMFLDEVTLHTLESEGQKMDSMGFIGIWKIILIKNMPYNDMRRVGKIPKFLAHRLFPSSRFSIWLDSKLRLQTDPILILEYFLWRHGYEYAISNHYDRHCVWEEVAQNKKLNKFNHTIIDQQFEFYQADGLTRCPRRLFYRERTHTNVQLILLPVVQ

SEQ ID NO: 176064 - protein, 230 aa, Zea Mays
MFLDEVTLHTLESEGQKMDSMGFIGIWKIILIKNMPYNDMRRVGKIPKFLAHRLFPSSRFSIWLDSKLRLQTDPILILEYFLWRHGYEYAISNHYDRHCVWEEVAQNKKLNKFNHTIIDQQFEFYQADGLTRFNPSDPNKLLPSYVPEGSFIVREHTPMSNLFSCLWYNEVDRFTPRDQLSFAYTYLKLRRINPDRPFRLNMFKDCERRSIAKLFHHRSEESHSGAQLTR

SEQ ID NO: 176065 - protein, 305 aa, Zea Mays
MQRRPEFSFPGSPARGLPPRPPANPMAPRYGDEEVRWLQASPQASPEMDYSSGGSGTPSPQLWAHHHQLHRQYPASAGSSPSRAQAIAGYRREMLDLVRGLPESAYELSLRDIVEHPSPPSPPHAPTNPLPPPTTAGPRASRAVPVPAQEKGESAGARKDAVAAADAEDGGGSRKQGGSKGKKQGRKQRTMRKQRSRSLDRSVSLDTGLLIKLFLPLSLGGKKKVSPKPDAAKDSKKKKRKEKKEAAVQEEEWWTKSEFSEAGNSSRTSSSNSNSSAASLRNANGAANPRAPDRSWSSATVQIKV

SEQ ID NO: 176066 - protein, 71 aa, Zea Mays
MNCSFFCFSANVYLYIFSHIYIHLLLYLFLIVTTVHNRKLHSCVFSCILMSLQLHRIMKNYHNNSYLANSV

SEQ ID NO: 176067 - protein, 282 aa, Zea Mays
MTEQQYLEHSIPWIAANDAAWRAFCRYWASAEFKAKSVRHSSNHGTESYHKYGGDDHFRLAKRMEASTGAVPSDVQIYLRGHRGPDPANLDVLYSQKQQIVWYTMFANVIDSSQVRVQRGGSSWSAARSSRLSTQDPAEVEQLREELRRHQDFLKQQAAQHEYYATQIQQQQNTHTTTSTGSRDTRPGAPPPPPHVHYPWSSPPPTPTSPSTEHQVLVRFGGRGPDHDQAKAAARSGCRRDGDAHQRVRAEECHSSWLDGCLWIVVLVLLACCLRMEGKLLV

SEQ ID NO: 176068 - protein, 303 aa, Zea Mays
MFGSEGRCPESKNEATQYGLDMTEQQYLEHSIPWIAANDAAWRAFCRYWASAEFKAKSVRHSSNHGTESYHKYGGDDHFRLAKRMEASTGAVPSDVQIYLRGHRGPDPANLDVLYSQKQQIVWYTMFANVIDSSQVRVQRGGSSWSAARSSRLSTQDPAEVEQLREELRRHQDFLKQQAAQHEYYATQIQQQQNTHTTTSTGSRDTRPGAPPPPPHVHYPWSSPPPTPTSPSTEHQVLVRFGGRGPDHDQAKAAARSGCRRDGDAHQRVRAEECHSSWLDGCLWIVVLVLLACCLRMEGKLLV

SEQ ID NO: 176069 - protein, 180 aa, Zea Mays
MTEQQYLEHSIPWIAANDAAWRAFCRYWASAEFKAKSVRHSSNHGTESYHKYGGDDHFRLAKRMEASTGAVPSDVQIYLRGHRGPDPANLDVLYSQKQQIVWLHMVRRCLVSMDQTMIGGPHILILRLCMQVVEKLMEGADSTYLILFHWLSAIHIFLICRDVTCFVGTQCLLTSSTRAR

SEQ ID NO: 176070 - protein, 679 aa, Zea Mays
MMPSGPPNPMGPGQPVSGAAASLLRTSSSLLSGGGQPGMAGGGGGGMLSSQSPFSSLVSPLTQFGGNGLLGGASNVSSLLNRTTFRNGGPMPGPGSMQGGGMQMSTLQQRAGLDGASDFISTGGSDPLSFPSSSQVNLVNQMGSDNLQVTSQQQQQMDAVQDMQQQQQLPMSYSQQQLPAQHSQQLQQPQATVKLENGGSMVSIKSEQQMGQPEQNGPAQMMRSAGCVKLEPQQLQAQMMRSLSSVKMEQQSSDSSAFLQQQQQQQQHHLLQLTKQIRNCPDLVSMGGPNTTANPQAAAAAAAQLTLLQQQRLLHMQQQHQQQQILKNLPLQRNQLQQQQQHQQQQQQQQLLRQQSLNMRTPGKSSPYEPGTCAKRLTHYMYHQQNRPQDNNIEYWRNFVNEYFAPNAKKRWCVSLYGSGRQTTGVFPQDVWHCEICNRKPGRGFETTVEVLPRLCQIKYASGTLEELLYIDMPHESQNTSGQIILDYTKAIQESVFEQLRVVREGHLRIVFNPDLKIASWEFCARRHEELIPRRSIIPQVSNLGAVVQKYQAAAQNSTSLSPQDMQNNCNSFVACARQLAKALEVPLVNDLGYTKRYVRCLQIAEVVNCMKDLIDHSRQTGSGPIACITFRGGLQGLALFNRSSKLRRSRPFPRVQTRVAKILLLWLVCSLLPLPMVT

SEQ ID NO: 176071 - protein, 558 aa, Zea Mays
MMPSGPPNPMGPGQPVSGAAASLLRTSSSLLSGGGQPGMAGGGGGGMLSSQSPFSSLVSPLTQFGGNGLLGGASNVSSLLNRTTFRNGGPMPGPGSMQGGGMQMSTLQQRAGLDGASDFISTGGSDPLSFPSSSQVNLVNQMGSDNLQVTSQQQQQMDAVQDMQQQQQLPMSYSQQQLPAQHSQQLQQPQATVKLENGGSMVSIKSEQQMGQPEQNGPAQMMRSAGCVKLEPQQLQAQMMRSLSSVKMEQQSSDSSAFLQQQQQQQQHHLLQLTKQIRNCPDLVSMGGPNTTANPQAAAAAAAQLTLLQQQRLLHMQQQHQQQQILKNLPLQRNQLQQQQQHQQQQQQQQLLRQQSLNMRTPGKSSPYEPGTCAKRLTHYMYHQQNRPQDNNIEYWRNFVNEYFAPNAKKRWCVSLYGSGRQTTGVFPQDVWHCEICNRKPGRGFETTVEVLPRLCQIKYASGTLEELLYIDMPHESQNTSGQIILDYTKAIQESVFEQLRVVREGHLRIVFNPDLKIASWEFCARRHEELIPRRSIIPQVCCMCPTIGESTGGSFSK

SEQ ID NO: 176072 - protein, 579 aa, Zea Mays
MMPSGPPNPMGPGQPVSGAAASLLRTSSSLLSGGGQPGMAGGGGGGMLSSQSPFSSLVSPLTQFGGNGLLGGASNVSSLLNRTTFRNGGPMPGPGSMQGGGMQMSTLQQRAGLDGASDFISTGGSDPLSFPSSSQVNLVNQMGSDNLQVTSQQQQQMDAVQDMQQQQQLPMSYSQQQLPAQHSQQLQQPQATVKLENGGSMVSIKSEQQMGQPEQNGPAQMMRSAGCVKLEPQQLQAQMMRSLSSVKMEQQSSDSSAFLQQQQQQQQHHLLQLTKQIRNCPDLVSMGGPNTTANPQAAAAAAAQLTLLQQQRLLHMQQQHQQQQILKNLPLQRNQLQQQQQHQQQQQQQQLLRQQSLNMRTPGKSSPYEPGTCAKRLTHYMYHQQNRPQDNNIEYWRNFVNEYFAPNAKKRWCVSLYGSGRQTTGVFPQDVWHCEICNRKPGRGFETTVEVLPRLCQIKYASGTLEELLYIDMPHESQNTSGQIILDYTKAIQESVFEQLRVVREGHLRIVFNPDLKIASWEFCARRHEELIPRRSIIPQVSNLGAVVQKYQAAAQNSTSLSPQDMQNNCNSTGGSFSK

SEQ ID NO: 176073 - protein, 234 aa, Zea Mays
MTRHTPCLYRTISMKIFVKSSTGRTVCLRVHPADTVHTVKTKIQEQQYLVYDGVQLEDDRTLADYGIEHKSVLDLKEKMQIFIVETLAGTTITLEVESSETIDNIKERIKESEGFPKGQQCLIFDNKQLEDNSTLADNNISEGSTLLLVLRHMLLRGTMHISIYMFSGKVVTLEVKRSDTIDNVKLKIYEKTHTRHIQQMIIFDGIKLEGSKTLAYYGIEDGDTLHMMPCLCGC

SEQ ID NO: 176074 - protein, 502 aa, Zea Mays
MPPSKGKKKNPSTSPRPSPRTPSSCPSAGSGTGDGERSVDLPSIAAAAAEQFPALVPRGGSGYFAGIVAEVAPRDGSRGGRLGRLWLSEAAMVGAGMRPGCFVSVSLISSSSDQLDGFPLINLFEECNRFFDLDLDNDLLYGEAGKNFVVATVLPSREVPKNGIKLSWDLACVLGHPFVGRSLFICPLCTLQAPKRSDDVHILRVMKCKNLYLSLVPPNVGSSKGIESESDYHPERSAMVMETPKRGPSTPLRKKESHHFASNNGSSMCLDPTTARSALADEKINELLHTSALWWLNGRHLLKGNFVPLSICGKLSLFVVMGAEPDSSSQDVLYENGNTLSNAEDSTKSQENPVLFLVDRTTKVHLSDSVCTKQLDSDKPGLPSEPHEYDDKRNADFNHSPTLGGLSKESATIKGIISFSLADQIGLPRYKGILLYGPPGTGKTSLASSCAYDAGVNLFTINGPEIISHYYGESEQSLSAIPRTEDGHTSPPSNWSSSLSDQ

SEQ ID NO: 176075 - protein, 780 aa, Zea Mays
MKCKNLYLSLVPPNVGSSKGIESESDYHPERSAMVMETPKRGPSTPLRKKESHHFASNNGSSMCLDPTTARSALADEKINELLHTSALWWLNGRHLLKGNFVPLSICGKLSLFVVMGAEPDSSSQDVLYENGNTLSNAEDSTKSQENPVLFLVDRTTKVHLSDSVCTKQLDSDKPGLPSEPHEYDDKRNADFNHSPTLGGLSKESATIKGIISFSLADQIGLPRYKGILLYGPPGTGKTSLASSCAYDAGVNLFTINGPEIISHYYGESEQSLYDVFTSAKQAAPAVIFIDELDAIAPSRKDGSEALSIRMVATLLKLMDEIGPSDRVLLIAATNRPDSIDPALRRPGRLDKEIEIGVPSPGQRMDILRHLLIGVHHSLTNEEVESVALATHGFVGADLAAVCNEAALSALRRYISLKENSIQQLGHPGCSFYKCNSQDTEDSSSLSSSFSKLTMSSYVACMNGGNIKSSESYDDTDEIPLYVTNKDFDKAKTKVRPSAMREVILELPKVRWEDVGGQCSVKEQLIEAIQLPQKCPEAFERLGIRPPRGLLMIGPPGCSKTLMARAAASEAKLNFLAVKGPELFSKWVGDSEKAVRSLFAKARANAPAILFFDEIDGLAVTRGQENDGTSVADRVLSQLLVEMDGLDQRVGVTVIAATNRPDKIDPALLRPGRFDRVLDVQPPDEADRADIFRIHTRSMPCSADMNLNELARLTEGYTGADIKLICREAAVAALDERFDIQEVAMRHFNSAIDRTKPSDVKFFQELAKQFRRSLTSLRKQ

SEQ ID NO: 176076 - protein, 427 aa, Zea Mays
MWLSCTSYFHLFTESCLESLLLPSPSHSPHGSINLGHSTHQPLYRPAPSSKFYRHTYSPTINPSSTLTLSLPVRAAHTTLLLVSRGLASSSPTVLMLNLAPFETPPLGRQERPTNTIVTATAAIARGNEESSSNTCLQHGHLDLSLGISLSHGGGGGGGSCDASSCGGNKQDSYGGGQGSRDDKDNNVRRMTSCIGGTATANVITAGHSSLAGDLTAAPGGGGGGGWAAAFMPSPTGFMHPWSLAARQQKAAAEQDRTPPATYLSSSDDRVVTSPSAVGWPPVHTSRRNIVSAMHVITNKQTAGASSAVAGNGGTPPGSTTTATHTGGGETNGAAAAALAARPALAASSMFAKVHMEGYAIGRKVNLRAQDGYDSLSRTLTNMATNFFCPADCSGAAEKDAPKSDKFIFLYEDFEGDRMLVGDVPWE

SEQ ID NO: 176077 - protein, 428 aa, Zea Mays
MWLSCTSYFHLFTESCLESLLLPSPSHSPHGSINLGHSTHQPLYRPAPSSKFYRHTYSPTINPSSTLTLSLPVRAAHTTLLLVSRGLASSSPTVLMLNLAPFETPPLGRQERPTNTIVTATAAIARGNEESSSNTCLQHGHLDLSLGISLSHGGGGGGGSCDASSCGGNKQDSYGGGQGSRDDKDNNVRRMTSCIGGTATANVITAGHSSLAGDLTAAPGGGGGGGWAAAFMPSPTGFMHPWSLAARQQKAAAEQDRTPPATYLSSSDDRVVTSPSAVGWPPVHTSRRNIVSAMHVITNKQTAGASSAVAGNGGTPPGSTTTATHTGGGETNGAAAAALAARPALAASSMFAKVHMEGYAIGRKVNLRAQDGYDSLSRTLTNMATNFFCHCSLRLLKDCTSSENPASGDKGRGEGDRNYKAEEPTTNG

SEQ ID NO: 176078 - protein, 262 aa, Zea Mays
MSLFTHSDQDDELRISSIFTRAPSASSQRPPAPSMSSPFSAASVAAGSEAAAGTRKLPVLLFDVMDTLVRDPFYHHIPGFFQMSMKELLEAKHPTAWSEFEKGLIDENELAKKFFKDGRSFDLQGLKECMVRAYEYIDGVEDILCCLKKNNYEMHAFTNYPVWYQLIEDKLKLSKYLSWTFCSCRTGKRKPSPEFYLQAADQLNVDPASCVFIDDRMINIEAALSVGMVGLQFKSAEALQKDLCALGVELSPLVCEGEAQVQ

SEQ ID NO: 176079 - protein, 217 aa, Zea Mays
MSLFTHSDQDDELRISSIFTRAPRPPAPSMSSPFSAASVAAGSEAAAGTRKLPVLLFDVMDTLVRDPFYHHIPGFFQMSMKELLEAKHPTAWSEFEKGLIDENELAKKFFKDGRSFDLQGLKECMVRAYEYIDGVEDILCCLKKNNYEMHAFTNYPVWYQLIEDKLKLSKYLSWTFCSCRTGMVGLQFKSAEALQKDLCALGVELSPLVCEGEAQVQ

SEQ ID NO: 176080 - protein, 182 aa, Zea Mays
MSLFTHSDQDDELRISSIFTRAPRPPAPSMSSPFSAASVAAGSEAAAGTRKLPVLLFDVMDTLVRDPFYHHIPGFFQMSMKELLEAKHPTAWSEFEKGLIDENELAKKFFKDGRSFDLQGLKECMVRAYEYIDGVEDILCCLKKNNYEMHAFTNYPVWYQLIEDKLKLSKYLSWTFCSCRTG

SEQ ID NO: 176081 - protein, 228 aa, Zea Mays
MSSPFSAASVAAGSEAAAGTRKLPVLLFDVMDTLVRDPFYHHIPGFFQMSMKELLEAKHPTAWSEFEKGLIDENELAKKFFKDGRSFDLQGLKECMVRAYEYIDGVEDILCCLKKNNYEMHAFTNYPVWYQLIEDKLKLSKYLSWTFCSCRTGKRKPSPEFYLQAADQLNVDPASCVFIDDRMINIEAALSVGMVGLQFKSAEALQKDLCALGVELSPLVCEGEAQVQ

SEQ ID NO: 176082 - protein, 192 aa, Zea Mays
MSLFTHSDQDDELRISSIFTRAPRPPAPSMSSPFSAASVAAGSEAAAGTRKLPVLLFDVMDTLVRDPFYHHIPGFFQMSMKELLEAKHPTAWSEFEKGLIDENELAKKFFKDGRSFDLQGLKECMVRAYEYIDGVEDILCCLKKNNYEMHAFTNYPVWYQLIEDKLKLSKYLSWTFCSCRTGGTWSGDNYSP

SEQ ID NO: 176083 - protein, 550 aa, Zea Mays
MSAADPSAAPAAAADPDGPDSVRLTWNTWPRSKVEASRCVVPLAATISPTRVPDPSAASPPPLPYPPLRCKPPCSALLNPFARVDFAAKIWICPLCFSRNHFPPHYAAISESNVPAELFPQCSTVDYIVGGAGIPGVGGAPPPPPPVFLFVIDTCVIEEELEYVKMAMRKAVALLPEHALVGLVTFGTQVHLHELGFSDLSKIYVFRGTKEISKDQILDQLGLAGAGRPGFPKMPQQPGGPQVNGMHPPSTAGVNRFLLPVSDCEIALSTLLDELQPDQWPVEAGNRAIRCTGVALSVAAGLLGACMPGTGARIIALLGGPCTEGPGMIVSKDLSEPVRSHKDLDKDAAPHFQKAVKFYDGLAKQLVSQGHVLDVFASALDQVGLAEMKVAIERTGGLVVLSESFGHSVFKDSFKRIFEGGEQSLGLSFNGIIEINCSKDIKVQGIIGPCTSLEKKGAMCSDTVVGQGNTSAWKMCGLDRNTSLTVFFDVSPSERSSQPGNQNPHLYIQFVTSYQHPEGQMRIRVTTICRKWVDGSTNTELNISRNVLGD

SEQ ID NO: 176084 - protein, 502 aa, Zea Mays
MSAADPSAAPAAAADPDGPDSVRLTWNTWPRSKVEASRCVVPLAATISPTRVPDPSAASPPPLPYPPLRCKPPCSALLNPFARVDFAAKIWICPLCFSRNHFPPHYAAISESNVPAELFPQCSTVDYIVGGAGIPGVGGAPPPPPPVFLFVIDTCVIEEELEYVKMAMRKAVALLPEHALVGLVTFGTQVHLHELGFSDLSKIYVFRGTKEISKDQILDQLGLAGAGRPGFPKMPQQPGGPQVNGMHPPSTAGVNRFLLPVSDCEIALSTLLDELQPDQWPVEAGNRAIRCTGVALSVAAGLLGACMPGTGARIIALLGGPCTEGPGMIVSKDLSEPVRSHKDLDKDAAPHFQKAVKFYDGLAKQLVSQGHVLDVFASALDQVGLAEMKVAIERTGGLVVLSESFGHSVFKDSFKRIFEGGEQSLGLSFNGIIEINCSKDIKVQGIIGPCTSLEKLSVKEIHQHGKCVVSIEILLLQYFLMSHRVNDRASQETKIPICIYNL

SEQ ID NO: 176085 - protein, 422 aa, Zea Mays
MSAADPSAAPAAAADPDGPDSVRLTWNTWPRSKVEASRCVVPLAATISPTRVPDPSAASPPPLPYPPLRCKPPCSALLNPFARVDFAAKIWICPLCFSRNHFPPHYAAISESNVPAELFPQCSTVDYIVGGAGIPGVGGAPPPPPPVFLFVIDTCVIEEELEYVKMAMRKAVALLPEHALVGLVTFGTQVHLHELGFSDLSKIYVFRGTKEISKDQILDQLGLAGAGRPGFPKMPQQPGGPQVNGMHPPSTAGVNRFLLPVSDCEIALSTLLDELQPDQWPVEAGNRAIRCTGVALSVAAGLLGACMPGTGARIIALLGGPCTEGPGMIVSKDLSEPVRSHKDLDKDAAPHFQKAVKFYDGLAKQLVSQGHVLDVFASALDQVGLAEMKVAIERTGGLVVLSESFGHSVFKDSFKRIFEGVA

SEQ ID NO: 176086 - protein, 756 aa, Zea Mays
MSAADPSAAPAAAADPDGPDSVRLTWNTWPRSKVEASRCVVPLAATISPTRVPDPSAASPPPLPYPPLRCKPPCSALLNPFARVDFAAKIWICPLCFSRNHFPPHYAAISESNVPAELFPQCSTVDYIVGGAGIPGVGGAPPPPPPVFLFVIDTCVIEEELEYVKMAMRKAVALLPEHALVGLVTFGTQVHLHELGFSDLSKIYVFRGTKEISKDQILDQLGLAGAGRPGFPKMPQQPGGPQVNGMHPPSTAGVNRFLLPVSDCEIALSTLLDELQPDQWPVEAGNRAIRCTGVALSVAAGLLGACMPGTGARIIALLGGPCTEGPGMIVSKDLSEPVRSHKDLDKDAAPHFQKAVKFYDGLAKQLVSQGHVLDVFASALDQVGLAEMKVAIERTGGLVVLSESFGHSVFKDSFKRIFEGGEQSLGLSFNGIIEINCSKDIKVQGIIGPCTSLEKKGAMCSDTVVGQGNTSAWKMCGLDRNTSLTVFFDVSPSERSSQPGNQNPHLYIQFVTSYQHPEGQMRIRVTTICRKWVDGSTNTEELVEGFDQETAAVVLARYISLKMEMEEEFDATRWLDRSLIRLCSRFGDYRKDDPSSFSLHSNFSLFPQFMFNLRRSQFVQVFNNSPDETAYFRMLLNRESITNSVAMIQPSLISFSFDSPPSPVFLDVASIAADRILLLDAYFSVVIFHGMTIAQWRNMGYQNQPEHEARFLLAKLNPSATYNSAHDVAPGSDIIFTDDVSFQVFCEHLQRLAVQS

SEQ ID NO: 176087 - protein, 549 aa, Zea Mays
MSAADPSAAPAAAADPDGPDSVRLTWNTWPRSKVEASRCVVPLAATISPTRVPDPSAASPPPLPYPPLRCKPPCSALLNPFARVDFAAKIWICPLCFSRNHFPPHYAAISESNVPAELFPQCSTVDYIVGGAGIPGVGGAPPPPPPVFLFVIDTCVIEEELEYVKMAMRKAVALLPEHALVGLVTFGTQVHLHELGFSDLSKIYVFRGTKEISKDQILDQLGLAGAGRPGFPKMPQQPGGPQVNGMHPPSTAGVNRFLLPVSDCEIALSTLLDELQPDQWPVEAGNRAIRCTGVALSVAAGLLGACMPGTGARIIALLGGPCTEGPGMIVSKDLSEPVRSHKDLDKDAAPHFQKAVKFYDGLAKQLVSQGHVLDVFASALDQVGLAEMKVAIERTGGLVVLSESFGHSVFKDSFKRIFEGGEQSLGLSFNGIIEINCSKDIKVQGIIGPCTSLEKKGAMCSDTVVGQGNTSAWKMCGLDRNTSLTVFFDVSPSERSSQPGNQNPHLYIQFVTSYQHPEGQMRIRVTTICRKWVDGSTNTELLCWQDTSL

SEQ ID NO: 176088 - protein, 114 aa, Zea Mays
MKRITRSIPLPLLKRERRRLQGWRQMIMGATIRLRRFPSLASSLYPTDSLCCLASLCHTKVTTSAFTSLTINGSTPPRKKKEQRQHETARPWTWGALHSITRSARWRRTRPRAP

SEQ ID NO: 176089 - protein, 91 aa, Zea Mays
MGSRKAHGVLVLVLLLIVLPALSIGGRELADEKDHKGWRQMIMGATIRLRRFPSLASSLYPTDSLCCLASLCHTKVRLINNTCAELVRWSE

SEQ ID NO: 176090 - protein, 99 aa, Zea Mays
MRTRLDSSKVLSRNFLRACNDLRIHILKSGNDLPKLKGARSSSKREQSSSCSFRCLIQEHSTASSEKGAATAAGVATNDYGRYDPAPAFSKPRFKFIPN

SEQ ID NO: 176091 - protein, 442 aa, Zea Mays
MAHDGFLGGFHELSWPLVHAAAAGAAPFDPLLVHVPHALMGAGAGWQHEAAVGAIVPSQSQSQSPPPPPSSLAAAAVGGADAVEAAMMEQLASRLGVSVPSPPSSRYVSCHSTPVAPCVLAGDAERAERLSCFPASGRKLSRVASSQSLLREQAPAPAPAPSPGAAAKQHAGDGACDGPCRKRKASGTSSKQSKAKEAVTTAPPESRETAETRAKKCKLSTDEERKPAAGEGWRGSGKGKELVAADAEPPKDYIHVRARRGQATDSHSLAERVRREKIGERMKLLQDLVPGCSKVTGKAVMLDEIINYVQSLQRQVEANKMCAAATSSISMAQQPLPLPAAYHALEGSSPAFCYTTTPPAPGTAARLGVAASDAKAFEMAPPSSAATVNHAGTAERRPLEGPADENASPQVRTYVQQAYLPSSSISIVSLAVRSIHSKTVDA

SEQ ID NO: 176092 - protein, 887 aa, Zea Mays
MGRAGFLFLPLLLLLAFAGPGPASAATAMTPDAGVILDLAKSLTNPPPSWTGTDVCGGVSFSGVTCNGAARVTGINLAKLHLSGTLSSSLANLTALQSLQLQGNALEGDLPSLAQMGSLETLVLDGNAFSTLPPDFLEGLPSLLKLSMDDLPLEPWSIPDAIAGCAMLQTFSASNASVSGPFPAVLANLTSLQTLRLSYNNLTGVLPVGLEALGSLETLQLNSQRSNGMLSGPIDVVAKLPSLKTLWLQSNSFTGPIPEFDPNTQLETFNVRDNSLTGPVPPSLVGITSLQDVALSNNFLQGPKPKFAAKTVDIDSGNGFCHEDPGPCDPLVTTLLGVASGFGYPLQLKKWAGNNPCDPWPGLSCIKMDVTQIKLPRRNLSGLISPAFANLTRLQRLDLSNNRLTGVIPDALTTLKSLNYLDVSNNRLTGQVPEFKQHIKLMTAGNSFGESGGDSGGGGSNVRSSSSNPTGSHNSKSNAGMIVGILLVVILLVICVGLFLHHRRNKNVDKFSPISTKSPSGESEVMKIQVVGTNGHSNISGSVGSTELYSHSSADNTSIADLFESHGMQLPMSVLLKATNNFDEDYILGTGGFGVVFKGTLNDKLVAVKRCDSGTMGTKGLQEFMAEIDVLRKGGTLRQHLCDLQQSGYTPLTWTQRMTIALDVARGIEYLHGLAQETFIHRDLKPSNILLDQDLRAKVSDFGLVKLAKDTDKSMMTRVAGTFGYLAPEYATTGKVTTKVDVYAYGVILMEMITGRKVLDDSLPDGETHLVTSFRKNMLDKEKFRKFLDPTLELSAESWNSLLEVADLARHCTAREPYQRPDMGHCVNRLSSLVDQWKPTNIVDDDDEEGGTSEMGLHQHLEIWRCDDFTISDSDSFSAHNTSRKYH

SEQ ID NO: 176093 - protein, 254 aa, Zea Mays
MACLAPQFKWAPSAAAHMPSSSSSSSYSRCSALRVHCAVTSAAVVEDRTNGSAAQLRLAYAAPAIQRNFEATLASEALLNEEAVVAAAAAEAVALARAAAEAAQEVVQIVQRNNHQPVIRPKKCVDNYLANEILRTEMRSSSPDMYANNPLMEYLDSYGIMDAEDELDAYAQYTENIAVKSARQSERKARRTRAAIKASTTLHASQKVALSSKKKRSKGSSSSMNPLGSLWKMTGRRLLTAKEEVEFSEGSFEA

SEQ ID NO: 176094 - protein, 403 aa, Zea Mays
MACLAPQFKWAPSAAAHMPSSSSSSSYSRCSALRVHCAVTSAAVVEDRTNGSAAQLRLAYAAPAIQRNFEATLASEALLNEEAVVAAAAAEAVALARAAAEAAQEVVQIVQRNNHQPVIRPKKCVDNYLANEILRTEMRSSSPDMYANNPLMEYLDSYGIMDAEDELDAYAQYTENIAVKSARQSERKARRTRAAIKASTTLHASQKVALSSKKKRSKGSSSSMNPLGSLWKMTGRRLLTAKEEVEFSEGIQDLLKLEAIQAELIEYNGGQPTFSQWATAAGVDEKTLRKRLNYGIYCKNRMVTSNVRLVISIAREFEGPGMDFYDLIQEGMQGLIRGAEKFDSSKGFRFSTYSHWWIKQAMRKSVSEQSQIFRLPVCPPPKSCSFPDINVLMHYCTLLSPQL

SEQ ID NO: 176095 - protein, 300 aa, Zea Mays
MDWAAASGSPSWGAAATDPGPTMLSFAGPSSSAADAEVRLQDFAAGLAQSSRPTGAAPGAGRRSRAAVGGAGAEACSVDGCRSDLSRCREYHRRHKVCEAHSKAPVVVVGGQERRFCQQCSRFHMLSEFDEEKRSCRKRLDGHNRRRRKPQHDLTNLGGFFPYHQVNQFEFYPQTIPTVGQNSDAVHLVGRQQPFSISFSRTPDEFPFPQGGGSSVLHHLHAARPGHHAEGSSHTGSSTRDNALSGTLGPECALSLLSSSLRRPSTAGVPAVGQPQTQVVVRQRCIQVTRRLVLASERKW

SEQ ID NO: 176096 - protein, 201 aa, Zea Mays
MLSEFDEEKRSCRKRLDGHNRRRRKPQHDLTNLGGFFPYHQVNQFEFYPQTIPTVGQNSDAVHLVGRQQPFSISFSRTPDEFPFPQGGGSSVLHHLHAARPGHHAEGSSHTGSSTRDNALSGTLGPECALSLLSSSLRRPSTAGVPAVGQPQVTASSTTAVSQAATAAVATAAFAASAGHHVFVPDAMFEDPSQALPFSWQ

SEQ ID NO: 176097 - protein, 146 aa, Zea Mays
MQVLQETMEGRWNYTFQATPCIARAVGGGDVQGCRNVLPDIADYFRLEIGKVHDKKKARVVEEARKLQIAGPHCGFDDHDDDVELQAAIRDEEIRRRAHVTGGTYETSGGLSQGGVRAAFGRTSSRKEKPRMVQTRIDTRPFSKAV

SEQ ID NO: 176098 - protein, 323 aa, Zea Mays
MYGTSDPTAAERTAFRRAEKQYKLYKTLNVKGRSRSRSRSGCRPSSGEGGGADLSAVVDFHALLAADGELPDGIGRRECPGFDRPVFCFLDRPGFYFIPGALSTEEQCCWIRESLKTFPQPPNRTNLTAIYGSISDLLIAAENQQILVEAENPDIQERNKQNNCGGKTESKYFKFVDSESQKGEEHRSNAATTLVRKLRWSTLGLQFDWSKIDVGDMLGGHVDDMEADWTKPIVSISLGCKCIFLLGGKTRDEVPTAMFLRSGDIVLMAGEARERFHGVPRIFTESDQQEIPALISQLSSGDDVFILEYIKNSRININIRQVY

SEQ ID NO: 176099 - protein, 281 aa, Zea Mays
MYGTSDPTAAERTAFRRAEKQYKLYKTLNVKGRSRSRSRSGCRPSSGEGGGADLSAVVDFHALLAADGELPDGIGRRECPGFDRPVFCFLDRPGFYFIPGALSTEEQCCWIRESLKTFPQPPNRTNLTAIYGSISDLLIAAENQQILVEAENPDIQERNKQNNCGGKTESKYFKFVDSESQKGEEHRSNAATTLVRKLRWSTLGLQFDWSKRTIRSKSPRNSQEKPLSSSRLVERNYDVSLPHNKIPGALASLAKKMAIPAMPSGEEFKPEAAIVNYYGPN

SEQ ID NO: 176100 - protein, 112 aa, Zea Mays
MNRSFVRNSLRNCLKYSRCKISNFLPINPFINLEQSVCPIPNFREQHHREESSCFLPDTWIGKLHNVQLSSLRPEMQVCPSREVYKHFLMQRSSALSTSFHHIRAVTDKGRF

SEQ ID NO: 176101 - protein, 498 aa, Zea Mays
MACSGCSCEARELVAELCRHFYAQGWVTGTGGSITVKVNDPTVPLADRLIVMSPSGVQKERMVAEDMYVMAADGKVLSAPVAKPWPNKPPKCTDCAPLFMKAYLMRGAGAVIHSHGIETCIATMLIPGAKEFRVTHMEMIKGIKGHGYHDELVIPIIENTPYEYELTDSLSEAIAAYPKATAVLVRNHGIYVWGESWINAKTQAECYHYLLDACIKLYQLGIDWTTPEHGSINNPRRPHSILSPEICNGCHAADSSKCVVLDIEGTTTPISFVTDVMFPYARDNVRKHLTSTFDFEETKEDIKLLRIQIEDDLQNGVAGAVPVPPDEGGKEEVINSLVANVESMIKADRKITSLKQLQGHIWRIGFQKKELQGVVFEDVPVALKNWHASGIKVYIYSSGSREAQRLLFGNTTYGDLRKFLCGYFDTTTGNKRETRSYFEISQSLGVDSPSQILFITDVFQEAIAAKNAGFEVIISIRPGNAPLPDNHGFRTIKSFSEI

SEQ ID NO: 176102 - protein, 500 aa, Zea Mays
MACSGCSCEAAVGAMASEAYLEGAPVREARELVAELCRHFYAQGWVTGTGGSITVKVNDPTVPLADRLIVMSPSGVQKERMVAEDMYVMAADGKVLSAPVAKPWPNKPPKCTDCAPLFMKAYLMRGAGAVIHSHGIETCIATMLIPGAKEFRVTHMEMIKGIKGHGYHDELVIPIIENTPYEYELTDSLSEAIAAYPKATAVLVRNHGIYVWGESWINAKTQAECYHYLLDACIKLYQLGIDWTTPEHGSINNPRRPHSILSPEICNGCHAADSSKCVVLDIEGTTTPISFVTDVMFPYARDNVRKHLTSTFDFEETKEDIKLLRIQIEDDLQNGVAGAVPVPPDEGGKEEVINSLVANVESMIKADRKITSLKQLQGHIWRIGFQKKELQGVVFEDVPVALKNWHASGIKVYIYSSGSREAQRLLFGNTTYGDLRKFLCGYFDTTTGNKRETRSYFEISQSLGVDSPSQILFITDVFQEAIAAKNAGDNLHSPGKCPTS

SEQ ID NO: 176103 - protein, 222 aa, Zea Mays
MFPYARDNVRKHLTSTFDFEETKEDIKLLRIQIEDDLQNGVAGAVPVPPDEGGKEEVINSLVANVESMIKADRKITSLKQLQGHIWRIGFQKKELQGVVFEDVPVALKNWHASGIKVYIYSSGSREAQRLLFGNTTYGDLRKFLCGYFDTTTGNKRETRSYFEISQSLGVDSPSQILFITDVFQEAIAAKNAGFEVIISIRPGNAPLPDNHGFRTIKSFSEI

SEQ ID NO: 176104 - protein, 50 aa, Zea Mays
MFRSAACGEVTTFLTAGHETTQDYHTIQVGAVASTFSSQRRVEVGRNRKP

SEQ ID NO: 176105 - protein, 293 aa, Zea Mays
MAAPSGGGGGGAGEGSSSAAAAATIGVHGVDQEAMWQMNLEEAMELGPYPERVGEPDCSYYMRTGMCRFGMTCKFNHPADRKLAVAAARMKGEYPQRIGQPECQYYLKTGTCKFGATCKFHHPREKAAMATRVQLNELGYPLRPNEKECAYYLRTGQCKFGSTCKFHHSQPSTMMVAVRGSVYSPGQSATSPGQHAYQGAVTSWPLSRSASFIASPRWPGHSSYAQVIVPPGLVQVPGWSPYTAQIGSSSSEDQQRTPGAAQYYTGSRQSGTSIGDQGMFSSYQAVLYEDRRL

SEQ ID NO: 176106 - protein, 403 aa, Zea Mays
MAAPSGGGGGGAGEGSSSAAAAATIGVHGVDQVAEAMWQMNLEEAMELGPYPERVGEPDCSYYMRTGMCRFGMTCKFNHPADRKLAVAAARMKGEYPQRIGQPECQNEKECAYYLRTGQCKFGSTCKFHHSQPSTMMVAVRGSVYSPGQSATSPGQHAYQGAVTSWPLSRSASFIASPRWPGHSSYAQVIVPPGLVQVPGWSPYTAQIGSSSSEDQQRTPGAAQYYTGSRQSGTSIGDQGMFSSYQAGSVPVGLYAVQRENLFPERPDQPECQFYMKTGDCKFGAVCKFHHPRERIIPTPNCALSPLGLPLRPGEPICSFYNRYGMCKFGPNCKFDHPMGNAMYGQAPSPASEAPAPRRMLAHVPPSHPEASPDGGSGRSRRIAHSDSQQIPSGERSAEREAS

SEQ ID NO: 176107 - protein, 207 aa, Zea Mays
MWQMNLEEAMELGPYPERVGEPDCSYYMRTGMCRFGMTCKFNHPADRKLAVAAARMKGEYPQRIGQPECQYYLKTGTCKFGATCKFHHPREKAAMATRVQLNELGYPLRPNEKECAYYLRTGQCKFGSTSCLPRGCNKLALVEICFFHCKSKVARSFKLCTSDCSSRACSGPRVESLYCANWFFILGGPTTDTWSCSILYWLTPKWY

SEQ ID NO: 176108 - protein, 367 aa, Zea Mays
MWQMNLEEAMELGPYPERVGEPDCSYYMRTGMCRFGMTCKFNHPADRKLAVAAARMKGEYPQRIGQPECQNEKECAYYLRTGQCKFGSTCKFHHSQPSTMMVAVRGSVYSPGQSATSPGQHAYQGAVTSWPLSRSASFIASPRWPGHSSYAQVIVPPGLVQVPGWSPYTAQIGSSSSEDQQRTPGAAQYYTGSRQSGTSIGDQGMFSSYQAGSVPVGLYAVQRENLFPERPDQPECQFYMKTGDCKFGAVCKFHHPRERIIPTPNCALSPLGLPLRPGEPICSFYNRYGMCKFGPNCKFDHPMGNAMYGQAPSPASEAPAPRRMLAHVPPSHPEASPDGGSGRSRRIAHSDSQQIPSGERSAEREAS

SEQ ID NO: 176109 - protein, 495 aa, Zea Mays
MWQMNLEEAMELGPYPERVGEPDCSYYMRTGMCRFGMTCKFNHPADRKLAVAAARMKGEYPQRIGQPECQYYLKTGTCKFGATCKFHHPREKAAMATRVQLNELGYPLRPNEKECAYYLRTGQCKFGSTCKFHHSQPSTMMVAVRGSVYSPGQSATSPGQHAYQGAVTSWPLSRSASFIASPRWPGHSSYAQVIVPPGLVQVPGWSPYTAQIGSSSSEDQQRTPGAAQYYTGSRQSGTSIGDQGMFSSYQAGSVPVGLYAVQRENLFPERPDQPECQFYMKTGDCKFGAVCKFHHPRERIIPTPNCALSPLGLPLRPVFELKQSMKDKNLHLSSVATTIRESQYAVSTIATACASSVQIANSITQWEMPCTARLHRQLARPQLLGACWHMYRRRTQKHRLMVVPEGLGGLPTLIPSKYPLVKGALRERRPRPSSVSSFPILDWSNHLQPTTFEDPKLYRSFAPPLSFTYRSLLQRVLHSGRKKFLPVRDAHLLPH

SEQ ID NO: 176110 - protein, 131 aa, Zea Mays
MAVTGLQLGYKAFDQLEGLEVAWNQIKVGDLLRNNDDLERLRSEVWLLKTLKHKNIIKFYNSWLDKRSNNINFIMEVFTSGMLRQYRIKHKKVDIRALKKWSRQILSGLVYLHNHDPPMIHRDLKCDNIYS

SEQ ID NO: 176111 - protein, 454 aa, Zea Mays
MALSVEKTSSGREYKVKDLSQADFGRLEIELAEVEMPGLMACRAEFGPSKPFAGARISGSLHMTIQTAVLIETLTALGAEVRWCSCNIFSTQDHAAAAIARDSAAVFAWKGETLEEYWWCTERCLDWGEAGGPDLIVDDGGDATLLIHEGVKAEEDYEKTGKIPDPESTDNAEFKIVLTIIRDGLKADPKKYRKMKERLVGVSEETTTGVKRLYQMQETGALLFPAINVNDSVTKSKFDNLYGCRHSLPDGLMRATDVMIAGKVAVVCGYGDVGKGCAAALKQAGARVIVTEIDPICALQALMEGLQVLPLEDVVSEADIFVTTTGNKDIIMVDHMRKMKNNAIVCNIGHFDNEIDMLGLETYPGVKRITIKPQTDRWVFPETNTGIIVLAEGRLMNLGCATGHPSFVMSCSFTNQVIAQLELWKEKSSGKYEKKVYVLPKHLDEKELFAFAEE

SEQ ID NO: 176112 - protein, 105 aa, Zea Mays
MCRLFSLAHGSRIELLFQGRELEEEEGSWLARRRRRRARGRAVTAATAAPGQSHRGASAWTRRPAGATRPASNPASSPTHRCTSAWTASPASASAAAPPPPPRTN

SEQ ID NO: 176113 - protein, 1386 aa, Zea Mays
MWPCIDCAANANSPGKTCPDRHRPTQTPTAGSDPACSTYASRHPSPLHPLFSSPKSRVLPPSCPQRVRSDPPGFSAAAVDLRDLSGRIQFRASSAADRGPGRRIRAPRVRPRRRSFCDGVLAWLVEGGRKERSHMRVTVTPKDEERLVDLMAREQPRSAVVAAGGDLVTAAGGGGEGSDRDSSGSIEEITADDFKKDSSSALGGAAAAAGPRSRSWVAPPAVGYMARNFRYAFNSFAWSQAVRNKPLGLQPPAPDDDEVEHAVDVSDGEKEEGEIEEGEAVEALASPAPAQPETIDLDSDAPEKSESVAIDGSASVVPVPAAEEEEVNLDQRVGSILEELEMVSIEEAEKYMGICFMFFLEQRLCFRSFEGACARLHTCFENLKPLFQELENGSPMAILEPLMQQAFIGIDTLTTVANLYNLPRREQNKTTLLKLLFHIKNRYSDMLTPEQREEMDSRVRKLVFGEKDNVSDPSTSCGTSAINVSAPSGQVSNTGGLPFESGAANLFSSLPRLEVPAKRNSPLLNLHADYDENSLPSPTRDNAPPFPALKPIGFGAFPMVPEKLSFLDRVEPTKNSLYPPLNDPLKAVSSYQQKYGQKSVYPSDDLPSPTPSGDEGKPADKGGDIFSDVSSFPVPKSIVLPSTSQMPASQPSTVSSSSISYASSTSQMAASQPITVSSSGISYASGPPGFAKQIEQSTAGPNHAIKAASKSRDPRLRFLNRDSAGATDVNWRANFSELKDGNLGGVSVGNRKQKAVDDPQVDDNALKRFRGGIANQRDMQPTGNPNQLMNIRAPTHSSSINMKTLQPPQTTAPHVSAAPAVPLPPMLLKDIAVNPALLMHLIQMEHQKKSASESQGGMSSGMTNNGIAGMVFTPGNAPKITEAAQVPSVRPQVPVQTPPLNSQNDGGIVRMKPRDPRRILHNNIAQKSDAMSLEQVKNNGTTQPDSQGTKDQTTPVPSQPALPSSIARPFSSAKHVDPVSNSQLAATAIMAPTQALSSVNKVDPRLAVEQNGQNADATTNGASATTLEATQPVSPWGDVDHLLDGYDDQQKALIQKERARRITEQHKMFSARKLCLVLDLDHTLLNSAKFIEVEPIHEEMLRKKEEQDRTLPERHLYRFHHMNMWTKLRPGIWNFLQKASNLFELHLYTMGNKLYATEMAKVLDPTGTLFAGRVISRGDDGDPFDSDERVPKSKDLDGVLGMESAVVIIDDSVRVWPHNRHNLIVVERYTYFPCSRRQFGLPGPSLLEIDRDERPEDGTLASSLAVIERIHHNFFSHPNLNEADVRSILASEQRRILTGCRIVFSRVFPVGDASPHLHPLWQTAEQFGAVCTNLVDDRVTHIVANSPGTDKVNWALSKGKFVVHPGWVEASALLYRRANEHDFAVK

SEQ ID NO: 176114 - protein, 1369 aa, Zea Mays
MWPCIDCAANANSPGKTCPDRHRPTQTPTAGSDPACSTYASRHPSPLHPLFSSPKSRVLPPSCPQRVRSDPPGFSAAAVDLRDLSGRIQFRASSAADRGPGRRIRAPRVRPRRRSFCDGVLAWLVEGGRKERSHMRVTVTPKDEERLVDLMAREQPRSAVVAAGGDLVTAAGGGGEGSDRDSSGSIEEITADDFKKDSSSALGGAAAAAGPRSRSWVAPPAVGYMARNFRYAFNSFAWSQAVRNKPLGLQPPAPDDDEVEHAVDVSDGEKEEGEIEEGEAVEALASPAPAQPETIDLDSDAPEKSESVAIDGSASVVPVPAAEEEEVNLDQRVGSILEELEMVSIEEAEKSFEGACARLHTCFENLKPLFQELENGSPMAILEPLMQQAFIGIDTLTTVANLYNLPRREQNKTTLLKLLFHIKNRYSDMLTPEQREEMDSRVRKLVFGEKDNVSDPSTSCGTSAINVSAPSGQVSNTGGLPFESGAANLFSSLPRLEVPAKRNSPLLNLHADYDENSLPSPTRDNAPPFPALKPIGFGAFPMVPEKLSFLDRVEPTKNSLYPPLNDPLKAVSSYQQKYGQKSVYPSDDLPSPTPSGDEGKPADKGGDIFSDVSSFPVPKSIVLPSTSQMPASQPSTVSSSSISYASSTSQMAASQPITVSSSGISYASGPPGFAKQIEQSTAGPNHAIKAASKSRDPRLRFLNRDSAGATDVNWRANFSELKDGNLGGVSVGNRKQKAVDDPQVDDNALKRFRGGIANQRDMQPTGNPNQLMNIRAPTHSSSINMKTLQPPQTTAPHVSAAPAVPLPPMLLKDIAVNPALLMHLIQMEHQKKSASESQGGMSSGMTNNGIAGMVFTPGNAPKITEAAQVPSVRPQVPVQTPPLNSQNDGGIVRMKPRDPRRILHNNIAQKSDAMSLEQVKNNGTTQPDSQGTKDQTTPVPSQPALPSSIARPFSSAKHVDPVSNSQLAATAIMAPTQALSSVNKVDPRLAVEQNGQNADATTNGASATTLEATQPVSPWGDVDHLLDGYDDQQKALIQKERARRITEQHKMFSARKLCLVLDLDHTLLNSAKFIEVEPIHEEMLRKKEEQDRTLPERHLYRFHHMNMWTKLRPGIWNFLQKASNLFELHLYTMGNKLYATEMAKVLDPTGTLFAGRVISRGDDGDPFDSDERVPKSKDLDGVLGMESAVVIIDDSVRVWPHNRHNLIVVERYTYFPCSRRQFGLPGPSLLEIDRDERPEDGTLASSLAVIERIHHNFFSHPNLNEADVRSILASEQRRILTGCRIVFSRVFPVGDASPHLHPLWQTAEQFGAVCTNLVDDRVTHIVANSPGTDKVNWALSKGKFVVHPGWVEASALLYRRANEHDFAVK

SEQ ID NO: 176115 - protein, 788 aa, Zea Mays
MRPVTPLLFILSFLRPNLACCLRPAPSACAPIRRVSALRLSIYAICLAEYSSEPRALQIEDLVVGFGRRGSFEGACARLHTCFENLKPLFQELENGSPMAILEPLMQQAFIGIDTLTTVANLYNLPRREQNKTTLLKLLFHIKNRYSDMLTPEQREEMDSRVRKLVFGEKDNVSDPSTSCGTSAINVSAPSGQVSNTGGLPFESGAANLFSSLPRLEVPAKRNSPLLNLHADYDENSLPSPTRDNAPPFPALKPIGFGAFPMKYGQKSVYPSDDLPSPTPSGDEGKPADKGGDIFSDVSSFPVPKSIVLPSTSQMPASQPSTVSSSSISYASSTSQMAASQPITVSSSGISYASGPPGFAKQIEQSTAGPNHAIKAASKSRDPRLRFLNRDSAGATDVNWRANFSELKDGNLGGVSVGNRKQKAVDDPQVDDNALKRFRGGIANQRDMQPTGNPNQLMNIRAPTHSSSINMKTLQPPQTTAPHVSAAPAVPLPPMLLKDIAVNPALLMHLIQMEHQKKSASESQGGMSSGMTNNGIAGMVFTPGNAPKITEAAQVPSVRPQVPVQTPPLNSQNDGGIVRMKPRDPRRILHNNIAQKSDAMSLEQVKNNGTTQPDSQGTKDQTTPVPSQPALPSSIARPFSSAKHVDPVSNSQLAATAIMAPTQALSSVNKVDPRLAVEQNGQNADATTNGASATTLEATQPVSPWGDVDHLLDGYDDQQKALIQKERARRITEQHKMFSARKLCLVLDLDHTLLNSAKKWNQFMKRCYGRKRSKTGLCLNVISTVFII

SEQ ID NO: 176116 - protein, 1227 aa, Zea Mays
MRVTVTPKDEERLVDLMAREQPRSAVVAAGGDLVTAAGGGGEGSDRDSSGSIEEITADDFKKDSSSALGGAAAAAGPRSRSWVAPPAVGYMARNFRYAFNSFAWSQAVRNKPLGLQPPAPDDDEVEHAVDVSDGEKEEGEIEEGEAVEALASPAPAQPETIDLDSDAPEKSESVAIDGSASVVPVPAAEEEEVNLDQRVGSILEELEMVSIEEAEKSFEGACARLHTCFENLKPLFQELENGSPMAILEPLMQQAFIGIDTLTTVANLYNLPRREQNKTTLLKLLFHIKNRYSDMLTPEQREEMDSRVRKLVFGEKDNVSDPSTSCGTSAINVSAPSGQVSNTGGLPFESGAANLFSSLPRLEVPAKRNSPLLNLHADYDENSLPSPTRDNAPPFPALKPIGFGAFPMVPEKLSFLDRVEPTKNSLYPPLNDPLKAVSSYQQKYGQKSVYPSDDLPSPTPSGDEGKPADKGGDIFSDVSSFPVPKSIVLPSTSQMPASQPSTVSSSSISYASSTSQMAASQPITVSSSGISYASGPPGFAKQIEQSTAGPNHAIKAASKSRDPRLRFLNRDSAGATDVNWRANFSELKDGNLGGVSVGNRKQKAVDDPQVDDNALKRFRGGIANQRDMQPTGNPNQLMNIRAPTHSSSINMKTLQPPQTTAPHVSAAPAVPLPPMLLKDIAVNPALLMHLIQMEHQKKSASESQGGMSSGMTNNGIAGMVFTPGNAPKITEAAQVPSVRPQNSQNDGGIVRMKPRDPRRILHNNIAQKSDAMSLEQVKNNGTTQPDSQGTKDQTTPVPSQPALPSSIARPFSSAKHVDPVSNSQLAATAIMAPTQALSSVNKVDPRLAVEQNGQNADATTNGASATTLEATQPVSPWGDVDHLLDGYDDQQKALIQKERARRITEQHKMFSARKLCLVLDLDHTLLNSAKFIEVEPIHEEMLRKKEEQDRTLPERHLYRFHHMNMWTKLRPGIWNFLQKASNLFELHLYTMGNKLYATEMAKVLDPTGTLFAGRVISRGDDGDPFDSDERVPKSKDLDGVLGMESAVVIIDDSVRVWPHNRHNLIVVERYTYFPCSRRQFGLPGPSLLEIDRDERPEDGTLASSLAVIERIHHNFFSHPNLNEADVRSILASEQRRILTGCRIVFSRVFPVGDASPHLHPLWQTAEQFGAVCTNLVDDRVTHIVANSPGTDKVNWALSKGKFVVHPGWVEASALLYRRANEHDFAVK

SEQ ID NO: 176117 - protein, 458 aa, Zea Mays
MDAPRGGHARRPGPSGEAANQRRAAAAQAMARMEEMMLAHAGAAGEFSIILDAPLPSLQQYRRHPTPPSGAPSASSANSSPFRRGGGGGRDEGVPARLRRDGSGHDALGDPVTAARASRHGAADGTGAGAARPRAGGARREREQEKPVEAPVRLTDPRSVRRPVSRGETPPPTAAEVRRVADQEEEEETPLKLLARGGRSSSAARPAEASQASETVPTAARPSSRRSRRDVGAKQGLSEVTSNVDSDVESVGRRSSRGSEDGGDERVSLPMPLAAVVARDRSRSNSPAISRNGVDSAAANRTPSTGRSTFAPPVGVSVRPLQAVEIPNGTPRDRRAVYPDPTFAQSTRSRDSHDSSTLTEELEMLKDENVNLLEKLGLAEEKLRQSEARTTELEKQVANLGNGLSMEVKLMKRREEMLVRKEQEIRKALISKNGKSEELTTLQQQLQVSLQEKKHRLL

SEQ ID NO: 176118 - protein, 76 aa, Zea Mays
MVSHASFDTNRSSMRGATVAPGLVSVDHRLHLRALARSMSWAAAGEAAILGIRAPARDHGSRTLLPPHPHRPRCQT

SEQ ID NO: 176119 - protein, 63 aa, Zea Mays
MRGATVAPGLVSVDHRLHLRALARSMSWAAAGEAAILGIRAPARDHGSRTLLPPHPHRPRCQT

SEQ ID NO: 176120 - protein, 52 aa, Zea Mays
MFILQHIPMPRRSLCNKTSQMKKVVLYSSYEEDGVEKSGGGSWRSWAIICRP

SEQ ID NO: 176121 - protein, 87 aa, Zea Mays
MYEPTLFSCSHNILVLLYTCVEIYLPRLWNSKLLLNFYLCINQSRVFMHAHLHHFSSWQTTIKPFYVSQDTHAYTFPFMQVYILLVC

SEQ ID NO: 176122 - protein, 95 aa, Zea Mays
MAGRNASHMAMASRSSTTGTAVLCFLVVVSLFLAPSLFVAGTEAAAAYGAGRKMKQAAAGAVATKQDGYGYPATSSPAGYPAVPCCPHPPEGGRG

SEQ ID NO: 176123 - protein, 72 aa, Zea Mays
MYSTTRFRFEPALEVAQPRLRLQTAPPHTSASAGDLPERLPSRACDSATALLSPGTPPAPLLPLPSASPPTG

SEQ ID NO: 176124 - protein, 162 aa, Zea Mays
MDRASILGDAIEYLKELLQKINDLQNDLESSPSTASLPPTPTSFHPLTPTLPTLPSRVKEELCPSALPSPTSQQPRVEVRMREGRAVNIHMLCARRPGLLLSAMRAIEGLGLDVQQAVISCFNGFSLDIFKAELCKEGPGLLPEEIKSVLLQSAGFHGGVMP

SEQ ID NO: 176125 - protein, 90 aa, Zea Mays
MLQKNVVWCLVAQTMIKAMFLSIDPVPKFHNLSGARPKQSHATTSLFHLNLVIIFVVNHVVALSSKSLDPSSILPHYLVICCNLFSSIGC

SEQ ID NO: 176126 - protein, 499 aa, Zea Mays
MVRTRRRLVLLLLLLGLTVLSPLALYTSRLSVALNSIQARVFPGEITNQGRGVKADKLNALPLQTVSSLKEPVDIVFSEELTESKSQELRLPKVGAHKSRVLSEVTVADDDTSSKDNEVIEQVITLEAQDGGLVKGAGVSDEQEKNIGSLQQSSSEESSQDTMPKQTPAKVVAENSQSARTDGKTKTTVLPDMRIRNIKDQLIKAKVYLGLGSIRASSQYLKDLRQRIREVQKVLGDASKDSDLPKNAHEKVKALEQMLIKGKQMQDDCSIIVKKLRAMLHSAEEQLHAHKKQTVFLTQLAAKTLPKGLHCLPLRLANEYFSLDPVRQQFPNQQNLINPKLYHYALFSDNILATAVVVNSTVLNAKHPSDHVIHIVTDKLNYAPMRMWFLSNPPGKATIEVQNIEEFTWLNDSYSPVLKHLGSQSMIDYYFGTNRANSDSNLKYRNPKYLSILNHLRFYLPEIYPKLDKMVFLDDDIVVKKDLAGLWSINMKGKAAEHN

SEQ ID NO: 176127 - protein, 487 aa, Zea Mays
MPKQTPAKVVAENSQSARTDGKTKTTVLPDMRIRNIKDQLIKAKVYLGLGSIRASSQYLKDLRQRIREVQKVLGDASKDSDLPKNAHEKVKALEQMLIKGKQMQDDCSIIVKKLRAMLHSAEEQLHAHKKQTVFLTQLAAKTLPKGLHCLPLRLANEYFSLDPVRQQFPNQQNLINPKLYHYALFSDNILATAVVVNSTVLNAKHPSDHVIHIVTDKLNYAPMRMWFLSNPPGKATIEVQNIEEFTWLNDSYSPVLKHLGSQSMIDYYFGTNRANSDSNLKYRNPKYLSILNHLRFYLPEIYPKLDKMVFLDDDIVVKKDLAGLWSINMKGKVNGAVETCGESFHRYDRYLNFSNPIITKSFDPHACVWAFGMNVFDLAEWRRQNITEIYHSWQKLNEDRSLWKLGTLPPGLVTFWNKTFPLSRSWHVLGLGYNPHVNSRDIEHAAVIHYNGNMKPWLEIGLPKFRSYWSKYLDYDQSFLRECNINP

SEQ ID NO: 176128 - protein, 641 aa, Zea Mays
MVRTRRRLVLLLLLLGLTVLSPLALYTSRLSVALNSIPRVFPGEITNQGRGVKADKLNALPLQTVSSLKEPVDIVFSEELTESKSQGAHKSRVLSEVTVADDDTSSKDNEVIEQVITLEAQDGGLVKGAGVSDEQEKNIGSLQQSSSEESSQDTMPKQTPAKVVAENSQSARTDGKTKTTVLPDMRIRNIKDQLIKAKVYLGLGSIRASSQYLKDLRQRIREVQKVLGDASKDSDLPKNAHEKVKALEQMLIKGKQMQDDCSIIVKKLRAMLHSAEEQLHAHKKQTVFLTQLAAKTLPKGLHCLPLRLANEYFSLDPVRQQFPNQQNLINPKLYHYALFSDNILATAVVVNSTVLNAKHPSDHVIHIVTDKLNYAPMRMWFLSNPPGKATIEVQNIEEFTWLNDSYSPVLKHLGSQSMIDYYFGTNRANSDSNLKYRNPKYLSILNHLRFYLPEIYPKLDKMVFLDDDIVVKKDLAGLWSINMKGKVNGAVETCGESFHRYDRYLNFSNPIITKSFDPHACVWAFGMNVFDLAEWRRQNITEIYHSWQKLNEDRSLWKLGTLPPGLVTFWNKTFPLSRSWHVLGLGYNPHVNSRDIEHAAVIHYNGNMKPWLEIGLPKFRSYWSKYLDYDQSFLRECNINP

SEQ ID NO: 176129 - protein, 642 aa, Zea Mays
MVRTRRRLVLLLLLLGLTVLSPLALYTSRLSVALNSIQARVFPGEITNQGRGVKADKLNALPLQTVSSLKEPVDIVFSEELTESKSQGAHKSRVLSEVTVADDDTSSKDNEVIEQVITLEAQDGGLVKGAGVSDEQEKNIGSLQQSSSEESSQDTMPKQTPAKVVAENSQSARTDGKTKTTVLPDMRIRNIKDQLIKAKVYLGLGSIRASSQYLKDLRQRIREVQKVLGDASKDSDLPKNAHEKVKALEQMLIKGKQMQDDCSIIVKKLRAMLHSAEEQLHAHKKQTVFLTQLAAKTLPKGLHCLPLRLANEYFSLDPVRQQFPNQQNLINPKLYHYALFSDNILATAVVVNSTVLNAKHPSDHVIHIVTDKLNYAPMRMWFLSNPPGKATIEVQNIEEFTWLNDSYSPVLKHLGSQSMIDYYFGTNRANSDSNLKYRNPKYLSILNHLRFYLPEIYPKLDKMVFLDDDIVVKKDLAGLWSINMKGKVNGAVETCGESFHRYDRYLNFSNPIITKSFDPHACVWAFGMNVFDLAEWRRQNITEIYHSWQKLNEDRSLWKLGTLPPGLVTFWNKTFPLSRSWHVLGLGYNPHVNSRDIEHAAVIHYNGNMKPWLEIGLPKFRSYWSKYLDYDQSFLRECNINP

SEQ ID NO: 176130 - protein, 385 aa, Zea Mays
MQDDCSIIVKKLRAMLHSAEEQLHAHKKQTVFLTQLAAKTLPKGLHCLPLRLANEYFSLDPVRQQFPNQQNLINPKLYHYALFSDNILATAVVVNSTVLNAKHPSDHVIHIVTDKLNYAPMRMWFLSNPPGKATIEVQNIEEFTWLNDSYSPVLKHLGSQSMIDYYFGTNRANSDSNLKYRNPKYLSILNHLRFYLPEIYPKLDKMVFLDDDIVVKKDLAGLWSINMKGKVNGAVETCGESFHRYDRYLNFSNPIITKSFDPHACVWAFGMNVFDLAEWRRQNITEIYHSWQKLNEDRSLWKLGTLPPGLVTFWNKTFPLSRSWHVLGLGYNPHVNSRDIEHAAVIHYNGNMKPWLEIGLPKFRSYWSKYLDYDQSFLRECNINP

SEQ ID NO: 176131 - protein, 85 aa, Zea Mays
MYPWRCSSRTSEEREKMGQTFTVHYFTYENGIQKYLIWGLTARVLIHAASVVYERPPDFTERRAHFKLPKFTKDCSSMLAGPAKH

SEQ ID NO: 176132 - protein, 69 aa, Zea Mays
MGQTFTVHYFTYENGIQKYLIWGLTARVLIHAASVVYERPPDFTERRAHFKLPKFTKDCSSMLAGPAKH

SEQ ID NO: 176133 - protein, 87 aa, Zea Mays
MMLIVDDWSLKSPLRGKKLFKLRIHPPQQMKPQMKVRAVKVRAEVGNFDNGEKLRAQASEGEEVKTCAAKKKGKRRQCPCIICKSCV

SEQ ID NO: 176134 - protein, 63 aa, Zea Mays
MEKSFERKPAKEKKSKLAQQKRKGKDDNVPVSFVNHVCKPHGHVCNFLRCHSTFLYIGEQCPT

SEQ ID NO: 176135 - protein, 840 aa, Zea Mays
MKGKRFSLSLGRVGDQAPGGAERAGRGGAGTRAHYAQPNCYLTGTGTGTGTGCATLPPLHVTCALCSAPLAAGVYCTSPTSKQMRRKRSTALHTPPWALARLAARGCAAYYKARASSCRPERRACCLPCLAFACQSNPVLHLLGRLVAGQSSGASFDSSAVAGCLSSQLARRLVAPPGREGVCVCLADRDRIREIEREAMDDAERSQAPPESCVDWRGRPCRPRHGGMRAAAFVLGACVRFRCLSLPPSLPPWGRIITATLLVAPVTRPPTSRRARPRPTPRRRPGNAVYIQQQIKKASGCCAHCSVPGVADDGAGGGGEQPHHLRVRGAALPAAAGGQRGDQLRRHRLHPLAPRRLPLRLLRRLPAHAAGLRRRRARGPGTTGGASASPAAEVGAVQHADHGGQLRAGRRHQGRRLLRGAVPGGARRRLRHAQHDRVRRRPVRGGGEGRQAPLHLLQPLLPGLLRRRGRRADGRGLGADALRDGRRLRPRRRRPGRRAPRPRVRRGGVPQQAPPGQRHLHSHCKGFRCCVQQEEADLPFRLLQPCPHRGRRCGGCRRRRRLPPRQQVQVLGQGVHQGRGGHGAGERVAAVHGGRGAADQDPAGRAAHRGVHRRHQHRAGAAADVLGAAGQRHGHEAGAVILPNPAGVAAGHPVRHAAGAGPGLRAPAGAARAAAHGRAGRDRPAPAHRRRPLPRRAVHGLRRGRRAQAPGRRRAGVRRAAAAAAVRALARAAVLRLRPVGAVHQRGPHGVLLRAGVVDRRDGGAHAGLLHGLLLLLLLVRVLPQLGARVAGEQGHGGRRPPWLARRQRPQQGQARPVLLGARRAQRPQLLLLPAVREVV

SEQ ID NO: 176136 - protein, 50 aa, Zea Mays
MKNCNNISVGRKNAIVLPNITEAEETTHVRLKHRLSYIAVQNQSHLYCHR

SEQ ID NO: 176137 - protein, 92 aa, Zea Mays
MEVAAVPRSAAACRAAPLLPAVRAAACHLALPRRAFSASVAAAPAPRRLAARRAADGDSVETAPEAVPIEKRFPPFPSVMDINQIREILPHR

SEQ ID NO: 176138 - protein, 496 aa, Zea Mays
MNPSGQWEEYPHYVNMEGLHSVSPGIYNDNQSLMLSAGYANNPQMMYGAYSPVSTAGDGQQYFPVHYSFSNPYYQPPASPSMGYSNSATGMSQGDPMLQQEYFLPDGLLYSPTPGYHQPFSSFDRALTQPNNAPGLFGQGSLPLASGMHHGSMYGPGSYKGRQYGSKFGGTTPSWSSAGRRFGTFDLSGNQQRGSMSFGSHNGSLEFMNEQNRGPRATKPKIQDTENSGDEKSEKTVPLIDSELYNRSDFITEYKDAKFFVIKSYTEDHVHRSIKYNVWASTASGNRKLDSAYRAAREKEEHCPIFLFFSVNGSGQFCGVAEMIGPVDFDRSVNYWQQDKWSGQFPVKWHIIKDVPNNLLRHIILENNDNKPVTNSRDTQELEQGLQMLTIFKSHEAETTIVEDFDFYEQREKALQENRRQQHAASTDTQKLVDTKAQDAVADISDAFAKAVQLKNTENSGTTPKTEGASAEKGSAATAKVEGSANLNTGPVEESS

SEQ ID NO: 176139 - protein, 112 aa, Zea Mays
MSRALGPCHDIRPCLTTIAFNTTTALFLLPLQAGAHAHSHHLFALRACLVLALTNLPGPGSSPRTLILSAAAGSTFLAEHSQARLAGSEPNRPLVPHSQPSSPPLTTIGPSL

SEQ ID NO: 176140 - protein, 86 aa, Zea Mays
MLDEFQWENEWVDENCDELTWGGMKLLVHLTIYGTITCLWLLLLVQQPPSARRIAGSAQGLLQLQISLKKTTMTMMQEMKHKIRCV

SEQ ID NO: 176141 - protein, 238 aa, Zea Mays
MISHTAAITIYTKTGERREMAEATPYEEQRRRQVEANKRKLEELQLHHLSAAIREAAAAAKPSLVKKRKARVPLDVADAVMEPVRRSGRLANLPDKPVYREKVPDFGMKIRRTYGSVRRDLTNRVYATDDARSYAISKAEDLEQELDSSFPIFIKPMTQSHVTGGFWLGLPIHFCRKYLPKRDEMITLVDEDDDESDTLYLAMKRGLSAGWRGFAVQQKLVDGDCLVFQLIEQTKFKC

SEQ ID NO: 176142 - protein, 57 aa, Zea Mays
MRRAGIESCGTGGRRKGRRRACSAAVMVPPREFGDDAVLPWPVVVRYAFETRGEGGV

SEQ ID NO: 176143 - protein, 296 aa, Zea Mays
MFCPMICLEIVKNGTGSSKNHAIVLPERVSPASLSLILNYCRFHQVPGRSNKERKSFDEKFVRIDTEKLCKLASAALGLQLRPLVDLTCGALARIIGGKTPDEVRDIFHLPDDLTEEEKLEPLKNVNDDPTIRLLNRLYAKKRKELQERQKLKDVQTQEQKDERSLDELLCFINGHGDSRGGKASKNKKRNKRRKDQVKNPTKADSEPVNKEGASCVVPCKEDSNNLSRHPCQSPNLQDDVEYPFDNADLDDGLDPAMREELDREVAEFEMKLKLAWSERMVLGQDQPMESDVDTR

SEQ ID NO: 176144 - protein, 861 aa, Zea Mays
MGKSSKKAAAVAAAPAAVPKGKKREAEDEIEMAVSAKKQKAAPPAKAVPTSKKDAKEDAKSKKQPPPKKAENSSSDSEEDPESEEENFYNLIESGRADGDEEFDEDEEDGFEFGDADEAMQCVVMAESSTTAAALRAHTQDYEALAAHKRKALAEEQPQREEGPKRPRPDQLSEAEAATMFDQLMEGFGLRRKRRSKDGKRRGRKKGTKNKGSAEVIKKLGDATLLFAEEKFNEAIPILHEIVRIAPNLSDSYYLLGSIYSEIGELDKAINFLMLAAYVSPKDASLWKKLIPLAKKKGDASLARHCILKAMNADPEDVDLKYLCGYMYHNLCEYQKAAEIYEQIVRIYPANSAVRKVAAQMYRECGQIDNAINLLKDYADTQTFNIDWSVLDLLISLYLRNNVFSEALKQIKRAQLHLGSQQKLPVQLQAKEVICHAYCGDMKHAEIFLRDVRLEPSKENIDVLKELASNLEKMGRYEYAVKFYLLIENVATQNDGGLCFDHKEMGSWYVKAAQCYMILGDKKNAIPYFYKALQSMKDNIGIRLTLSSLLIDDDKTDEAATLLSPPKIPELQSANTPDQQKPWWCDGKVKMALAKLYYNKGNLEDFVDTIFHPILETLNVEYANRKVKSMRKLPNIVLHERVKVLGEQRPDSVFQGLRPIASPDELQKANRAKKLIEKRTAANEELKHDYLPRTKQVPPVPGLLTNVEHHQLVLNLCRTLALLQRYWDALQIINRTLKLGNDALTGDKKEELRSLGAQIAYRAPDPSHGFKYVRYVVQQHPYSLAAWNSYYKVVSRIEDRFPHHFKYLLRTREANPDCVPPIIISGHRFTAISQHQSAARDYLEAYKLDPENPLINLCALP

SEQ ID NO: 176145 - protein, 739 aa, Zea Mays
MGKSSKKAAAVAAAPAAVPKGKKREAEDEIEMAVSAKKQKAAPPAKAVPTSKKDAKEDAKSKKQPPPKKAENSSSDSEEDPESEEENFYNLIESGRADGDEEFDEDEEDGFEFGDADEAMQCVVMAESSTTAAALRAHTQDYEALAAHKRKALAEEQPQREEGPKRPRPDQLSEAEAATMFDQLMEGFGLRRKRRSKDGKRRGRKKGTKNKGSAEVIKKLGDATLLFAEEKFNEAIPILHEIVRIAPNLSDSYYLLGSIYSEIGELDKAINFLMLAAYVSPKDASLWKKLIPLAKKKGDASLARHCILKAMNADPEDVDLKYLCGYMYHNLCEYQKAAEIYEQIVRIYPANSAVRKVAAQMYRECGQIDNAINLLKDYADTQTFNIDWSVLDLLISLYLRNNVFSEALKQIKRAQLHLGSQQKLPVQLQAKEVICHAYCGDMKHAEIFLRDVRLEPSKENIDVLKELASNLEKMGRYEYAVKFYLLIENVATQNDGGLCFDHKEMGSWYVKAAQCYMILGDKKNAIPYFYKALQSMKDNIGIRLTLSSLLIDDDKTDEAATLLSPPKIPELQSANTPDQQKPWWCDGKVKMALAKLYYNKGNLEDFVDTIFHPILETLNVEYANRKVKSMRKLPNIVLHERVKVLGEQRPDSVFQGLRPIASPDELQKANRAKKLIEKRTAANEELKHDYLNKASSSCSWSTDKCGASSACVKSLSNISFAAAILGCTADYQPNPQTWK

SEQ ID NO: 176146 - protein, 532 aa, Zea Mays
MGKSSKKAAAVAAAPAAVPKGKKREAEDEIEMAVSAKKQKAAPPAKAVPTSKKDAKEDAKSKKQPPPKKAENSSSDSEEDPESEEENFYNLIESGRADGDEEFDEDEEDGFEFGDADEAMQCVVMAESSTTAAALRAHTQDYEALAAHKRKALAEEQPQREEGPKRPRPDQLSEAEAATMFDQLMEGFGLRRKRRSKDGKRRGRKKGTKNKGSAEVIKKLGDATLLFAEEKFNEAIPILHEIVRIAPNLSDSYYLLGSIYSEIGELDKAINFLMLAAYVSPKDASLWKKLIPLAKKKGDASLARHCILKAMNADPEDVDLKYLCGYMYHNLCEYQKAAEIYEQIVRIYPANSAVRKVAAQMYRECGQIDNAINLLKDYADTQTFNIDWSVLDLLISLYLRNNVFSEALKQIKRAQLHLGSQQKLPVQLQAKEVICHAYCGDMKHAEIFLRDVRLEPSKENIDVLKELASNLEKMGRYEYAVKFYLLIENVATQNDGGLCFDHKEMGSWYVKAAQCYMILGDKKNAIPYFYKA

SEQ ID NO: 176147 - protein, 654 aa, Zea Mays
MGKSSKKAAAVAAAPAAVPKGKKREAEDEIEMAVSAKKQKAAPPAKAVPTSKKDAKEDAKSKKQPPPKKAENSSSDSEEDPESEEENFYNLIESGRADGDEEFDEDEEDGFEFGDADEAMQCVVMAESSTTAAALRAHTQDYEALAAHKRKALAEEQPQREEGPKRPRPDQLSEAEAATMFDQLMEGFGLRRKRRSKDGKRRGRKKGTKNKGSAEVIKKLGDATLLFAEEKFNEAIPILHEIVRIAPNLSDSYYLLGSIYSEIGELDKAINFLMLAAYVSPKDASLWKKLIPLAKKKGDASLARHCILKAMNADPEDVDLKYLCGYMYHNLCEYQKAAEIYEQIVRIYPANSAVRKVAAQMYRECGQIDNAINLLKDYADTQTFNIDWSVLDLLISLYLRNNVFSEALKQIKRAQLHLGSQQKLPVQLQAKEVICHAYCGDMKHAEIFLRDVRLEPSKENIDVLKELASNLEKMGRYEYAVKFYLLIENVATQNDGGLCFDHKEMGSWYVKAAQCYMILGDKKNAIPYFYKALQSMKDNIGIRLTLSSLLIDDDKTDEAATLLSPPKIPELQSANTPDQQKPWWCDGKVKMALAKLYYNKGNLEDFVDTIFHPILETLNVEYANRKVKSMRKLPNIVLHERVKVLDKRQTEQRN

SEQ ID NO: 176148 - protein, 922 aa, Zea Mays
MGKSSKKAAAVAAAPAAVPKGKKREAEDEIEMAVSAKKQKAAPPAKAVPTSKKDAKEDAKSKKQPPPKKAENSSSDSEEDPESEEENFYNLIESGRADGDEEFDEDEEDGFEFGDADEAMQCVVMAESSTTAAALRAHTQDYEALAAHKRKALAEEQPQREEGPKRPRPDQLSEAEAATMFDQLMEGFGLRRKRRAREGEERKEQRIRAVLKLLKSWVMLLYFSLKKNLTRKKGDASLARHCILKAMNADPEDVDLKYLCGYMYHNLCEYQKAAEIYEQIVRIYPANSAVRKVAAQMYRECGQIDNAINLLKDYADTQTFNIDWSVLDLLISLYLRNNVFSEALKQIKRAQLHLGSQQKLPVQLQAKEVICHAYCGDMKHAEIFLRDVRLEPSKENIDVLKELASNLEKMGRYEYAVKFYLLIENVATQNDGGLCFDHKEMGSWYVKAAQCYMILGDKKNAIPYFYKALQSMKDNIGIRLTLSSLLIDDDKTDEAATLLSPPKIPELQSANTPDQQKPWWCDGKVKMALAKLYYNKGNLEDFVDTIFHPILETLNVEYANRKVKSMRKLPNIVLHERVKVLGEQRPDSVFQGLRPIASPDELQKANRAKKLIEKRTAANEELKHDYLPRTKQVPPVPGLLTNVEHHQLVLNLCRTLALLQRYWDALQIINRTLKLGNDALTGDKKEELRSLGAQIAYRAPDPSHGFKYVRYVVQQHPYSLAAWNSYYKVVSRIEDRFPHHFKYLLRTREANPDCVPPIIISGHRFTAISQHQSAARDYLEAYKLDPENPLINLCVGTALISLALGFRLQNKNQCIVQAFAFLYRYLRLCDNSQEASYNIARAYHHIGLNTLAAVYYDKALSTEEKDHPIPKLPYEAGSRAPEDLRPGYCDVRREAAFNLHLIYMKSGATDLARRILKTYCTV

SEQ ID NO: 176149 - protein, 451 aa, Zea Mays
MKDNIGIRLTLSSLLIDDDKTDEAATLLSPPKIPELQSANTPDQQKPWWCDGKVKMALAKLYYNKGNLEDFVDTIFHPILETLNVEYANRKVKSMRKLPNIVLHERVKVLGEQRPDSVFQGLRPIASPDELQKANRAKKLIEKRTAANEELKHDYLPRTKQVPPVPGLLTNVEHHQLVLNLCRTLALLQRYWDALQIINRTLKLGNDALTGDKKEELRSLGAQIAYRAPDPSHGFKYVRYVVQQHPYSLAAWNSYYKVVSRIEDRFPHHFKYLLRTREANPDCVPPIIISGHRFTAISQHQSAARDYLEAYKLDPENPLINLCVGTALISLALGFRLQNKNQCIVQAFAFLYRYLRLCDNSQEASYNIARAYHHIGLNTLAAVYYDKALSTEEKDHPIPKLPYEAGSRAPEDLRPGYCDVRREAAFNLHLIYMKSGATDLARRILKTYCTV

SEQ ID NO: 176150 - protein, 482 aa, Zea Mays
MGSWYVKAAQCYMILGDKKNAIPYFYKALQSMKDNIGIRLTLSSLLIDDDKTDEAATLLSPPKIPELQSANTPDQQKPWWCDGKVKMALAKLYYNKGNLEDFVDTIFHPILETLNVEYANRKVKSMRKLPNIVLHERVKVLGEQRPDSVFQGLRPIASPDELQKANRAKKLIEKRTAANEELKHDYLPRTKQVPPVPGLLTNVEHHQLVLNLCRTLALLQRYWDALQIINRTLKLGNDALTGDKKEELRSLGAQIAYRAPDPSHGFKYVRYVVQQHPYSLAAWNSYYKVVSRIEDRFPHHFKYLLRTREANPDCVPPIIISGHRFTAISQHQSAARDYLEAYKLDPENPLINLCVGTALISLALGFRLQNKNQCIVQAFAFLYRYLRLCDNSQEASYNIARAYHHIGLNTLAAVYYDKALSTEEKDHPIPKLPYEAGSRAPEDLRPGYCDVRREAAFNLHLIYMKSGATDLARRILKTYCTV

SEQ ID NO: 176151 - protein, 494 aa, Zea Mays
MNMGGLCFDHKEMGSWYVKAAQCYMILGDKKNAIPYFYKALQSMKDNIGIRLTLSSLLIDDDKTDEAATLLSPPKIPELQSANTPDQQKPWWCDGKVKMALAKLYYNKGNLEDFVDTIFHPILETLNVEYANRKVKSMRKLPNIVLHERVKVLGEQRPDSVFQGLRPIASPDELQKANRAKKLIEKRTAANEELKHDYLPRTKQVPPVPGLLTNVEHHQLVLNLCRTLALLQRYWDALQIINRTLKLGNDALTGDKKEELRSLGAQIAYRAPDPSHGFKYVRYVVQQHPYSLAAWNSYYKVVSRIEDRFPHHFKYLLRTREANPDCVPPIIISGHRFTAISQHQSAARDYLEAYKLDPENPLINLCVGTALISLALGFRLQNKNQCIVQAFAFLYRYLRLCDNSQEASYNIARAYHHIGLNTLAAVYYDKALSTEEKDHPIPKLPYEAGSRAPEDLRPGYCDVRREAAFNLHLIYMKSGATDLARRILKTYCTV

SEQ ID NO: 176152 - protein, 448 aa, Zea Mays
MLAPFTAGWQSTDVHPLVIERSEGSYVYDSNGKKYIDALAGLWCTALGGNEPRLVKAATEQLNKLPFYHSFWNRTTKPSLDLANDILSMFTAREMGKVFFTNSGSEANDSQVKLVWYYNNALGRPDKKKFIARSKSYHGSTLIAASLSGLPALHQKFDLPAPFVLHTDCPHYWRFRLPDETEEEFSTRLANNLENLVLKEGPETIAAFIAEPVMGAGGVILPPKTYFEKIQAVLKKYDILLIADEVITAFGRLGTMFGCDMYNIKPDLVSIAKALSSAYMPIGAILVSPEITDVIYSQSNKLGSFAHGFTYSGHPVSCAVAVETLKIYKERNIVEHVNKIAPRFQEGIKAFSGSPIVGEIRGLGLILGTEFVDNKSPNDPFPAEWGVGSIFGAECEKRGMLIRVAGDSIMLSPPLIMTPNEVEEIISKFGDALKATEERIVELKSRKN

SEQ ID NO: 176153 - protein, 113 aa, Zea Mays
MIFRRWATKRTAGSTKNGRDSNPKYLGVKKFGGEKVLPGNIIVRQRGTRFHPGNYVGMGKDHTLFCLKEGNVRFERNKLSGRKWVHVDPVAGHDLHPIYADGFATTSDTEPMQ

SEQ ID NO: 176154 - protein, 111 aa, Zea Mays
MTTRGHGDLTGDSILKASTMFNFQEMSCCFTCATGMERNNENEGGSKVRIFSYSEMRKATHDFSGANKIGEGGFGSVFRGKLKDGTIVAVKVLSANSRVPEDSCVQLSREQ

SEQ ID NO: 176155 - protein, 657 aa, Zea Mays
MGKSSKKAAAVAAAPAAVPKGKKREAEEEIEKAVSAKKQKAAPPAKAVPTSKKDAKKSKKQPPPKKAESSSSDSEEDSESEEEVKKVQPKKAPAPKIAKQESSDDDTSDETSESDEEPAKKPAAKPLAAVAKNGSKTVKQESSSDEDSSEDESDDDSDDEPAKKAAAKPLGAVAKNGLKKGKQESSSDGSSSDDESDDDVKPAAPLKKTSVAVAQKKKGDSSESDSDDDSDEEVPPKSKAPAATIKKEDSSESESESDSEDASKTQPAKRAASKMKDESSDDSDTDEDEEPPQKKQKEALSAAKKESSSEDEDDSSEESSDDEPTKVEEKKAPKVSENSGSEDESSEDESDKDSEEPANTPKKAAVHASEKKTATKEPKTPTGSQSESTEVNTLFMGNVPWKAEFDDVKEFFEDVGEVVDVRFPTHDDGNRKGFCYVEFVSAEAAAKAYKEKQSKELHGREVRLDFAKGRSTQTPRSGNDGSFQKAARGNSSSIFIRGFDKNLSEDEIRSSLEQHFSDCGEMTRVSIPTDHESGAIKGMAYIDFKDQDSVSKALELSGSDIGGGYELYVDEAKPRGDGQRGGGRSGGRSGGRFGDRSGGRRGGGRFGERSGGRDGGGRFGGRRGGRDGGRGRGGRGFGNKHSAGTPSAGKKTTFGDD

SEQ ID NO: 176156 - protein, 807 aa, Zea Mays
MYKAANARLLLRSLSPNSAALASVNPGRAASSARLALSLPCGAWVGRSGLVRRAAAFSGTRPRFAGARAQIGAAVPAVEQFQRRMATQATVHAFKDILTSLPKPGGGEYGKFYSLPALNDPRIDKLPYSVRILLESAIRNCDNFQVTKNDVEKIIDWENTSPKLAEIPFKPARVLLQDFTGVPAVVDLAAMRDAMAKLGSDANKINPLVPVDLVIDHSVQVDVARSQNAVQANMELEFSRNKERFGFLKWGSSAFQNMLVVPPGSGIVHQVNLEYLGRVVFNTDGILYPDSVVGTDSHTTMIDGLGVAGWGVGGIEAEATMLGQPMSMVLPGVVGFKLTGKLRSGVTATDLVLTVTQMLRKHGVVGKFVEFYGEGMGKLSLADRATIANMSPEYGATMGFFPVDHVTLDYLKLTGRSDETVSMIEAYLRANKMFVDYNEPPTERIYSSYLELNLDEVEPSMSGPKRPHDRVPLKEMKSDWHACLDNKVGFKGFAVPKEQQDKVVKFDFHGQPAEMKHGSVVIAAITSCTNTSNPSVMLGAGLVAKKACELGLEVKPWVKTSLAPGSGVVTKYLLQSGLQEYLNQQGFHIVGYGCTTCIGNSGDLDESVSTAITENDVVAAAVLSGNDEVMARGTFANIRIVNKFLNGEVGPKTIHVPTGEKLSVFDAAMRYKSEGHATIILAGAEYGSGSSRDWAAKGPMLLGVKAVIAKSFERIHRSNLVGMGIIPLCFKAGEDADSLGLTGHERYSIDLPTNLSEIRPGQDVTVTTDNGKSFTCIVRFDTEVELAYFNHGGILPYVIRNLAAAHN

SEQ ID NO: 176157 - protein, 987 aa, Zea Mays
MYKAANARLLLRSLSPNSAALASVNPGRAASSARLALSLPCGAWVGRSGLVRRAAAFSGTRPRFAGARAQIGAAVPAVEQFQRRMATQATVHAFKDILTSLPKPGGGEYGKFYSLPALNDPRIDKLPYSVRILLESAIRNCDNFQVTKNDVEKIIDWENTSPKLAEIPFKPARVLLQDFTGVPAVVDLAAMRDAMAKLGSDANKINPLVPVDLVIDHSVQVDVARSQNAVQANMELEFSRNKERFGFLKWGSSAFQNMLVVPPGSGIVHQVNLEYLGRVVFNTDGILYPDSVVGTDSHTTMIDGLGVAGWGVGGIEAEATMLGQPMSMVLPGVVGFKLTGKLRSGVTATDLVLTVTQMLRKHGVVGKFVEFYGEGMGKLSLADRATIANMSPEYGATMGFFPVDHVTLDYLKLTGRSDETVSMIEAYLRANKMFVDYNEPPTERIYSSYLELNLDEVEPSMSGPKRPHDRVPLKEMKSDWHACLDNKVGFKGFAVPKEQQDKVVKFDFHGQPAEMKHGSVVIAAITSCTNTSNPSVMLGAGLVAKKACELGLEVKPWVKTSLAPGSGVVTKYLLQSGLQEYLNQQGFHIVGYGCTTCIGNSGDLDESVSTAITENDVVAAAVLSGNRNFEGRVHPLTRANYLASPPLVVAYALAGTVDIDFEKEPIGFGKDGKEVYFRDIWPSTEEIAQVVQSSVLPDMFKGTYEAITKGNPMWNQLTVPEASLYSWDSKSTYIHEPPYFKDMTMSPPGPSTVKDAYCLLNFGDSITTDHISPAGSIHKDSPAAKYLMERGVDRKDFNSYGSRRGNDEVMARGTFANIRIVNKFLNGEVGPKTIHVPTGEKLSVFDAAMRYKSEGHATIILAGAEYGSGSSRDWAAKGPMLLGVKAVIAKSFERIHRSNLVGMGIIPLCFKAGEDADSLGLTGHERYSIDLPTNLSEIRPGQDVTVTTDNGKSFTCIVRFDTEVELAYFNHGGILPYVIRNLAAAHN

SEQ ID NO: 176158 - protein, 289 aa, Zea Mays
MFKGTYEAITKGNPMWNQLTVPEASLYSWDSKSTYIHEPPYFKDMTMSPPGPSTVKDAYCLLNFGDSITTDHISPAGSIHKDSPAAKYLMERGVDRKDFNSYGSRRGNDEVMARGTFANIRIVNKFLNGEVGPKTIHVPTGEKLSVFDAAMRYKSEGHATIILAGAEYGSGSSRDWAAKGPMLLGVKAVIAKSFERIHRSNLVGMGIIPLCFKAGEDADSLGLTGHERYSIDLPTNLSEIRPGQDVTVTTDNGKSFTCIVRFDTEVELAYFNHGGILPYVIRNLAAAHN

SEQ ID NO: 176159 - protein, 305 aa, Zea Mays
MMPQQQQPGMAPPPPQAAPGAPPHWGGIPPPMAPQHQYAPPPTHQAPPPPQMWGQAPPPPPPPQAAYGQAPPPPQAAYGQALPPPQAAYGQAPPPPQAAYYGAVPAPAAVAAAPVGPSEVRTLWIGDLQYWMDDNYIYGCFASTGEVQNVKLIRDKHTGQLQGYGFIEFISRAAAERVLQTYNGTMMPNVELPFRLNWASAGEKRDDTPDYTIFVGDLAADVTDYVLQETFRAHYPSVKGAKVVTDKLTMRTKGYGFVKFGDPNEQARAMTEMNGMLCSSRPMRIGPAANKKATVVQEKDFCWWS

SEQ ID NO: 176160 - protein, 443 aa, Zea Mays
MMPQQQQPGMAPPPPQAAPGAPPHWGGIPPPMAPQHQYAPQMWGQAPPPPPPPQAAYGQAPPPPQAAYGQALPPPQAAYGQAPPPPQAAYYGAVPAPAAVAAAPVGPSEVRTLWIGDLQYWMDDNYIYGCFASTGEVQNVKLIRDKHTGQLQGYGFIEFISRAAAERVLQTYNGTMMPNVELPFRLNWASAGEKRDDTPDYTIFVGDLAADVTDYVLQETFRAHYPSVKGAKVVTDKLTMRTKGYGFVKFGDPNEQARAMTEMNGMLCSSRPMRIGPAANKKATVVQEKVPSAQGVQSDNDPNNTTIFVGGLDPNVTEDMLKQVFTPYGDVVHVKIPVGKRCGFVQYANRSSAEEALVILQGTLVGGQNVRLSWGRSPSNKQVQDSNQWAGANAGYYGYGQGYEAYGYPQSQDPNMYNYGAGAYAGYPNYQQQPVAQQPPQQQ

SEQ ID NO: 176161 - protein, 215 aa, Zea Mays
MLLPRKLLPWRRPAQDAQALAGRLLRSSSSSFDPDDDDPPFTRVPKLPPRAPSTPPPKPKALAGKIRPDEPAHSDLPFDFRYSYSETDPTWRPIGFREPTRFSPFGPGRLDRPWDGTAAARVGDYASGDERIREEVLGEPLSEEEVAALVERYRHSDCSRQINLGKGGVTHNMLDDIHNHWKRAEAVRIKCLGVPTLDMDNICFHLEAAKSYPAA

SEQ ID NO: 176162 - protein, 359 aa, Zea Mays
MRRLFRTWWPVFPSSVLRSIEDDLQFSSSENNRPTTSTNLHQTESLSPRPSHGIHVNPKYLEAQHKFKQANVVHQPAARDTRQMTDVQEDLINGLASNSSCERPSIFQKSSLQYADDPDQQETFRPLAGTRAASPHLLSTHASDMNLDGPLVNSRRNLSISPPLDVFSRNVSPKRALERLPPSHSVLGPDPRKFTDRNGRLRWGLDDGAQRPTISMLDEEYRKQSARELIDAYGNCQGRDADERLPKVQRLDPNGMASRSSARNWLTSEEEEYSWEDMSPTLTDRVSSSMPSFPPGTMRTGFPGANAGLLESDVGRHNFPSQATRLSVDGSPFNLEDRFSTASDHMQTCQHDSAVSMNL

SEQ ID NO: 176163 - protein, 344 aa, Zea Mays
MRRLFRTWWPVFPSSVLRSIEDDLQFSSSENNRPTTSTNLHQTESLSPRPSHGIHVNPKYLEAQHKFKQANVVHQPAARDTRQMTDVQEDLINGLASNSSCERPSIFQKSSLQYADDPDQQETFRPLAGTRAASPHLLSTHASDMNLDGPLVNSRRNLSISPPLDVFSRNVSPKRALERLPPSHSVLGPDPRKFTDRNGRLRWGLDDGAQRPTISMLDEEYRKQSARELIDAYGNCQGRDADERLPKVQRLDPNGMASRSSARNWLTSEEEEYSWEDMSPTLTDRVSSSMPSFPPGTMRTGFPGANAGLLESDVGRHNFPSQATRLSVDGSPFNLEDRFSTASV

SEQ ID NO: 176164 - protein, 323 aa, Zea Mays
MWDSVLHVLTIVHEDGRVPTQAAGLIEKMESFKFVFILKLMLKMLAITNELSQTLQRKNANIVHAMELLDVVKTRMATMRTDSGWESFFQSVKEFCAQKGIPVVDMDEEVPIRGRSRRDGFTITNLHYYRTEIFFVVLDKINTELCHRFNEVSSELLVCFSCLDPKNLFCSFDIEKLVRLGTLYDKDFSVIECAMLREQLETYIVHVRRHAAFGTCEDIASLSMKMVETKKHLVFPLVFKLIELALLLPVSTASVERIFSAMNIIKRELRNKIENDWMNDLMVCYTEKEIFKSLDDETITRRFQRLKTRRMQLPRVTTTRLTT

SEQ ID NO: 176165 - protein, 354 aa, Zea Mays
MRRLFRTWWPVFPSSVLRSIEDDLQFSSSENNRPTTSTNLHQTESLSPRPSHGIHVNPKYLEAQHKFKQANVVHQPAARDTRQMTDVQEDLINGLASNSSCERPSIFQYADDPDQQETFRPLAGTRAASPHLLSTHASDMNLDGPLVNSRRNLSISPPLDVFSRNVSPKRALERLPPSHSVLGPDPRKFTDRNGRLRWGLDDGAQRPTISMLDEEYRKQSARELIDAYGNCQGRDADERLPKVQRLDPNGMASRSSARNWLTSEEEEYSWEDMSPTLTDRVSSSMPSFPPGTMRTGFPGANAGLLESDVGRHNFPSQATRLSVDGSPFNLEDRFSTASDHMQTCQHDSAVSMNL

SEQ ID NO: 176166 - protein, 451 aa, Zea Mays
MAGAAASPAAGHVVERFRSRLREEAGGGEPGAAAVVHVYAEALRELTFNCKPVITELTIIAGQHATLAAGGIADAICARVAEVPPDQILPSLYLLDSIVKNIVFPSSVLRSIEDDLQFSSSENNRPTTSTNLHQTESLSPRPSHGIHVNPKYLEAQHKFKQANVVHQPAARDTRQMTDVQEDLINGLASNSSCERPSIFQKSSLQYADDPDQQETFRPLAGTRAASPHLLSTHASDMNLDGPLVNSRRNLSISPPLDVFSRNVSPKRALERLPPSHSVLGPDPRKFTDRNGRLRWGLDDGAQRPTISMLDEEYRKQSARELIDAYGNCQGRDADERLPKVQRLDPNGMASRSSARNWLTSEEEEYSWEDMSPTLTDRVSSSMPSFPPGTMRTGFPGANAGLLESDVGRHNFPSQATRLSVDGSPFNLEDRFSTASDHMQTCQHDSAVSMNL

SEQ ID NO: 176167 - protein, 486 aa, Zea Mays
MAGAAASPAAGHVVERFRSRLREEAGGGEPGAAAVVHVYAEALRELTFNCKPVITELTIIAGQHATLAAGGIADAICARVAEVPPDQILPSLYLLDSIVKNIGGEYVEHFATRLRSVFVDAYYRVHPNQYTSMRRLFRTWWPVFPSSVLRSIEDDLQFSSSENNRPTTSTNLHQTESLSPRPSHGIHVNPKYLEAQHKFKQANVVHQPAARDTRQMTDVQEDLINGLASNSSCERPSIFQYADDPDQQETFRPLAGTRAASPHLLSTHASDMNLDGPLVNSRRNLSISPPLDVFSRNVSPKRALERLPPSHSVLGPDPRKFTDRNGRLRWGLDDGAQRPTISMLDEEYRKQSARELIDAYGNCQGRDADERLPKVQRLDPNGMASRSSARNWLTSEEEEYSWEDMSPTLTDRVSSSMPSFPPGTMRTGFPGANAGLLESDVGRHNFPSQATRLSVDGSPFNLEDRFSTASDHMQTCQHDSAVSMNL

SEQ ID NO: 176168 - protein, 474 aa, Zea Mays
MAGAAASPAAGHVVERFRSRLREEAGGGEPGAAAVVHVYAEALRELTFNCKPVITELTIIAGQHATLAAGGIADAICARVAEVPPDQILPSLYLLDSIVKNIGGEYVEHFATRLRSVFVDAYYRVHPNQYTSMRRLFRTWWPVFPSSVLRSIEDDLQFSSSENNRPTTSTNLHQTESLSPRPSHGIHVHQPAARDTRQMTDVQEDLINGLASNSSCERPSIFQKSSLQYADDPDQQETFRPLAGTRAASPHLLSTHASDMNLDGPLVNSRRNLSISPPLDVFSRNVSPKRALERLPPSHSVLGPDPRKFTDRNGRLRWGLDDGAQRPTISMLDEEYRKQSARELIDAYGNCQGRDADERLPKVQRLDPNGMASRSSARNWLTSEEEEYSWEDMSPTLTDRVSSSMPSFPPGTMRTGFPGANAGLLESDVGRHNFPSQATRLSVDGSPFNLEDRFSTASDHMQTCQHDSAVSMNL

SEQ ID NO: 176169 - protein, 215 aa, Zea Mays
MNLDGPLVNSRRNLSISPPLDVFSRNVSPKRALERLPPSHSVLGPDPRKFTDRNGRLRWGLDDGAQRPTISMLDEEYRKQSARELIDAYGNCQGRDADERLPKVQRLDPNGMASRSSARNWLTSEEEEYSWEDMSPTLTDRVSSSMPSFPPGTMRTGFPGANAGLLESDVGRHNFPSQATRLSVDGSPFNLEDRFSTASDHMQTCQHDSAVSMNL

SEQ ID NO: 176170 - protein, 1061 aa, Zea Mays
MFDYIDRLFIMVRPRKLMYMAIDGVAPRAKMNQQRSRRFRAAKDAADAAAEEERLREEFEREGRRLPAKQQSQTCDSNVITPGTEFMAVLSVALQYYIHQRLNYDPGWKKIKVILSDANVPGEGEHKIMSYIRGQRNLPGFNPNTRHCLYGLDADLIMLALATHEVHFSILREVVFTPGQQDKCFLCGQVGHLAANCEGKAKRKAGEYDEKGEAIVPKKPYQFLNIWTLREYLEYEFRMPNPPFQIDFERIVDDFIFMCFFVGNDFLPHMPTLEIREGAINLLMAVYKKEFPSMGGYLTDSCTPDLNRVEHFIQAVGSYEDKIFQKRARLHQRQAERIKREKAQAKRGDDLDPHVRDDLIVPVSNFRGSRLASGAVPSPYEQNGSQRERYNQTRKAPRVSSSGSSIAAAIVEAEQDLEAQERENKEELKSMLKDALREKSDVFNSENSEEDKVKLGEPGWRDRYYEEKFGARTPERMEEIRRDVALKYTEGLCWVMHYYYEGVCSWQWFYPYHYAPFASDLTSLSQLNITFELGSPFKPFDQLMGVFPAASAHALPLKYRQLMTDPNSPIIDFYPTDFEVDMNGKRFSWQGIAKLPFIEEDRLLAEIKKVEDTLTPEEARRNSTMCNMLFVNGAHSLSPYIYSLNSKFGHLPDKDRGAIKEKLDPSASGGMNGYIALCGGDPSPPVFRSPVDGLEDIMDNQVICSIYKLPDPHKHIARPPAGVIIPKKSVEAGDLKPPPVLWHEDSGRRPHDNNHRRPYDNSNRQNPSGALSGRQLGEAAHRLVVNSLNVRGGGQNNSPSMPYQTMMSGMNYPNGRHHVGNHGVPPRMEQPAGRSGWHVSDDNMTNGQAAYGQYQPERLGPSRHERGNHGRQQYNPYARDNHHDSSGRVQPPGYHQNRGNPQSAAPSAGPGLYGPYPPAYAGGYSGGYQPVPYGGQQWQQRPYGGGTPPTRPNSHQSQNRYGTLDRSSNKRSSDVEENELLDLDLDDLEDLTDALGESFLDFFLLYFLGGFGMSGIGLFLDRYFWGDMPTGHISGCSSNSASQRLVPEAVRSGTTPSQRAN

SEQ ID NO: 176171 - protein, 117 aa, Zea Mays
MFEQVDNIGLSTDMDHSDEHDSDDMKVGAASDGPSRLRKKRSKVWDEYEPIIVDGAIQSAECRYCHMHMSCRGADGQSNGTSHLWRHQKICRAKDEFCPSQLQQDADFSSDWSSVRF

SEQ ID NO: 176172 - protein, 87 aa, Zea Mays
MRPRHGMRRRLLVAVERADALTSSGVTLAGRIGLLVDKEASALVLVLLLQLQLQHQHRLLLFSTMSLPMLMVIFTWVMPSIKSSRIL

SEQ ID NO: 176173 - protein, 120 aa, Zea Mays
MMRRIDRGGEQEEAHLDQRTSPPRWRRSRGNGGGGPRAGGVAALFLREPGADGRSTRRALRPYPLRPAPTRIAVNPTRPGPLAIETHFHPAHRTHFDPPHCITLFIASQQHLMDGRNLSK

SEQ ID NO: 176174 - protein, 328 aa, Zea Mays
MNSTATLRPREGEKRQGRNVQLEASAASSGTGSEAHPHFRRGSSVRLELEAQKTSRTQQNSSLTSLPLPLPLPLCGPNNLSLSLSLSLFFLSALQTISPSPSLLSKTNETKQETEKSPSPVAVAVAVAARIMSAAAAAEVGKEKGAATPGPGPGPGGACELCGAAARVYCGADEATLCWGCDAQVHGANFLVARHARSLLCRGCARPTPWRAAGPRLGPTVSLCVRCVRRGPAGAVGVGGDEEMGGAGDGDAEDDDDEDDDSEEEEEEEEEEGEGENQVVPWTEDAEATPPPVGSSTSSSSREAPANGAERAAKLYLRQATCDDWCRC

SEQ ID NO: 176175 - protein, 52 aa, Zea Mays
MLSLGSFKTRVILSSCLQAFQIEPITSTVSYMIGRDVMEGRGQCRCRCCTVS

SEQ ID NO: 176176 - protein, 96 aa, Zea Mays
MDSYKTGDSFIFETQRHNGIRELCPANGEHKLIRARALIPLHEPNSVAINHQGLSYCIIQFIEKDYKLADTMIWGLLKHWPVRNCQEVIGFDQIIN

SEQ ID NO: 176177 - protein, 98 aa, Zea Mays
MLAIVEHVWEAEADDSSYVIKEQTYPEKVLTRGTQTTLYLRDDDKYEFTDPARIESLVKNCSQFVSFSYIHGRRNQEHLGVLYCFLELSSNFDGRNFV

SEQ ID NO: 176178 - protein, 96 aa, Zea Mays
MLAIVEHVWEAEADDSSYVIKEQTYPEKVLTRGTQTTLYLRDDDKYEFTDPARIESLVKNCSQFVSFSYIHGRRNQEHLGVMIAIVYCNLASFNYT

SEQ ID NO: 176179 - protein, 90 aa, Zea Mays
MDSYKTGDSFIFETQRHNGIRELCPANGEHKLIRARALIPLHEPNSVAINHQGLSYCIIQFIEKDYKLADTMIWGLLKHWPVRNCQEVLK

SEQ ID NO: 176180 - protein, 610 aa, Zea Mays
MPKFRTTIKLFLRQAPKYTEELARVHACLTKEALQAHQCSSLRRKLLMPLSLPRSLPRQFHLPLPVSCYPRAILMEQDQSADSGFDFATGIVTSGSAVAPHSGEQAEASAYQADDRMAFNETYWEEKGGNSLRVLVATDCHLGYLEKDEVRGFDSFDTFEEICSLAVKNKVDFLLLCGNLFHENKPSNSTLVKAIEILRRYCMNDCPVQFQVISDQAASLQNRFCQVNYEDPNYKIGLPVFTIHGDQDYPTGTDNLSVNDILTAGNFLNYFGKTDLGCTGVGKVTVYPVVIRKGETYIAMYGLGNIKDGRLKRMLHEPGAVNWMQPEFQDETPSSDWFNILVLHQKRTRGSPGDAISELLLPRFVDMVIWGHEHECLIDPQEVPGMGFHITQPGSSIATSLINTEANPKHALFLEIKGREYRTTKIPLQSVRPFEYAEVVLEDQVDVDPGDEASIHEHLHKVVSNLIDKSREEASSSGSKPKLPLVRIKVHHTGLSTINSKQFGQHYVGKVVNPQDILLLTRSRQRHQTMQESCNISEDLCPNELNQQTVEALIADSNIVPNFLLILSFLVLLKQDVFFSSLLFFSFLSFFLSSFLCIGRPPFDYYMIAR

SEQ ID NO: 176181 - protein, 210 aa, Zea Mays
MKSLEHLISAPSAQPNTPDLPDEKKQFIPFASPPPVVATPLEKTETVPSPSMSPPVKPTEPKISTKRVDELATPPVPPTDYTFTKQPEQVRPISSESEASIDLDDVLSAAQTAAESAERAASAARAAANLVQLRIADLKKNSRVYNKYTDSAQKESPHQAEGTQKPVFDHQDSFTNETQDYVPSHVPQRSPSLEDDPYFSYPNLFSAPKP

SEQ ID NO: 176182 - protein, 484 aa, Zea Mays
MEQADVSAKMAEDSCLEHAEAVTSKSSAKKHRKKKRKDKEVETIGQKQILDADENVGSEDTKRNSREREHDRKSKKHKRKHQDDETASNGSSGNQIVLGEDKRTEKEYLVTLDLEEDNKSDMSKIGKKTDSKKKRRKERNDGVDLRQNTLVGEGKNGKNNKEKKMCEDENGGGEREKENMGKQKDKCRRVSFTDHVEVFNIGGSDDVEGDGSGETELVHGRRFSPEEDAKLMEAILKYAELKQLGEKGLQMIGESNKHPETRGCWAEIGKALPHRPKKAKYARGKVLLQRSAERKWTAEEYEIIRRFVEKNGRNWKVLAKELGKSEIHVKDTWRRIKFKNLKRGTWSQDEYQNLFDLVNLDMRVKAHQNINTGHRHIRDNISWEAISEKLTTRRAEECCTKWLQNVDAVCAEDVDWENLLEHRSGELCRHRWNQMIRLMGDHRYRPFIEQVEVLARRYCPEMLAYRKPVAGGSSADEPAGASDL

SEQ ID NO: 176183 - protein, 412 aa, Zea Mays
MSNKEEKECQMTKEEKRRKKREKHKDMGQSGDYEGKAVMSNKEEKDCQVTEEEKKRKKGKKHKDKGQGSNSDSSCARNHSIEMEQADVSAKMAEDSCLEHAEAVTSKSSAKKHRKKKRKDKEVETIGQKQILDADENVGSEDTKRNSREREHDRKSKKHKRKHQDDETASNGSSGNQIVLGEDKRTEKEYLVTLDLEEDNKSDMSKIGKKTDSKKKRRKERNDGVDLRQNTLVGEGKNGKNNKEKKMCEDENGGGEREKENMGKQKDKCRRVSFTDHVEVFNIGGSDDVEGDGSGETELVHGRRFSPEEDAKLMEAILKYAELKQLGEKGLQMIGESNKHPETRGCWAEIGKALPHRPKKAKYARGKVLLQRSAERKWTAEEYEIIRRFVEKNGRNWKGLGVRMSTKTCLIW

SEQ ID NO: 176184 - protein, 587 aa, Zea Mays
MSNKEEKECQMTKEEKRRKKREKHKDMGQSGDYEGKAVMSNKEEKDCQVTEEEKKRKKGKKHKDKGQGSNSDSSCARNHSIEMEQADVSAKMAEDSCLEHAEAVTSKSSAKKHRKKKRKDKEVETIGQKQILDADENVGSEDTKRNSREREHDRKSKKHKRKHQDDETASNGSSGNQIVLGEDKRTEKEYLVTLDLEEDNKSDMSKIGKKTDSKKKRRKERNDGVDLRQNTLVGEGKNGKNNKEKKMCEDENGGGEREKENMGKQKDKCRRVSFTDHVEVFNIGGSDDVEGDGSGETELVHGRRFSPEEDAKLMEAILKYAELKQLGEKGLQMIGESNKHPETRGCWAEIGKALPHRPKKAKYARGKVLLQRSAERKWTAEEYEIIRRFVEKNGRNWKVLAKELGKSEIHVKDTWRRIKFKNLKRGTWSQDEYQNLFDLVNLDMRVKAHQNINTGHRHIRDNISWEAISEKLTTRRAEECCTKWYGQLASPLVKQGIWADTDDYMLQNVDAVCAEDVDWENLLEHRSGELCRHRWNQMIRLMGDHRYRPFIEQVEVLARRYCPEMLAYRKPVAGGSSADEPAGASDL

SEQ ID NO: 176185 - protein, 413 aa, Zea Mays
MSNKEEKECQMTKEEKRRKKREKHKDMGQSGDYEGKAVMSNKEEKDCQVTEEEKKRKKGKKHKDKGQGSNSDSSCARNHSIEMEQADVSAKMAEDSCLEHAEAVTSKSSAKKHRKKKRKDKEVETIGQKQILDADENVGSEDTKRNSREREHDRKSKKHKRKHQDDETASNGSSGNQIVLGEDKRTEKEYLVTLDLEEDNKSDMSKIGKKTDSKKKRRKERNDGVDLRQNTLVGEGKNGKNNKEKKMCEDENGGGEREKENMGKQKDKCRRVSFTDHVEVFNIGGSDDVEGDGSGETELVHGRRFSPEEDAKLMEAILKYAELKQLGEKGLQMIGESNKHPETRGCWAEIGKALPHRPKKAKYARGKVLLQRSAERKWTAEEYEIIRRFVEKNGRNWKVGLGVRMSTKTCLIW

SEQ ID NO: 176186 - protein, 553 aa, Zea Mays
MSNKEEKDCQVTEEEKKRKKGKKHKDKGQGSNSDSSCARNHSIEMEQADVSAKMAEDSCLEHAEAVTSKSSAKKHRKKKRKDKEVETIGQKQILDADENVGSEDTKRNSREREHDRKSKKHKRKHQDDETASNGSSGNQIVLGEDKRTEKEYLVTLDLEEDNKSDMSKIGKKTDSKKKRRKERNDGVDLRQNTLVGEGKNGKNNKEKKMCEDENGGGEREKENMGKQKDKCRRVSFTDHVEVFNIGGSDDVEGDGSGETELVHGRRFSPEEDAKLMEAILKYAELKQLGEKGLQMIGESNKHPETRGCWAEIGKALPHRPKKAKYARGKVLLQRSAERKWTAEEYEIIRRFVEKNGRNWKVLAKELGKSEIHVKDTWRRIKFKNLKRGTWSQDEYQNLFDLVNLDMRVKAHQNINTGHRHIRDNISWEAISEKLTTRRAEECCTKWYGQLASPLVKQGIWADTDDYMLVEALQNVDAVCAEDVDWENLLEHRSGELCRHRWNQMIRLMGDHRYRPFIEQVEVLARRYCPEMLAYRKPVAGGSSADEPAGASDL

SEQ ID NO: 176187 - protein, 357 aa, Zea Mays
MSNKEEKECQMTKEEKRRKKREKHKDMGQSGDYEGKAVMSNKEEKDCQVTEEEKKRKKGKKHKDKGQGSNSDSSCARNHSIEMEQADVSAKMAEDSCLEHAEAVTSKSSAKKHRKKKRKDKEVETIGQKQILDADENVGSEDTKRNSREREHDRKSKKHKRKHQDDETASNGSSGNQIVLGEDKRTEKEYLVTLDLEEDNKSDMSKIGKKTDSKKKRRKERNDGVDLRQNTLVGEGKNGKNNKEKKMCEDENGGGEREKENMGKQKDKCRRVSFTDHVEVFNIGGSDDVEGDGSGETELVHGRRFSPEEDAKLMEAILKYAELKQLGEKGLQMIGESNKHPETRGCWAEIDGLLSIC

SEQ ID NO: 176188 - protein, 129 aa, Zea Mays
MRTCLVAVNSNSVNSSFNIECGDATDANFEKYNLSRGSVAGILTLDTVADYLPRRGPLKQRRYCVYSKRRGAEGGATERDREDVGPRSRGSGKELGMPVDGTALRRKQRGRATPVQKPRLQVHTSAGRS

SEQ ID NO: 176189 - protein, 272 aa, Zea Mays
MAEAPTRTELEEPKILLSETKEMAEAPSTEKMEEAKGSTEGSKISEVLSPSANVETIKNQKRPAVTPKRKRMANVLDVLETIKSSSTTPKKTVETSEAKTEIFDTKAPEQETEAEAGPSEPTKVKSLETEEEKMTEPILVEEISAVAPEASPKVLDYIVRHASGKKLSVKEKQEAQLYAQKLKYPKGELIFNGSGEEDFLYCLPDSKEISVCREMSKSFGFVAEPPKLLGPHAPVLVPRTSNGYACASNNLTGSVRVSQGPRINHLPPRSQD

SEQ ID NO: 176190 - protein, 92 aa, Zea Mays
MKPSVRVSSSRDLAPAPSMEGSPPVRAYARNLARAQDDGPRGGSHLRKPCAPALAPASPDRSDTVQLTGTQYASSLDLLWLFTYNTLNDYKS

SEQ ID NO: 176191 - protein, 119 aa, Zea Mays
MKPSVRVSSSRDLAPAPSMEGSPPVRAYARNLARAQDVALSPTVVLASSLQHLLSFSLNGVDQDGPRGGSHLRKPCAPALAPASPDRSDTVQLTGTQYASSLDLLWLFTYNTLNDYKIV

SEQ ID NO: 176192 - protein, 112 aa, Zea Mays
MKPSVRVSSSRDLAPAPSMEGSPPVRAYARNLARAQDVALSPTVVLASSLQHLLSFSLNGVDQDGPRGGSHLRKPCAPALAPASPDRSDTADWHTVRIVIGLALALHLQHPE

SEQ ID NO: 176193 - protein, 614 aa, Zea Mays
MADGTQWEGTWVEPSENHRKGDHAGIVLVLLNHPSHSRQLGPPASADNPLDLSMVDVRLPMLVYVSREKRPGHNHQKKAGAMNALTRCSAVLSNSPFILNLDCDHYINNSQALRAGICFMLGRDSDTVAFVQFPQRFEGVDPTDLYANHNRIFFDGTLRALDGMQGPIYVGTGCLFRRITLYGFDPPRINVGGPCFPSLGGMFAKTKYEKPGLELTTKAAVAKGKHGFLPMPKKSYGKSDAFADTIPMASHPSPFAAAAAVVAEEATIAEAVAVCAAAYEKKTGWGSDIGWVYGTVTEDVVTGYRMHIKGWRSRYCSIYPHAFIGTAPINLTERLFQVLRWSTGSLEIFFSRNNPLFGSTFLHPLQRVAYINITTYPFTAIFLIFYTTVPALSFVTGHFIVQRPTTMFYVYLAIVLGTLLILAVLEVKWAGVTVFEWFRNGQFWMTASCSAYLAAVCQVLVKVVFRRDISFKLTSKQPAGDEKKDPYADLYVVRWTWLMVTPIIIILVNIIGSAVAFAKVLDGEWTHWLKVAGGVFFNFWVLFHLYPFAKGILGRHGKTPVVVLVWWAFTFVITAVLYINIPHIHGPGGKHGGAIGKHGAAHHGKKFDGYYLWP

SEQ ID NO: 176194 - protein, 702 aa, Zea Mays
MAPGGRRSNGETPTGQQQQQQQADGRRGCACGGFPVCACAGAAAVASAASSADMDRVAVAATEGQIGAVNDESWVAVDLSDDGLSSAADPGAVALEERPVFRTEKIKGVLLHPYRVLIFVRLIAFTLFVIWRISHRNPDALWLWVTSIAGEFWFGFSWLLDQLPKLNPINRVPDLGALRQRFDRADGTSRLPGLDIFVTTADPFKEPILSTANSILSILAADYPVERNTCYLSDDSGMLLTYEAMAEAAKFATVWVPFCRKHGIEPRGPESYFELKSHPYMGRSQEDFVNDRRRVRRDYDEFKARINGLENDIRQRSDAYNAARGLKDGEPRATWMADGTQWEGTWVEPSENHRKGDHAGIVLVLLNHPSHSRQLGPPASADNPLDLSMVDVRLPMLVYVSREKRPGHNHQKKAGAMNALTRCSAVLSNSPFILNLDCDHYINNSQALRAGICFMLGRDSDTVAFVQFPQRFEGVDPTDLYANHNRIFFDGTLRALDGMQGPIYVGTGCLFRRITLYGFDPPRINVGGPCFPSLGGMFAKTKYEKPGLELTTKAAVAKGKHGFLPMPKKSYGKSDAFADTIPMASHPSPFAAAAAVVAEEATIAEAVAVCAAAYEKKTGWGSDIGWVYGTVTEDVVTGYRMHIKGCSAGPRAPWRSSSPGTTRCSGARSCTRCSAWRTSTSPRTRSRRSSSSSTPRCRRCRS

SEQ ID NO: 176195 - protein, 465 aa, Zea Mays
MLLTYEAMAEAAKFATVWVPFCRKHGIEPRGPESYFELKSHPYMGRSQEDFVNDRRRVRRDYDEFKARINGLENDIRQRSDAYNAARGLKDGEPRATWMADGTQWEGTWVEPSENHRKGDHAGIVLVLLNHPSHSRQLGPPASADNPLDLSMVDVRLPMLVYVSREKRPGHNHQKKAGAMNALTRCSAVLSNSPFILNLDCDHYINNSQALRAGICFMLGRDSDTVAFVQFPQRFEGVDPTDLYANHNRIFFDGTLRALDGMQGPIYVGTGCLFRRITLYGFDPPRINVGGPCFPSLGGMFAKTKYEKPGLELTTKAAVAKGKHGFLPMPKKSYGKSDAFADTIPMASHPSPFAAAAAVVAEEATIAEAVAVCAAAYEKKTGWGSDIGWVYGTVTEDVVTGYRMHIKGCSAGPRAPWRSSSPGTTRCSGARSCTRCSAWRTSTSPRTRSRRSSSSSTPRCRRCRS

SEQ ID NO: 176196 - protein, 561 aa, Zea Mays
MVDVRLPMLVYVSREKRPGHNHQKKAGAMNALTRCSAVLSNSPFILNLDCDHYINNSQALRAGICFMLGRDSDTVAFVQFPQRFEGVDPTDLYANHNRIFFDGTLRALDGMQGPIYVGTGCLFRRITLYGFDPPRINVGGPCFPSLGGMFAKTKYEKPGLELTTKAAVAKGKHGFLPMPKKSYGKSDAFADTIPMASHPSPFAAAAAVVAEEATIAEAVAVCAAAYEKKTGWGSDIGWVYGTVTEDVVTGYRMHIKGWRSRYCSIYPHAFIGTAPINLTERLFQVLRWSTGSLEIFFSRNNPLFGSTFLHPLQRVAYINITTYPFTAIFLIFYTTVPALSFVTGHFIVQRPTTMFYVYLAIVLGTLLILAVLEVKWAGVTVFEWFRNGQFWMTASCSAYLAAVCQVLVKVVFRRDISFKLTSKQPAGDEKKDPYADLYVVRWTWLMVTPIIIILVNIIGSAVAFAKVLDGEWTHWLKVAGGVFFNFWVLFHLYPFAKGILGRHGKTPVVVLVWWAFTFVITAVLYINIPHIHGPGGKHGGAIGKHGAAHHGKKFDGYYLWP

SEQ ID NO: 176197 - protein, 178 aa, Zea Mays
MALGRMGSRCKRDALAETTPTEYEKQRAAHVMRNNQMLQRLGINQLRTIMTATRVRSKDDCSEESGSLYDGEDSEGSEQEEDFQVAKVAFYTHNNCVKNKLNREKMQFPQCTGSQSYIAKSYVVRQEKYKDMEPSVIDLFKEMHCSKKKGFSEAVQKAIVIWKQWWQHQLKMDSMCCL

SEQ ID NO: 176198 - protein, 88 aa, Zea Mays
MEHESKYCYYSHTSWFHNNTCIDGGRPSGATGSFGPDSLICEGSLGPAFTKRNSVIRRYIANSYMLKPTIRPLYLDDMLHFRFTNFKL

SEQ ID NO: 176199 - protein, 145 aa, Zea Mays
MDPLMSMVPSCTADDCTAHKFIEKFFTYRFFMGLKTDFEAIRTRLLHRSASLTMTEALSDLLAEETRLSSMFVPHTHVSYKVLATSHKYGGKGGYFEPCKHCNKTTHRSDQCFLKYPEKLAEFRSHRTNQGHGPSKGSVIVEAGL

SEQ ID NO: 176200 - protein, 139 aa, Zea Mays
MDPLMSMVPSCTADDCTAHKFIEKFFTYRFFMGLKTDFEAIRTRLLHRSASLTMTEALSDLLAEETRLSSMFVPHTHVSYKVLATSHKYGGKGGYFEPCKHCNKTTHRSDQCFLKYPEKLAEFRSHRTNQGHGPSKGSV

SEQ ID NO: 176201 - protein, 119 aa, Zea Mays
MGLKTDFEAIRTRLLHRSASLTMTEALSDLLAEETRLSSMFVPHTHVSYKVLATSHKYGGKGGYFEPCKHCNKTTHRSDQCFLKYPEKLAEFRSHRTNQGHGPSKGSVSISVGYMCNSH

SEQ ID NO: 176202 - protein, 114 aa, Zea Mays
MGLKTDFEAIRTRLLHRSASLTMTEALSDLLAEETRLSSMFVPHTHVSYKVLATSHKYGGKGGYFEPCKHCNKTTHRSDQCFLKYPEKLAEFRSHRTNQGHGPSKGSVIVEAGL

SEQ ID NO: 176203 - protein, 72 aa, Zea Mays
MPSAPAAPAPCPGRRCPCRARPQLRTPPPRTPPPSAPVAPTASGRPRRGHPRQQVRQLCTGIYEKSVGSSFQ

SEQ ID NO: 176204 - protein, 185 aa, Zea Mays
MSSQVDRRSQSAGKRARTDGSRREDDWVCPSCKNVNFAFRTTCNMRSCNQSRPADHTKAMQTPPHYPTSGGYMGPGTPPSMYLGGGAPPYGSSMFNGPAVTRYGIPQFPGGSAYSYGYGGPIPMGSPYGPMQIAGPTPYSGGTMMTAGGMYGIPMDRYGPIPAGPGPMVCALVIILLYTYYLMLI

SEQ ID NO: 176205 - protein, 137 aa, Zea Mays
MRCHCCAHLSLKANSQQNPSYCFVCRIPPPLASHAARRRGGVCDCPSRCKEHMLLAAPLARRRHHRFTFSYVFSGSRREDDWVCPSCKNVNFAFRTTCNMRSCNQSRPADHTVECMEFPWTGMGQYLLVLVQWYVLL

SEQ ID NO: 176206 - protein, 393 aa, Zea Mays
MASLLRRSAVPARQLLLLLPRHLAAAGSAPASSRSFSRFHPRDDDDSSMFDPPEPPVNWGMNIVPEKKAFVVERFGKYLKTLDSGFHLLIPAVDRIAYVHSLKEETIPIPDQNAITKDNVTIQIDSVIYIKIMDPYLASYGVEDPIYAVLQLAQTTMRSELGKITLDKTFEERDALNEKIVSAINEAATDWGLKCIRYEIRDITPPTGIRQAMEMQAEAKRRKRAQILESEGKKTAQVLESEGAMLDLANRAKGAAEAILAKSEATARGMRLVSDAMTTEGSAKAASLKLAEQYIEAFSNLAQKTNTMLLPGDSASPASFVAQAMKTYQQIHSHSQALKYHPQIEGLEESGETSPAAPSSEASKTPPFVGEADSNHTFSLQRPRIRSELPSSA

SEQ ID NO: 176207 - protein, 535 aa, Zea Mays
MKKTLVFHRGRAPKGERTGWIMHEYRTTEPEFESGEQGGYVLYRLFRKQEEKTERSSPEEVDRSGYSPTPSRSSPDNLEANEEANTPLNKESPESALHESPIELPKSVETNGGSMTRWLADRNDNLMVTAPDVSHIPFHGHAAGVAKVDPSVGASGHLVNPHNGNDDYNKFVSDFTPILPLENAFFTDIQQGAFGFDGIMNPLDPLDAFLNQTLVDPDEHSSTTSKVQYDSDIPTEFENHWNMKVEPQDDQCWWANIGFEPDEPNPLLPCDTTDQDILSVDSGADSFNELFNSMEETGIIVRPQQLDSTVQPNHVFASQGNAARRLRLQVESREIITKDESEDEVSCVLTPDCLNDSVEESTAEKDVASDGDEAESTGIVIRSHHPAPRSSSESSFTQQGTAMQRLRLQSGLNKGQRPSTDDSSSCIIDEPGSQHKAEKAEIEEDASTNLAGSADDLPGNIHDDEQKNIPEHEAKSVLRLRKTSEEGNKDVKQESCLEPHVRAPMQKGGFQSYIIWLVLPVALLLLLCVGTYGWV

SEQ ID NO: 176208 - protein, 542 aa, Zea Mays
MKKTLVFHRGRAPKGERTGWIMHEYRTTEPEFESGEQGGYVLYRLFRKQEEKTERSSPEEVDRSGYSPTPSRSSPDNLEANEEANTPLNKESPESALHESPIELPKSVETNGGSMTRWLADRNDNLMVTAPDVSHIPFHGHAAGVAKVDPSVGASGHLVNPHNGNDDYNKFVSDFTPILPLENAFFTDIQQGAFGFDGIMNPLDPLDAFLNQTLVDPDEHSSTTSKVQYDSDIPTEFENHWNMKVEPQDDQCWWANIGFEPDEPNPLLPCDTTDQDILSVDSGADSFNELFNSMEETGIIVRPQQLDSTVQPNHVFASQGNAARRLRLQVESREIITKDESEDEVSCVLTPDCLNDSVEESTAEKDVASDGDEAESTGIVIRSHHPAPRSSSESSFTQQGTAMQRLRLQSGLNKGQRPSTDDSSSCIIDEPGSQHKAEKAEIEEDASTNLAGSADDLPGNIHDDEQKNIPEHGAEMTSPEAKSVLRLRKTSEEGNKDVKQESCLEPHVRAPMQKGGFQSYIIWLVLPVALLLLLCVGTYGWV

SEQ ID NO: 176209 - protein, 716 aa, Zea Mays
MEVNSSGEETVVKVRKPYTITKQRERWTEAEHKRFLEALKLYGRAWQRIEEHVGTKTAVQIRSHAQKFFTKLEKEAMNNGTSPGQAHDIDIPPPRPKRKPNSPYPRKSCLSSETQTKELPNDKSTKPNMPLSNGHVKMVGDASLQNFQRKELSEKGSRSEVLNLFRDAPSASFSSVNKSSSNHGAPRRTEASKTESRDMSIMENNSFNPNTQEDVKVISDQEMERLNGIQIRSKCEHSHEGYLDISTQQMKLMPKSVETTYVDEQTARASHTLAESDGTASIPVTVPEGTHPDQTSDQVGINGSMNPCIHPMVSADPKFGSSATPQTFPHNYAAFAPMMQCNCNQDTYRSFTNMSSTFSSMLVSTLLSNPAIHAAARLAASYWPAAEGNTPIDPNQENPADGVQGRNIGSPPSMVSIVAATVAAASAWWATQGLLPFFAPPVAFPFVPAPSAAFPTVDVPRPSEKDRDCPAENAQIECQEARKQVQFEGLRIAASSESDGSGKGEVSLHTELKLSPAQNADATPTTGAGTNDAFRNKKKQDRSSCGSNTPSSSDVDAGNVPEEDNANEKAKQASCSNSSAGDTNHRRFRSNGSTSDSWKEVSEEGRLAFDALFSREKLPQSFSPPQAVDSKEVAKEEEDEVTTVAVDLNKNATSIDHDDLDTMDEPRASFPNELSHLKLKSRRTGFKPYKRCSVEAKENRVPASDMAHAKVYLIKV

SEQ ID NO: 176210 - protein, 709 aa, Zea Mays
MEVNSSGEETVVKVRKPYTITKQRERWTEAEHKRFLEALKLYGRAWQRIEEHVGTKTAVQIRSHAQKFFTKLEKEAMNNGTSPGQAHDIDIPPPRPKRKPNSPYPRKSCLSSETQTKELPNDKSTKPNMPLSNGHVKMNFQRKELSEKGSRSEVLNLFRDAPSASFSSVNKSSSNHGAPRRTEASKTESRDMSIMENNSFNPNTQEDVKVISDQEMERLNGIQIRSKCEHSHEGYLDISTQQMKLMPKSVETTYVDEQTARASHTLAESDGTASIPVTVPEGTHPDQTSDQVGINGSMNPCIHPMVSADPKFGSSATPQTFPHNYAAFAPMMQCNCNQDTYRSFTNMSSTFSSMLVSTLLSNPAIHAAARLAASYWPAAEGNTPIDPNQENPADGVQGRNIGSPPSMVSIVAATVAAASAWWATQGLLPFFAPPVAFPFVPAPSAAFPTVDVPRPSEKDRDCPAENAQIECQEARKQVQFEGLRIAASSESDGSGKGEVSLHTELKLSPAQNADATPTTGAGTNDAFRNKKKQDRSSCGSNTPSSSDVDAGNVPEEDNANEKAKQASCSNSSAGDTNHRRFRSNGSTSDSWKEVSEEGRLAFDALFSREKLPQSFSPPQAVDSKEVAKEEEDEVTTVAVDLNKNATSIDHDDLDTMDEPRASFPNELSHLKLKSRRTGFKPYKRCSVEAKENRVPASDMAHAKVYLIKV

SEQ ID NO: 176211 - protein, 512 aa, Zea Mays
MEVNSSGEETVVKVRKPYTITKQRERWTEAEHKRFLEALKLYGRAWQRIEEHVGTKTAVQIRSHAQKFFTKLEKEAMNNGTSPGQAHDIDIPPPRPKRKPNSPYPRKSCLSSETQTKELPNDKSTKPNMPLSNGHVKMVGDASLQNFQRKELSEKGSRSEVLNLFRDAPSASFSSVNKSSSNHGAPRRTEASKTESRDMSIMENNSFNPNTQEDVKVISDQEMERLNGIQIRSKCEHSHEGYLDISTQQMKLMPKSVETTYVDEQTARASHTLAESDGTASIPVTVPEGTHPDQTSDQVGINGSMNPCIHPMVSADPKFGSSATPQTFPHNYAAFAPMMQCNCNQDTYRSFTNMSSTFSSMLVSTLLSNPAIHAAARLAASYWPAAEGNTPIDPNQENPADGVQGRNIGSPPSMVSIVAATVAAASAWWATQGLLPFFAPPVAFPFVPAPSAAFPTVDVPRPSEKDRDCPAENAQIECQEARKQELAQMMHSGIRKSRIALHAVLTHLQVVM

SEQ ID NO: 176212 - protein, 65 aa, Zea Mays
MVVVLCFPCSASTPSVRLVITLLLHPVWSDLCVSIKQAKSRNVRQVFDKNKKMSQVLSPRSRISN

SEQ ID NO: 176213 - protein, 162 aa, Zea Mays
MPSQPISLLIPKCTSAIILRRAPPWARLTQLLARRVGRLVVAIAALAFLWCSASLSAHNTAPSTPTWQIPVRLFSKLIGHALSSPWRSGGPHHLALCHLSLSPSSLCHQRLLGASACPLHRPCPYSATALRDRAARPKTCIALFVSSSPCYCIRCGAICVCR

SEQ ID NO: 176214 - protein, 376 aa, Zea Mays
MMRQTQATILQKTQQVRTAQQQPQSRHHHHHPPGGSRAGATGSRPATAVNAERFENRLKKPTTFLCKHKFRNELPDPSAQLKWLPLNKDKDRYTKYRITSLEKNYIPKMIVPEDIGIPLDLLDMSVYNPPDVQPPMAPEDEELLRDDQVLTPIKQEGTRKRERPTDKGVSWLVKTQYISPLSADAAKTSLTEKQAKERRESRGGRNAFLDNLNDREKQIKAIEESFRAAKSRPVHQTKRGMQAEWVMPLLPDFDRYEEPFVMVNFDGDPTADSEQYNKLERPVRDECESRAVMKSFSVSGSDPSKQEKFLAYMAPAPHELTRDLDDENDDIQYSWLREYHWEVRGDDKDDPTTYLVTFDKKDGAKYLVISDVHSVL

SEQ ID NO: 176215 - protein, 268 aa, Zea Mays
MIVPEDIGIPLDLLDMSVYNPPDVQPPMAPEDEELLRDDQVLTPIKQEGTRKRERPTDKGVSWLVKTQYISPLSADAAKTSLTEKQAKERRESRGGRNAFLDNLNDREKQIKAIEESFRAAKSRPVHQTKRGMQAEWVMPLLPDFDRYEEPFVMVNFDGDPTADSEQYNKLERPVRDECESRAVMKSFSVSGSDPSKQEKFLAYMAPAPHELTRDLDDENDDIQYSWLREYHWEVRGDDKDDPTTYLVTFDKKDGAKYLVISDVHSVL

SEQ ID NO: 176216 - protein, 279 aa, Zea Mays
MQPKRLNKSCLAFQSLTEKQAKERRESRGGRNAFLDNLNDREKQIKAIEESFRAAKSRPVHQTKRGMQAEWVMPLLPDFDRYEEPFVMVNFDGDPTADSEQYNKLERPVRDECESRAVMKSFSVSGSDPSKQEKFLAYMAPAPHELTRDLDDENDDIQYSWLREYHWEVRGDDKDDPTTYLVTFDKKDGAKYLPLPTKLVLQKKKAKEGRSGDEIEHFPVPSRITVSKTAHGGTMERGESSGMHANSKPRRSHVDDDLDEHPKRTRVEDIDQYSEEYSE

SEQ ID NO: 176217 - protein, 172 aa, Zea Mays
MSYLSARAQAVMKSFSVSGSDPSKQEKFLAYMAPAPHELTRDLDDENDDIQYSWLREYHWEVRGDDKDDPTTYLVTFDKKDGAKYLPLPTKLVLQKKKAKEGRSGDEIEHFPVPSRITVSKTAHGGTMERGESSGMHANSKPRRSHVDDDLDEHPKRTRVEDIDQYSEEYSE

SEQ ID NO: 176218 - protein, 84 aa, Zea Mays
MKSFSVSGSDPSKQEKFLAYMAPAPHELTRDLDDENDDIQYSWLREYHWEVRGDDKDDPTTYLVTFDKKDGAKYLVISDVHSVL

SEQ ID NO: 176219 - protein, 103 aa, Zea Mays
MPNLCPGFIFAVAACLRFERFHCKCSRAGTPERRSWALSTLVCPIGAMCVSFLKNPRPGGEEGRHDWILSSGRGHDLSCRWCTRLPNYKWRYLFNQQAQAPAP

SEQ ID NO: 176220 - protein, 168 aa, Zea Mays
MSRVRHIFLAGCLGWRFCKGRIYDQGCLGCSPGRGPITREGIHPQPSFASRYGVHRATLVQCPAAAEHIQTPHARAAQAQPQTCSAAQLAVAVLPTCRPPHAATAQAASARRVFRAVFWRAEQAATAQARPTTAGELSRLQASREQAEQSRAVSTKQRLAEHSSEQPE

SEQ ID NO: 176221 - protein, 71 aa, Zea Mays
MDAFESEHLIYVTYSNPNAQIQISDMHMRLISKSDMMVLIFEETYWIEHISINIHLYLILFHSYSHGSHAY

SEQ ID NO: 176222 - protein, 194 aa, Zea Mays
MSEEERKGGGGGGDDGAAAAARAAEQARELQDAAAALLTRTRAEEEALRRRAAALQGELRRLREAAAAHADSEKVEEDLDRATCLITEGDVASLLPSKTQGTFLRMFLGPVNLRAPRKEVQLKVKEEYNSYRDRTALLFLGFPVILLFLRQWLWNRCFPALPVQLYQAWLLFLYTSLALRENILRVNGSDIRPW

SEQ ID NO: 176223 - protein, 170 aa, Zea Mays
MLMSVISLTWEIKGQPNCARKQRGVELFLCWAIMQGFVMMLQNRYQRQRLYTRIALGKAKRMDVVWGETAGVEGQLLLLCPLLFLLQGFEGYVGFLLLRTAHTGVVPEWQVVVCGILLISMAIGNFANTLDTLMAKSRFKAKMKKSKGKRDLDTCPSPTGSSPTDSATRA

SEQ ID NO: 176224 - protein, 386 aa, Zea Mays
MDSTPAPEAAPGASSSSPAAAAAAEGLAGGVAAMTLDERFEMLRGIGEECIQEDELRRLLENKPVPICYDGFEPSGRMHIAQGVVKTINVNKMVNAGCKVKIWIADWFAQLNNKMGGDLKKIQTVGRYMIEIWKAAGMNLDGVEFLWSSEEINKRAHEYWPIVMDIARKNNVKRIMRCCQIMGRSDQDDLTAAQIFYPCMQCADIFFLKADICQLGMDQRKVNVLAREYCDDIKRKNKPIILSHHMLPGFKEGQEKMSKSDPSSAIFMEDDEAQVNVKIKQAFCPPKIVEGNPCLEYIKYIVFPWFGRFEVIRKESNGGNKTFTCMNELISDYETGALHPADVKPALAKAINEILQPVRDHFNNNNEAKVLLNTVKEAYYANSIRE

SEQ ID NO: 176225 - protein, 401 aa, Zea Mays
MDSTPAPEAAPGASSSSPAAAAAAEGLAGGVAAMTLDERFEMLRGIGEECIQEDELRRLLENKPVPICYDGFEPSGRMHIAQGVVKTINVNKMVNAGCKVKIWIADWFAQLNNKMGGDLKKIQTVGRYMIEIWKAAGMNLDGVEFLWSSEEINKRAHEYWPIVMDIARKNNVKRIMRCCQIMGRSDQDDLTAAQIFYPCMQCADIFFLKADICQLGMDQRKVNVLAREYCDDIKRKNKPIILSHHMLPGFKEGQEKMSKSDPSSAIFMEDDEAQVNVKIKQAFCPPKIVEGNPCLEYIKYIVFPWFGRFEVIRKESNGGNKTFTCMNELISDYETGALHPADVKPALAKAINEILQPVRDHFNNNNEAKVLLNTVKVQSNQLRSGSCPSLGHVYIRVDIAV

SEQ ID NO: 176226 - protein, 183 aa, Zea Mays
MAVPPSSVPWTEEEHRTFLAGLEKLGKGDWRGIAKNFVTTRTPTQVASHAQKYFLRQTNPNKKKRRSSLFDMMPRELSPAPNCPILPPSMAKVHDVVAMTKQLQNSNLEGTSSSNAASQVGRDLPPVPSFKATNMDPSFSKFSHMAISPLQGVYVVSESSLTKTKYGARLENSLPIRTSSQSP

SEQ ID NO: 176227 - protein, 744 aa, Zea Mays
MALSSSRAPLLPLLCLLLTVVAAAKHPKQEKPTPAALAPVVTLEGCPDKCGNVSIPYPFGTKDGCFRPGFFVVCNDTFDPPRPFINSSLALGTDDTRTQIVVEDLYYLTAEDGMPETTPTRSAWPIELAGVSLSDAKARLLGAFSYECRLNETHHSVRRQRINFGVYRSPFLLSDADNVLMGIGSNVVAEQTTGPLCQSYLNLISLSDGPVNGSCSGQGCCQANLPPVRSDSTVTIQKGTMYEDGGYGGGGGGRVDCSYAMIVEKAWYNFSSVDLDSDAFLRRNAAGVVPVVADFTIDGGGCPDAGEPTPKDFACISDNSKCVDRLVYDNSRGHYCSCSVGYQGNPYIHGGCQDIDECARPDLYPCHGKCKNTPGDYECSCPAGKRGNAKQAPCTDLFSLPAKISVGVVGGLFIAALLVFIILIRNEKRKMAEFFEKNGGPTLEKAKNIKIYKKEELKPILRRSNFIGRGAFGEVYKGDLDGQSVAVKKPVDDSDGVHNDQFANEVIIQSRVNHKNIVRLIGCCLEVDKPMLVYEFLSKGSLDDVLHGSRRDPLNLKCRLDIAAESAEGLAYLHSKTTNVILHGDVKPANILLDEDWTPKISDFGISRLIVKDKQHTDFVIGDRSYMDPVYLRDGLLTDRSDVYSFGVVILELISRKKATYSGNNSLVREFLDAHKGKMEATKLFDEEIAKPEVSDLLNSLYEIAVRCLNLDVDERPSMTEVAESILMLKRSWSNTLTKTSSAS

SEQ ID NO: 176228 - protein, 391 aa, Zea Mays
MRWSAFLWEAASGRRPGVSNLLLVVAAASSGGLVAYADSGSDAAVEQPQLPPRKKVVVLGTGWGGTTFLRNLDSRLYDVQVISPRNYFAFTPLLPSVTSGTVEPRSIVEPIRRVLEKKGGEIKFWEAECFKIDPQSKKIHCRSNVGTSLEGNGEFLVDYDYLVVAVGARTNTFNTPGVVENCHFLKEVEDAQKIRRSVMDCFERASLPFLNEEERKKNLHFVVVGGGPTGVEFAASLHDFVTEDLSKLYPSIQHLVKISLIEAADHILTMFDKRITNFAEDKFGRDGIDVKTGYKVVKVSKDDITMQNPATGDISVPYGMAVWSTGIGTRPFVVEFMKQIGQANRRVLATDEWLRVRECDGVYAIGDCATINQRKVMVCNESLLLVRLDLA

SEQ ID NO: 176229 - protein, 379 aa, Zea Mays
MDCFERASLPFLNEEERKKNLHFVVVGGGPTGVEFAASLHDFVTEDLSKLYPSIQHLVKISLIEAADHILTMFDKRITNFAEDKFGRDGIDVKTGYKVVKVSKDDITMQNPATGDISVPYGMAVWSTGIGTRPFVVEFMKQIGQANRRVLATDEWLRVRECDGVYAIGDCATINQRKVMEDISEIFRVADKDKSGTLTVKEIQDILDDIYVRYPQVQLYLKSKQMNGIADLVRSAKGDAEKESVELNIEEFKKALSLVDSQVKFLPATAQVASQQGQYLARCFNKMKDAEENPEGPIRIRGEGRHRFRPFRYRHLGQFAPLGGEQTAAQLPGDWISIGHSSQWLWYSVYATKQISWRTRMLVVSDWTRRFIFGRDSSCI

SEQ ID NO: 176230 - protein, 1010 aa, Zea Mays
MGSGRAVMLCGTLALVPKDLALPPCRSTRGWGSSGGQGLVGGHHSGGERPQFWLPRGKKMKEDRWMRDEELSRQRKPERNGSVFTPIAAMYSSGHALPVANRSHGLVFGSLSKDWDDIRQRKDQLVNFLASLERASGDSAAAGKIEDSKLASPVEPTEQKEKAAIIVLDSDDEDGNGSGNSKLASETNKELGTSGLINNIAERMTFNGSQAFGTVHTYGDKNTQIVPYGQCSALVNQFPLQTSWQPSIQFERVVLQKRPEEQRMQDLVAASIAEKRAETQVFLSLPTEKKRRRSDPSLHASDDTATVPKQRKSKGATVVAAANLSLVSQQTATSPEPDMVIEEEEKHKNESDGLDDYWKDFALAVESTKLDEVDEAAIEKEDNGKMEDIDCNHDIRIHEDLGHVCRVCGMIVRRADSIIDYQWKKASRRRTNGYGGHSKDADEIDCGTVKLSEDFIVADIAIHPRHARIMKPHQLEGFNFLVKNLIGDKPGGCILAHAPGTGKTFMLISFIQSFMARYPSARPLVVLPKGILGIWKTEIKRWQVQDIPVYDFYSVKAEKRVEQLQILKSWEDKMSILFLGYKQFSTIVTDDGGSNVTAACRDRLLKVPNLLILDEGHTPRNRETNVLESLNRVETPRKVVLSGTLFQNHVEEVFNILNLVRPKFLRMESSRPTARRIMSQVEIVGRSSKGLADGAFTKAVEETLLNDENFKRKAHVIRGLRELTKDVLHYYKGDILDELPGLVDFSVFLKLTPKQKDIIYKLEAHDRFKRNAVGSALYIHPCLSELSEVNAEHRANTFRDDLVDSLVDSITVRDGVKANFFMNILSLANSAGEKVLAFSQYISPMIFFERLLVKKKGWHVGKEIFMISGDTSQEDRELATDHFNNSADAKIMFGSIKACGEGISLVGASRVVILDVHLNPSVTRQAIGRAFRPGQQKKVFVYRLVAADSDEVKVHETAFKKEVIPKLWFEWSEHCTTEDFKLGQIDIDDSGDELLDTKAIRKDIKALYRR

SEQ ID NO: 176231 - protein, 921 aa, Zea Mays
MYSSGHALPVANRSHGLVFGSLSKDWDDIRQRKDQLVNFLASLERASGDSAAAGKIEDSKLASPVEPTEQKEKAAIIVLDSDDEDGNGSGNSKLASETNKELGTSGLINNIAERMTFNGSQAFGTVHTYGDKNTQIVPYGQCSALVNQFPLQTSWQPSIQFERVVLQKRPEEQRMQDLVAASIAEKRAETQVFLSLPTEKKRRRSDPSLHASDDTATVPKQRKSKGATVVAAANLSLVSQQTATSPEPDMVIEEEEKHKNESDGLDDYWKDFALAVESTKLDEVDEAAIEKEDNGKMEDIDCNHDIRIHEDLGHVCRVCGMIVRRADSIIDYQWKKASRRRTNGYGGHSKDADEIDCGTVKLSEDFIVADIAIHPRHARIMKPHQLEGFNFLVKNLIGDKPGGCILAHAPGTGKTFMLISFIQSFMARYPSARPLVVLPKGILGIWKTEIKRWQVQDIPVYDFYSVKAEKRVEQLQILKSWEDKMSILFLGYKQFSTIVTDDGGSNVTAACRDRLLKVPNLLILDEGHTPRNRETNVLESLNRVETPRKVVLSGTLFQNHVEEVFNILNLVRPKFLRMESSRPTARRIMSQVEIVGRSSKGLADGAFTKAVEETLLNDENFKRKAHVIRGLRELTKDVLHYYKGDILDELPGLVDFSVFLKLTPKQKDIIYKLEAHDRFKRNAVGSALYIHPCLSELSEVNAEHRANTFRDDLVDSLVDSITVRDGVKANFFMNILSLANSAGEKVLAFSQYISPMIFFERLLVKKKGWHVGKEIFMISGDTSQEDRELATDHFNNSADAKIMFGSIKACGEGISLVGASRVVILDVHLNPSVTRQAIGRAFRPGQQKKVFVYRLVAADSDEVKVHETAFKKEVIPKLWFEWSEHCTTEDFKLGQIDIDDSGDELLDTKAIRKDIKALYRR

SEQ ID NO: 176232 - protein, 193 aa, Zea Mays
MKSACYNKAAVLQVWDGGRRRGREWWGFGMDIITQLQDQLDEMAVLAVNTFGTLQRDAPPDRLSSSYPDPLNPNPKPEDDSKPQVQAQPGAPPPPPAQAQAQAQPPAPDLTEQPKAMSRALVLAAKKFDALVAAVPLSSEEDQVKRIQELQAENEVVGLELQKQLEAAERELKQVEVLFNEATDNCINFKKLD

SEQ ID NO: 176233 - protein, 245 aa, Zea Mays
MAQASSLVAVLRRRTPAAARLLPHRLVSSAPAPAFASSSLVPLPLPSLIEGDRCGGGLSASFGSHSRLRLPRRHHAVAMATRTAHQVASSPESPAAVTSLSSSEASTSTAASEHSELVDFIKSAFGKLEGQNHCWFNIMNDTWMNLNHEGIYLLLLYQSCGTLNNDGKHLIAFESLKHLQQRYPRLNVFALQHGSDVSSLASQSQAFRTIVKEYITFPILISDKNFSNVLRTLYYSQTGLRSLMS

SEQ ID NO: 176234 - protein, 470 aa, Zea Mays
MAQASSLVAVLRRRTPAAARLLPHRLVSSAPAPAFASSSLVPLPLPSLIEGDRCGGGLSASFGSHSRLRLPRRHHAVAMATRTAHQVASSPESPAAVTSLSSSEASTSTAASEHSELVDFIKSAFGKLEGQNHCWFNIMNDTWMNLNHEGIYLLLLYQSCGTLNNDGKHLIAFESLKHLQQRYPRLNVFALQHGSDVSSLASQSQAFRTIVKEYITFPILISDKNFSNMTNGACYLLFEGSKDPVLFTNWVEEPDVMIKAIDELTTSKEKPSENVLSRVSWQKEEVVKEPSVGSFRNLLLYHPACVSVDEDGDRIFISDSNHHRIIISNSNGMILDYIGSSPGYEDGEFESAKFLRPASSFYHAAEDCLFIVDSENHAVRKADLGRRTLQTVYPVFNKSNGIWSWITDKLGMRKEATPTIQDFHADSMALPWHLIQISEDTLLVADRSFETPWTLTISTGEKQDIGRELK

SEQ ID NO: 176235 - protein, 469 aa, Zea Mays
MAQASSLVAVLRRRTPAAARLLPHRLVSSAPAPAFASSSLVPLPLPSLIEGDRCGGGLSASFGSHSRLRLPRRHHAVAMATRTAHQVASSPESPAAVTSLSSSEASTSTAASEHSELVDFIKSAFGKLEGQNHCWFNIMNDTWMNLNHEGIYLLLLYQSCGTLNNDGKHLIAFESLKHLQQRYPRLNVFALQHGSDVSSLASQSQAFRTIVKEYITFPILISDKNFSNMTNGACYLLFEGSKDPVLFTNWVEEPDVMIKAIDELTTSKEKPSENVLSRVSWQKEEVVKEPSVGSFRNLLLYHPACVSVDEDGDRIFISDSNHHRIIISNSNGMILDYIGSSPGYEDGEFESAKFLRPASSFYHAAEDCLFIVDSENHAVRKADLGRRTLQTVYPVFNKSNGIWSWITDKLGMRKEATPTIQDFHADSMALPWHLIQISEDTLLVADRSFETPWTLTISTGEKQDIGRVV

SEQ ID NO: 176236 - protein, 535 aa, Zea Mays
MIKAIDELTTSKEKPSENVLSRVSWQKEEVVKEPSVGSFRNLLLYHPACVSVDEDGDRIFISDSNHHRIIISNSNGMILDYIGSSPGYEDGEFESAKFLRPASSFYHAAEDCLFIVDSENHAVRKADLGRRTLQTVYPVFNKSNGIWSWITDKLGMRKEATPTIQDFHADSMALPWHLIQISEDTLLVADRSFETPWTLTISTGEKQDIGRGRAEIMESYQKTVKERCALIKDMHMNWSSSARVLSDSVQKIPNNELISSIARFQNYIVFCDTDGQRVLKHDLDTKTTSTIQFSDCEVLGLPYWSVCNLERVSTWGYSSGQLQEHAQQVDVLPGRCNITVYVDIPVGTELAAPLVDNCIWRQVRGSGAEVSGSDGPDTATEKVGIAQQWYDELDNLAFSEVAEEPTAAAHGDGNTDDQSYQEQRRVQFTCTVNVSPGTCELVASVALYLRLAGKRTTTDGVELVKRVMGGCQFREEQAGVELLARCREDDDATGLVVVKPVHLRLRLVCGDHPAGATNKETISTESSLKINVTLD

SEQ ID NO: 176237 - protein, 319 aa, Zea Mays
MESYQKTVKERCALIKDMHMNWSSSARVLSDSVQKIPNNELISSIARFQNYIVFCDTDGQRVLKHDLDTKTTSTIQFSDCEVLGLPYWSVCNLERVSTWGYSSGQLQEHAQQVDVLPGRCNITVYVDIPVGTELAAPLVDNCIWRQVRGSGAEVSGSDGPDTATEKVGIAQQWYDELDNLAFSEVAEEPTAAAHGDGNTDDQSYQEQRRVQFTCTVNVSPGTCELVASVALYLRLAGKRTTTDGVELVKRVMGGCQFREEQAGVELLARCREDDDATGLVVVKPVHLRLRLVCGDHPAGATNKETISTESSLKINVTLD

SEQ ID NO: 176238 - protein, 68 aa, Zea Mays
MGGCQFREEQAGVELLARCREDDDATGLVVVKPVHLRLRLVCGDHPAGATNKETISTESSLKINVTLD

SEQ ID NO: 176239 - protein, 383 aa, Zea Mays
MVPERRLENLVEQALTVQRDACYFHNSVDGLSLYIDHHCGKDQIPSCTLQVLRAHHDEVWFIQFSNNGKYLASASNDKSAIIWEVDEDGELLLRHTLSGHQKSVMMVAWSPDDCQLLTCGQEETIRRWDVKSGKCLHVYEKSATGLISCAWFPDGKQLSGLADQNFCIWDLDGKEVDCWKGQGSTGTSDFAVAKDGNLIISMSKQNTILLFDRETKQERIIEEGSTITSFCLSEDGDFLLVNLVSEEIHLWNIRNDPVRVNRYNGHKRTRFVIRSCFGGFEQAFIASGSEDSQVYIWHRATGDLIETLAGHSGTVNCVSWNPANPHMLASASDDHTVRIWGAKKSSLKRKDVGSSNCNSNGSRSNGNAHNNVFVQKCNGNNTK

SEQ ID NO: 176240 - protein, 458 aa, Zea Mays
MDEVTLCPKPRFLVIPWPATSHMIPIVDIGCLLAADGAPVTIITTPSSSQLVQSRVDDRAGQAGSADTTVTALPFPAMEAGLPDGCEPWAVPEGIVKLIFQIFIEYFIRFKIAPDRWRLCDKLWVGLDAGERCCGRADGHLAFSAEQFLNEKLAVGVLGIRVSVGVTKPTEGVLTGAKDGGGARAEADVGMEQDKLRKALAEPVESLFDVADQTTWQSIRNIYKRETEAILPEFLNNLCQFEMEYAPAEEMVSKLKDYAQSVVESKAKEESSKVLIHMKERGDSDTVSSVARFTTVFSHDKDSIPRVWTGKEDVHAIAKEARSTALKLLSVMAAIRWDDEPDRIESILTSTLLEGSVVSKIASAASADPLASTTWEEQAHRRGNSKLPPPWAIVAIAILGFNEIMVLIRNPIYLFLLFVGYLMVKALAMQLDVSREFQNGVVPGIISVSVKLLPTIQN

SEQ ID NO: 176241 - protein, 240 aa, Zea Mays
MHNLRSVSKPNAKLYLGLPFTPNRQCEALFGPTEGPTRSADVSLTLSTTRPHCSCSLDAVTSRMDGADIPSHSAADGDRPPENADDGGVEDERAAAPPPERCGALASAIAGVLAGALREHEERAAATARSQDEVAAAIDRLNGELDRLLENAPTMVIMHHSARISSIRKRISAMNMLLKSIQRRIDSMDRIISTDHSSPVQKAGNEVGTSYGFQYHEVSGGEVLAEFWWCPINCAPFLFW

SEQ ID NO: 176242 - protein, 128 aa, Zea Mays
MKLEQGSSRILVVSHQLRTISVLVELPSNNHTVLCIEVRRHNVDFFPRDVSSKYFNPFCSILEWGKSFVLDGQCCRQRIVLSALAFTLVFKHEIVFRNIIILSLLSGFDVYLLVEDGNIWNSCCYILS

SEQ ID NO: 176243 - protein, 86 aa, Zea Mays
MVIMHHSARISSIRKRISAMNMLLKSIQRRIDSMDRIISTDHSSPVQKAGNEVGTSYGFQYHEVSGGEVLAEFWWCPINCAPFLFW

SEQ ID NO: 176244 - protein, 218 aa, Zea Mays
MKLREHMQGDIDDENEAYERYTQNVRLLEETFYPMEYADVEPEAEAPSSDEERMDLLVSEAKVRLKSDNEIADRFKERVAAILDQKLKKLLESQSADEDDKLSDPDQDDHLNPAKFSAKQKAERSASLNELLGKLTRARSEDDLKPCRDLIEQLFGKEKGSSTDRQAGVEMEQRDQESAAAAVAQPYSVPELCARMEVDEDFAAKISDEFSLSQVAQL

SEQ ID NO: 176245 - protein, 151 aa, Zea Mays
MPKSPNQTALMNVLVAYPTDGQSQRSPTHPTNAGRTQTQTYHSQQYNTSHPLRLGSGLLGGWFFLPASLVNQINRLARSPPDRHAPRTTRPPPRISRARAQASIAADPDAPPPGQSGGGDGGDMSRPGLAGPASHGRHRAPGHRHRQRHRV

SEQ ID NO: 176246 - protein, 435 aa, Zea Mays
MDATARPAIVIDNGTGYSKLGFSGNSEPSFTLPTVVAANESFLDQTELLSSANWIAQYNAGIMADLDFFIGDEALSRFRSSGLYTLRSPIRHGQVYDWDTMERFWQQCIFNYLRCNPEEHYFLLTDSPVSTPESRECTGEIMFETFNVPGLYISVQSVLSLSAGYAYLKSLSDDDSDTRSDMTGVVVDIGDGAPQIVPVVNGYVIGSSIKSFPSSGSDVTQFISQLLQERGELLAPEDSLDISRKVKEVYCYTCSDIVKEFKKHDKKPDKYIKHWSAVKPKTGVPYTIDIGYERFLGPEIFFNPEIYSADFSTPLPELIDNCVQSAPIDTRRALYKNIVLSGGSTMFKDFHKRLQTDIKKIVDDRVAATNARHRVEVRPIEVNVVAHPIQSYAVWFGGSVAASNPEFFEFCHTKEEYEEHGASICRTSPVFKGMY

SEQ ID NO: 176247 - protein, 128 aa, Zea Mays
MEPTSLRPRPPWPRHRRRICASPRPRPPPSPPPTPSPPSASSSPSSPPSSALPAHCNRLLTMLAWDGDGDAALRGLCPLRRLQHLLCHRHLHPWRGMFVAGQFSGRASVSVFGYATQSDLKLALPCSF

SEQ ID NO: 176248 - protein, 105 aa, Zea Mays
MEPTSLRPRPPWPRHRRRICASPRPRPPPSPPPTPSPPSASSSPSSPPSSALPAHCNRLLTMLAWDGDGDAALRGLCPLRRLQHLLCHRHLHPWRGMVGPTLLFL

SEQ ID NO: 176249 - protein, 281 aa, Zea Mays
MASATATAPAFALASSLSRRGFLPLSRRAGRPVPQSLRFVASAVRRRRSAVVVAADAAAAAGSAEFGDEENPYELLGIRPLDSFDHMKMAYKKKRKDAEETGDDEFLAKLDRAHDTVMMQQLRYRKKGVTYGSVQVSKDIKYADNQPIVLWGPRFSRSTVKDMRINMAISAAFVVWIAIMGNADWKPLQFLCFAFFCRILQKLRATEPLITPIYNEYGEVEGRGIRMAKRVVRALGLIFGCVFTASLFDCPPNIFRLIQQLVTWLSFHCSILPVCFTTIRS

SEQ ID NO: 176250 - protein, 205 aa, Zea Mays
MKMAYKKKRKDAEETGDDEFLAKLDRAHDTVMMQQLRYRKKGVTYGSVQVSKDIKYADNQPIVLWGPRFSRSTVKDMRINMAISAAFVVWIAIMGNADWKPLQFLCFAFFCRILQKLRATEPLITPIYNEYGEVEGRGIRMAKRVVRALGLIFGCVFTASLAYTAASNMVELSLQYTPRMFYYYQELIVTVAASVLLYITASWYR

SEQ ID NO: 176251 - protein, 127 aa, Zea Mays
MLIVYGYSLVVWIAIMGNADWKPLQFLCFAFFCRILQKLRATEPLITPIYNEYGEVEGRGIRMAKRVVRALGLIFGCVFTASLAYTAASNMVELSLQYTPRMFYYYQELIVTVAASVLLYITASWYR

SEQ ID NO: 176252 - protein, 768 aa, Zea Mays
MMGKTHMFSKGHPLGFVPDYRHRVEAMGEFKRLGSPVRVDSGSYCPPPKRKCVSVNSEERECASGFSLTRVPREVFSLPSMTALDKKDVEMRLHHELAQVKDLQIRLFSGGHNVGSMNGATVASAPGSDMLPKKKAEKLRRSNSVQTDRGAPPPMATAVAPPVSSSINYTSSFKQCANLLKSLMSHVWASPFLVPVDIVKLNIPDYFQIVKQPMDLGTIQKRMKAGMYSTPPEFAADVRLTFSNAMNYNPANNDVHLMAKTLSKNFESRWKLIEKKLPKPDEKPPQPDEKPPQPVEKPPVRKPTKKNSTKRVSIEKEDLTKKKPSKKSVPKQYIFRGEDSADSPVLQPKKRKTSPLVQDAPLVGDIVPTRKRIMTSEQKYDLSARLQSYGAFIPDHVVELIRSHADYCDANEEELELDMDALGDDTLFELLRLLDDYDRVNPSRNLTEQDPHEVKSRSQYELINASVCNEEVNELFDEDVDIGENDPPVLTFPPLVLEDETADRSRKHSASSSSSSDSESSSSGSSSSSGSDTDAKAAQQNSVSKEKILPVDGLGHEKDSLDTLNLPEQSTDPVSVSAYGEGGYVSEKVSPEKQIRAALLRSRFADTILKAREKALDQTTKKDPEKLRREREELERLQRQERARLQAEAKAAEDACKRAEEAAAAEAAAEAKRQRDIEREAARKALQEMERTVDINGGSHFLKDLEMLRGITCEEMPNLVGEGSPGFQLGSSNALAKLGLYMKDDEDDEEGDLADAPVVVDIEEGEID

SEQ ID NO: 176253 - protein, 766 aa, Zea Mays
MMGKTHMFSKGHPLGFVPDYRHRVEAMGEFKRLGSPVRVDSGSYCPPPKRKCVSVNSEERECASGFSLTRVPREVFSLPSMTALDKKDVEMRLHHELAQVKDLQIRLFSGGHNVGSMNGATVASAPGSDMLPKKKAEKLRRSNSVQTDRGAPPPMATAVAPPVSSSINYTSSFKQCANLLKSLMSHVWASPFLVPVDIVKLNIPDYFQIVKQPMDLGTIQKRMKAGMYSTPPEFAADVRLTFSNAMNYNPANNDVHLMAKTLSKNFESRWKLIEKKLPKPDEKPPQPDEKPPQPVEKPPVRKPTKKNSTKRVSIEKEDLTKKKPSKKSVPKQYIFRGEDSADSPVLQPKKRKTSPLVQDAPLVGDIVPTRKRIMTSEQKYDLSARLQSYGAFIPDHVVELIRSHADYCDANEEELELDMDALGDDTLFELLRLLDDYDRVNPSRNLTEQDPHEVKSRSQYELINASVCNEEVNELFDEDVDIGENDPPVLTFPPLVLEDETADRSRKHSASSSSSSDSESSSSGSSSSSGSDTDAKAAQQNSVSKEKILPVDGLGHEKDSLDTLNLPEQSTDPVSVSAYGGYVSEKVSPEKQIRAALLRSRFADTILKAREKALDQTTKKDPEKLRREREELERLQRQERARLQAEAKAAEDACKRAEEAAAAEAAAEAKRQRDIEREAARKALQEMERTVDINGGSHFLKDLEMLRGITCEEMPNLVGEGSPGFQLGSSNALAKLGLYMKDDEDDEEGDLADAPVVVDIEEGEID

SEQ ID NO: 176254 - protein, 768 aa, Zea Mays
MMGKTHMFSKGHPLGFVPDYRHRVEAMGEFKRLGSPVRVDSGSYCPPPKRKCVSVNSEERECASGFSLTRVPREVFSLPSMTALDKKDVEMRLHHELAQVKDLQIRLFSGGHNVGSMNGATVASAPGSDMLPKKKAEKLRRSNSVQTDRGAPPPMATAVAPPVSSSINYTSSFKQCANLLKSLMSHVWASPFLVPVDIVKLNIPDYFQIVKQPMDLGTIQKRMKAGMYSTPPEFAADVRLTFSNAMNYNPANNDVHLMAKTLSKNFESRWKLIEKKLPKPDEKPPQPDEKPPQPVEKPPVRKPTKKNSTKRVSIEKEDLTKKKPSKKSVPKQYIFRGEDSADSPVLQPKKRKTSPLVQDAPLVGDIVPTRKRIMTSEQKYDLSARLQSYGAFIPDHVVELIRSHADYCDANEEELELDMDALGDDTLFELLRLLDDYDRVNPSRNLTEQDPHEVKSRSQYELINASVCNEEVNELFDEDVDIGENDPPVLTFPPLVLEDETADRSRKHSASSSSSSDSESSSSGSGSSSSSGSDTDAKAAQQNSVSKEKILPVDGLGHEKDSLDTLNLPEQSTDPVSVSAYGGYVSEKVSPEKQIRAALLRSRFADTILKAREKALDQTTKKDPEKLRREREELERLQRQERARLQAEAKAAEDACKRAEEAAAAEAAAEAKRQRDIEREAARKALQEMERTVDINGGSHFLKDLEMLRGITCEEMPNLVGEGSPGFQLGSSNALAKLGLYMKDDEDDEEGDLADAPVVVDIEEGEID

SEQ ID NO: 176255 - protein, 141 aa, Zea Mays
MFLGELEEVLEATQPAEFQRCMVPLFRQISRCLSSSHFQVAERALFLWNSNHIEGLIKHNSKVILPVVLPALERNTKGHWNQAVQSLSLNVRKIFMDYDPALFEECREKFEEEEAQEAGMRSRCEARWKRLEEIASSKEVK

SEQ ID NO: 176256 - protein, 75 aa, Zea Mays
MTVSVFIIRGQRKGCKMVIPALLRCSCHMLTSSLRLNVLIQALLEALERQSSSTCSCLLMVILLKCIACFVYDEW

SEQ ID NO: 176257 - protein, 508 aa, Zea Mays
MAISAKERKLSRLGSCKGGAAAGSGSGGGGGSPAARAHRSVAAAPQRRVFAALFAFLCAGVVVLGGVHVIGATFRPVLRTAWPAATLNAISSDARARRGGSSADTTVLPSVQIRHAVAMPDRVLLILKDGPLLPSPERFQCLYSPANSSELRRHRPLLAASSPDGPSLVHCPAEPSCVDVSLSLSLSPPVAPLQWDRLVYAALVDSRDNSTVVFAKGMNLRPGRLGVASRYQCVFGRDLWKPKQRVLTSPVISAAQEVFRCVTPARVRRHLRMTTDPNGNGNGNDKPMLVSIRTKGQRDSTLPSIAEPEPLPPRHNYRHHRRRPKAHSMCVCTMLRNQARFLREWIIYHSRIGVERWFIYDNNSDDGIEQVLGTMDPSTHNVTRHLWPWTKSQEAGFAHCALRARESCEWVGFIDVDEFLHFPGNQTTLPDILRSYSNRPRVGELRTACHSFGPSGRTRIPKQGVTTGYTCRLAAPERHKSIVRPDALNPSLVNVVHHFHLREGARRD

SEQ ID NO: 176258 - protein, 110 aa, Zea Mays
MIESICLAGGTKHILRWGLTRRVSPKMVCTDSLRYVCSSSFALLLPSLISLVFPCFKLTLQINIRLDSVSKGVVVLFCCLPQKSSCDFLFILWILQPLLIVRPLSMPSWF

SEQ ID NO: 176259 - protein, 53 aa, Zea Mays
MLPHYLAHRPSNHYHHRSSGSLMPPLPNMWPQIPLLDMKTSNPNPKQESVIRP

SEQ ID NO: 176260 - protein, 163 aa, Zea Mays
MASKGGAVLMVCRTCGKKGDHWTSKCPYKDLAPPTETFTDRPPTSDGPPAPGGPAKGAYVPPTMRGGADRTGDSMRRRNDENSVRVTNLSEDTREPDLLELFRAFGPVSRVYVAVDQKTGSSRGFGFVNFVHREDAEKAINKLNGYGYDNLILRVEWATPRPN

SEQ ID NO: 176261 - protein, 316 aa, Zea Mays
MQGGRGGRQGLFGFGDPSGGSGGFGQPGSLMPGFFGGANPFDDPFFTNPFGSMMQTSFSAPFSGMMQPSFMNPFGSMVQPSLLGPSMFAPHGNLNGGMFGSQTHLGQDDDEEGEKKNGNFRKHQRESKEPYVEDPDDEEDNKRPKHGQFGREFSRVNTSRPQPQTFMFQSSTVTYGGPNGACYTSSTTRRTGADGFTLEENKEADTTTGKATHRISRGIGIKGHSLTRNLNSDGRVNTLQTLHNLNEDELGGFEESWQRNTRENMPGWDPRMNMLGNGNVRSDFRDVNQMPALPAPELYRGTNFQNGSSMGRAPRT

SEQ ID NO: 176262 - protein, 280 aa, Zea Mays
MQGGRGGRQGLFGFGDPSGGSGGFGQPGSLMPGFFGGANPFDDPFFTNPFGSMMQTSFSAPFSGMMQPSFMNPFGSMVQPSLLGPSMFAPHGNLNGGMFGSQTHLGQGISNGSGFIQQAPEPSRPKGPIIKELSSDDEDDVDDDEEGEKKNGNFRKHQRESKEPYVEDPDDEEDNKRPKHGQFGREFSRVNTSRPQPQTFMFQSSTVTYGGPNGACYTSSTTRRTGADGFTLEENKEADTTTGKATHRISRGIGIKMSLVDLRNHGKEIPGRICLAGILE

SEQ ID NO: 176263 - protein, 63 aa, Zea Mays
MVGAVALCHLHRKTKARFRLRRSLLVPRPRLARRPTRNLAHCKSVTGPAWTSILRASSVIAFL

SEQ ID NO: 176264 - protein, 350 aa, Zea Mays
MAIVETAAAAAAAAAAADHTAPPREEEAPGAAADAGEREMRDLEDLLSKLNPMAEEFVPPSLASPISGAGAGHGALTPAPLSPAAYGFYPVNAGFAVASPGHRGVVSFPAVADAHAGRGMKKDGAGGFGGHGHGHPGRRRTNSRTSMAQRDEAIRRTVYVSDIDHQVTEENLAALFINCGQVVDCRMCGDPNSVLRFAFIEFTDEEGARAALNLSGTVLGYYPVKVLPSKTAIAPVNETFLPRSDDEREMCARTIYCTNIDKKVTQADLKLFFESICGEVGRSLLQTQSPFCTAKGLSAEVAWRLPSFYPHRFCGIRDGQLSIPSPSNLRSFFFLGKYFLRKSCLAFSIV

SEQ ID NO: 176265 - protein, 261 aa, Zea Mays
MGVVVEREEWALSPFAYPLLSAAALAAVLLLPYLSPRTAAHATGPSSPFDVGAAPFLRFRRAFLVLFSLASGIHSVFGEDEFVRCGLGREQTTARLASTTAAALFPGAISGVISDKIGPRRACILYWVLQLAVGVVKSFSALRCSWINNFILAFASSVFSFCFETWLVLEHEKQDQKQDLLFDTFWLMTFFESVSLVGSQEITNVLVSDDDSRFLLPYAFAATLSVVGILYIRNASSTCQHASAIGSYQKSFLAHVLRGEC

SEQ ID NO: 176266 - protein, 194 aa, Zea Mays
MGVVVEREEWALSPFAYPLLSAAALAAVLLLPYLSPRTAAHATGPSSPFDVGAAPFLRFRRAFLVLFSLASVVEGIHSVFGEDEFVRCGLGREQTTARLASTTAAALFPGAISGVISDKIGPRRACILYWVLQLAVGVVKSFSALRCSWINNFILAFASSVFSFCFETWLVLEHEKVSVFLETHMCYYCVVYVV

SEQ ID NO: 176267 - protein, 154 aa, Zea Mays
MGIGEHFEGVKQHWASNFAFLDYYKKVYGRAEPLPKWSDADVDEFIASDPVYGPQLKALRESRKFALAGAFAGAAHLGGVALKYSKAPHGVVLATGFGAITGAVLGSEVAEHWYQLYKMDKQGANLRFIYWWEDKVSEELNHVELNDAYLSIPV

SEQ ID NO: 176268 - protein, 135 aa, Zea Mays
MHATIEEIEAEKSLIEDQAKEKMEKAIETVQANFNTVRTGRANPAMLDRIEVEYYGTPVNLKSIAQISTPDATSLLIQPYDKSSLKLIEKTIVAANLGVTPSNDGEVIRVTVPPLTSDRRKELSKTVAKLAEDGK

SEQ ID NO: 176269 - protein, 158 aa, Zea Mays
MALHAVSSAAVSSPLRALSRSLPQRPGCGCLPKQSVMIYSTKFARPQAGPVDFAGRPLVLGRSDKRAVLMHATIEEIEAEKSLIEDQAKEKMEKAIETVQANFNTVRTGRANPAMLDRIEVEYYGTPVNLKSIAQISTPDATSLLIQPYDKSSLLRKL

SEQ ID NO: 176270 - protein, 204 aa, Zea Mays
MALHAVSSAAVSSPLRALSRSLPQRPGCGCLPKQSVMIYSTKFARPQAGPVDFAGRPLVLGRSDKRAVLMHATIEEIEAEKSLIEDQAKEKMEKAIETVQANFNTVRTGRANPAMLDRIEVEYYGTPVNLKSIAQISTPDATSLLIQPYDKSSLKLIEKTIVAANLGVTPSNDGEVIRVTVPPLTSDRRKELSKTVAKLAEDGK

SEQ ID NO: 176271 - protein, 325 aa, Zea Mays
MGCVSSKQFHGGDDHGDGKPRRRPSSNSLKRLVSYSSSKRHEELEEEDEVGAAVAATSSSGGRRAGNDASTARLIRKPPALVVEAVPALSEEAATLAVGVVDAERAVAAATGNRKRPPADVHINGAAEQGLSSVGVRTEGEAKPRIRDVPNGVQGEHVVAGWPRWLTEVAAEAVRGWQPRRAESFEKLDKIGQGTYSSVYKARDLENGKIVALKKVRFANMDPESVRFMAREIHILRRLDHPNVIKLEGLVTSRMSSSLYLVFEYMEHDLAGLAATPGLKFSEPQVKCYMQQLLSGLDHCHNRGVLHRDIKGANLLLDNNGILKI

SEQ ID NO: 176272 - protein, 218 aa, Zea Mays
MNPKSSSYKFTPKEDAVSGFPIDPPARAAADNGYPQRVPLMQAGRSSSTLGRSSGMDPKAQRFHTSQIVTTEMSGQSTASGQRGNAPKMSNLGESARRQYLREHRSSSRYSQLTAADPSDRPEWNHQFQERPSSSHRKDDAVANKEHTVNGTKKNRIHYSGPLMPPGVNMDEILREHERQIQQAVRRARLDKGKGKHSGERDQSESLLCTTGNLRADR

SEQ ID NO: 176273 - protein, 274 aa, Zea Mays
MPAIHQVYPSIPQARNMMLSFEMKKLGGKEQLLKDRKLKLDGGSNLLHLMHRRVQMNPKSSSYKFTPKEDAVSGFPIDPPARAAADNGYPQRVPLMQAGRSSSTLGRSSGMDPKAQRFHTSQIVTTEMSGQSTASGQRGNAPKMSNLGESARRQYLREHRSSSRYSQLTAADPSDRPEWNHQFQERPSSSHRKDDAVANKEHTVVNGTKKNRIHYSGPLMPPGVNMDEILREHERQIQQAVRRARLDKGKGKHSGERDQSESLLCTTGNLRADR

SEQ ID NO: 176274 - protein, 152 aa, Zea Mays
MQCLVRNVCRAGSRGAAARLLELAAAGPGATQPSVAVKLLRPPYEFTRPIGVVQPVRVQSRAVSRDGLVPAAATSGFGLCAQVIVAMRGLSTVGSAAEVASDSDDSTSPAVEHPPRIKFKRPDKTARHIMNVCKLNPKQRGGRKGPLGKGDS

SEQ ID NO: 176275 - protein, 383 aa, Zea Mays
MDDYCSQVPVGHLVFMVHGIGQRLEKANLVDDVVDFRRVTANLAERYLTSYQRSTQRVLFIPCQWRKGLKLSGESTVEKLTLDGVKGLRVALGATVHDVLYYMSPIYCQHIIDSVSNQLNKLYMKFLKRNPGYSGKVSLYGHSLGSVLSYDILCHQESLWAPFPTEYLNMETSDRNQGAKSANEADLHDSGAKDHDTSSLGYSCADNENSVIDEDSTRTDVSCMDSILPSCVLEDSPNNHDTVVPRGAVVADQNGEEKKVENYQSVYAEEGTTSGVITKKAEGSSISRSAKEVHEEVLDKEKLMVLAKDKLILSLEEEVDTFFAVGSPLGVFLSLRNVRIGIGKGQDYWQDKNVIEEMPCCRQMFNIFHPFDPVAYRWAFIQN

SEQ ID NO: 176276 - protein, 448 aa, Zea Mays
MDDYCSQVPVGHLVFMVHGIGQRLEKANLVDDVVDFRRVTANLAERYLTSYQRSTQRVLFIPCQWRKGLKLSGESTVEKLTLDGVKGLRVALGATVHDVLYYMSPIYCQHIIDSVSNQLNKLYMKFLKRNPGYSGKVSLYGHSLGSVLSYDILCHQESLWAPFPTEYLNMETSDRNQGAKSANEADLHDSGAKDHDTSSLGYSCADNENSVIDEDSTRTDVSCMDSILPSCVLEDSPNNHDTVVPRGAVVADQNGEEKKVENYQSVYAEEGTTSGVITKKAEGSSISRSAKEVHEEVLDKEKLMVLAKDKLILSLEEEVKCLKAKLDQLEQHNHLVTENTSGVEYHEGQNYNHALNSGKLFVAQESTNQSYSPQIKYTKLNFKVDTFFAVGSPLGVFLSLRNVRIGIGKGQDYWQDKNVIEEMPCCRQMFNIFHPFDPVAYRWAFIQN

SEQ ID NO: 176277 - protein, 619 aa, Zea Mays
MDDYCSQVPVGHLVFMVHGIGQRLEKANLVDDVVDFRRVTANLAERYLTSYQRSTQRVLFIPCQWRKGLKLSGESTVEKLTLDGVKGLRVALGATVHDVLYYMSPIYCQHIIDSVSNQLNKLYMKFLKRNPGYSGKVSLYGHSLGSVLSYDILCHQESLWAPFPTEYLNMETSDRNQGAKSANEADLHDSGAKDHDTSSLGYSCADNENSVIDEDSTRTDVSCMDSILPSCVLEDSPNNHDTVVPRGAVVADQNGEEKKVENYQSVYAEEGTTSGVITKKAEGSSISRSAKEVHEEVLDKEKLMVLAKDKLILSLEEEVKCLKAKLDQLEQHNHLVTENTSGVEYHEGQNYNHALNSGKLFVAQESTNQSYSPQIKYTKLNFKVDTFFAVGSPLGVFLSLRNVRIGIGKGQDYWQDKNVIEEMPCCRQMFNIFHPFDPVAYRGGKRIHVGVQEFREDISARSQAIARQLKSLKVKAVAAILALSRNDTEEDGESANEKEKSYGSIMMERLTSSPNGRIDHVLQEKTFQHPYLSALGAHTNYWRDHDTALFILKHLYRDIPEDPPSDVIERMPIKLFYERDPVEEETPVTFSDHAAIKEFCRKVKAYSRKMEDDANCQAS

SEQ ID NO: 176278 - protein, 538 aa, Zea Mays
MSPIYCQHIIDSVSNQLNKLYMKFLKRNPGYSGKVSLYGHSLGSVLSYDILCHQESLWAPFPTEYLNMETSDRNQGAKSANEADLHDSGAKDHDTSSLGYSCADNENSVIDEDSTRTDVSCMDSILPSCVLEDSPNNHDTVVPRGAVVADQNGEEKKVENYQSVYAEEGTTSGVITKKAEGSSISRSAKEVHEEVLDKEKLMVLAKDKLILSLEEEVKCLKAKLDQLEQHNHLVTENTSGVEYHEGQNYNHALNSGKLFVAQESTNQSYSPQIKYTKLNFKVDTFFAVGSPLGVFLSLRNVRIGIGKGQDYWQDKNVIEEMPCCRQMFNIFHPFDPVAYRIEPLVCEDYLKKRPVIVPYHRGGKRIHVGVQEFREDISARSQAIARQLKSLKVKAVAAILALSRNDTEEDGESANEKEKSYGSIMMERLTSSPNGRIDHVLQEKTFQHPYLSALGAHTNYWRDHDTALFILKHLYRDIPEDPPSDVIERMPIKLFYERDPVEEETPVTFSDHAAIKEFCRKVKAYSRKMEDDANCQAS

SEQ ID NO: 176279 - protein, 801 aa, Zea Mays
MAGPWDTHASTSRAPAGPDGEAEGASPDSLRNTPSNIARLEDAIGHCAARRKYLAHTKSPSDGEDVRWYFCKLPLADKVLSSSVPRTEIVGKGDYFRFSERDSLALEASFLEREEELLAYWWREYAECSAGPRGSLVESDDSAYLYKVEEERVGVPVKGGLYEVDLMRRHCFPVYWNGENRRVLRGHWFARKGGVDWIPVREDVSEQLELAYNCQVWHRRKFQPSGLFAARVDLQGSTPDLHALFTGEDDTWEAWLVFDTGPKFGSNTIKLRRGYFCSESASTKPSQDELRQKKEEEMDDYCSQVPVGHLVFMVHGIGQRLEKANLVDDVVDFRRVTANLAERYLTSYQRSTQRVLFIPCQWRKGLKLSGESTVEKLTLDGVKGLRVALGATVHDVLYYMSPIYCQHIIDSVSNQLNKLYMKFLKRNPGYSGKVSLYGHSLGSVLSYDILCHQESLWAPFPTEYLNMETSDRNQGAKSANEADLHDSGAKDHDTSSLGYSCADNENSVIDEDSTRTDVSCMDSILPSCVLEDSPNNHDTVVPRGAVVADQNGEEKKVENYQSVYAEEGTTSGVITKKAEGSSISRSAKEVHEEVLDKEKLMVLAKDKLILSLEEEVKCLKAKLDQLEQHNHLVTENTSGVEYHEGQNYNHALNSGKLFVAQESTNQSYSPQIKYTKLNFKVDTFFAVGSPLGVFLSLRNVRIGIGKGQDYWQDKNVIEEMPCCRQMFNIFHPFDPVAYRIEPLVCEDYLKKRPVIVPYHRGGKRIHVGVQRRYFCTFSSNCPSIEVTEGQSSSCYTSIEQK

SEQ ID NO: 176280 - protein, 465 aa, Zea Mays
MDDYCSQDELRQKKEEEMDDYCSQVPVGHLVFMVHGIGQRLEKANLVDDVVDFRRVTANLAERYLTSYQRSTQRVLFIPCQWRKGLKLSGESTVEKLTLDGVKGLRVALGATVHDVLYYMSPIYCQHIIDSVSNQLNKLYMKFLKRNPGYSGKVSLYGHSLGSVLSYDILCHQESLWAPFPTEYLNMETSDRNQGAKSANEADLHDSGAKDHDTSSLGYSCADNENSVIDEDSTRTDVSCMDSILPSCVLEDSPNNHDTVVPRGAVVADQNGEEKKVENYQSVYAEEGTTSGVITKKAEGSSISRSAKEVHEEVLDKEKLMVLAKDKLILSLEEEVKCLKAKLDQLEQHNHLVTENTSGVEYHEGQNYNHALNSGKLFVAQESTNQSYSPQIKYTKLNFKVDTFFAVGSPLGVFLSLRNVRIGIGKGQDYWQDKNVIEEMPCCRQMFNIFHPFDPVAYRWAFIQN

SEQ ID NO: 176281 - protein, 625 aa, Zea Mays
MVHGIGQRLEKANLVDDVVDFRRVTANLAERYLTSYQRSTQRVLFIPCQWRKGLKLSGESTVEKLTLDGVKGLRVALGATVHDVLYYMSPIYCQHIIDSVSNQLNKLYMKFLKRNPGYSGKVSLYGHSLGSVLSYDILCHQESLWAPFPTEYLNMETSDRNQGAKSANEADLHDSGAKDHDTSSLGYSCADNENSVIDEDSTRTDVSCMDSILPSCVLEDSPNNHDTVVPRGAVVADQNGEEKKVENYQSVYAEEGTTSGVITKKAEGSSISRSAKEVHEEVLDKEKLMVLAKDKLILSLEEEVKCLKAKLDQLEQHNHLVTENTSGVEYHEGQNYNHALNSGKLFVAQESTNQSYSPQIKYTKLNFKVDTFFAVGSPLGVFLSLRNVRIGIGKGQDYWQDKNVIEEMPCCRQMFNIFHPFDPVAYRIEPLVCEDYLKKRPVIVPYHRGGKRIHVGVQEFREDISARSQAIARQLKSLKVKAVAAILALSRNDTEEDGESANEKEKSYGSIMMERLTSSPNGRIDHVLQEKTFQHPYLSALGAHTNYWRDHDTALFILKHLYRDIPEDPPSDVIERMPIKLFYERDPVEEETPVTFSDHAAIKEFCRKVKAYSRKMEDDANCQAS

SEQ ID NO: 176282 - protein, 592 aa, Zea Mays
MDDYCSQDELRQKKEEEMDDYCSQVPVGHLVFMVHGIGQRLEKANLVDDVVDFRRVTANLAERYLTSYQRSTQRVLFIPCQWRKGLKLSGESTVEKLTLDGVKGLRVALGATVHDVLYYMSPIYCQHIIDSVSNQLNKLYMKFLKRNPGYSGKVSLYGHSLGSVLSYDILCHQESLWAPFPTEYLNMETSDRNQGAKSANEADLHDSGAKDHDTSSLGYSCADNENSVIDEDSTRTDVSCMDSILPSCVLEDSPNNHDTVVPRGAVVADQNGEEKKVENYQSVYAEEGTTSGVITKKAEGSSISRSAKEVHEEVLDKEKLMVLAKDKLILSLEEEVDTFFAVGSPLGVFLSLRNVRIGIGKGQDYWQDKNVIEEMPCCRQMFNIFHPFDPVAYRIEPLVCEDYLKKRPVIVPYHRGGKRIHVGVQEFREDISARSQAIARQLKSLKVKAVAAILALSRNDTEEDGESANEKEKSYGSIMMERLTSSPNGRIDHVLQEKTFQHPYLSALGAHTNYWRDHDTALFILKHLYRDIPEDPPSDVIERMPIKLFYERDPVEEETPVTFSDHAAIKEFCRKVKAYSRKMEDDANCQAS

SEQ ID NO: 176283 - protein, 383 aa, Zea Mays
MGNAFACMPRKEQRGAAAVSRSKRMGSARSARGGPKLTPAEEELLHRQALAMAIHQHLDAGGSMSRRIDAGASLSRRMAPGSTSSRRRGDLPDSVTNAKPAPIVLENLETKKIVLVHGEGFGAWCWYKTISHLEEAGLDPVALDLTGSGIDHTDTNSIATLADYSKPLIDYLDRLPEDEKVILVGHSCGGASVSYALEQYPRKISKAVFLTATMGLTLTYIRQLRSADVFLQESQFLVYGNGKDKPPTGLMFDKQQIKGLYFNQTPSKDMALAAVSMRPIPLAPIMEKLSLTPENYGSVRRYFIQALDDHMLSPDAQEKLVRENPPDGIFKIKGGDHCPFFSKPQSLNKILLEIAQIQAPAALLKASSPEETAAAMVTGPAKS

SEQ ID NO: 176284 - protein, 163 aa, Zea Mays
MVKDGQRPFDVFSEEFLVYGNGKDKPPTGLMFDKQQIKGLYFNQTPSKDMALAAVSMRPIPLAPIMEKLSLTPENYGSVRRYFIQALDDHMLSPDAQEKLVRENPPDGIFKIKGGDHCPFFSKPQSLNKILLEIAQIQAPAALLKASSPEETAAAMVTGPAKS

SEQ ID NO: 176285 - protein, 365 aa, Zea Mays
MLETSAEKHTTIMGHDHMSRIKMHMAEGSFGDRNRCQQPGCNEVVDGRVVYCKTHSGELSCQQFSHLQSGLESSAVPCTEQELHVKHEGDDRGMFCKNDSCSKQAHENSIYCKLHSGVSKGCMVRGCTRGAHGGTPLCIGHGGGKRCVIPGCPNAACGQGLSDRCVRHGGGRRCRFEGCAKGAQGNTDYCIRHGGGRRCKFEGCTKSAQGRTDFCIKHGGGSRCKFQGCGTSAKWGTDFCSIHRKALLGGDNAAVPEALPAASEKRRRAKKPKKAAKLSEASQENATAAAAIAGNSTQHMGGLLIAIPVANRDMLTKAVAATGQAAIASAQIVAPLSMKSPTPSGAAAATLTGREAGASREMLGL

SEQ ID NO: 176286 - protein, 386 aa, Zea Mays
MLETSAEKHTTIMGHDHMSRIKMHMAEGSFGDRNRCQQPGCNEVVDGRVVYCKTHSGELSCQQFSHLQSGLESSVPCTEQELHVKHEGDDRGKLKDSSGYTLGQTAQFVFPGAGMFCKNDSCSKQAHENSIYCKLHSGVSKGCMVRGCTRGAHGGTPLCIGHGGGKRCVIPGCPNAACGQGLSDRCVRHGGGRRCRFEGCAKGAQGNTDYCIRHGGGRRCKFEGCTKSAQGRTDFCIKHGGGSRCKFQGCGTSAKWGTDFCSIHRKALLGGDNAAVPEALPAASEKRRRAKKPKKAAKLSEASQENATAAAAIAGNSTQHMGGLLIAIPVANRDMLTKAVAATGQAAIASAQIVAPLSMKSPTPSGAAAATLTGREAGASREMLGL

SEQ ID NO: 176287 - protein, 353 aa, Zea Mays
MGHDHMSRIKMHMAEGSFGDRNRCQQPGCNEVVDGRVVYCKTHSGELSCQQFSHLQSGLESSAVPCTEQELHVKHEGDDRGMFCKNDSCSKQAHENSIYCKLHSGVSKGCMVRGCTRGAHGGTPLCIGHGGGKRCVIPGCPNAACGQGLSDRCVRHGGGRRCRFEGCAKGAQGNTDYCIRHGGGRRCKFEGCTKSAQGRTDFCIKHGGGSRCKFQGCGTSAKWGTDFCSIHRKALLGGDNAAVPEALPAASEKRRRAKKPKKAAKLSEASQENATAAAAIAGNSTQHMGGLLIAIPVANRDMLTKAVAATGQAAIASAQIVAPLSMKSPTPSGAAAATLTGREAGASREMLGL

SEQ ID NO: 176288 - protein, 272 aa, Zea Mays
MFCKNDSCSKQAHENSIYCKLHSGVSKGCMVRGCTRGAHGGTPLCIGHGGGKRCVIPGCPNAACGQGLSDRCVRHGGGRRCRFEGCAKGAQGNTDYCIRHGGGRRCKFEGCTKSAQGRTDFCIKHGGGSRCKFQGCGTSAKWGTDFCSIHRKALLGGDNAAVPEALPAASEKRRRAKKPKKAAKLSEASQENATAAAAIAGNSTQHMGGLLIAIPVANRDMLTKAVAATGQAAIASAQIVAPLSMKSPTPSGAAAATLTGREAGASREMLGL

SEQ ID NO: 176289 - protein, 387 aa, Zea Mays
MLETSAEKHTTIMGHDHMSRIKMHMAEGSFGDRNRCQQPGCNEVVDGRVVYCKTHSGELSCQQFSHLQSGLESSGLSVRPVTPVNDSQFKGSVSIAAVPCTEQELHVKHEGDDRGMFCKNDSCSKQAHENSIYCKLHSGVSKGCMVRGCTRGAHGGTPLCIGHGGGKRCVIPGCPNAACGQGLSDRCVRHGGGRRCRFEGCAKGAQGNTDYCIRHGGGRRCKFEGCTKSAQGRTDFCIKHGGGSRCKFQGCGTSAKWGTDFCSIHRKALLGGDNAAVPEALPAASEKRRRAKKPKKAAKLSEASQENATAAAAIAGNSTQHMGGLLIAIPVANRDMLTKAVAATGQAAIASAQIVAPLSMKSPTPSGAAAATLTGREAGASREMLGL

SEQ ID NO: 176290 - protein, 642 aa, Zea Mays
MNYEDMEAHMAKFKDDWKEYGVTVMCDSWTGPTMMCIINFMVYCNGRMFFHKSINATGRVQNAEFIYDCIREVVVDEIGVKNVIQIVTDNGSNYKKACRQLITRYPHITWQPCAAHTINLMLKDISRFSEVSQVVDDAKRICRFFYNHNRLHAMMREKIGGELIRWNATRFGTVFIFLQSFWDRQDKFMQWMVSDDWKNNAWKDEADHAFTYDCLLNRRWWSDMELVLNAVTPIYTVLRYADQQKNATIAGFLPKIMTAMAQIRGNLSKEKDLLDRIVGVIKKRLKYMVDDTLIVAAGALDPKTLYMTKLSRKSSTRHAVTLALKKLASSSKIASAAIEQYAFFCEKRGLFAGEEAERSATNGRMSAAEWWSAYGGEHKELQMLARRIVSQCLSSSGCERNWSTFALVHTKLRNRLGYEKLHKLVYVHYNLKLRIQHFENDMQSLQEMQVFKDTELDPYSVMIDCAMYDEGNPIMDWLCNSRSESTPILDEYDDNELESPIPSRVLMDELGMDVEVTALKRKLDFNTREGKKKRKAGLVDIEEEIEDDVESDSSDGSPINVELCDSSSDDDGTVGDEFGDEWEFRGPSGGGACEVGPSGGGACDVGPSGDGSRDGAMHEQAAPNPPLRPRSTRLKKVPVKEL

SEQ ID NO: 176291 - protein, 643 aa, Zea Mays
MNYEDMEAHMAKFKDDWKEYGVTVMCDSWTGPTMMCIINFMVYCNGRMFFHKSINATGRVQNAEFIYDCIREVVVDEIGVKNVIQIVTDNGSNYKKACRQLITRYPHITWQPCAAHTINLMLKDISRFSEVSQVVDDAKRICRFFYNHNRLHAMMREKIGGELIRWNATRFGTVFIFLQSFWDRQDKFMQWMVSDDWKNNAWKDEADHAFTYDCLLNRRWWSDMELVLNAVTPIYTVLRYADQQKNATIAGFLPKIMTAMAQIRGNLSKEKDLLDRIVGVIKKRLKYMVDDTLIVAAGALDPKTLYMTKLSRKSSTRHAVTLALKKLASSSKIASAAIEQYAFFCEKRGLFAGEEAERSATNGRMSAAEWWSAYGGEHKELQMLARRIVSQCLSSSGCERNWSTFALVHTKLRNRLGYEKLHKLVYVHYNLKLRIQHFENDMQSLQEMQVFKDTELDPYSVMIDCAMYDEGNPIMDWLCNSRSESTPILDEYDDNELESPIPSRVLMDELGMDVEVTALKRKLDFNTREGKKKRKAGLVDIEEEIEDDVESDSSDGSPINVELCDSSSDDDGTGDEFGDEWEFRGPSGGGACEVGPSGGGACDVGPSGDGSRDGAMHEQAAPNPPLRPRSTRLKKVPVKELYK

SEQ ID NO: 176292 - protein, 523 aa, Zea Mays
MQNRQKFNCTIRFHRSKSCQIDVSAHLSGNNCLGCAAGSDLHKWAAAEKFQPSSKSSGHLNGTGQKVHSLVDSEKPSNQSFAMIVKSHTLRLPVGNPDGTIIIRTDQYNRDDLRVDYMYAKFFVIKSIGEADVHKSIKYGVWSSSSNGNIKLDSAFRDADRISRRHSTKCPVFLFFSVNGSGHFCGMAEMVGPVDFHKDMDFWCQDKWTGCFPVRWHIVKDIPNGFLQHITLQNNENKPVTHSRDTQEIPYLPGISVIKIFKDIKVRDCLFDDFMRYEAEEAQMKPHRRCKLSYDAPDFVPVSQRTEQTKSSSVLVDRTSEIQNVSEKPHDAKVINPQEPRASDKQASEAEKENELQESHCSGSQNQEDAAKTATNHPPGPSLKAAGADGKQQYWKKVENPKQHADSGAAQGSLKAPEKRLNGVSGSASTVPVPEGGEQQRVTAKLGSLKISSKAVEADRKTSTAGMEKQLNGVSGSGSAVPEGGEEQKVKISSKVVEADRKTSKAGVVTIGSMPVRVDSYAV

SEQ ID NO: 176293 - protein, 329 aa, Zea Mays
MAISFVSLLAMSAILVACFFARRHQIRRDRARLPRAQESHGMSSQLVKAIPSLIFTKVQEDNCTSATCAICLEDYSVGEKIRVLPCRHKFHAACVDLWLTSWRTFCPVCKRDASAGTSDPPVSESTPLLSSSATRLPESTVLASLRSTAAASPPRTISRHPLLRSISRNYSVSGSSILRTPDSRFDANSSICTSGSNLDLANVPSPWSGTWHRASAHSLCRGYLSPPIGIRNTSAHVSRSANGSPSRYVGSSRMSHGSSGQQHPHLRHCTLSGPSLFTMVPQSPQQNQLQHGGYSETNLSAAASAQSFRQLYLQHCPDSDTSSQSLPGC

SEQ ID NO: 176294 - protein, 1609 aa, Zea Mays
MCSDMSGQRHHHATSRENAPEDNGYHRTPHGADHLEQSQAADTDNKHINHLSTDDNVPSSASGHKHGAISRHPSTSSVDDRSIKSGDDSDGAESTSGRSSNTEISFMNNDTIWIPPQAADKEDEAQSFATSIAYDDDDDDYSDGIKWGQSSFPSPGKQHDADTSNHREEREKAMLEAMNGQLKVLVSRFLASAGIPSSNEEGSDSWLDIVTSLSWEAALLIKPDGSMGKEMDPGSYIKVKCVASGTRRQSEVIKGLVFKKNTAHKHMPTNCHNPRLLLLKGVLGHSDIGLSSFSSMDQEKDLLERAIGKMMEICSPNVVLVEKTVSRNIQELLLKEGVTLILDMKLNRLQRIARCTGSPIISFSEVLDKPKLKQCDYFHIEKFIEEHNNASEGGKMPSKTLMFLEGFPRPLGCTILLKGANSEELKKVKQVMHFTVFAAYHLILETSFFEDQRVFLNDKSTPKEISVTATEGASPTAYDVAALSGAIPSFPSHGDPPALRLFHATSNSYADVNKPLTYPENGDAFSSVSSSSANDLEQGTSIRPNNAERLTSLVQGPLRKLFTDMLRHQNIYLPVTSLQEANDISKEVRAESSQETVINGFHRPEIEESVVSIENGDSINDAQKQEIAQAIMPRGSSANDKDAESSVMGDNGAHSTSIIIKEKYVDDDQADDALDSHSILILMSSQCPEKQVICEQSHLTRIKYYGSFDVSLGRYLQDILQNQKLSCSSCGEPPESHMYSYTHRNGNLTVLVKHLVPQHHLPGESEGKVWMWTRCSRCDHEHGVSKPTPRVLISAEARNLSFGKFLELSFSSHSAARRLSICGHLVNRDCLRFFGLGSKVAMFRYSSVEIYTTCKPQPTLQFVNPIRQDWFEGQRRNVHAKGMALFSGVARFLQNLKNEHPDAITLAIHCGLAFPVKDFTELEELLIKEKAQFESSVDKATDQNGVPTSSVHELLNINWYYQDLLLELYIWDRRLHQLFYCKSVKLESVSNYKNLADTVDGICGDKFGVDKKIDEFTYDETTAALGVASTTEPASNKLDHQSGDAAASLLDESQEAGHSEIPCNGGSKAEKSSIAHGQIKVDGTTKTGNDPCFEISNDKKVQVNLTVADPISMEQERCSTLQQFKYPYWDDRERWIWNSISESQLAYRNDIQIGYLEKFELINNYLPHYLPPLFEQHDDADSPHFAVGPGGNILCIMEDEISSIIARALAISDERRHLIDLKFENGMDYSKGEHAKAMEKSYSFLSENSFTSSPWSSTDSEASLSSLSSFSSFSSDDFSGYDSSSLLSSMHPEMTVNGKITLKGKYSVTVVYDNQFFALRKKCCPSELAYITSLSRCKKWNAQGGKSKAYFAKTTDDRFIIKQIKKTEFDSFIKFAPDYFRHVYHSLDTGSQTCLAKILGIYQVKQIRHGKEVKIDLMVMENLLFGHNISRIYDLKGVTFSRRVTDSNDHDTVYLDQNYVEDMGFSPIYIGGRTKHLLQRAIWNDTSFLTSVNVMDYSLLVGVDKEKHELVFGIIDYLRQYTWDKQLETWVKTSLVVPKNVSPTVISPKEYKKRFRKFMAKYFLSVPDTWSSDNSSNPCKSFGQSNHKLAEVHNGDSLLQHPNEAEGCV

SEQ ID NO: 176295 - protein, 1563 aa, Zea Mays
MCSDMSGQRHHHATRENAPEDNGYHRTPHGADHLEQSQAADTDNKHINHLSTDDNVPSSASGHKHGAISRHPSTSSVDDRSIKSGDDSDGAESTSGRSSNTEISFMNNDTIWIPPQAADKEDEAQSFATSIAYDDDDDDYSDGIKWGQSSFPSPGKQHDADTSNHREEREKAMLEAMNGQLKVLVSRFLASAGIPSSNEEGSDSWLDIVTSLSWEAALLIKPDGSMGKEMDPGSYIKVKCVASGTRRQSEVIKGLVFKKNTAHKHMPTNCHNPRLLLLKGVLGHSDIGLSSFSSMDQEKDLLERAIGKMMEICSPNVVLVEKTVSRNIQELLLKEEVLDKPKLKQCDYFHIEKFIEEHNNASEGGKMPSKTLMFLEGFPRPLGCTILLKGANSEELKKVKQVMHFTVFAAYHLILETSFFEDQRVFLNDKSTPKEISVTATEGASPTAYDVAALSGAIPSFPSHGDPPALRLFHATSNSYADVNKPLTYPENGDAFSSVSSSSANDLEQGTSIRPNNAERLTSLVQGPLRKLFTDMLRHQNIYLPVTSLQEANDISKEVRAESSQETVINGFHRPEIEESVVSIENGDSINDAQKQEIAQAIMPRGSSANDKDAESSVMGDNGAHSTSIIIKEKYVDDDQADDALDSHSILILMSSQCPEKQVICEQSHLTRIKYYGSFDVSLGRYLQDILQNQKLSCSSCGEPPESHMYSYTHRNGNLTVLVKHLVPQHHLPGESEGKVWMWTRCSRCDHEHGVSKPTPRVLISAEARNLSFGKFLELSFSSHSAARRLGSKVAMFRYSSVEIYTTCKPQPTLQFVNPIRQDWFEGQRRNVHAKGMALFSGVARFLQNLKNEHPDAITLAIHCGLAFPVKDFTELEELLIKEKAQFESSVDKATDQNGVPTSSVHELLNINWYYQDLLLELYIWDRRLHQLFYCKSVKLESVSNYKNLADTVDGICGDKFGVDKKIDEFTYDETTAALGVASTTEPASNKLDHQSGDAAASLLDESQEAGHSEIPCNGGSKAEKSSIAHGQIKVDGTTKTGNDPCFEISNDKKVQVNLTVADPISMEQERCSTLQQFKYPYWDDRERWIWNSISESQLAYRNDIQIGYLEKFELINNYLPHYLPPLFEQHDDADSPHFAVGPGGNILCIMEDEISSIIARALAISDERRHLIDLKFENGMDYSKGEHAKAMEKSYSFLSENSFTSSPWSSTDSEASLSSLSSFSSFSSDDFSGYDSSSLLSSMHPEMTVNGKITLKGKYSVTVVYDNQFFALRKKCCPSELAYITSLSRCKKWNAQGGKSKAYFAKTTDDRFIIKQIKKTEFDSFIKFAPDYFRHVYHSLDTGSQTCLAKILGIYQVKQIRHGKEVKIDLMVMENLLFGHNISRIYDLKGVTFSRRVTDSNDHDTVYLDQNYVEDMGFSPIYIGGRTKHLLQRAIWNDTSFLTSVNVMDYSLLVGVDKEKHELVFGIIDYLRQYTWDKQLETWVKTSLVVPKNVSPTVISPKEYKKRFRKFMAKYFLSVPDTWSSDNSSNPCKSFGQSNHKLAEVHNGDSLLQHPNEAEGCV

SEQ ID NO: 176296 - protein, 1564 aa, Zea Mays
MCSDMSGQRHHHATSRENAPEDNGYHRTPHGADHLEQSQAADTDNKHINHLSTDDNVPSSASGHKHGAISRHPSTSSVDDRSIKSGDDSDGAESTSGRSSNTEISFMNNDTIWIPPQAADKEDEAQSFATSIAYDDDDDDYSDGIKWGQSSFPSPGKQHDADTSNHREEREKAMLEAMNGQLKVLVSRFLASAGIPSSNEEGSDSWLDIVTSLSWEAALLIKPDGSMGKEMDPGSYIKVKCVASGTRRQSEVIKGLVFKKNTAHKHMPTNCHNPRLLLLKGVLGHSDIGLSSFSSMDQEKDLLERAIGKMMEICSPNVVLVEKTVSRNIQELLLKEGVTLILDMKLNRLQRIARCTGSPIISFSEVLDKPKLKQCDYFHIEKFIEEHNNASEGGKMPSKTLMFLEGFPRPLGCTILLKGANSEELKKVKQVMHFTVFAAYHLILETSFFEDQRVFLNDKSTPKEISVTATEGASPTAYDVAALSGAIPSFPSHGDPPALRLFHATSNSYADVNKPLTYPENGDAFSSVSSSSANDLEQGTSIRPNNAERLTSLVQGPLRKLFTDMLRHQNIYLPVTSLQEANDISKEVRAESSQETVINGFHRPEIEESVVSIENGDSINDAQKQEIAQAIMPRGSSANDKDAESSVMGDNGAHSTSIIIKEKYVDDDQADDALDSHSILILMSSQCPEKQVICEQSHLTRIKYYGSFDVSLGRYLQDILQNQKLSCSSCGEPPESHMYSYTHRNGNLTVLVKHLVPQHHLPGESEGKVWMWTRCSRCDHEHGVSKPTPRVLISAEARNLSFGKFLELSFSSHSAARRLGSKVAMFRYSSVEIYTTCKPQPTLQFVNPIRQDWFEGQRRNVHAKGMALFSGVARFLQNLKNEHPDAITLAIHCGLAFPVKDFTELEELLIKEKAQFEDLLLELYIWDRRLHQLFYCKSVKLESVSNYKNLADTVDGICGDKFGVDKKIDEFTYDETTAALGVASTTEPASNKLDHQSGDAAASLLDESQEAGHSEIPCNGGSKAEKSSIAHGQIKVDGTTKTGNDPCFEISNDKKVQVNLTVADPISMEQERCSTLQQFKYPYWDDRERWIWNSISESQLAYRNDIQIGYLEKFELINNYLPHYLPPLFEQHDDADSPHFAVGPGGNILCIMEDEISSIIARALAISDERRHLIDLKFENGMDYSKGEHAKAMEKSYSFLSENSFTSSPWSSTDSEASLSSLSSFSSFSSDDFSGYDSSSLLSSMHPEMTVNGKITLKGKYSVTVVYDNQFFALRKKCCPSELAYITSLSRCKKWNAQGGKSKAYFAKTTDDRFIIKQIKKTEFDSFIKFAPDYFRHVYHSLDTGSQTCLAKILGIYQVKQIRHGKEVKIDLMVMENLLFGHNISRIYDLKGVTFSRRVTDSNDHDTVYLDQNYVEDMGFSPIYIGGRTKHLLQRAIWNDTSFLTSVNVMDYSLLVGVDKEKHELVFGIIDYLRQYTWDKQLETWVKTSLVVPKNVSPTVISPKEYKKRFRKFMAKYFLSVPDTWSSDNSSNPCKSFGQSNHKLAEVHNGDSLLQHPNEAEGCV

SEQ ID NO: 176297 - protein, 1458 aa, Zea Mays
MNNDTIWIPPQAADKEDEAQSFATSIAYDDDDDDYSDGIKWGQSSFPSPGKQHDADTSNHREEREKAMLEAMNGQLKVLVSRFLASAGIPSSNEEGSDSWLDIVTSLSWEAALLIKPDGSMGKEMDPGSYIKVKCVASGTRRQSEVIKGLVFKKNTAHKHMPTNCHNPRLLLLKGVLGHSDIGLSSFSSMDQEKDLLERAIGKMMEICSPNVVLVEKTVSRNIQELLLKEEVLDKPKLKQCDYFHIEKFIEEHNNASEGGKMPSKTLMFLEGFPRPLGCTILLKGANSEELKKVKQVMHFTVFAAYHLILETSFFEDQRVFLNDKSTPKEISVTATEGASPTAYDVAALSGAIPSFPSHGDPPALRLFHATSNSYADVNKPLTYPENGDAFSSVSSSSANDLEQGTSIRPNNAERLTSLVQGPLRKLFTDMLRHQNIYLPVTSLQEANDISKEVRAESSQETVINGFHRPEIEESVVSIENGDSINDAQKQEIAQAIMPRGSSANDKDAESSVMGDNGAHSTSIIIKEKYVDDDQADDALDSHSILILMSSQCPEKQVICEQSHLTRIKYYGSFDVSLGRYLQDILQNQKLSCSSCGEPPESHMYSYTHRNGNLTVLVKHLVPQHHLPGESEGKVWMWTRCSRCDHEHGVSKPTPRVLISAEARNLSFGKFLELSFSSHSAARRLGSKVAMFRYSSVEIYTTCKPQPTLQFVNPIRQDWFEGQRRNVHAKGMALFSGVARFLQNLKNEHPDAITLAIHCGLAFPVKDFTELEELLIKEKAQFESSVDKATDQNGVPTSSVHELLNINWYYQDLLLELYIWDRRLHQLFYCKSVKLESVSNYKNLADTVDGICGDKFGVDKKIDEFTYDETTAALGVASTTEPASNKLDHQSGDAAASLLDESQEAGHSEIPCNGGSKAEKSSIAHGQIKVDGTTKTGNDPCFEISNDKKVQVNLTVADPISMEQERCSTLQQFKYPYWDDRERWIWNSISESQLAYRNDIQIGYLEKFELINNYLPHYLPPLFEQHDDADSPHFAVGPGGNILCIMEDEISSIIARALAISDERRHLIDLKFENGMDYSKGEHAKAMEKSYSFLSENSFTSSPWSSTDSEASLSSLSSFSSFSSDDFSGYDSSSLLSSMHPEMTVNGKITLKGKYSVTVVYDNQFFALRKKCCPSELAYITSLSRCKKWNAQGGKSKAYFAKTTDDRFIIKQIKKTEFDSFIKFAPDYFRHVYHSLDTGSQTCLAKILGIYQVKQIRHGKEVKIDLMVMENLLFGHNISRIYDLKGVTFSRRVTDSNDHDTVYLDQNYVEDMGFSPIYIGGRTKHLLQRAIWNDTSFLTSVNVMDYSLLVGVDKEKHELVFGIIDYLRQYTWDKQLETWVKTSLVVPKNVSPTVISPKEYKKRFRKFMAKYFLSVPDTWSSDNSSNPCKSFGQSNHKLAEVHNGDSLLQHPNEAEGCV

SEQ ID NO: 176298 - protein, 209 aa, Zea Mays
MAHEEQLCFWVNIHNALVMHAFMAYGLQEKRMKSTDLILKAAYNVGGHSVNSQTIQNSILGCQSHRPSLWVRTLFTPTKKSGSSIHPYALQYAEPIAHFALSTGAFSDPPVRLYTAKKLYHQLEQARAEFIQANVMVRRQTIFLPKVLHFYAKDASLELPDLVDIVCESMPELQRKEIRQYLRRRIDKCVQWLPYKSSFRYTVHSSLAE

SEQ ID NO: 176299 - protein, 468 aa, Zea Mays
MPFIRWLLILLRAQSAADLAWEIAVLEEQVVRKELHLLSLYRAAFDQYLGVSPRASAQEPRHERSSRRATAADDEGALRLRSIKESASYSLPTLSDSKRVHAQELSRCSSGRSSLANFLSASIAEYVPKISCKLSEDILRCVSAVYCKLASRPLSQEEEEARSETPPFTPSLSVSSASSSFSLKKQHPVRGWSPRCYYNADATATPDAYASSGGSSGRYSGVMVFPGIHVDEEKFEYACKMLDTIRSLIKRLEKIDPRKMAHEEQLCFWVNIHNALVMHAFMAYGLQEKRMKSTDLILKAAYNVGGHSVNSQTIQNSILGCQSHRPSLWVRTLFTPTKKSGSSIHPYALQYAEPIAHFALSTGAFSDPPVRLYTAKKLYHQLEQARAEFIQANVMVRRQTIFLPKVLHFYAKDASLELPDLVDIVCESMPELQRKEIRQYLRRRIDKCVQWLPYKSSFRYTVHSSLAE

SEQ ID NO: 176300 - protein, 160 aa, Zea Mays
MYGMPMDRYGLIPAGSGPMGTRAGSYSDEDSQKKSAGAGRDNDWECPNCHNINFGFRTVCNMRKCNTPRPENQGSKPDGLRGSKPKTPEGSWKCEQCNNINYPFRTKCNRPQCGAEKPSQTNNANESAEDQDNQVFVSEPSLWSSTFSTPLFRTLSCMPY

SEQ ID NO: 176301 - protein, 299 aa, Zea Mays
MSSQVDSRSQSAGKRARTDGSRREDDWVCPSCKNVNFAFRTTCNMRNCNQSRPADHTAMQTPPRYPTSGGYMSPGTPPSMYLGGGAPPYGSSMFNGPAMTRYGITQFPGGSAYPYGYGGRISMGSPYGPMQMAGPTAYSGGSMMGAGGMYGMPMDRYGLIPAGSGPMGTRAGSYSDEDSQKKSAGAGRDNDWECPNCHNINFGFRTVCNMRKCNTPRPENQGSKPDGLRGSKPKTPEGSWKCEQCNNINYPFRTKCNRPQCGAEKPSQTNNANESAEDQDNQFSSCKITKLFIEATTSA

SEQ ID NO: 176302 - protein, 184 aa, Zea Mays
MSSQVDSRSQSAGKRARTDGSRREDDWVCPSCKNVNFAFRTTCNMRNCNQSRPADHTAMQTPPRYPTSGGYMSPGTPPSMYLGGGAPPYGSSMFNGPAMTRYGITQFPGGSAYPYGYGGRISMGSPYGPMQMAGPTAYSGGSMMGAGGMYGMPMDRYGLIPAGSGPMVCALVNFLLYTYYLTLI

SEQ ID NO: 176303 - protein, 757 aa, Zea Mays
MWRDWGGGGCLSTPPPRGPWPRRCRRRRTTTTTTRRWPRRGSRWAARAGCSRECPRRSAPPRSAAVSTSPSTPAVPPPRRCASSLPATSRRVTEEVPLDPLLNRTGNVWHVFIHGDQLHGMLYGYRFDGVFAPERGQYYDVSNVVVDPYAKAVVSRGEYGVPAPGGSCWPQMAGMIPLPYNKFDWQGDLPLGYHQKDLVIYEMHLRGFTKHNSSKTKHPGTYIGAVSKLDHLKELGVNCIELMPCHEFNELEYFSSSSKMNFWGYSTINFFSPMARYSSSGIRDSGCGAINEFKAFVREAHKRGIEVIMDVVFNHTAEGNEKGPILSFRGIDNSTYYMLAPKGEFYNYSGCGNTFNCNHPVVREFIVDCLRYWVTEMHVDGFRFDLASILTRGCSLWDPVNVYGSPMEGDMITTGTPLVAPPLIDMISNDPILGNVKLIAEAWDAGGLYQVGQFPHWNVWSEWNGKYRDTVRQFIKGTDGFAGAFAECLCGSPQLYQAGGRKPWHSINFVCAHDGFTLADLVTYNSKYNLSNGEDNRDGENHNLSWNCGEEGEFASLSVRRLRKRQMRNFFVCLMVSQGVPMFYMGDEYGHTKGGNNNTYCHDHYVNYFRWDKKEEQSSDLYRFCRLMTKFRKECESLGLEDFPTSERLKWHGHQPGKPDWSEASRFVAFTMKDETKGEIYVAFNTSHLPVVVGLPERSGFRWEPVVDTGKEAPYDFLTDGLPDRAVTVYQFSHFLNSNLYPMLSYSSIILVLRPDV

SEQ ID NO: 176304 - protein, 585 aa, Zea Mays
MAQQLPCVSSPRPLLAVPAGRWRAGVRGRPNVAGLGRGRLSLHAAAARPVAEAVQAEEDDDDDDEEVAEERFALGGACRVLAGMPAPLGATALRGGVNFAVYSSGASAASLCLFAPGDLKADRVTEEVPLDPLLNRTGNVWHVFIHGDQLHGMLYGYRFDGVFAPERGQYYDVSNVVVDPYAKAVVSRGEYGVPAPGGSCWPQMAGMIPLPYNKFDWQGDLPLGYHQKDLVIYEMHLRGFTKHNSSKTKHPGTYIGAVSKLDHLKELGVNCIELMPCHEFNELEYFSSSSKMNFWGYSTINFFSPMARYSSSGIRDSGCGAINEFKAFVREAHKRGIEVIMDVVFNHTAEGNEKGPILSFRGIDNSTYYMLAPKGEFYNYSGCGNTFNCNHPVVREFIVDCLRYWVTEMHVDGFRFDLASILTRGCSLWDPVNVYGSPMEGDMITTGTPLVAPPLIDMISNDPILGNVKEVSIKLVSFLTGTFGQSGMESIAIPCVSSSKAQMDLLVLLLNAYVEVHSYTRQGGGSLGTVSTLYVHTMDLHWLIWSHTIASTTCQMVRTTEMGKIIILAGIVGRKENLQVCQSED

SEQ ID NO: 176305 - protein, 608 aa, Zea Mays
MRAVVSRGEYGVPAPGGSCWPQMAGMIPLPYNKFDWQGDLPLGYHQKDLVIYEMHLRGFTKHNSSKTKHPGTYIGAVSKLDHLKELGVNCIELMPCHEFNELEYFSSSSKMNFWGYSTINFFSPMARYSSSGIRDSGCGAINEFKAFVREAHKRGIEVIMDVVFNHTAEGNEKGPILSFRGIDNSTYYMLAPKGEFYNYSGCGNTFNCNHPVVREFIVDCLRYWVTEMHVDGFRFDLASILTRGCSLWDPVNVYGSPMEGDMITTGTPLVAPPLIDMISNDPILGNVKLIAEAWDAGGLYQVGQFPHWNVWSEWNGKYRDTVRQFIKGTDGFAGAFAECLCGSPQLYQAGGRKPWHSINFVCAHDGFTLADLVTYNSKYNLSNGEDNRDGENHNLSWNCGEEGEFASLSVRRLRKRQMRNFFVCLMVSQGVPMFYMGDEYGHTKGGNNNTYCHDHYVNYFRWDKKEEQSSDLYRFCRLMTKFRKECESLGLEDFPTSERLKWHGHQPGKPDWSEASRFVAFTMKDETKGEIYVAFNTSHLPVVVGLPERSGFRWEPVVDTGKEAPYDFLTDGLPDRAVTVYQFSHFLNSNLYPMLSYSSIILVLRPDV

SEQ ID NO: 176306 - protein, 379 aa, Zea Mays
MNGTGGSHHQQQHRLRQQQQQQALLMQQALQQQQQQHQYQSGVLAAAAAAAMTQMEPISNGNLPPGFDPSTCRSVYVGNVNPNVTESLLIEVFQSAGLVERCKLIRKEKSSFGFVDYYDRRSAALAIMTLHGRHIISFLFEAETAITEMTGKWLGSRQIRCNWATKTNSEEKPETDNHNAVVLTNGSSTNSATDASQDAGSKENPENNPDCTTVYVGNLGHEVNRDELHRHFYNLGVGAIEEIRVQQDKGFGFVRYSTHGEAALAIQMANGLVVRGKSIKCSWGNKPTPPGTTSKPLPPPVASYQPAVAMSGVPQGFTAAELLAYQRQLALSQAAAGQIAGQHGLAGQVSAGLLAAAGSQALYDGYPNQSSAQQLMYYN

SEQ ID NO: 176307 - protein, 284 aa, Zea Mays
MQKESDEQKRKIKKTERALKVAEEELMRLQLEATAKSKQLTEVHGAWLPPWLATHYARYMEVVSGHWNYHGKPAVQNVLHKASEKSAHAKKWAEPHIETAKMKWIPVKEKLVVLKKNAEPYVQKVSTRSVEFYESSRDAVTPHVVKVKEFAHPYYQEAKKFSKPYIDQIAEITKPHVEKVRTTLKPYTKRAVHAYGSFLGSATTYHRQAQATIMDYLHQHGVPKSFATKELVWFLASALLALPVFVIYRLVVETFCTKKNRRPRGGNGNGNHGQKRHKRRYADK

SEQ ID NO: 176308 - protein, 666 aa, Zea Mays
MTEVADASPPPPTAGGGDRKRGRASPVPPLPGQHKRRREEGGGGGFDRRRLGPVGGGGHEQDDRRYGNGLGGIGGRGGDSRYTNRAPDSGRGGWNEGSGNSRREGLMSYKQFIQELEDDVSPVEAQSRYEEYKSEYITTQKKAYFALHKDEDWLRNKYHPTNLENVIERRNELARTTADDFFLQLQSGSLDTGPGLTGSAVSKSGNNSSKNLDAVEGDGKKGKLGKGSDDSYYAAPKAHPVSSEVRRIRIDIEQAQGLICKLDSEKGIENNILSSSNHEKPDMDKSHGSMGPIVIVQGSSTVKGLEGTELLDTLVTYLWRIHGVDYYGMSETNEPKGLRHVKADARTYNGASSSATEWENKLDSFWQDRIQGQDPLEILKAKEKIDGAATEVLDPYVRKIRDEKYGWKYGCGAKGCTKLFHAAEFVQKHIKLKHTDLVVDLTSKAREDIYFENYMNDPKAPGGTPIMQQPAPRGKGRQRPPIESRLRDERGNHRLDSDGSGENPDDPVYDSFGDPTMHGAFPPDIPAPPVLMPVPGAGPLGPFIPAPPEVAMHMLRDQGAPPPFEPSGGPHPRKAGRGSGGGGPPMRGPSPVFSAPPPHHMHDPRRIRRPGCSRGRSDRHGLPKLVGLPPDTRLGKHYSAKSKHLALSKITAEEPQQASQHLCLDS

SEQ ID NO: 176309 - protein, 548 aa, Zea Mays
MDPDDEPAAQRKAVDLHLPRDTEPASSPACTRRAAPRVLSYCDVPFASASAQRCASFPQRHGELAHARSASFAAWIEGGSASAPAAALERAMSQYGGADGALPEFVGAGGGEGIFRVPLRAAMHPARPPPLEVRPHPLRETQAGAFLRTLACDPRRRQLWAGAESGVRVWGLHEVFRGWWPGAGPRRRGDEEAAPFRESVPVPPALCAAVDGANGMVWTGHRDGRIRAWRMDHAAPAGGYSAGSAPMFKEALSWQAYSRTPVLAIVVTLDAKTRELLKVFGIDGQVDLARPEAPVMPEQFIEEEIKVKPTKRERPQGSFTFFQKSRNALMGAADAVRRVATKGTFVEDNRRTEAVAQAMNGTIWSGCTDGSIIVWDGNGNRLREFHYHSSSVRCIKTLGDKVWVGYASGTIQVVDVEGNLQAGWIGHSCPVIDMAISDSYIFSLAHHGGIRGWPLSSPSSLDDILCYELASRELLYTRLENLKILVGTWNVAQEKASPEALRSWLGGAFFDVGLVVVGLQEVEMGAGVLAMAAAKESGLKAVPMGSGG

SEQ ID NO: 176310 - protein, 745 aa, Zea Mays
MDPDDEPAAQRKAVDLHLPRDTEPASSPACTRRAAPRVLSYCDVPFASASAQRCASFPQRHGELAHARSASFAAWIEGGSASAPAAALERAMSQYGGADGALPEFVGAGGGEGIFRVPLRAAMHPARPPPLEVRPHPLRETQAGAFLRTLACDPRRRQLWAGAESGVRVWGLHEVFRGWWPGAGPRRRGDEEAAPFRESVPVPPALCAAVDGANGMVWTGHRDGRIRAWRMDHAAPAGGYSAGSAPMFKEALSWQAYSRTPVLAIVVTLYGEIWSGSEGGAIKAWPWDTIAKSLSFTSGERHNAASLVEKSYIDLRNHATIGNMCSLPAADVKHMLADNCRAKIWSLTSMTFALWDAKTRELLKVFGIDGQVDLARPEAPVMPEQFIEEEIKVKPTKRERPQGSFTFFQKSRNALMGAADAVRRVATKGTFVEDNRRTEAVAQAMNGTIWSGCTDGSIIVWDGNGNRLREFHYHSSSVRCIKTLGDKVWVGYASGTIQVVDVEGNLQAGWIGHSCPVIDMAISDSYIFSLAHHGGIRGWPLSSPSSLDDILCYELASRELLYTRLENLKILVGTWNVAQEKASPEALRSWLGGAFFDVGLVVVGLQEVEMGAGVLAMAAAKESVGLEGSANGQWWIDSIGKTLDEGISFHRVGSRQLAGLLIAAWATNDLRPHVGDVDTAAVPCGFGRAIGNKGGVGLRIRVFGRRICFVNNHFAAHQENVSRRNADFDRIYRTMTFTKPQGSAG

SEQ ID NO: 176311 - protein, 543 aa, Zea Mays
MDPDDEPAAQRKAVDLHLPRDTEPASSPACTRRAAPRVLSYCDVPFASASAQRCASFPQRHGELAHARSASFAAWIEGGSASAPAAALERAMSQYGGADGALPEFVGAGGGEGIFRVPLRAAMHPARPPPLEVRPHPLRETQAGAFLRTLACDPRRRQLWAGAESGVRVWGLHEVFRGWWPGAGPRRRGDEEAAPFRESVPVPPALCAAVDGANGMVWTGHRDGRIRAWRMDHAAPAGGYSAGSAPMFKEALSWQAYSRTPVLAIVVTLDAKTRELLKVFGIDGQVDLARPEAPVMPEQFIEEEIKVKPTKRERPQGSFTFFQKSRNALMGAADAVRRVATKGTFVEDNRRTEAVAQAMNGTIWSGCTDGSIIVWDGNGNRLREFHYHSSSVRCIKTLGDKVWVGYASGTIQVVDVEGNLQAGWIGHSCPVIDMAISDSYIFSLAHHGGIRGWPLSSPSSLDDILCYELASRELLYTRLENLKILVGTWNVAQEKASPEALRSWLGGAFFDVGLVVVGLQEVEMGAGVLAMAAAKESLSYGLR

SEQ ID NO: 176312 - protein, 82 aa, Zea Mays
MSSRKHHELPEGGAGEAAPAARRCGTPRAPCTTRTSWPPCAGSSTSASSPSATLKRRGARAGNWWSCRSSAAGGSTTGGRPR

SEQ ID NO: 176313 - protein, 52 aa, Zea Mays
MSRRTRPALCQDKGCQSLTCISRSQRQRKVGDAVATREHNHQDIELSKEIND

SEQ ID NO: 176314 - protein, 73 aa, Zea Mays
MTSWLFDVVGHVCVVLIKYICFTAIGLHIYQWTCIRKTVLTYLLMKKKIHEVESMDIELLLTRLLSMTPKQNL

SEQ ID NO: 176315 - protein, 349 aa, Zea Mays
MAVPQVDKKMLGELEAMGFPTARSVRALHFSGNSNLESAVNWLLEHESDPDIDRLPLIPREISIECGDTSDEVRNDVEGMRDTVQEQKPKEHTETGRQNETSQLEREPNADGQEEEDRKRILALYKQKRDEEGRARGRIRSQLQEDQRERIRAAKDLMEAKRSLEENQRKRVMESRVADQEEEKRARERIRQRIADDKAERRRRLGLPQDDPRDPAATMTPAKVKPAGRAVVASEQLRDCLRTVKKNHRDDPAAVARAYQVLLKIVGNVAKNPGEEKFRRIRLSNPVFKDRVGSVRGGVEFLELCGFRRFSGIGYLVMPRDKVDVALLTAAGVEIASALENPYFGLLSK

SEQ ID NO: 176316 - protein, 345 aa, Zea Mays
MIARLDLPLCFGESSAFQDYITHAHNPRFDKFSRQTTARDLISLFNDHAEHLINVLKSVSFVALTSDIWSGKAKEDYISVVVHFVNFDWCLEKSLLGLRAIEVAHTGYDIAERVELVANDYGITDKIFAIVLDNSSSNKTAMEVLKLVFSGYIGHLIPMPSRNEYDLSVIFLHQRCGCHIINFIINSCLKRLQPYLKDFRIAITFLNALNQCMASYKQYCLSVGVRPRKFGMDMDVRWNFTFLMLKHLVPYQSTFSVWIRTNHPCKVGGSFLLRDNHWSIAEKFLSFLQLFYDSTLALSGVYYPTSPLMLHHILKIARHLNAYENHELLRDAVVPMKSMFLKYWR

SEQ ID NO: 176317 - protein, 193 aa, Zea Mays
MAAVASSFSRFSFRCAVCPSPLRVRFSQPHPPARLRVSSTVVALHKRNPKRLKYAAERQFTSLWWLGFARTKRGDAGLLRVEVEPSGGDFWKLDPIIDLINRGAVGVIPTDTVYSVVCDLSNNESIERLRRLKGIGDSKPLSILCRSLRDIDTYTTGFPQGTNQGQANIFRVVKRAIPGPVCKKEAGWRPNSR

SEQ ID NO: 176318 - protein, 178 aa, Zea Mays
MAAVASSFSRFSFRCAVCPSPLRVRFSQPHPPARLRVSSTVVALHKRNPKRLKYAAERQFTSLWWLGFARTKRGDAGLLRVEVEPSGGDFWKLDPIIDLINRGAVGVIPTDTVYSVVCDLSNNESIERLRRLKGIGDSKDFLKALTKGKLTFFVLSSVQYLGLTHLFYLQASSFLNNV

SEQ ID NO: 176319 - protein, 132 aa, Zea Mays
MAAEAGPISKVLIVIAMQKEATPLVHKFNLVEAPAHQSTFPKGAPWVWYHGSYKGLHIDLVLPGMDAVLGVDSVGTVPVAVVTSFSIQTLKPDLIINAGTAGGFKAKGASITDVFLASDVAFHDRRIPIPPF

SEQ ID NO: 176320 - protein, 207 aa, Zea Mays
MAATKASTLTLYCLEWMLFLSCVLAGVDSVGTVPVAVVTSFSIQTLKPDLIINAGTAGGFKAKGASITDVFLASDVAFHDRRIPIPIFDMYGTGARKTFAAPNILKELNLKVGKLSTGDSLDMCPQDKELILRNDATIKDMEGAAVAYVADMFSTPAIFVKAVTDIVDGVKPTYEEFLQNLIAVTTALELAVTKVVDFISGKRISDL

SEQ ID NO: 176321 - protein, 564 aa, Zea Mays
MAEVGSRVRGFLRNRWLVFVAAMWMQSCAGVGYLFGSLSPVIKASLGYNQRQVAGLGVAKDLGDSVGFLAGTLCAVLPLWAMCILIFIGNNGETYFNTAALVSCVQNFPKSRGPIVGILKGFAGLSGAILTQIYAIVHSPDDAALIFMVAVGPTMVVIALMFIVRPVGGHRQVRPSDGTSFTFVYSVCLLLASYLMGVMLLEDLVDLSQSVTVVLTVILIMFLLVPIVIPVLLSFFSDDDETLYALLLPSPRKEEASASTSSEEQHEVILSEVEDEKPKDVDLLPASERQRRIAELQTRLFQAAAVGAVRVKRRKGPRRGEDFTLMQALIKADFWLLFFSLLLGSGSGLTVIDNLGQMSQSLGYEETHIFVSMISIWNFLGRIGGGYFSEIIVKDYAYPRAIALAIAQVLMAIGHFNFAMAWPGTMYIGTLLVGVGYGAHWAIVPAAASELFGVKNFGALYNFLTVANPAGSLVFSGVIASGIYDSEAAKQAQQRHNSTSLAMSGRVAGMVSGAAPSLKCEGAVCFFLSSLIMSGFCIIAFGLSLILVYRTKIVYTSLYGKPRT

SEQ ID NO: 176322 - protein, 492 aa, Zea Mays
MPNLLLFHKMCILIFIGNNGETYFNTAALVSCVQNFPKSRGPIVGILKGFAGLSGAILTQIYAIVHSPDDAALIFMVAVGPTMVVIALMFIVRPVGGHRQVRPSDGTSFTFVYSVCLLLASYLMGVMLLEDLVDLSQSVTVVLTVILIMFLLVPIVIPVLLSFFSDDDETLYALLLPSPRKEEASASTSSEEQHEVILSEVEDEKPKDVDLLPASERQRRIAELQTRLFQAAAVGAVRVKRRKGPRRGEDFTLMQALIKADFWLLFFSLLLGSGSGLTVIDNLGQMSQSLGYEETHIFVSMISIWNFLGRIGGGYFSEIIVKDYAYPRAIALAIAQVLMAIGHFNFAMAWPGTMYIGTLLVGVGYGAHWAIVPAAASELFGVKNFGALYNFLTVANPAGSLVFSGVIASGIYDSEAAKQAQQRHNSTSLAMSGRVAGMVSGAAPSLKCEGAVCFFLSSLIMSGFCIIAFGLSLILVYRTKIVYTSLYGKPRT

SEQ ID NO: 176323 - protein, 172 aa, Zea Mays
MSGRALKDLNVSQSADLENGKDNSVKSCITKPVLNGNKCANKEEKAPSACHDAVTNGNAAAIADVEYIDSENLVDLPDVDAALSTLAKRLDSKDWVMTCEALNNVRQLAMYHKERLQELLEPLVPLIVKSVKNPRSAVCKTALMTCADIFKAYGDLMVHSIDPLLQRQLLYR

SEQ ID NO: 176324 - protein, 232 aa, Zea Mays
MLASVKLEVMSPSAEYPDEGSVSVEFHMPPICSPLVRPGRSAEVAPVISKALEDVLMSSRMLNLKDLCLITGKASWLAYLDIYCLNADGSLFDAALISAVAAFTHLEIPLVSVGDDGKLFTVGGNDGKNKFELVNREKRKLTLGDIPLSLTCALHKGSILTDPTSEEESIIETYVTVVVDSSDRLVSLQKVGGTVTSMATIKECISLAKERRLRLREILIDSVKAMEVDHTE

SEQ ID NO: 176325 - protein, 150 aa, Zea Mays
MVMVGKDGSKQTLAWAIPPSAVTVEIPLVSVGDDGKLFTVGGNDGKNKFELVNREKRKLTLGDIPLSLTCALHKGSILTDPTSEEESIIETYVTVVVDSSDRLVSLQKVGGTVTSMATIKECISLAKERRLRLREILIDSVKAMEVDHTE

SEQ ID NO: 176326 - protein, 293 aa, Zea Mays
MERILRCFNLGPTGSEDDDISFTLTVETFSFEELSAATDNFSSTLRIGSGGQATVYEGHIPHIGQVAVKRLRTNDFPSKQRAFLMEVYVLNSTNHPHIVKLLGCCSEGTERLLVYEYVKGGTLRHRLKELNWYTRMRIARDTATVLEKLHLQSDPPIIHRDFKSDNILLSTNLSPKVSDFGIAKIAPAGDELTAATSETLGTYGYASPGIFRPLNATVMTDIYSFGVVLLEIITGKPAIDHSKEGDEHYLVHWFFLELIMLLKSKFWSSGSFDCVWKSNESMDRLRLKNRLWN

SEQ ID NO: 176327 - protein, 186 aa, Zea Mays
MEVYVLNSTNHPHIVKLLGCCSEGTERLLVYEYVKGGTLRHRLKELNWYTRMRIARDTATVLEKLHLQSDPPIIHRDFKSDNILLSTNLSPKVSDFGIAKIAPAGDELTAATSETLGTYGYASPGIFRPLNATVMTDIYSFGVVLLEIITGKPAIDHSKEGDEHYLVHWRQVFFGADYVIKEQVLE

SEQ ID NO: 176328 - protein, 82 aa, Zea Mays
MTCLCAGHAPLMQGPSRVDRRASERSIDERMTKLGVYVGLSRAVSLASPDSLLPPMLASASLVLLYRLLNIFDEGVAIFSSP

SEQ ID NO: 176329 - protein, 220 aa, Zea Mays
MADADLTPNHSLLLKMPAASAHAHSPSLSSLLLYGQESHGEAAPANANANAAAATVEDAASLETSSAVVDSASPMERKRKATAEDSAAISSPQPKDCKQESKSRRGKRPRKETEEKSSTDEDEASKGYIHVRARRGQATDSHSLAERFLLPPFSLGEEREDQREDEDAAGTGPWLRQGYWKGHGFGRDHQLRAVPAEPGRVPFHEDCLHEPSAVRVRNEQ

SEQ ID NO: 176330 - protein, 53 aa, Zea Mays
MTYPKQAQGGGRNNRRVMILKPYNDMYIGCFHAINLGLSARQAGAWRGWCLVS

SEQ ID NO: 176331 - protein, 283 aa, Zea Mays
MRCAGAFPGDLLICLFICFVSTRGKRNSFPAICPPVDRHVVVVPFYYDRSAHVLSHLFVSAMCARAFACVCCASALHLHVVELPVSQIQSLEESAELLRERCLKFHKRLPEGLGEAYDGDIAFASSLETFGGGHNDPISVAFGGPVMTKFTIALREIGTYKEVLRSQVEHMLNDRLLNFVDIDLHDVKDAHKRFDKASLSYDQIREKYLSLKKGTRPDITTAIEDELHSARSSFEQARFNLVTSLSHVEAKKRYEFLEAVSATMDSHLRYFKQVPPCIFCLVV

SEQ ID NO: 176332 - protein, 92 aa, Zea Mays
MPPPPPPPQQQQQQSGMTLCRLPTATLGLPLSLPCLLPRSRPRLCFAARHARAVAARASSSSPSPDSSFGSRMEESVKKTVADNPVVIYSKS

SEQ ID NO: 176333 - protein, 557 aa, Zea Mays
MDSAANWRSTQGTDPAAGGVDPNAAAPAGSDWRTQLQPEARHRIVNKIMETLKKHLPVSVPEGLTELHKIAVRFEEKIYTAATSQSDYLRKISLKMLSMESQTKTQQNPGNVQVIPNQNPPGPAPGLPPQVSNPAQSSAIPLISQQQTRQSNASTSVQGSLPSLGQNSSSVSQASTLHNMSVMPQNTMNNGLAQGTPQDMYAAQRQMAGRQQQQQQQQAHNQLIYQQQKYLNQKLQQNSLMPSHIQQQQPLLQSTQMQSSQQPMMQMSSGLQPGQTAIPQTQSMTMHSATQSGIQQNPLNSVQQSVQPLLHQPTQSVVRQQQHPQSMHQQSSLQQTQPTQQPNIPLQQQQPQLMNQQSNLQQNQLMNQQSGVVETQQQQRLPVQSNNLLNMQQTQQMMNQQSMSLHQPQQLANQGNMSSLHQQQHQQNQQQQQLLGTGPNARMHMLQQQKVIQQPQQQQHAQQTSMGLIQPQSQQNQLQQPQQHMMSQFQSQPNQMQQQLGMQQRLQTSAGMLLQQNNIDQKQYVQAQRGLQEAPSNMKRISGSTFSFSHIKASLVE

SEQ ID NO: 176334 - protein, 635 aa, Zea Mays
MDSAANWRSTQGTDPAAGGVDPNAAAPAGSDWRTQLQPEARHRIVNKIMETLKKHLPVSVPEGLTELHKIAVRFEEKIYTAATSQSDYLRKISLKMLSMESQTKTQQNPGNVQVIPNQNPPGPAPGLPPQVSNPAQSSAIPLISQQQTRQSNASTSVQGSLPSLGQNSSSVSQASTLHNMSVMPQNTMNNGLAQGTPQDMYAAQRQMAGRQQQQQQQQAHNQLIYQQQKYLNQKLQQNSLMPSHIQQQQPLLQSTQMQSSQQPMMQMSSGLQPGQTAIPQTQSMTMHSATQSGIQQNPLNSVQQSVQPLLHQPTQSVVRQQQHPQSMHQQSSLQQTQPTQQPNIPLQQQQPQLMNQQSNLQQNQLMNQQSGVVETQQQQRLPVQSNNLLNMQQTQQMMNQQSMSLHQPQQLANQGNMSSLHQQQHQQNQQQQQLLGTGPNARMHMLQQQKVIQQPQQQQHAQQTSMGLIQPQSQQNQLQQPQQHMMSQFQSQPNQMQQQLGMQQRLQTSAGMLLQQNNIDQKQYVQAQRGLQEAPSTSVDSTAQTGHPGIGDLQEELYQMIKSLKDQYFVELNELYNKVSIKIQQIDNQMPAQKSAEQYEKMKGFKGMLERTLHFLQVNKSNIHPGTWAANVSAI

SEQ ID NO: 176335 - protein, 1259 aa, Zea Mays
METLKKHLPVSVPEGLTELHKIAVRFEEKIYTAATSQSDYLRKISLKMLSMESQTKTQQNPGNVQVIPNQNPPGPAPGLPPQVSNPAQSSAIPLISQQQTRQSNASTSVQGSLPSLGQNSSSVSQASTLHNMSVMPQNTMNNGLAQGTPQDMYAAQRQMAGRQQQQQQQQAHNQLIYQQQKYLNQKLQQNSLMPSHIQQQQPLLQSTQMQSSQQPMMQMSSGLQPGQTAIPQTQSMTMHSATQSGIQQNPLNSVQQSVQPLLHQPTQSVVRQQQHPQSMHQQSSLQQTQPTQQPNIPLQQQQPQLMNQQSNLQQNQLMNQQSGVVETQQQQRLPVQSNNLLNMQQTQQMMNQQSMSLHQPQQLANQGNMSSLHQQQHQQNQQQQQLLGTGPNARMHMLQQQKVIQQPQQQQHAQQTSMGLIQPQSQQNQLQQPQQHMMSQFQSQPNQMQQQLGMQQRLQTSAGMLLQQNNIDQKQYVQAQRGLQEAPSTSVDSTAQTGHPGIGDLQEELYQMIKSLKDQYFVELNELYNKVSIKIQQIDNQMPAQKSAEQYEKMKGFKGMLERTLHFLQVNKSNIHPGLREKIPIYERQILSILSSQRRKPVQAPGQQTFQQSSGQAPSSNISQQLQTSQGLQQHDSHTSQMPQASLPSMNTGVQTSGAPAPQGTNFGVPTTQQNVTNAPQAGSNLENAQGNNFNHVQHGSMGAALQQERTGPMQGALNAQQQSSSNMISNNAMSTMQTNNNANANSLQQLKQQRQEHQMMQSQQMKQRQQMMQQIQQKQTLQPQLPIQQLKKQQQQGQMQFPQLHSGNDVNELKVRQGAAIKSGMYQQLSQRNYYQQIKQGGVFPISSPQTLQTSSPQISHHSPQVDQHSLLQSQVKTGTPLHSANSPFVPSPSPPVAPSPMPMDSDKPLSNLSSVTSAGQAGHQQTSLAPQTQSIAVNTPGISASPLLAEFTSADGSPANVPTQVPAKSSAAERPLDRLLKALRTTQRESLSAAVSDIGSVVSMIDRIAGSAPGNGSRAAVGEDLVAMTKCRLQARNFITHDGSGASKKMKRDTSAMPLNVSSAGSVNDSLKQSYGVGTPELQSTATSRVKWQRAEVNHALMEEIQEINQQLIDTELHVSEDDAESFTTSEGGKGTVIRCTFTAVAVCPSLKSVFASAQMSPILPLRLLVPASYPKCSPVLLDKFPDEQWNSDDLSTKAKTKFSVLLRGLAEPMSLREIARTWDACARKVITEYAQQTGGGSFSSSYGCWESCVGAC

SEQ ID NO: 176336 - protein, 195 aa, Zea Mays
MSGRGGPEAQKHTNFIFDVGQRHYRVKPESQEHADRVLEKNANKVCKDAFFNARLQVANVYMKRRGHSIKNFRQYLDVYLTVDQYMEPQSFKVLCEICASLEWIEKSNRNRHRQRHQQDEDDDEVVVNHTYGAYGHIRLAKRMEAQTGVVPSLIDVYRRGHRAKNSEISDELCSQEAIERMETYEQEMVRKYGED

SEQ ID NO: 176337 - protein, 194 aa, Zea Mays
MLTHEHKRMGGHDLHRPQCRYQVRVSNELGSGRPRAAWNAVMVVVGEALVIGILCMALILIFRDSFSIIFTSDTTLQRAVARIAGLLGLTMVLNSVQPVVSGVAVGGGWQGLVAYINLGCYYIFGLPLGYLLGYKFSFGVGGIWSGMLCGITLQTLILLGVVWRTDWKAEAAQASGRVQKWGGKGTDEVKPLLE

SEQ ID NO: 176338 - protein, 202 aa, Zea Mays
MINNSLARSEVSEEQKRPSNGDDVYHFISYVPVDGVLYELDGLKEGPICLEKCPGGVGDAGWLRLAQPVIKGHIDLFSQNDVRCSVMAILKNRKEMCTVELKELKRKRESLLQQTGYPSAIRHVPSVEQSLAEVSAQIEAVTEKMIMEEEKVKTWKTENLRRKHNYVPFLFNFLKILEEKQQLNPLIEKAKAKQKSHCPSPR

SEQ ID NO: 176339 - protein, 655 aa, Zea Mays
MNHPSSSSSSAQPPPAPAVAAEATSLAPGFRFHPTDEELVSYYLKRKVLGRPLKVDAIADVDLYKLEPWDLPARSRLRSRDSQWYFFSRLDRKHANRARTNRATSGGYWKTTGKDREVRHGPRLVGMKKTLVFHAGRAPKGERTNWVMHEYRLEGDDAAGIPQKAGPGPQNGAQYGAPFVEEEWEEDDTDDGLLPVEGVAAADPEVPLASVEIPGALDRGYLQMSDLIQGLDDQNGNGTPSLPVSDTSNNSNHSEDVDGNSGDILSDPNLGSNFLQYAEPGEQNSLMLNGTIISNANAGDFFDNSSHSDGFLELKDFGDAANLDFPLGNGSSIWPLDCWAWKTPDSAESLNGTNDEIPPLPDDQTFQPDELEQLLQSIQEDSHLGSSIIDPPHSSMTNSVLPDEDCLMFYDAPFDSTMCDDGFAQNGILGSAATNLSGIGMVDDGMPYFDAMDGNLFNDILGSIQQPDGSSSHAFNGPVLTQEVNNTMFTYSPTQKVLEPNIVVGAPSSARLPEAGSQLNCVVLPDGQAKSSTIGKGFVRILDSISAPPAFAGEFPSNHRKSLARISGARPNTLHVSAEVIHIGSLAVPSGADKWALQKDQGMELLFSADFEPDARIHCGCNTITAVLRGGFCLFFVSAIMLLVSYEVGMCIYGK

SEQ ID NO: 176340 - protein, 451 aa, Zea Mays
MNHPSSSSSSAQPPPAPAVAAEATSLAPGFRFHPTDEELVSYYLKRKVLGRPLKVDAIADVDLYKLEPWDLPARSRLRSRDSQWYFFSRLDRKHANRARTNRATSGGYWKTTGKDREVRHGPRLVGMKKTLVFHAGRAPKGERTNWVMHEYRLEGDDAAGIPQDSFVVCRIFQKAGPGPQNGAQYGAPFVEEEWEEDDTDDGLLPVEGVAAADPEVPLASVEIPGALDRGYLQMSDLIQGLDDQNGNGTPSLPVSDTSNNSNHSEDVDGNSGDILSDPNLGSNFLQYAEPGEQNSLMLNGTIISNANAGDFFDNSSHSDGFLELKDFGDAANLDFPLGNGSSIWPLDCWAWKTPDSAESLNGTNDEIPPLPDDQTFQPDELEQLLQSIQEDSHLGSSIIDPPHSSMTNSVLPDEDCLMFYDAPFDSTMCDDGFAQNGILGSAATNLSAARW

SEQ ID NO: 176341 - protein, 218 aa, Zea Mays
MMHRSIPPCVMMGLHRMGSLALQQPIYLQPDGSSSHAFNGPVLTQEVNNTMFTYSPTQKVLEPNIVVGAPSSARLPEAGSQLNCVVLPDGQAKSSTIGKGFVRILDSISAPPAFAGEFPSNHRKSLARISGARPNTLHVSAEVIHIGSLAVPSGADKWALQKDQGMELLFSADFEPDARIHCGCNTITAVLRGGFCLFFVSAIMLLVSYEVGMCIYGK

SEQ ID NO: 176342 - protein, 527 aa, Zea Mays
MAPPAGSGAATEGGPARRRGTGTGTSPGRTKVWVEPPGKSHHQTPARSLPPPSPPAPSVAAKRVSVVYYLCRNRHLEHPHLIEVPLAAPEEGLYLRDVINRLNVLRGKGMSSKYSWSCKRSYKNGFVWHDLSDDDLVLPAQGNEYILKGSELLDRSPPLDRQQNGVSNPKVEGLKPCKEESPQSRGSQEGCSSSSSSSALGKEISPPPATRRPQQQAQSAVLPSSSASTNHEDDLCPTAHSGSSGNQSPEPAGRNAPLSEASSPGPSEYRVCRPIGAQDAATQTDDSERDVAKTHTCVVGVSMDTTLDAEIQECHQRSSLLSPKVPKIVQESPALCSSDASPGVRVETLESLIRAEACRRSSFRTLEEEHMLGPIGVKLKPANLLMQLITCGSISVKEHRGFGFIPTYRPRFTQVEFPSSVFSTPVALRHLDKIPCNTRTIGTRAPESERFSGSLVETKMQDESRRGISSLKRSSSYDEDRFIEQHIPKVIQKTLVSQVVSGVFRRLSESYHVSNREMEQYSPLSLM

SEQ ID NO: 176343 - protein, 475 aa, Zea Mays
MSSKYSWSCKRSYKNGFVWHDLSDDDLVLPAQGNEYILKGSELLDRSPPLDRQQNGVSNPKVEGLKPCKEESPQSRGSQEGCSSSSSSSALGKEISPPPATRRPQQQAQSAVLPSSSASTNHEDDLCPTAHSGSSGNQSPEPAGRNAPLSEASSPGPSEYRVCRPIGAQDAATQTDDSERDVAKTHTCVVGVSMDTTLDAEIQECHQRSSLLSPKVPKIVQESPALCSSDASPGVRVETLESLIRAEACRRSSFRTLEEEHMLGPIGVKLKPANLLMQLITCGSISVKEHRGFGFIPTYRPRFTQVEFPSSVFSTPVALRHLDKIPCNTRTIGTRAPESERFSGSLVETKMQDESRRGISSLKRSSSYDEDRVYRAAHSKSDTENSCESGSFRCLPQTIRIISCKQSRNGTILSPFSDVRNSSSQQEYSTRSSPLGSSKSASNRMTDPSLGKVDSFHKEKDMIKIEESFLLELGL

SEQ ID NO: 176344 - protein, 125 aa, Zea Mays
MAVTSAAARRFLALAPARGPRAFWSASCPPDPDAPSASSTSTDNNSRRKKKEPSGSAHHRLAAVMDAVNERKLPPELSGRGNAVRKYGGRSEGWWRRSSSRDDSLGGAVVKNQYVGHVRGLKLTL

SEQ ID NO: 176345 - protein, 123 aa, Zea Mays
MEEGHFENLPGKGKPLNLTSNPHADPAEDTLYRILSKNGCAPEWVELNKEIRGMILSWRSALRKAWANRSEDDDSNWSDDSRALQERIRQINDKVFRYNLIVPFGRQLFGLNWDKELDKLKEE

SEQ ID NO: 176346 - protein, 773 aa, Zea Mays
MEGECRRAKSGPKGQLPADAGVIPRAVKQIFDTLERQNTEYSVKITFLELYNEEITDLLAPEEISKAAFEDKQKKALPLNLMEDGKGGVLVRGLEEEIVTNASEIFSLLERGSAKRRTAETLLNKQSSRSHSLFSITIHIKEATPEGEELIKCGKLNLVDLAGSENISRSGAKEGRAREAGEINKSLLTLGRVITALVEHLGHVPYRDSKLTRLLRDSLGGRTKTCIIATVSPSVHCLEETLSTLDYAHRAKSIKNRPEVNQKMMKSTLIKDLYGEIDRLKAEVYAAREKVGVYIPKDRYQQEENERKAMADQIEQMNASLEVNHKLISDLQQNYDSELQHSADLSKKLEVTEKCLDHTSNLLSTTKEDLKQAQYNLNEKDYIISEQKKAENALTHQTYVLRSDLEQYTRDNTSLYSKIARGDKLSATNRSVVNTFQTDLASKLDILSNTLNASIDQQNMHLKSVEDLCQSYVDSHDKATSELKKKILASKSLYMSHMEAFLNVVLVHKASANGTLEDISSLSAASCCSLDQLLVCVEGEAQNIFNDIHNLLTIHRSEMTHFTQELRESFQISLDRTKEMSTYIIGLFDKYVEETSKLHSHSNNTHEAQMKSIEDFQMVYEEQSKSVEQKLLAEISSLVSKHITRQRELVGVRLSSLGDAARGNKAFLDEHTSAMEFVTKDAKRKWETFAEQAENDCKAGSSFSAAKHSRMETMLQECNGRSHMLLLTISAESKLLKLKHSSGLQLRTTSNMNWKLHLLELWLKKTPPITART

SEQ ID NO: 176347 - protein, 101 aa, Zea Mays
MPPSFPSPPCTIPFVPSTSPSSMGSASTAPTVYRAAHLPHAVSSPRWEGASVTSNPNKEELWPDMGGRVVSGSAEHPPVVSSFPINHWVSKVCSYCVCTNF

SEQ ID NO: 176348 - protein, 58 aa, Zea Mays
MPPSFPSPPCTIPFVPSTSPSSMGSASTAPTVYRAAHLPHAVSSPRWEGASVTSNPNK

SEQ ID NO: 176349 - protein, 50 aa, Zea Mays
MMFMYIELTEYLLSAILLTGEEIYMYFFHAWVSLIENFLGLHLFDIHRIS

SEQ ID NO: 176350 - protein, 366 aa, Zea Mays
MAKLGTDRRFLSQVAHARTTAHNMHASSSRCMRSAWPTQLARTDDTEKKTDRANTHKMEKSQGAGPVSVARHPSHPTHLLTTTGQHDTEGGSSQATSPRLYSPAVPPHTMSDYNRYGHSYSYGGGYGQGPAPSAPPAPHMPTATSAAPPSSSSYGAYAGYPPAYPPPPSQAAGGFGPAGSGYGFVPVAFPPGTHPDVERAFRAADRDCSGAIDERELQGALSSAYHRFSVRTVRLLMFLFNDPSSSTPSRMGPTQFVSLWDCLGQWRGIFDRYDRDRSGKIDSRELTEALRSLGYAVPPSVIELLIANYSNGVPSNGALDFDNFVECGMIVKGLTEKFKEKDTRYTGSATLTYDGFLSMVIPFIVP

SEQ ID NO: 176351 - protein, 218 aa, Zea Mays
MSDYNRYGHSYSYGGGYGQGPAPSAPPAPHMPTATSAAPPSSSSYGAYAGYPPAYPPPPSQAAGGFGPAGSGYGFVPVAFPPGTHPDVERAFRAADRDCSGAIDERELQGALSSAYHRFSVRTVRLLMFLFNDPSSSTPSRMGPTQFVSLWDCLGQWRGIFDRYDRDRSGKIDSRELTEALRSLGYAVPPSVIELLIANYSNGVPSNGALDFDNFVEV

SEQ ID NO: 176352 - protein, 77 aa, Zea Mays
MALFLSSGLASARPLSVHLRRALGRHLSHCSARHAYRPRRGQAQSMSLLCMRPAQGPRDDDRASDMVPTTRCSWWTT

SEQ ID NO: 176353 - protein, 186 aa, Zea Mays
MERDGQQTRRDKLIIDTDPGIDDSMAILMAFRAHTLEIIGLTTIFGNVDTEGATCNALLLCERAGHPEVPVAEGSHEPLKGGKPRIADFVHGSDGIGNLFLPAPSAKKVEESAADFMVNKVSEFPGEVSVLALGPLTNVALAIKRDPSFASKVNKIVVLGGAFFVAGNVNPAAEANEQMSLWLALT

SEQ ID NO: 176354 - protein, 276 aa, Zea Mays
MERDGQQTRRDKLIIDTDPGIDDSMAILMAFRAHTLEIIGLTTIFGNVDTEGATCNALLLGGKPRIADFVHGSDGIGNLFLPAPSAKKVEESAADFMVNKVSEFPGEVSVLALGPLTNVALAIKRDPSFASKVNKIVVLGGAFFVAGNVNPAAEANILGDPEAADIVFTSGADVIVVGINITTQVCLTDEGLLELRNSKGKHAPFLSETCKFYRDWHVKSDGFHGIFLHDPVSFTAVLHPEYFTFKKGVVRVETQGICTGHTLMDQGLKKYAFFSE

SEQ ID NO: 176355 - protein, 389 aa, Zea Mays
MQQQPPAILLQLIRGDRHGAVRPAERETRQGLPAVRRGQGRRFGRRHRIRRPGAGGSRAGRAGQGRRRHRQHRSNHQLLRKIRCFAGRERAGSEAPVHVRQAVREAQDAHARLHCLRLGLQGGPHPGEAHQARRVAAGGHVPGRGRGAAPRQGGEEVAGGERRWRRRQHGAEGHEGAGPPAGAALRVVQHVRVHQGHGGGRAGPAAPGRRRPRGGDAAQHHHQRPARPAARVDAGHPHHRQHHHRLRQAEPVLLPRRPPPRHGRHPRGHGGQRHDGGRGGALGGVRAAAAAGGGVPRHLVAAQPGHLRRALPVRTPPFLREPARRQGRQGHPHQGDVLLHQHRQVPPLHDSHLQGAIRDSAPCESAALWPSLAALQRPQPQVQVCDASG

SEQ ID NO: 176356 - protein, 73 aa, Zea Mays
MASIRRRLSRSCGASSLLLVELPAGMKIQAEVVTEEKSTPVIEEESRPLHCNKGDEEYSSSCGWRAHPVLEED

SEQ ID NO: 176357 - protein, 59 aa, Zea Mays
MLKVRTHFSKLFCKLLKLILAKSLSLIPKSSISLRVFFLSRVRLAKVHSVLRVFEPMLL

SEQ ID NO: 176358 - protein, 192 aa, Zea Mays
MHDVQISVHLSTIESILFAPFLVLRMHKRANLISFLLLLLLMQHGLWSSGASDKNKSMVEQLQRYGVIRSTKVAEVMEAIDRGLFVPPGGSPYHDSPMPIGYNATISAPHMHAACLELLEKNLQPGMRALDVGSGTGYLTACFALMVGPEGRAVGVEHIPELVATSTENIKKSAAAPHLNDGSLSIHVSGKY

SEQ ID NO: 176359 - protein, 99 aa, Zea Mays
MMDPSVYTFLMFKMDADGREGWPELAPYEAIHVGAAAPQIPEALIEQLKPGGRMVIPVGTVFQELKVVDKKLDGTVSIRDETSVRYVPLTSKDAQLHAS

SEQ ID NO: 176360 - protein, 962 aa, Zea Mays
MSGGGLEVQVHVVGGARSCFAALPLHLIHDLERTSATGDLPPVLALELRGPAGARWSLAWSGAASRSSAIEVAQELADCISLPDGTIAQLSVARSLAKADSISIEPYSEDDWEILESRADLAEETILKQVGIVYEGMKFPLWLDGHNIVKFVVLSSFPEKTVVQLVPGTEVVVAPKKRKEKPSQDLQKQSALKEQVKIKALLRVQAADRKYAHTFKYEGVEIGVVVSYAVLIHPDTAASISVGNLQLVAVSPKSSKKGLPLKGKEVGRKKGISVTKERSHEAIVYILLSDSVAKGHVMLPYSIRHFISADVHSWVYIKTYSANIKEDEPLVTISPLKFKMHVKDAHDSSKLVSQEVDTSRITRIPSENGDFFQKARYSENKNIRGADIESISESVSRQKFFIKHWLIGHLKEMGLHASHTEMNSIVLPTNILLHLEATDKEGTKGVEFLYFLKLTSENSNFNDSQLNIETTWSVPTSNADDLELHFGKFELGEPVSFDSLVDSGSSDGFKLTRSSLGWMENAMSDVTKRLSVLLSATSLRLFNRIKFPFPGHVIVYGPRGSGKTALTRASAKYFEDHKDILAHIIYIDCSKLALGKAKETRQEIEDSMSEALLHSPSIIIFDDLDSVVSVSSDPQVSQSSSSSDSLVQYLADIMDEYKDKIQNTCGYGPIAFMASVQSLQSLPQDLTSSGRFDFHIELSALAVPERKALLQHQVEEHDLLCSEEVLSEIASKCEGYDAYDLEILVDRAVHTAAYRFLLPSNACHNSLKRTLLMEDFFKAMHGFLPVAMRDLRKYAPDDKDGGWEDVGGLDEAVTIIKETLELPSKYPNIFTRAPVRLRSNILLYGPPGCGKTHIVRAAAAACSLRFISVKGPELLNKYIGSSEQSVRDFFAKAVAAAPCLLFFDEFDSIAPQRGTHSAGVSDRVVNQFLTELDGVETLTGVFVFAATRFHWQVMPVSKMLLL

SEQ ID NO: 176361 - protein, 738 aa, Zea Mays
MSGGGLEVQVHVVGGARSCFAALPLHLIHDLERTSATGDLPPVLALELRGPAGARWSLAWSGAASRSSAIEVAQELADCISLPDGTIAQLSVARSLAKADSISIEPYSEDDWEILESRADLAEETILKQVGIVYEGMKFPLWLDGHNIVKFVVLSSFPEKTVVQLVPGTEVVVAPKKRKEKPSQDLQKQSALKEQVKIKALLRVQAADRKYAHTFKYEGVEIGVVVSYAVLIHPDTAASISVGNLQLVAVSPKSSKKGLPLKGKEVGRKKGISVTKERSHEAIVYILLSDSVAKGHVMLPYSIRHFISADVHSWVYIKTYSANIKEDEPLVTISPLKFKMHVKDAHDSSKLVSQEVDTSRITRIPSENGDFFQKARYSENKNIRGADIESISESVSRQKFFIKHWLIGHLKEMGLHASHTEMNSIVLPTNILLHLEATDKEGTKGVEFLYFLKLTSENSNFNDSQLNIETTWSVPTSNADDLELHFGKFELGEPVSFDSLVDSGSSDGFKLTRSSLGWMENAMSDVTKRLSVLLSATSLRLFNRIKFPFPGHVIVYGPRGSGKTALTRASAKYFEDHKDILAHIIYIDCSKLALGKAKETRQEIEDSMSEALLHSPSIIIFDDLDSVVSVSSDPQVSQSSSSSDSLVQYLADIMDEYKDKIQNTCGYGPIAFMASVQSLQSLPQDLTSSGRFDFHIELSALAVPERKALLQHQVEEHDLLCSEEVLSEIASKCEGNFG

SEQ ID NO: 176362 - protein, 827 aa, Zea Mays
MLPYSIRHFISADVHSWVYIKTYSANIKEDEPLVTISPLKFKMHVKDAHDSSKLVSQEVDTSRITRIPSENGDFFQKARYSENKNIRGADIESISESVSRQKFFIKHWLIGHLKEMGLHASHTEMNSIVLPTNILLHLEATDKEGTKGVEFLYFLKLTSENSNFNDSQLNIETTWSVPTSNADDLELHFGKFELGEPVSFDSLVDSGSSDGFKLTRSSLGWMENAMSDVTKRLSVLLSATSLRLFNRIKFPFPGHVIVYGPRGSGKTALTRASAKYFEDHKDILAHIIYIDCSKLALGKAKETRQEIEDSMSEALLHSPSIIIFDDLDSVVSVSSDPQVSQSSSSSDSLVQYLADIMDEYKDKIQNTCGYGPIAFMASVQSLQSLPQDLTSSGYFFFSIFLQSVLVESLTSSMLIKTRFHLAGRFDFHIELSALAVPERKALLQHQVEEHDLLCSEEVLSEIASKCEGYDAYDLEILVDRAVHTAAYRFLLPSNACHNSLKRTLLMEDFFKAMHGFLPVAMRDLRKYAPDDKDGGWEDVGGLDEAVTIIKETLELPSKYPNIFTRAPVRLRSNILLYGPPGCGKTHIVRAAAAACSLRFISVKGPELLNKYIGSSEQSVRDFFAKAVAAAPCLLFFDEFDSIAPQRGTHSAGVSDRVVNQFLTELDGVETLTGVFVFAATSKPQLIDAALLRPGRFDRLVFCDFPRWDERLEILKVHSRTVSLASDASLEDVASLTEGFTGADLAAILTDAGLAAIHELLDNQENGVPETEPCISKELLMSVTRKARPSTPADEKMRYDREFGEFVSSRKSISTKARESKGKKVTLA

SEQ ID NO: 176363 - protein, 665 aa, Zea Mays
MLPYSIRHFISADVHSWVYIKTYSANIKEDEPLVTISPLKFKMHVKDAHDSSKLVSQEVDTSRITRIPSENGDFFQKARYSENKNIRGADIESISESVSRQKFFIKHWLIGHLKEMGLHASHTEMNSIVLPTNILLHLEATDKEGTKGVEFLYFLKLTSENSNFNDSQLNIETTWSVPTSNADDLELHFGKFELGEPVSFDSLVDSGSSDGFKLTRSSLGWMENAMSDVTKRLSVLLSATSLRLFNRIKFPFPGHVIVYGPRGSGKTALTRASAKYFEDHKDILAHIIYIDCSKLALGKAKETRQEIEDSMSEALLHSPSIIIFDDLDSVVSVSSDPQVSQSSSSSDSLVQYLADIMDEYKDKIQNTCGYGPIAFMASVQSLQSLPQDLTSSGRFDFHIELSALAVPERKALLQHQVEEHDLLCSEEVLSEIASKCEGYDAYDLEILVDRAVHTAAYRFLLPSNACHNSLKRTLLMEDFFKAMHGFLPVAMRDLRKYAPDDKDGGWEDVGGLDEAVTIIKETLELPSKYPNIFTRAPVRLRSNILLYGPPGCGKTHIVRAAAAACSLRFISVKGPELLNKYIGSSEQSVRDFFAKAVAAAPCLLFFDEFDSIAPQRGTHSAGVSDRVVNQFLTELDGVETLTGVFVFAATRFHWQVMPVSKMLLL

SEQ ID NO: 176364 - protein, 737 aa, Zea Mays
MLPYSIRHFISADVHSWVYIKTYSANIKEDEPLVTISPLKFKMHVKDAHDSSKLVSQEVDTSRITRIPSENGDFFQKARYSENKNIRGADIESISESVSRQKFFIKHWLIGHLKEMGLHASHTEMNSIVLPTNILLHLEATDKEGTKGVEFLYFLKLTSENSNFNDSQLNIETTWSVPTSNADDLELHFGKFELGEPVSFDSLVDSGSSDGFKLTRSSLGWMENAMSDVTKRLSVLLSATSLRLFNRIKFPFPGHVIVYGPRGSGKTALTRASAKYFEDHKDILAHIIYIDCSKLALGKAKETRQEIEDSMSEALLHSPSIIIFDDLDSVVSVSSDPQVSQSSSSSDSLVQYLADIMDEYKDKIQNTCGYGPIAFMASVQSLQSLPQDLTSSGRFDFHIELSALAVPERKALLQHQVEEHDLLCSEEVLSEIASKCEGYDAYDLEILVDRAVHTAAYRFLLPSNACHNSLKRTLLMEDFFKAMHGFLPVAMRDLRKYAPDDKDGGWEDVGGLDEAVTIIKETLELPSKYPNIFTRAPVRLRSNILLYGPPGCGKTHIVRAAAAACSLRFISVKGPELLNKYIGSSEQSVRDFFAKAVAAAPCLLFFDEFDSIAPQRGTHSAGVSDRVVNQVSLASDASLEDVASLTEGFTGADLAAILTDAGLAAIHELLDNQENGVPETEPCISKELLMSVTRKARPSTPADEKMRYDREFGEFVSSRKSISTKARESKGKKVTLA

SEQ ID NO: 176365 - protein, 836 aa, Zea Mays
MSGGGLEVQVHVVGGARSCFAALPLHLIHDLERTSATGDLPPVLALELRGPAGARWSLAWSGAASRSSAIEVAQELADCISLPDGTIAQLSVARSLAKADSISIEPYSEDDWEILESRADLAEETILKQVGIVYEGMKFPLWLDGHNIVKFVVLSSFPEKTVVQLVPGTEVVVAPKKRKEKPSQDLQKQSALKEQVKIKALLRVQAADRKYAHTFKYEGVEIGVVVSYAVLIHPDTAASISVGNLQLVAVSPKSSKKGLPLKGKEVGRKKGISVTKERSHEAIVYILLSDSVAKGHVMLPYSIRHFISADVHSWVYIKTYSANIKEDEPLVTISPLKFKMHVKDAHDSSKLVSQEVDTSRITRIPSENGDFFQKARYSENKNIRGADIESISESVSRQKFFIKHWLIGHLKEMGLHASHTEMNSIVLPTNILLHLEATDKEGTKGVEFLYFLKLTSENSNFNDSQLNIETTWSVPTSNADDLELHFGKFELGEPVSFDSLVDSGSSDGFKLTRSSLGWMENAMSDVTKRLSVLLSATSLRLFNRIKFPFPGHVIVYGPRGSGKTALTRASAKYFEDHKDILAHIIYIDCSKLALGKAKETRQEIEDSMSEALLHSPSIIIFDDLDSVVSVSSDPQVSQSSSSSDSLVQYLADIMDEYKDKIQNTCGYGPIAFMASVQSLQSLPQDLTSSGRFDFHIELSALAVPERKALLQHQVEEHDLLCSEEVLSEIASKCEGYDAYDLEILVDRAVHTAAYRFLLPSNACHNSLKRTLLMEDFFKAMHGFLPVAMRDLRKYAPDDKDGGWEDVGGLDEAVTIIKEGTCAVAVKHSPVWTTWMW

SEQ ID NO: 176366 - protein, 532 aa, Zea Mays
MSGGGLEVQVHVVGGARSCFAALPLHLIHDLERTSATGDLPPVLALELRGPAGARWSLAWSGAASRSSAIEVAQELADCISLPDGTIAQLSVARSLAKADSISIEPYSEDDWEILESRADLAEETILKQVGIVYEGMKFPLWLDGHNIVKFVVLSSFPEKTVVQLVPGTEVVVAPKKRKEKPSQDLQKQSALKEQVKIKALLRVQAADRKYAHTFKYEGVEIGVVVSYAVLIHPDTAASISVGNLQLVAVSPKSSKKGLPLKGKEVGRKKGISVTKERSHEAIVYILLSDSVAKGHVMLPYSIRHFISADVHSWVYIKTYSANIKEDEPLVTISPLKFKMHVKDAHDSSKLVSQEVDTSRITRIPSENGDFFQKARYSENKNIRGADIESISESVSRQKFFIKHWLIGHLKEMGLHASHTEMNSIVLPTNILLHLEATDKEGTKGVEFLYFLKLTSENSNFNDSQLNIETTWSVPTSNADDLELHFGKFELGEPVSFDSLVDSGSSDGFKLTRSSLGWMENAMSDVTKSNIF

SEQ ID NO: 176367 - protein, 958 aa, Zea Mays
MKFPLWLDGHNIVKFVVLSSFPEKTVVQLVPGTEVVVAPKKRKEKPSQDLQKQSALKEQVKIKALLRVQAADRKYAHTFKYEGVEIGVVVSYAVLIHPDTAASISVGNLQLVAVSPKSSKKGLPLKGKEVGRKKGISVTKERSHEAIVYILLSDSVAKGHVMLPYSIRHFISADVHSWVYIKTYSANIKEDEPLVTISPLKFKMHVKDAHDSSKLVSQEVDTSRITRIPSENGDFFQKARYSENKNIRGADIESISESVSRQKFFIKHWLIGHLKEMGLHASHTEMNSIVLPTNILLHLEATDKEGTKGVEFLYFLKLTSENSNFNDSQLNIETTWSVPTSNADDLELHFGKFELGEPVSFDSLVDSGSSDGFKLTRSSLGWMENAMSDVTKRLSVLLSATSLRLFNRIKFPFPGHVIVYGPRGSGKTALTRASAKYFEDHKDILAHIIYIDCSKLALGKAKETRQEIEDSMSEALLHSPSIIIFDDLDSVVSVSSDPQVSQSSSSSDSLVQYLADIMDEYKDKIQNTCGYGPIAFMASVQSLQSLPQDLTSSGRFDFHIELSALAVPERKALLQHQVEEHDLLCSEEVLSEIASKCEGYDAYDLEILVDRAVHTAAYRFLLPSNACHNSLKRTLLMEDFFKAMHGFLPVAMRDLRKYAPDDKDGGWEDVGGLDEAVTIIKETLELPSKYPNIFTRAPVRLRSNILLYGPPGCGKTHIVRAAAAACSLRFISVKGPELLNKYIGSSEQSVRDFFAKAVAAAPCLLFFDEFDSIAPQRGTHSAGVSDRVVNQFLTELDGVETLTGVFVFAATSKPQLIDAALLRPGRFDRLVFCDFPRWDERLEILKVHSRTVSLASDASLEDVASLTEGFTGADLAAILTDAGLAAIHELLDNQENGVPETEPCISKELLMSVTRKARPSTPADEKMRYDREFGEFVSSRKSISTKARESKGKKVTLA

SEQ ID NO: 176368 - protein, 322 aa, Zea Mays
MEDFFKAMHGFLPVAMRDLRKYAPDDKDGGWEDVGGLDEAVTIIKETLELPSKYPNIFTRAPVRLRSNILLYGPPGCGKTHIVRAAAAACSLRFISVKGPELLNKYIGSSEQSVRDFFAKAVAAAPCLLFFDEFDSIAPQRGTHSAGVSDRVVNQFLTELDGVETLTGVFVFAATSKPQLIDAALLRPGRFDRLVFCDFPRWDERLEILKVHSRTVSLASDASLEDVASLTEGFTGADLAAILTDAGLAAIHELLDNQENGVPETEPCISKELLMSVTRKARPSTPADEKMRYDREFGEFVSSRKSISTKARESKGKKVTLA

SEQ ID NO: 176369 - protein, 63 aa, Zea Mays
MGQFVDDDIRDLPRSPWRRSTLPSSPRTTSTSASSGSASSTATSTSVVVAVGRSDPTSVTRTK

SEQ ID NO: 176370 - protein, 101 aa, Zea Mays
MNKFRQKLGRQSYTVQKRKWAKEDAQALTEGKSIPFQDMPDGRHKDWARVDVNEKSVASTFTPFYNMDILATAIGSNHPGRTTGVSAYVGLGMGLAQGDGH

SEQ ID NO: 176371 - protein, 121 aa, Zea Mays
MNKFRQKLGRQSYTVQKRKWAKEDAQALTEGKSIPFQDMPDGRHKDWARVRNPSGDVNITESHPIIKKIVDVNEKSVASTFTPFYNMDILATAIGSNHPGRTTGVSAYVGLGMGLAQGDGH

SEQ ID NO: 176372 - protein, 325 aa, Zea Mays
MSSESSSDTSRSSTSKTSRSISSSSSTSLHSEDIVEKGSCTSARHRTKQSHAKCKKLEKGGPHRLTFDKNGIAQSPVKHVNEFSSYEFSSYCGYIACMHVDIRIKDWRKVPKVVKSNLWEDVSKKFFMPRDETHTLNVKKVALKSMSHAWKDFKWKLNINYVKKNKTPFEDYPELKKEWWPNFVECVTSAEYIALGEKGKKSQSMNKFRQKLGRQSYTVQKRKWAKEDAQALTEGKSIPFQDMPDGRHKDWARVRNPSGDVNITESHPIIKKIVDVNEKSVASTFTPFYNMDILATAIGSNHPGRTTGVSAYVGLGMGLAQGDGH

SEQ ID NO: 176373 - protein, 864 aa, Zea Mays
MGKICLGQEMFRLQLMERQLSKEEQEELTRKSQAMDNNDTSDLRKFSRQAYLQKRRDKKIEEIRDEILDHQYIFQDLKLTEAEEKELRYKMKIYDLVKEHVETPDDVGAYKMPEAYDMGENVNQEKRFAVAMQRYKDPKANDKMNPFAEQEAWEEHQIGKSKLQFGSKDKKPSSDEYQYVFEDTIDFVKSSVIEGTQPEDDSDKEDVEAKDILKRELQDERKTLPIFKFRDELLKAVEEYQVIVIVGETGSGKTTQIPQFLHESGYTAKGKVACTQPRRVAAMSVAARVSQEMGVKLGHEVGYSIRFEDCTSDKTIIKYMTDGMLLREFLGEPDLASYSVVMVDEAHERTLSTDILFGLVKDISRFRPDLKLLISSATLDAEKFSDYFDSAPIFKIPGRRYPVEIHYTKAPEADYIDAAIVTVLQIHVTQSPGDILVFLTGQEEIETVDEILKHRTRGLGTKISELIICPIYANLPTELQAKIFEPTPEGARKVVLATNIAETSLTIDGIKYVIDPGFCKIKSYNPRTGMESLLINPISKASANQRAGRSGRTGPGKCFRLYTSYNYMHDLEDNTVPEIQRTNLANVVLTLKSLGIHDLVNFDFMDPPPSEALLRALEQLFALSALNSRGELTKTGRRMAEFPLDPMLSKMIVASEKYKCSDEIISIASMLSIGNSIFYRPKDKQVHADNARLNFHTGNVGDHIALLNVYNSWKETDYSTQWCYENYIQVRSMKRARDIRDQLDGLMERVEIEICSNTSDLDAIKKAITSGFFHHSARLQRDGTYKTVKNPQTVHIHPSSGLAEVRPRWVVYHELVLTTKEFMRQVTELKPEWLVEIAPHYYQLKDVEDSGTKKLPKGQGRAAL

SEQ ID NO: 176374 - protein, 828 aa, Zea Mays
MDNNDTSDLRKFSRQAYLQKRRDKKIEEIRDEILDHQYIFQDLKLTEAEEKELRYKMKIYDLVKEHVETPDDVGAYKMPEAYDMGENVNQEKRFAVAMQRDPKANDKMNPFAEQEAWEEHQIGKSKLQFGSKDKKPSSDEYQYVFEDTIDFVKSSVIEGTQPEDDSDKEDVEAKDILKRELQDERKTLPIFKFRDELLKAVEEYQVIVIVGETGSGKTTQIPQFLHESGYTAKGKVACTQPRRVAAMSVAARVSQEMGVKLGHEVGYSIRFEDCTSDKTIIKYMTDGMLLREFLGEPDLASYSVVMVDEAHERTLSTDILFGLVKDISRFRPDLKLLISSATLDAEKFSDYFDSAPIFKIPGRRYPVEIHYTKAPEADYIDAAIVTVLQIHVTQSPGDILVFLTGQEEIETVDEILKHRTRGLGTKISELIICPIYANLPTELQAKIFEPTPEGARKVVLATNIAETSLTIDGIKYVIDPGFCKIKSYNPRTGMESLLINPISKASANQRAGRSGRTGPGKCFRLYTSYNYMHDLEDNTVPEIQRTNLANVVLTLKSLGIHDLVNFDFMDPPPSEALLRALEQLFALSALNSRGELTKTGRRMAEFPLDPMLSKMIVASEKYKCSDEIISIASMLSIGNSIFYRPKDKQVHADNARLNFHTGNVGDHIALLNVYNSWKETDYSTQWCYENYIQVRSMKRARDIRDQLDGLMERVEIEICSNTSDLDAIKKAITSGFFHHSARLQRDGTYKTVKNPQTVHIHPSSGLAEVRPRWVVYHELVLTTKEFMRQVTELKPEWLVEIAPHYYQLKDVEDSGTKKLPKGQGRAAL

SEQ ID NO: 176375 - protein, 555 aa, Zea Mays
MIEMLLPCNQLSDQKRVIVIVGETGSGKTTQIPQFLHESGYTAKGKVACTQPRRVAAMSVAARVSQEMGVKLGHEVGYSIRFEDCTSDKTIIKYMTDGMLLREFLGEPDLASYSVVMVDEAHERTLSTDILFGLVKDISRFRPDLKLLISSATLDAEKFSDYFDSAPIFKIPGRRYPVEIHYTKAPEADYIDAAIVTVLQIHVTQSPGDILVFLTGQEEIETVDEILKHRTRGLGTKISELIICPIYANLPTELQAKIFEPTPEGARKVVLATNIAETSLTIDGIKYVIDPGFCKIKSYNPRTGMESLLINPISKASANQRAGRSGRTGPGKCFRLYTSYNYMHDLEDNTVPEIQRTNLANVVLTLKSLGIHDLVNFDFMDPPPSEALLRALEQLFALSALNSRGELTKTGRRMAEFPLDPMLSKMIVASEKYKCSDEIISIASMLSIGNSIFYRPKDKQVHADNARLNFHTGNVGDHIALLNVYNSWKETDYSTQWCYENYIQVRSMKRARDIRDQLDGLMERVSSITLHGCRGMVHIRLSRTLRPCISILVQD

SEQ ID NO: 176376 - protein, 225 aa, Zea Mays
MALKRSAAAASLGSASDASDGEAGAARNSHRRRVSPSRSRSESPRPNLGPSAAASDTNRERSPRDHLDSDADSDADAGAGAGRGARSSRLLGERSPSFHSNSDADVAGRSPSPRRNRERTLHLHSDSDSDNSTTAAAAASDDAGDASPLAIAHRASHIGTSNVKPVSTRPMDVPSRAAAGSSQRRSKRRPSPHSPEHQKRPPRVWSPEDEVTILSALIEFRAKKA

SEQ ID NO: 176377 - protein, 88 aa, Zea Mays
MYNCPYLVIYFYLFIHVQVALLWTKLVFFEPKAKNTFPSFCTQQSILLRHMYTFETKLLCVHRSTVVEDGVSLFVLHVMMMMILQMSK

SEQ ID NO: 176378 - protein, 286 aa, Zea Mays
MDGHGGGAGKLTRTPSSLLRSPTMRAGPGTASFHALDDPEPDDKKAQAPLGKPRALLRRAHHRFRPGPAQSALLLLLPVLALAALLMRGGDGGHHLALLAAAAGFALAAAAAVARLRGARPRSPALEASVRWFIGEDDDEEQRDWKRRAGLGLGLGLGRRAEVREGVEFYSNGDRYEGEFHGGRCSGSGVYSFFGKGKYEGDWVDGKYDGHGVESWARGSRYRGQYRQGLRHGHGVYRFYSGDDYAGEWAGGQSHGIGAQTCSDGSTYAGEFKCGVKHGLGCYHFR

SEQ ID NO: 176379 - protein, 50 aa, Zea Mays
MDSTTTANSSTFDLGIPAFVIKSPGAPCSSLCSRPPPSFDSRHCRREVED

SEQ ID NO: 176380 - protein, 775 aa, Zea Mays
MYNVGFSLTHAPYRPPAVKKYGGPGTITAVGWQDRQARREFQRDAVITRPPHHTPTFASTSRCPYLLRLCYCWCLSTLLYSLYSPGEGRRGHRGPGDGPDRGWIHFPPTSPLLLNRHLPHPPFLIPRASLAAPCRAMLSPLSALSSAAAAAHAVVAGDGEMRVADGGGGGGAGETGAGLRGGVGGGAVVEDGHGEASGGCSASRGSSARGSSGGDSPLTRFVRRGGRLGTMDPERDEMLTSSSSYGSTEPQEEEEEGAGALEAAKDNKRVHGARPQGQTKNAAPCFTRERQDQRHHRLGAVLFQGRKGRAQRPASLDFGCPGVARSSTHSPGFPAAGVAVVNKGMGVSYPSHSRPDVLSSPGTPSCNRRGMAGVGYQQGPRSERVIPPWTGHTSHSGSGMVLPYSTGTGRTLPSKWEDAERWIFSPNPNPNNALGRSVPQLWRPKSKSGPLGPPGRFCGAYSCVSSSAQFLDNGRVGNLTVNAHYMAGMLLPEHICGGVMDWERDASGASGEDSSNGQGGCRPGQMNVRHPAMQPTRVSQQHGSAMESYQSLHASLQSIQDGGIESIKDSATSSAPIILRKDVATQTSPAISRSSSPSTRTSFSRSLSSQQVKELESCFSKLEVRDVQVDDRVTLTRWSKKHVTRGSEKNATNIIECKKKTVDSKSSAWEVTQTAKCISMIEGEEAKMTAWENMQKAEAEAAIQKLVIKLEKKRPYSLERIFNTLRSGSRKTQVVRSTSTANQDQHISRTIKTAPNLSKNGQMSSLSGCFTCHAF

SEQ ID NO: 176381 - protein, 502 aa, Zea Mays
MVHDPRGRPRMQPPVSLEDQRHHRLGAVLFQGRKGRAQRPASLDFGCPGVARSSTHSPGFPAAGVAVVNKGMGVSYPSHSRPDVLSSPGTPSCNRRGMAGVGYQQGPRSERVIPPWTGHTSHSGSGMVLPYSTGTGRTLPSKWEDAERWIFSPNPNPNNALGRSVPQLWRPKSKSGPLGPPGRFCGAYSCVSSSAQFLDNGRVGNLTVNAHYMAGMLLPEHICGGVMDWERDASGASGEDSSNGQGGCRPGQMNVRHPAMQPTRVSQQHGSAMESYQSLHASLQSIQDGGIESIKDSATSSAPIILRKDVATQTSPAISRSSSPSTRTSFSRSLSSQQVKELESCFSKLEVRDVQVDDRVTLTRWSKKHVTRGSEKNATNIIECKKKTVDSKSSAWEVTQTAKCISMIEGEEAKMTAWENMQKAEAEAAIQKLVIKLEKKRPYSLERIFNTLRSGSRKTQVVRSTSTANQDQHISRTIKTAPNLSKNGQMSSLSGCFTCHAF

SEQ ID NO: 176382 - protein, 271 aa, Zea Mays
MFYWSGNFIAFYNRRGYKIVMTTSLSSDVPVGYFSWAEYDIMAPVPPKTEEALAAAFISNCGARNFRLQALEMLENLDVKIDSYGSCHRNRDGKVDKVDTLKRYRFSLAFENSNEEDYVTEKFFQSLVAGSIPVVVGAPNIQEFSPGEGAILHIKELDDVASVAKTMKNIASNPDAFNQSLRWKYDGPSDSFKALIDMAAVHSSCRLCIHIATKIHLKEERTPKFTNRPCSCSTKKGTIYHLFIRERGRFKSESIYMRPVNSGSLGIRSAR

SEQ ID NO: 176383 - protein, 322 aa, Zea Mays
MTTSLSSDVPVGYFSWAEYDIMAPVPPKTEEALAAAFISNCGARNFRLQALEMLENLDVKIDSYGSCHRNRDGKVDKVDTLKRYRFSLAFENSNEEDYVTEKFFQSLVAGSIPVVVGAPNIQEFSPGEGAILHIKELDDVASVAKTMKNIASNPDAFNQSLRWKYDGPSDSFKALIDMAAVHSSCRLCIHIATKIHLKEERTPKFTNRPCSCSTKKGTIYHLFIRERGRFKSESIYMRSGQLTLGALESAVLGKFRSLNHVPVWKDERPPSIRGGDDLKLYRIYPVGLTQRQALYGFRFRDDSELEQYIKDHPCAKLEVIFV

SEQ ID NO: 176384 - protein, 379 aa, Zea Mays
MHLQSPTPSACSEVPSSPFYMTPRSLVPLQHSPSVTEGNICTPIADKSFSSDSKSHHVVNMVADGFNWRKYGQKQVKSSDNSRSYYRCTNSGCLAKKKVEHFPDGRVVEIIYRGAHNHEPPQKTRFAKERVTPISVPSGGETLRLVNTEIVESSTPTCELERSAISETSEQHLFCSSDCEGDAGNKSEDEHPSAEALPKRRTLEATAPNLTPVRRTVREQKIIVQAGKMSDGYRWRKYGQKIVKGNPNPRSYYRCTHGGCPVRKHVEKAPDDVNNIVVTYEGKHNHDEPFRSSSIPVSVISPSATATEQPNTSSTSDERPPTITQKDANSESDKETTLKFGGEKALESAQTLLSIKTNSDDMKNSVLKETSAAVPVQNN

SEQ ID NO: 176385 - protein, 215 aa, Zea Mays
MRASVRIQLKRKRKNLVTLLKDGDNIITSHAAKADLVDQFYSNLIGQSVSRENTIDLAALGLPAHNLSILDAPFTEQEVLATVLNLPADKAPGPDGFTGRFYKVCWNIIKVDVLNAVSAIWCRNFNNLDKVNSAYITMIPKFDGADQVKDFRPISLVHSFAKLVTKILANRLAGHLNELVSPNQSAFIKGRFIQDNFMLVQQTSRFLHQQNKACL

SEQ ID NO: 176386 - protein, 557 aa, Zea Mays
MATPTSTVTRGGNRHWHCTQVLPLLLLVPLCFALLVESGGIPTTLDGPFPPATRAFDRALRQGSNDVPLTDPRLAPRVQPPAPEQIALAASADADSLWVSWVTGRARVGSSNLAPLDPAAAGSEVWYGERSAADAASYPHVVTGSAEVYSQLYPYPGLLNYTSGAIHHVRLRGLRPATRYYYRCGDSSLPGGLSDEHSFTTLPATGAGCYPRRVAVVGDLGLTGNSTATVDHLARNDPSLVLMVGDMTYANQYLTTGGKGVPCFSCSFPKAPIRESYQPRWDGWGRFMEPITSKIPLMVIEGNHEIEPQGHGGEVTFASYLARFAVPSKESGSNTKFYYSFNAGGIHFIMLGAYIDYNRTGVQYSWLEKDLQRVDRRATPWVVAAWHPPWYNSYSSHYQEFECMRQEMEELLYEYQVHAYERMDRVFNYTLDPCGPIYIGIGDGGNIEKIDMDHADDPGKCPSPSDNHPEFGGLCHLNFTSGPAKGKFCWDRQPEWSAYRESSFGHGILEVLNSTYALWTWHRNQDAYAENSVGDQIYIVRQPDKCLLQPASASSLN

SEQ ID NO: 176387 - protein, 450 aa, Zea Mays
MATPTSTVTRGGNRHWHCTQVLPLLLLVPLCFALLVESGGIPTTLDGPFPPATRAFDRALRQGSNDVPLTDPRLAPRVQPPAPEQIALAASADADSLWVSWVTGRARVGSSNLAPLDPAAAGSEVWYGERSAADAASYPHVVTGSAEVYSQLYPYPGLLNYTSGAIHHVRLRGLRPATRYYYRCGDSSLPGGLSDEHSFTTLPATGAGCYPRRVAVVGDLGLTGNSTATVDHLARNDPSLVLMVGDMTYANQYLTTGGKGVPCFSCSFPKAPIRESYQPRWDGWGRFMEPITSKIPLMVIEGNHEIEPQGHGGEVTFASYLARFAVPSKESGSNTKFYYSFNAGGIHFIMLGAYIDYNRTGVQYSWLEKDLQRVDRRATPWVVAAWHPPWYMHTKGWTEYLTTHWTPVARFTSALETAGTLKKLTWIMLMTLESVPHQVITTLNLVGSAI

SEQ ID NO: 176388 - protein, 430 aa, Zea Mays
MATPTSTVTRGGNRHWHCTQVLPLLLLVPLCFALLVESGGIPTTLDGPFPPATRAFDRALRQGSNDVPLTDPRLAPRVQPPAPEQIALAASADADSLWVSWVTGRARVGSSNLAPLDPAAAGSEVWYGERSAADAASYPHVVTGSAEVYSQLYPYPGLLNYTSGAIHHVRLRGLRPATRYYYRCGDSSLPGGLSDEHSFTTLPATGAGCYPRRVAVVGDLGLTGNSTATVDHLARNDPSLVLMVGDMTYANQYLTTGGKGVPCFSCSFPKAPIRESYQPRWDGWGRFMEPITSKIPLMVIEGNHEIEPQGHGGEVTFASYLARFAVPSKESGSNTKFYYSFNAGGIHFIMLGAYIDYNRTGVQYSWLEKDLQRVDRRATPWVVAAWHPPWYNSYSSHYQEFECMRQEMEELLYEYQVDIVFSGHVSSHIR

SEQ ID NO: 176389 - protein, 597 aa, Zea Mays
MATPTSTVTRGGNRHWHCTQVLPLLLLVPLCFALLVESGGIPTTLDGPFPPATRAFDRALRQGSNDVPLTDPRLAPRVQPPAPEQIALAASADADSLWVSWVTGRARVGSSNLAPLDPAAAGSEVWYGERSAADAASYPHVVTGSAEVYSQLYPYPGLLNYTSGAIHHVRLRGLRPATRYYYRCGDSSLPGGLSDEHSFTTLPATGAGCYPRRVAVVGDLGLTGNSTATVDHLARNDPSLVLMVGDMTYANQYLTTGGKGVPCFSCSFPKAPIRESYQPRWDGWGRFMEPITSKIPLMVIEGNHEIEPQGHGGEVTFASYLARFAVPSKESGSNTKFYYSFNAGGIHFIMLGAYIDYNRTGVQYSWLEKDLQRVDRRATPWVVAAWHPPWYNSYSSHYQEFECMRQEMEELLYEYQVDIVFSGHVHAYERMDRVFNYTLDPCGPIYIGIGDGGNIEKIDMDHADDPGKCPSPSDNHPEFGGLCHLNFTSGPAKGKFCWDRQPEWSAYRESSFGHGILEVLNSTYALWTWHRNQDAYAENSVGDQIYIVRQPDKCLLQPANSPIGGCPSLVSSNSSGGSITNGQLSYKMFVIMCVALM

SEQ ID NO: 176390 - protein, 280 aa, Zea Mays
MEPITSKIPLMVIEGNHEIEPQGHGGEVTFASYLARFAVPSKESGSNTKFYYSFNAGGIHFIMLGAYIDYNRTGVQYSWLEKDLQRVDRRATPWVVAAWHPPWYNSYSSHYQEFECMRQEMEELLYEYQVDIVFSGHVHAYERMDRVFNYTLDPCGPIYIGIGDGGNIEKIDMDHADDPGKCPSPSDNHPEFGGLCHLNFTSGPAKGKFCWDRQPEWSAYRESSFGHGILEVLNSTYALWTWHRNQDAYAENSVGDQIYIVRQPDKCLLQPATPLEDALL

SEQ ID NO: 176391 - protein, 75 aa, Zea Mays
MVYDTDCNGKVAFDDILSILRDLTGSFMTEQQRQKVLIHVLEEAGYTKDSHFTLPDFMKIIGNSELKMEVEVPID

SEQ ID NO: 176392 - protein, 104 aa, Zea Mays
MGSTSSMLTQYDIEEVQDHCNHAFSQQEIVSLYHRFCQLDRNGGGFVSADEFMSVPEFAVNPLSQRLLRMLDGLNFKEFVAFLSAFSPRTSLQQKIECSYFQGL

SEQ ID NO: 176393 - protein, 678 aa, Zea Mays
MLVSVAADDSGWQESPSQAVLFADEIAAVRAVLGGTLSEASIIAALSQCGGNAERAINAILDDAEVVSAPKRAKVELDVGGVPVQVPVAVKVKAESIDVGAVAPAAVKVKAEPIDGDVVGSQQSDGSSAKATAKMKSEPAEWSAKTPDRFVPDARSVGAPVAVASAGAGISIVPRQNKRPRQEVGTIELTTTHPVPYLNSRPIRALPPMPPMGGDGEVYDPKPIQMVPPLEIQMHDPRTTLPAPSPIDIEMYQQPPRPPPVDVEMCEQRSRPRPRPLRAVVPASVTDMRMVVAPPDGEFGDFPVERDWMLVGKSYVPGLSTNRGRRRLDAGEIVHFAFPSYEKIYGGLKMTAKKAAALAQIVRFSTKRAGEIGKLSPEWTQCLVPLVNSSKVKIQGKLVFPTMELRLMQEILLYVSFYIHKSVLAEMDNSPCDMLDHANVDFTPSPLHKLLSLLNLKPSNKDAFSLDDLTTRKLKQILRGNNNNGDDSTPVLGHTFLEQGADEQAISEAALNKLVGTAETFDLEEAEPPTTLVSVLKPYQKQALFWMSKLEKGIDANEETKTLNPCWSAYNIADRRAPPVYVNLFTGQATTQFPSMTETVRGGILADAMGLGKTVMTIALILSNPRGEFSNCIKGDTRYLGDRATRGYTSTSSVRGGTLVVCPMSLLGQWKVSILIYY

SEQ ID NO: 176394 - protein, 128 aa, Zea Mays
MKDISVCLVPCSSSSTWCNSLSSGRMLYKSEYKFSTIVQIESIRRLIEAVVIATGVHTFFVKAAYLVDSTNQVGHFQKLFMLSVWKEHVESQSRILLPSGTDNPFTRESVRAFSAVTLVSKNCSHIVV

SEQ ID NO: 176395 - protein, 75 aa, Zea Mays
MPRPASPLVATLRQPSDATLCPMLLPRLEPRTAATPLAAPPGPGESRPAPPARAARPRHPVLPRSHVLDASSYLG

SEQ ID NO: 176396 - protein, 180 aa, Zea Mays
MVMHACMLLIHSHRRRSYMQLSKITATPPVPFSTSSFAKKNYNPTKIVLGSGFSSPGRRWFFQRQKRAQLLRAKQKPRQKSHLRNAALLISSFSPALTVLATILSAGVHDAGHGGFVCLHLLVALLLLVVDALAAATVAAEGGRPARHGRGEAGQDAALRPLKTLGPMRHMKLARAGTTF

SEQ ID NO: 176397 - protein, 120 aa, Zea Mays
MYGIDLGTIVGLELDVDIVATNATTKKDIELSKEINDSFRQSSRARTRLPSSIEISGHVLTIGYWPTYLPMDVYREDSPDLFTNEEKIDEVESMDIGLLLTRLLSMVKLTYHISNELSGQ

SEQ ID NO: 176398 - protein, 1540 aa, Zea Mays
MMGSPDGRLVELFGAVKSWMPRRGDHSPPPALQSDAAAGQPLPHDLSRDFWMPDQSCRVCYDCDAQFTILNRRHHCRHCGRVFCARCTANSVPRSPGDAAREDGERIRVCNYCFKRWMEEEPAARGAAAGQQPSSPSLSAASVCSDKSSFTGTNGQMSSYANISYSEFPVHGEGNCGEDDGYREEQQPAMDPAPTMEPAAYADNSSDRFNFCLQRSDDEDDDYTVFRSDLEEQHMQNSDKYYGPMYFDGHHVSCSDDAKESTSPRKKLTTLVDSLGADKNEDHNVDECCNARSSSMYSMEVLDNEPVDFENNSLLWVAPEPEDGEDDHDGEHDDDEGVDATGEWGYLRTNSFGSGHCRSRDKSAEEHKKAMKDIVDGHFRALVSQLLQAEKVPLVDGSGKESWLDIVTSLSWEAASLLKPDTTSKGGQMDPGGYVKVKCLACGHPSESFVVKGVVCKKNVAHRRMSSKKEKPPILILGGALEYQRVSNLLSSFDTLLQQETDYLKMAVAKIKAHQPSVVLVEKSVSRYAQDLFLEKNISLVLNIKRPLLERISRCTGAHIVPSIDCLSSEKLGRCDLFHVEKYVEEHGTAGEGGKKMLKNLMFFEGCPKPFGCTILLKGANGDELKKVKHVLQYGVFAAYHLALETSFLVDEGATLPELPLKSPIIVAFPDKPSSADRSISTIPIIPIPSASPPNSCLQAFGLQNDDLTFDGTKRMEQTALGVPYEQTASVQINSQNGHITGFLDMVPQSSVGPLFQQSDIHCPDGTGGVNRKMNLQGSLPGTTRNVLVNDFSHSVSTAHPTNLVSAKGDGSLAKNPEIGDKIADKPAAPLNVQISHDDESIKNNSVAKTDEIPASPAENQSILVSLSSRCVWKESLCERPHLLRIKYYGNFDRPLGRFLRDQLFDQSKLCQSCELPPEAHVYCYVHPQGSLTISVRKLSIKLPGNGENDGRIWMWHRCLRCPRVNGLPPATKRVVMSDAAWGLSFGKFLELSFSNHAAASRVASCGHSLHRDCLRFYGFGEMVACFRYASIRVHSVYLPPPKLDFTSEHQEWVEEEAKEVDDSAELLFSEVLNALHKISGGRPITGSFDGNLKILELRRNIGELEEILVAEKTDFMESLKNLLKTDMRKEQPFIDILDVNKLRRHLLFLCYLWDQRLKFIANSGGKYCDALAGLRIGSGNSDFNGKPVGAAPKLEKGSKATVLSIAKEGSLQQSSCPSHGEDEGFNQANEYNENISRNAAELSGTEDSIAKINHATSADVKDRLDNQESRTGVRRVVSDGQFPVATDIPDTLDAKWRGQNEPAPDSNLAKPPLSVEDTTVDVKSQAKAVHTFTFTVRSGDAAEELLRWIKMPYMTSNSSLNTTSSSPLRFTSLAEYIPKYVELFCDLSQKGGARLFLPTGANDIVIPVFDDEPTSVISYALVSPMYCFQLSDDSSKNRDKESSLPLPVYDSGNFNPFHLFEEFGSHYDVTSSVSGVRGSFAPDQVHLSVSFEDGGPLGKVKYNVTCYYAKKFEALRRVHKHWKPYMLSKNFGDLSGSMI

SEQ ID NO: 176399 - protein, 1562 aa, Zea Mays
MQNSDKYYGPMYFDGHHVSCSDDAKESTSPRKKLTTLVDSLGADKNEDHNVDECCNARSSSMYSMEVLDNEPVDFENNSLLWVAPEPEDGEDDHDGEHDDDEGVDATGEWGYLRTNSFGSGHCRSRDKSAEEHKKAMKDIVDGHFRALVSQLLQAEKVPLVDGSGKESWLDIVTSLSWEAASLLKPDTTSKGGQMDPGGYVKVKCLACGHPSESFVVKGVVCKKNVAHRRMSSKKEKPPILILGGALEYQRVSNLLSSFDTLLQQETDYLKMAVAKIKAHQPSVVLVEKSVSRYAQDLFLEKNISLVLNIKRPLLERISRCTGAHIVPSIDCLSSEKLGRCDLFHVEKYVEEHGTAGEGGKKMLKNLMFFEGCPKPFGCTILLKGANGDELKKVKHVLQYGVFAAYHLALETSFLVDEGATLPELPLKSPIIVAFPDKPSSADRSISTIPIIPIPSASPPNSCLQAFGLQNDDLTFDGTKRMEQTALGVPYEQTASVQINSQNGHITGFLDMVPQSSVGPLFQQSDIHCPDGTGGVNRKMNLQGSLPGTTRNVLVNDFSHSVSTAHPTNLVSAKGDGSLAKNPEIGDKIADKPAAPLNVQISHDDESIKNNSVAKTDEIPASPAENQSILVSLSSRCVWKESLCERPHLLRIKYYGNFDRPLGRFLRDQLFDQSKLCQSCELPPEAHVYCYVHPQGSLTISVRKLSIKLPGNGENDGRIWMWHRCLRCPRVNGLPPATKRVVMSDAAWGLSFGKFLELSFSNHAAASRVASCGHSLHRDCLRFYGFGEMVACFRYASIRVHSVYLPPPKLDFTSEHQEWVEEEAKEVDDSAELLFSEVLNALHKISGGRPITGSFDGNLKILELRRNIGELEEILVAEKTDFMESLKNLLKTDMRKEQPFIDILDVNKLRRHLLFLCYLWDQRLKFIANSGGKYCDALAGLRIGSGNSDFNGKPVGAAPKLEKGSKATVLSIAKEGSLQQSSCPSHGEDEGFNQANEYNENISRNAAELSGTEDSIAKINHATSADVKDRLDNQESRTGVRRVVSDGQFPVATDIPDTLDAKWRGQNEPAPDSNLAKPPLSVEDTTVDVKSQAKAVHTFTFTVRSGDAAEELLRWIKMPYMTSNSSLNTTSSSPLRFTSLAEYIPKYVELFCDLSQKGGARLFLPTGANDIVIPVFDDEPTSVISYALVSPMYCFQLSDDSSKNRDKESSLPLPVYDSGNFNPFHLFEEFGSHYDVTSSVSGVRGSFAPDQVHLSVSFEDGGPLGKVKYNVTCYYAKKFEALRRSCCPSELDFFRSISRCKKWGAQGGKSNVFFAKSLDDRFIIKQVTKTELESFLKFGTEYFKYLSESISTGSPTCLAKILGIYQVTSKHVKGGKESKMDLLVMENLLFGRNITRLYDLKGSSRSRYNADSNGSNKVLLDQNLIEAMPTSPIFVGNKAKRLLERAVWNDTSFLAGIDVMDYSLLVGVDEEKHELVLGIIDFMRQYTWDKHLETWVKSSGILGGPKNASPTVISPMQYKKRFRKAMSAYFIVIPEQWMPAIINPSKSSSNICQEDSQNGSQE

SEQ ID NO: 176400 - protein, 103 aa, Zea Mays
MDYSLLVGVDEEKHELVLGIIDFMRQYTWDKHLETWVKSSGILGGPKNASPTVISPMQYKKRFRKAMSAYFIVIPEQWMPAIINPSKSSSNICQEDSQNGSQE

SEQ ID NO: 176401 - protein, 55 aa, Zea Mays
MICPVCRGIYNCSICRTKKGWFPTGSACRKAVGLGYKSVAHFLIAKHNNKQVPLI

SEQ ID NO: 176402 - protein, 129 aa, Zea Mays
MVTKQNNGRKHYTYLHAHKAATAKRMAVTSLSAPALVKTAPFVGPEQSSLLPLKHPGWMAAFGTSPSTLKLVVGLPSLNRTHQKYGPPPSVPLTAAPTSVWFLLRSIWRPFASFTNKTPKASAGAKYRT

SEQ ID NO: 176403 - protein, 309 aa, Zea Mays
MQRDQNSTSVVQEEAGHVPQPSAKLEKCAPSAMEISSIALMESKDCDDDSATSGDPQSTGTHSAPSYVTYGFAPQSHVNQIEKSESHSQSYHPTTDADERLSPSLATQAAHKYGNIPVVPTQTGQDQEGNDSPVIISSVSASVATPAAGVLSASVAIPQQSVPVFRQPLGVHIPHLPMNYVPYNQYISPFFIPPPTLHPFMGNATFSQPPSTGVMYPTPGTARVLPPVKFPVPSFKPGANIGSQASIGVPGCYGTYGSSPSVYTNNAPVSSGNLAENDNVTSSQFKENNIYFAGLQMRSFPPPTCETTI

SEQ ID NO: 176404 - protein, 437 aa, Zea Mays
MAAGGRVSIPAGARRTIADIKEIAGGHTDEEVYAMLRECNMDPNETVQRLLLEDTFHEVKRKRDKKKEVSKEPSDSRWRPAVQGQGGKNCRNCASRSLSSSNDSAGRSAISGKENGISLIMGKGSGSTPITNMNMDVKASTFMPSNSLLSGLCNGPYQSVDPAAVLVSSSSAVGDKSGSTALADLTGGLPFKDVVATIDPNSLQPLKPAPPSDPVVVSFLNSHSLGDVGASRQTIGIKKTSVEHKVGRDVSTDKGSSEQSVQSSFRRSSASRPSSSYNSHSEQSQKVIPSKEWKPKLTCLAASQATEDATVHDNVPLAAADTITQSAPVPNSAGTEDSLKVDICLNDLQLSDKQHVIIPDHLQVSESEKYVLSFGSFDVSFQQTKGSSDPDYVKSSLPKFSSSHELDGNIDELQSMQRIQHLLSKRKLVMFLNLLQS

SEQ ID NO: 176405 - protein, 629 aa, Zea Mays
MSKLPLSCQGGLPFKDVVATIDPNSLQPLKPAPPSDPVVVSFLNSHSLGDVGASRQTIGIKKTSVEHKVGRDVSTDKGSSEQSVQSSFRRSSASRPSSSYNSHSEQSQKVIPSKEWKPKLTCLAASQATEDATVHDNVPLAAADTITQSAPVPNSAGTEDSLKVDICLNDLQLSDKQHVIIPDHLQVSESEKYVLSFGSFDVSFQQTKGSSDPDYVKSSLPKFSSSHELDGNIDELQSMQRDQNSTSVVQEEAGHVPQPSAKLEKCAPSAMEISSIALMESKDCDDDSATSGDPQSTGTHSAPSYVTYGFAPQSHVNQIEKSESHSQSYHPTTDADERLSPSLATQAAHKYGNIPVVPTQTGQDQEGNDSPVIISSVSASVATPAAGVLSASVAIPQQSVPVFRQPLGVHIPHLPMNYVPYNQYISPFFIPPPTLHPFMGNATFSQPPSTGVMYPTPGTARVLPPVKFPVPSFKPGANIGSQASIGVPGCYGTYGSSPSVYTNNAPVSSGNLAENDNVTSSQFKENNIYFAGLQTDGLTLWVPTPGRDISALQVNSFYGLPPPGHQVTYAPQAGHGPYGGIYHPAHSVAGATVTPLLQPSHTMAGAVEIVGAPGGVYQHPQAHMNWGSY

SEQ ID NO: 176406 - protein, 804 aa, Zea Mays
MAAGGRVSIPAGARRTIADIKEIAGGHTDEEVYAMLRECNMDPNETVQRLLLEDTFHEVKRKRDKKKEVSKEPSDSRWRPAVQGQGGKNCRNCASRSLSSSNDSAGRSAISGKENGISLIMGKGSGSTPITNMNMDVKASTFMPSLLSGLCNGPYQSVDPAAVLVSSSSAVGDKSGSTALADLTGGLPFKDVVATIDPNSLQPLKPAPPSDPVVVSFLNSHSLGDVGASRQTIGIKKTSVEHKVGRDVSTDKGSSEQSVQSSFRRSSASRPSSSYNSHSEQSQKVIPSKEWKPKLTCLAASQATEDATVHDNVPLAAADTITQSAPVPNSAGTEDSLKVDICLNDLQLSDKQHVIIPDHLQVSESEKYVLSFGSFDVSFQQTKGSSDPDYVKSSLPKFSSSHELDGNIDELQSMQRDQNSTSVVQEEAGHVPQPSAKLEKCAPSAMEISSIALMESKDCDDDSATSGDPQSTGTHSAPSYVTYGFAPQSHVNQIEKSESHSQSYHPTTDADERLSPSLATQAAHKYGNIPVVPTQTGQDQEGNDSPVIISSVSASVATPAAGVLSASVAIPQQSVPVFRQPLGVHIPHLPMNYVPYNQYISPFFIPPPTLHPFMGNATFSQPPSTGVMYPTPGTARVLPPVKFPVPSFKPGANIGSQASIGVPGCYGTYGSSPSVYTNNAPVSSGNLAENDNVTSSQFKENNIYFAGLQTDGLTLWVPTPGRDISALQVNSFYGLPPPGHQVTYAPQAGHGPYGGIYHPAHSVAGATVTPLLQPSHTMAGAVEIVGAPGGVYQHPQAHMNWGSY

SEQ ID NO: 176407 - protein, 200 aa, Zea Mays
MQRDQNSTSVVQEEAGHVPQPSAKLEKCAPSAMEISSIALMESKDCDDDSATSGDPQSTGTHSAPSYVTYGFAPQSHVNQIEKSESHSQSYHPTTDADERLSPSLATQAAHKYGNIPVVPTQTGQDQEGNDSPVIISSVSASVATPAAGVLSASVAIPQQSVPVFRQPLATFNRGHVPNSWNRKSSSTCQIPSSFIQAWC

SEQ ID NO: 176408 - protein, 454 aa, Zea Mays
MAAGGRVSIPAGARRTIADIKEIAGGHTDEEVYAMLRECNMDPNETVQRLLLEDTFHEVKRKRDKKKEVSKEPSDSRWRPAVQGQGGKNCRNCASRSLSSSNDSAGRSAISGKENGISLIMGKGSGSTPITNMNMDVKASTFMPSLLSGLCNGPYQSVDPAAVLVSSSSAVGDKSGSTALADLTGGLPFKDVVATIDPNSLQPLKPAPPSDPVVVSFLNSHSLGDVGASRQTIGIKKTSVEHKVGRDVSTDKGSSEQSVQSSFRRSSASRPSSSYNSHSEQSQKVIPSKEWKPKLTCLAASQATEDATVHDNVPLAAADTITQSAPVPNSAGTEDSLKVDICLNDLQLSDKQHVIIPDHLQVSESEKYVLSFGSFDVSFQQTKGSSDPDYVKSSLPKFSSSHELDGNIDELQSMQRLVLTPFILIFGGYPCDALLCCYCVFFWQHQLQILSCFF

SEQ ID NO: 176409 - protein, 359 aa, Zea Mays
MEISSIALMESKDCDDDSATSGDPQSTGTHSAPSYVTYGFAPQSHVNQIEKSESHSQSYHPTTDADERLSPSLATQAAHKYGNIPVVPTQTGQDQEGNDSPVIISSVSASVATPAAGVLSASVAIPQQSVPVFRQPLGVHIPHLPMNYVPYNQYISPFFIPPPTLHPFMGNATFSQPPSTGVMYPTPGTARVLPPVKFPVPSFKPGANIGSQASIGVPGCYGTYGSSPSVYTNNAPVSSGNLAENDNVTSSQFKENNIYFAGLQTDGLTLWVPTPGRDISALQVNSFYGLPPPGHQVTYAPQAGHGPYGGIYHPAHSVAGATVTPLLQPSHTMAGAVEIVGAPGGVYQHPQAHMNWGSY

SEQ ID NO: 176410 - protein, 704 aa, Zea Mays
MAAGGRVSIPAGARRTIADIKEIAGGHTDEEVYAMLRECNMDPNETVQRLLLEDTFHEVKRKRDKKKEVSKEPSDSRWRPAVQGQGGKNCRNCASRSLSSSNDSAGRSAISGKENGISLIMGKGSGSTPITNMNMDVKASTFMPSNSLLSGLCNGPYQSVDPAAVLVSSSSAVGDKSGSTALADLTGGLPFKDVVATIDPNSLQPLKPAPPSDPVVVSFLNSHSLGDVGASRQTIGIKKTSVEHKVGRDVSTDKGSSEQSVQSSFRRSSASRPSSSYNSHSEQSQKATEDATVHDNVPLAAADTITQSAPVPNSAGTEDSLKVDICLNDLQLSDKQHVIIPDHLQVSESEKYVLSFGSFDVSFQQTKGSSDPDYVKSSLPKFSSSHELDGNIDELQSMQRDQNSTSVVQEEAGHVPQPSAKLEKCAPSAMEISSIALMESKDCDDDSATSGDPQSTGTHSAPSYVTYGFAPQSHVNQIEKSESHSQSYHPTTDADERLSPSLATQAAHKYGNIPVVPTQTGQDQEGNDSPVIISSVSASVATPAAGVLSASVAIPQQSVPVFRQPLGVHIPHLPMNYVPYNQYISPFFIPPPTLHPFMGNATFSQPPSTGVMYPTPGTARVLPPVKFPVPSFKPGANIGSQASIGVPGCYGTYGSSPSVYTNNAPVSSGNLAENDNVTSSQFKENNIYFAGLQFKDTTWTELRQ

SEQ ID NO: 176411 - protein, 513 aa, Zea Mays
MSKLPLSCQGGLPFKDVVATIDPNSLQPLKPAPPSDPVVVSFLNSHSLGDVGASRQTIGIKKTSVEHKVGRDVSTDKVIPSKEWKPKLTCLAASQATEDATVHDNVPLAAADTITQSAPVPNSAGTEDSLKVDICLNDLQLSDKQHVIIPDHLQVSESEKYVLSFGSFDVSFQQTKGSSDPDYVKSSLPKFSSSHELDGNIDELQSMQRDQNSTSVVQEEAGHVPQPSAKLEKCAPSAMEISSIALMESKDCDDDSATSGDPQSTGTHSAPSYVTYGFAPQSHVNQIEKSESHSQSYHPTTDADERLSPSLATQAAHKYGNIPVVPTQTGQDQEGNDSPVIISSVSASVATPAAGVLSASVAIPQQSVPVFRQPLGVHIPHLPMNYVPYNQYISPFFIPPPTLHPFMGNATFSQPPSTGVMYPTPGTARVLPPVKFPVPSFKPGANIGSQASIGVPGCYGTYGSSPSVYTNNAPVSSGNLAENDNVTSSQFKENNIYFAGLQFKDTTWTELRQ

SEQ ID NO: 176412 - protein, 435 aa, Zea Mays
MAAGGRVSIPAGARRTIADIKEIAGGHTDEEVYAMLRECNMDPNETVQRLLLEDTFHEVKRKRDKKKEVSKEPSDSRWRPAVQGQGGKNCRNCASRSLSSSNDSAGRSAISGKENGISLIMGKGSGSTPITNMNMDVKASTFMPSLLSGLCNGPYQSVDPAAVLVSSSSAVGDKSGSTALADLTGGLPFKDVVATIDPNSLQPLKPAPPSDPVVVSFLNSHSLGDVGASRQTIGIKKTSVEHKVGRDVSTDKGSSEQSVQSSFRRSSASRPSSSYNSHSEQSQKVIPSKEWKPKLTCLAASQATEDATVHDNVPLAAADTITQSAPVPNSAGTEDSLKVDICLNDLQLSDKQHVIIPDHLQVSESEKYVLSFGSFDVSFQQTKGSSDPDYVKSSLPKFSSSHELDGNIDELQSMQRIQHLLSKRKLVMFLNLLQS

SEQ ID NO: 176413 - protein, 720 aa, Zea Mays
MVSKEPSDSRWRPAVQGQGGKNCRNCASRSLSSSNDSAGRSAISGKENGISLIMGKGSGSTPITNMNMDVKASTFMPSNSLLSGLCNGPYQSVDPAAVLVSSSSAVGDKSGSTALADLTGGLPFKDVVATIDPNSLQPLKPAPPSDPVVVSFLNSHSLGDVGASRQTIGIKKTSVEHKVGRDVSTDKGSSEQSVQSSFRRSSASRPSSSYNSHSEQSQKVIPSKEWKPKLTCLAASQATEDATVHDNVPLAAADTITQSAPVPNSAGTEDSLKVDICLNDLQLSDKQHVIIPDHLQVSESEKYVLSFGSFDVSFQQTKGSSDPDYVKSSLPKFSSSHELDGNIDELQSMQRDQNSTSVVQEEAGHVPQPSAKLEKCAPSAMEISSIALMESKDCDDDSATSGDPQSTGTHSAPSYVTYGFAPQSHVNQIEKSESHSQSYHPTTDADERLSPSLATQAAHKYGNIPVVPTQTGQDQEGNDSPVIISSVSASVATPAAGVLSASVAIPQQSVPVFRQPLGVHIPHLPMNYVPYNQYISPFFIPPPTLHPFMGNATFSQPPSTGVMYPTPGTARVLPPVKFPVPSFKPGANIGSQASIGVPGCYGTYGSSPSVYTNNAPVSSGNLAENDNVTSSQFKENNIYFAGLQVNSFYGLPPPGHQVTYAPQAGHGPYGGIYHPAHSVAGATVTPLLQPSHTMAGAVEIVGAPGGVYQHPQAHMNWGSY

SEQ ID NO: 176414 - protein, 627 aa, Zea Mays
MGKGSGSTPITNMNMDVKASTFMPSNSLLSGLCNGPYQSVDPAAVLVSSSSAVGDKSGSTALADLTGGLPFKDVVATIDPNSLQPLKPAPPSDPVVVSFLNSHSLGDVGASRQTIGIKKTSVEHKVGRDVSTDKGSSEQSVQSSFRRSSASRPSSSYNSHSEQSQKAPVPNSAGTEDSLKVDICLNDLQLSDKQHVIIPDHLQVSESEKYVLSFGSFDVSFQQTKGSSDPDYVKSSLPKFSSSHELDGNIDELQSMQRDQNSTSVVQEEAGHVPQPSAKLEKCAPSAMEISSIALMESKDCDDDSATSGDPQSTGTHSAPSYVTYGFAPQSHVNQIEKSESHSQSYHPTTDADERLSPSLATQAAHKYGNIPVVPTQTGQDQEGNDSPVIISSVSASVATPAAGVLSASVAIPQQSVPVFRQPLGVHIPHLPMNYVPYNQYISPFFIPPPTLHPFMGNATFSQPPSTGVMYPTPGTARVLPPVKFPVPSFKPGANIGSQASIGVPGCYGTYGSSPSVYTNNAPVSSGNLAENDNVTSSQFKENNIYFAGLQVNSFYGLPPPGHQVTYAPQAGHGPYGGIYHPAHSVAGATVTPLLQPSHTMAGAVEIVGAPGGVYQHPQAHMNWGSY

SEQ ID NO: 176415 - protein, 399 aa, Zea Mays
MKGSGRITGNGRDSVGASLYTRVQPQTDMETQIHELEQEAYCSVLRAFKAQSDAITWEKESLITELRKELQVSDKEHRELLNKVNGDDIIRRIRKWRESTGGLMINLVNNSQRTHDPIPSPTTSARKRQKMSQPILSACVPAPSAMHSQPLTAPMQPSSSGAKKGAQPGTKVKKTKPGQKIPGGSAVKSMPSSAGPGGRGTIINRNMSAGLPPESSQLNPLIGRKVMTRWPDDNSFYEAEITDYDASKDIYTLVYDINTADETWEWVDFKEMAPEDIRWDGEEPDLNLIGRGAPVHGMKSSSRGGPMSGTGRDRGPQKNSFKKDYPSQNGIGKKSVDYIEILHTETLIKEVERVFSSANPDPLEMERAKKALKEHEQSLIDAIARLAEASDGEGVKCCA

SEQ ID NO: 176416 - protein, 240 aa, Zea Mays
MGTLLSLHVINLFTLVGLDFMESCKGLNSLSQEKESLITELRKELQVSDKEHRELLNKVNGDDIIRRIRKWRESTGGLMINLVNNSQRTHDPIPSPTTSARKRQKMSQPILSACVPAPSAMHSQPLTAPMQPSSSGAKKGAQPGTKVKKTKPGQKIPGGSAVKSMPSSAGPGGRGTIINRNMSAGLPPESSQLNPLIGRKVMTRWPDDNSFYEAEITDYDASKQTRHGNGLTSRRWHLRI

SEQ ID NO: 176417 - protein, 196 aa, Zea Mays
MDCVGAVDSSGTDDDLPQSYQNSRGMKGSGRITGNGRDSVGASLYTRVQPQTDMETQIHELEQEAYCSVLRAFKAQSDAITWEKESLITELRKELQVSDKEHRELLNKVNGDDIIRRIRKWRESTGGLMINLVNNSQRTHDPIPSPTTSARKRSKKGSSTRHKSEEDQTRPEDTWWLCSQIYAIFCWSWWARNYYQ

SEQ ID NO: 176418 - protein, 139 aa, Zea Mays
MAASGSRCPRVLVLLQGWVAYIKKQRSCPCVAVNSHSRESIKEVLKVVQARIREIKHGDNNCTGTALLVGIPNVGKSAIVNAMHQIGRIAAAEKGKLKHAIVSSHPGETRDIHGYLFSPVRELFSVMSLLKSPMGLMVG

SEQ ID NO: 176419 - protein, 117 aa, Zea Mays
MLQIRTHIAPPEGTNVSQPIFSRILTGTYRRRLVAVSACCCCSPSPPPPLAPFTGVHLNRRRLFPRDPPPDPIPVEDVVPPLALVLALAAAAAAAATTGTHSLRHFLTWPVNVVAGP

SEQ ID NO: 176420 - protein, 211 aa, Zea Mays
MDATLLLLPANCTAAASGRMRPRLPAGPHVASPGPSARPRTSIRASAVSAALAVRGLPQHASVAGQSTGSYRVGDVMTKREELHVVKPTTSVDDGALFLICCTCLPYFRSVERDHSILLFFAALEMLVKHRISGFPVIDDDWNLVGVVSDYDLLALDTISGAGPAEADIFPEVDSTWKECWWGGFLMSLACSPPRKKIFVAVAVQLLIVAD

SEQ ID NO: 176421 - protein, 205 aa, Zea Mays
MDATLLLLPANCTAAASGRMRPRLPAGPHVASPGPSARPRTSIRASAVSAALAVRGLPQHASVAGQSTGSYRVGDVMTKREELHVVKPTTSVDDDYDLLALDTISGAGPAEADIFPEVDSTWKTFHEIQKLLSKTNGKVIADVMTPAPLVVRETTNLEDAARLLLVTKYRRLPVVDSSGKLVGIITRGNVVQAALEIKKKVEGTL

SEQ ID NO: 176422 - protein, 135 aa, Zea Mays
MLVKHRISGFPVIDDDWNLVGVVSDYDLLALDTISGAGPAEADIFPEVDSTWKTFHEIQKLLSKTNGKVIADVMTPAPLVVRETTNLEDAARLLLVTKYRRLPVVDSSGKLVGIITRGNVVQAALEIKKKVEGTL

SEQ ID NO: 176423 - protein, 628 aa, Zea Mays
MSVRRRSTSMEGLLTLDDWKERRSDVDNSEDERRRLSIGSLKKKALNASNKLTHSLKKRGKRKVEHRASSFTIEDVRDEQEERAVFTFQQKLLDMNLLPDKHNDYHSLLRFLKARKFDTEKAIHMWAEMLQWRKESGADTILEDFSFEELDDVLCYYPQGYHGVDRQGRPVYIERLGKVEPNKLMHITTVDRYMKYHVQEFERAFRDRFPACSVAAKRHIDSTTTILDVDGVGLKNFSKTARDMLSRMQKIDSDYYPETLHQMFVVNAGSGFKLLWSSVKGFLDPKTASKIHVLGTKFQNKLLEVIDASQLPEFLGGTCTCAAVGGCMRSNKGPWNDPDIMKLAHNKEAKFTRHTRRLSEIEQGRSSFARLHLLKGRNSDTSTVESGSEIDDLGAPIMRSTVGCSRLAPVREEMRARDSAAYYSCDDHFVVVDKTVDYGRGGSPSDKSSASEVRTHVRPLDASTAAHVAGPSSNRRATVVPEEVSDEGVFRRFVRLLLAFIVKVFAFFHIVRSQQETRVNNLLPPAEPELISDDHPAVETFNVDHISPVIERLQRLEGKVDELGSKPPAIPVEKERSLLESWDRIKCIESDLERTKKVLQATVRKQLESAESLEEVIRSSLPRRRFCL

SEQ ID NO: 176424 - protein, 635 aa, Zea Mays
MSVRRRSTSMEGLLTLDDWKERRSDVDNSEDERRRLSIGSLKKKALNASNKLTHSLKKRGKRKVEHRASSFTIEDVRDEQEERAVFTFQQKLLDMNLLPDKHNDYHSLLRFLKARKFDTEKAIHMWAEMLQWRKESGADTILEDFSFEELDDVLCYYPQGYHGVDRQGRPVYIERLGKVEPNKLMHITTVDRYMKYHVQEFERAFRDRFPACSVAAKRHIDSTTTILDVDGVGLKNFSKTARDMLSRMQKIDSDYYPETLHQMFVVNAGSGFKLLWSSVKGFLDPKTASKIHVLGTKFQNKLLEVIDASQLPEFLGGTCTCAAVGGCMRSNKGPWNDPDIMKLAHNKEAKFTRHTRRLSEIEQGRSSFARLHLLKGRNSDTSTVESGSEIDDLGAPIMRSTVGCSRLAPVREEMQMRARDSAAYYSCDDHFVVVDKTVDYGRGGSPSDKSSASEVRTHVRPLDASTAAHVAGPSSNRRATVVPEEVSDEGVFRRFVRLLLAFIVKVFAFFHIVRSQQETRVNNLLPPAEPELISDDHPAVETFNVDHISPVIERLQRLEGKVDELGSKPPAIPVEKERSLLESWDRIKCIESDLERTKKVSFHQVLQATVRKQLESAESLEEVIRSSLPRRRFCL

SEQ ID NO: 176425 - protein, 601 aa, Zea Mays
MSVRRRSTSMEGLLTLDDWKERRSDVDNSEDERRRLSIGSLKKKALNASNKLTHSLKKRGKRKVEHRASSFTIEDVRDEQEERAVFTFQQKLLDMNLLPDKHNDYHSLLRFLKARKFDTEKAIHMWAEMLQWRKESGADTILEDFSFEELDDVLCYYPQGYHGVDRQGRPVYIERLGKVEPNKLMHITTVDRYMKYHVQEFERAFRDRFPACSVAAKRHIDSTTTILDVDGVGLKNFSKTARDMLSRMQKIDSDYYPETLHQMFVVNAGSGFKLLWSSVKGFLDPKTASKIHVLGTKFQNKLLEVIDASQLPEFLGGTCTCAAVGGCMRSNKGPWNDPDIMKLAHNKEAKFTRHTRRLSEIEQGRSSFARLHLLKGRNSDTSTVESGSEIDDLGAPIMRSTVGCSRLAPVREEMQMRARDSAAYYSCDDHFVVVDKTVDYGRGGSPSDKSSASEVRTHVRPLDASTAAHVAGPSSNRRATVVPEEVSDEGVFRRFVRLLLAFIVKVFAFFHIVRSQQETRVNNLLPPAEPELISDDHPAVETFNVDHISPVIERLQRLEGKVDELGSKPPAIPVEKERSLLESWDRIKCIESDLERTKKPL

SEQ ID NO: 176426 - protein, 614 aa, Zea Mays
MSVRRRSTSMEGLLTLDDWKERRSDVDNSEDERRRLSIGSLKKKALNASNKLTHSLKKRGKRKVEHRASSFTIEDVRDEQEERAVFTFQQKLLDMNLLPDKHNDYHSLLRFLKARKFDTEKAIHMWAEMLQWRKESGADTILEDFSFEELDDVLCYYPQGYHGVDRQGRPVYIERLGKVEPNKLMHITTVDRYMKYHVQEFERAFRDRFPACSVAAKRHIDSTTTILDVDGVGLKNFSKTARDMLSRMQKIDSDYYPETLHQMFVVNAGSGFKLLWSSVKGFLDPKTASKIHVLGTKFQNKLLEVIDASQLPEFLGGTCTCAAVGGCMRSNKGPWNDPDIMKLAHNKEAKFTRHTRRLSEIEQGRSSFARLHLLKGRNSDTSTVESGSEIDDLGAPIMRSTVGCSRLAPVREEMQMRARDSAAYYSCDDHFVVVDKTVDYGRGGSPSDKSSASEVRTHVRPLDASTAAHVAGPSSNRRATVVPEEVSDEGVFRRFVRLLLAFIVKVFAFFHIVRSQQETRVNNLLPPAEPELISDDHPAVETFNVDHISPVIERLQRLEGKVDELGSKPPAIPVEKERSLLESWDRIKCIESDLERTKKVSFHQVCQFISICTW

SEQ ID NO: 176427 - protein, 485 aa, Zea Mays
MEGLLTLDDWKERRSDVDNSEDERRRLSIGSLKKKALNASNKLTHSLKKRGKRKVEHRASSFTIEDVRDEQEERAVFTFQQKLLDMNLLPDKHNDYHSLLRFLKARKFDTEKAIHMWAEMLQWRKESGADTILEDFSFEELDDVLCYYPQGYHGVDRQGRPVYIERLGKVEPNKLMHITTVDRYMKYHVQEFERAFRDRFPACSVAAKRHIDSTTTILDVDGVGLKNFSKTARDMLSRMQKIDSDYYPETLHQMFVVNAGSGFKLLWSSVKGFLDPKTASKIHVLGTKFQNKLLEVIDASQLPEFLGGTCTCAAVGGCMRSNKGPWNDPDIMKLAHNKEAKFTRHTRRLSEIEQGRSSFARLHLLKGRNSDTSTVESGSEIDDLGAPIMRSTVGCSRLAPVREEMQMRARDSAAYYSCDDHFVVVDKTVDYGRGGSPSDKSSASEVPQVTGELQLCLKRFQMKECSVALSDYFWPSLSKSLPSFT

SEQ ID NO: 176428 - protein, 117 aa, Zea Mays
MVEVIHNCSILATVGLRMASTPGVSATLFDALAKANINVRAIAQGCSEYNITIVLKQEDCVRALRAAHSRFFLSKTTLAVGIIGPGLIGRTLLNQLKDQVYKTKESLVFLYCRRSAS

SEQ ID NO: 176429 - protein, 349 aa, Zea Mays
MRSLTVASRHPGAAFSTRRRPLLHPAAAGRDSTFQRCWRWEKTQDSSFGSSLRTSRLPRTVHGDILKNLLAPTAGAVSVEQAEAIADLPKGEMWSVHKFGGTCMGTSERIHNVADIVLRDPSERKLVVVSAMSKVTDMMYNLVNKAQSRDDSYIAVLDEVFDKHMTTAKDLLAGEDLARFLSQLHADISNLKAMLRAIYIAGHATESFSDFVVGHGELWSAQMLSYAIQKSGTPCSWMDTREVLVVNPSGANQVDPDYLESEKRLEKWFSRCPAETIIATGFIASTPENIPTTLKRDGSDFSAAIIGSLVKARQVTIWTDVDGVFSADPRKGGGILFPICWLLPRLKYY

SEQ ID NO: 176430 - protein, 257 aa, Zea Mays
MWSVHKFGGTCMGTSERIHNVADIVLRDPSERKLVVVSAMSKVTDMMYNLVNKAQSRDDSYIAVLDEVFDKHMTTAKDLLAGEDLARFLSQLHADISNLKAMLRAIYIAGHATESFSDFVVGHGELWSAQMLSYAIQKSGTPCSWMDTREVLVVNPSGANQVDPDYLESEKRLEKWFSRCPAETIIATGFIASTPENIPTTLKRDGSDFSAAIIGSLVKARQVTIWTDVDGVFSADPRKGGGILFPICWLLPRLKYY

SEQ ID NO: 176431 - protein, 241 aa, Zea Mays
MWSVHKFGGTCMGTSERIHNVADIVLRDPSERKLVVVSAMSKVTDMMYNLVNKAQSRDDSYIAVLDEVFDKHMTTAKDLLAGEDLARFLSQLHADISNLKAMLRAIYIAGHATESFSDFVVGHGELWSAQMLSYAIQKSGTPCSWMDTREVLVVNPSGANQVDPDYLESEKRLEKWFSRCPAETIIATGFIASTPENIPTTLKRDGSDFSAAIIGSLVKARQVTIWTDVDGVFSADPRKGS

SEQ ID NO: 176432 - protein, 333 aa, Zea Mays
MRSLTVASRHPGAAFSTRRRPLLHPAAAGRDSTFQRCWRWEKTQDSSFGSSLRTSRLPRTVHGDILKNLLAPTAGAVSVEQAEAIADLPKGEMWSVHKFGGTCMGTSERIHNVADIVLRDPSERKLVVVSAMSKVTDMMYNLVNKAQSRDDSYIAVLDEVFDKHMTTAKDLLAGEDLARFLSQLHADISNLKAMLRAIYIAGHATESFSDFVVGHGELWSAQMLSYAIQKSGTPCSWMDTREVLVVNPSGANQVDPDYLESEKRLEKWFSRCPAETIIATGFIASTPENIPTTLKRDGSDFSAAIIGSLVKARQVTIWTDVDGVFSADPRKVV

SEQ ID NO: 176433 - protein, 474 aa, Zea Mays
MWSVHKFGGTCMGTSERIHNVADIVLRDPSERKLVVVSAMSKVTDMMYNLVNKAQSRDDSYIAVLDEVFDKHMTTAKDLLAGEDLARFLSQLHADISNLKAMLRAIYIAGHATESFSDFVVGHGELWSAQMLSYAIQKSGTPCSWMDTREVLVVNPSGANQVDPDYLESEKRLEKWFSRCPAETIIATGFIASTPENIPTTLKRDGSDFSAAIIGSLVKARQVTIWTDVDGVFSADPRKVSEAVILSTLSYQEAWEMSYFGANVLHPRTIIPVMKYNIPIVIRNIFNTSAPGTMICQQPANENGDLEACVKAFATIDKLALVNVEGTGMAGVPGTANAIFGAVKDVGANVIMISQQATWEVAVGSGRPRALAGDGAAALPGVVAGLLGPSGAVECCTGGRHVKTWPNRCGTDGAPSGADAGVPGTPGESLGDPGEVGATGVEEPGNTRGVRTSGTAGASRAAFGAVGALGAVAP

SEQ ID NO: 176434 - protein, 561 aa, Zea Mays
MRSLTVASRHPGAAFSTRRRPLLHPAAAGRDSTFQRCWRWEKTQDSSFGSSLRTSRLPRTVHGDILKNLLAPTAGAVSVEQAEAIADLPKGEMWSVHKFGGTCMGTSERIHNVADIVLRDPSERKLVVVSAMSKVTDMMYNLVNKAQSRDDSYIAVLDEVFDKHMTTAKDLLAGEDLARFLSQLHADISNLKAMLRAIYIESFSDFVVGHGELWSAQMLSYAIQKSGTPCSWMDTREVLVVNPSGANQVDPDYLESEKRLEKWFSRCPAETIIATGFIASTPENIPTTLKRDGSDFSAAIIGSLVKARQVTIWTDVDGVFSADPRKVSEAVILSTLSYQEAWEMSYFGANVLHPRTIIPVMKYNIPIVIRNIFNTSAPGTMICQQPANENGDLEACVKAFATIDKLALVNVEGTGMAGVPGTANAIFGAVKDVGANVIMISQQATWEVAVGSGRPRALAGDGAAALPGVVAGLLGPSGAVECCTGGRHVKTWPNRCGTDGAPSGADAGVPGTPGESLGDPGEVGATGVEEPGNTRGVRTSGTAGASRAAFGAVGALGAVAP

SEQ ID NO: 176435 - protein, 564 aa, Zea Mays
MRSLTVASRHPGAAFSTRRRPLLHPAAAGRDSTFQRCWRWEKTQDSSFGSSLSRLPRTVHGDILKNLLAPTAGAVSVEQAEAIADLPKGEMWSVHKFGGTCMGTSERIHNVADIVLRDPSERKLVVVSAMSKVTDMMYNLVNKAQSRDDSYIAVLDEVFDKHMTTAKDLLAGEDLARFLSQLHADISNLKAMLRAIYIAGHATESFSDFVVGHGELWSAQMLSYAIQKSGTPCSWMDTREVLVVNPSGANQVDPDYLESEKRLEKWFSRCPAETIIATGFIASTPENIPTTLKRDGSDFSAAIIGSLVKARQVTIWTDVDGVFSADPRKVSEAVILSTLSYQEAWEMSYFGANVLHPRTIIPVMKYNIPIVIRNIFNTSAPGTMICQQPANENGDLEACVKAFATIDKLALVNVEGTGMAGVPGTANAIFGAVKDVGANVIMISQQATWEVAVGSGRPRALAGDGAAALPGVVAGLLGPSGAVECCTGGRHVKTWPNRCGTDGAPSGADAGVPGTPGESLGDPGEVGATGVEEPGNTRGVRTSGTAGASRAAFGAVGALGAVAP

SEQ ID NO: 176436 - protein, 430 aa, Zea Mays
MINNISISNMEAKAKEFNEVIQEQYYPWFAQYMVMKRASIEPNFHDLYMNFFDKVNSKSLNKEILKATYENCKVLLRSDLIKSSSEERSLLKNLGSWLGKFTIGRNQALRAKKIDPKSLIVEACEKGLMIAVIPFTSKILEPCQSSIANRPPNPWTMGILSLLAEIYNLPNLKMNLKFDIEVLFKNLTVDIKDVKPTSLLKDHLREVEGNLDFSNKDVTASQTPVVAEVPSGTIPSLTHMEQQPEINITSRAMILPNILNQYAAPVRLPTNSTVEDDKVALMMPEQVPSLTQVSPAQTQSTSPSPFSVNQLMVAIPREEIRFKINPKLGSLGPQLQYSKIMDLALDKANREIILPVIQRSVTIASRTTKELILKDYALESDNNTITRSAHLMVGTLAGSLAHVTCKEPLRVALYSNLRNLIQNLMSDLKA

SEQ ID NO: 176437 - protein, 72 aa, Zea Mays
MHKRQDMFSSLKSKAKQMATSFNMSNFANREDLLGQSKKADDMSRVAGLDNQGIVVLQRQIMKGIVFLWFVQ

SEQ ID NO: 176438 - protein, 66 aa, Zea Mays
MDVIWFGKYPFGSGFEDGEHWFRWNFRISGLFSDNGYEYEYFVRISNSNTICLIFVGYRISGYFLG

SEQ ID NO: 176439 - protein, 141 aa, Zea Mays
MFVLIAPQNAVGNCIIDDMRAMTDAAGDRPVILVNPRLKDMPASSGVMQTMGRDIRLKYAASFETCYSFRLLYYAGSFYPIMGALRMAYPNKYEIYRRVDTLNGKENYILIAEFTNKPTPDEITSAFKGQKREEKASSGFW

SEQ ID NO: 176440 - protein, 531 aa, Zea Mays
MQPGGAASSTATGGRRRVSVQSTRSAGATPASSVWEARMKMDEVRGGVKVFSAGAADEPADEEGVRVYRRLRRNQSEGGGAGAADTAAKKRRSWKASKPVTAIGDLRKSRSDAAAAVTTATTTATAVVARRAVARVSMPEKKVAPAPAAAAGEVKEVVVVEVHKAAAADAKNVARGPDEELDDDDDDHDDGAEGELLDEEQETDEEEEKEMLDLQDHMAIDDDEQTAPHQVDDDDEQDLEPPTKAGIKPTLSVEEERATNPEPVKPPPPGKKLASVVDLRAVNPEPMTPAPPPVEKKATPIVVHRMTNFELAQSFPEKKALPAVGPRIPKTEPASSPPGGEEYEEIQGRPSQPSRSQARMQNIVNLVMWTDVSKSALVFGLGTFLLVSSSYAKDLNFNTITAASYAGLIYLGLRFLRKSILSRGESVECDDDGGVGGDRCCYLVGEEDAVWLLRLVLPYVNEVLLNLRSLFSGEPATTMKLALILFAMARCGNFVTLWTLAKLVFFGVFIIPKVCSSYSTQLARYGSGWRG

SEQ ID NO: 176441 - protein, 142 aa, Zea Mays
MATGDESETAVRASEELRDWSDMTPVCLAEAFSRLALEDLWRGAMPCCRSWRDAARSRPGLFAVLDLEPGFAESTPGAEAAAWWTPSFQRRVDAMVRSAATFAVGELCEIHVRHCSDDALAFAAERRIRLSEMMRMQLDAPP

SEQ ID NO: 176442 - protein, 132 aa, Zea Mays
MATGDESETAVRASEELRDWSDMTPVCLAEAFSRLALEDLWRGAMPCCRSWRDAARSRPGLFAVLDLEPGFAESTPGAEAAAWWTPSFQRRVDAMVRSAATFAVGELCEIHVRHCSDDALAFAAERIAKQGM

SEQ ID NO: 176443 - protein, 189 aa, Zea Mays
MLDPWFKIKGLVGANQVLAYFAVSKVGEPPVDGITDTNPEGLTAAFGSWAPAVAARLQNGGLTCKVLEKEAFQKQMLEKLIWISAFMLVGARHPGATVGVVEKNYRSEVASLIAELASAAAAEEQLTFAEGMEDRLCAYSRAVAHFPTAVKEFKWRNGWFYSLTEKALAAGKPDPCPLHTAWLKEIRVI

SEQ ID NO: 176444 - protein, 715 aa, Zea Mays
MPAAGSRRFTRVFMPKAPKPPQSQDQADRATRVLRSGKRLAADRIRWDAKEAAAFHVDINHGHVQKRQKEDFPKPGLPPLTKSFGIVYRRKRRRRRHPTAEVVPEDEDGIRRFGIVYTRKKGKRSKVSPLLLPQEPEAPCDLAAAIPCSSSREFASRTGFLDAHFSALVDGVSTHSGVQTLVVLVDTSCSGSSHRLLGFLLPVLWWMRHSRQRGKFQNLATFILSAGVAVAFASHGVHFVKLQSASALLHRPLAHCGWCALHGSTKSEPLFWLLVGGSEEIYPHTPLYVDSGAQSSGFATTNMDSNEPCRVVPNYMPLEQGAGLVVHGLRLKKHQRRRRTMRHPQNWRCLIARLPYNGIGMKQSTSAMQTGVKLRSSRQESPVEPVQPKAALGISLDLLENMDESDVSTPMGSTRRKRSLKSPVERMNEKLALAEVRQDIDSVHSKANLLVFQADRCWREEGAEVMLELSETNKWCIVVKIQGVTRYLLKPSDMRSYVINRHTQAYMWTVDDAWKLEFTDRWDWLLFKELHVVGCERNSQGKAIPIPGVHEVSGEMEGIVTDPFLRPVPDYIRMVDDEVGRALSRDSIYDMDSEDEQWLIQLNHSDSDPNSSQRNHISYEDFEVLISIFEKDAYNNPQGKNDLSELLSRYPALLKDDNVHAVYGYWTSKRSKRAAPLLRVFQVILWGLSYPFPCSSILCYIVSLFYCLALFTPSN

SEQ ID NO: 176445 - protein, 204 aa, Zea Mays
MADSPSFRRYPLASSVDLVRWLPSSSISPSGRLLAAAVHDPTSGSFASSIRLLPLSDPVSRLASVPLPSRATALRCSNAALAAATSSGSLHFVPSSFDSDAAVSVPGGAGFHVGPVRGLDCGGEEWVTAGEDGRVHVVGGVADGRVVTRRVWDGKGMSGYEAARWASPVEFATGGAGCGVQWWDRRKGDAIVAQCNGICTGAVA

SEQ ID NO: 176446 - protein, 98 aa, Zea Mays
MREQRVVRVARGMQPRRRAGRKRRSLLLAAGGGGRCAAMAAARRMVRARLRVLRSLVPGAEAMRGLSLLSETLDYVACLKTQVELMQCLCKGPCSLLR

SEQ ID NO: 176447 - protein, 306 aa, Zea Mays
MESLMVVSPPLHLAALHGHAESVQLLLDLGASVSEVTVNDGSTIDLIEFKQFANPHLLISAKQLLIAAGANMGAQNVNGLTPLLVARSWHKTSIEGILSKQPENRMRILPSPYLCLPLMSIVKIARECGWRKTSASSTCQDPCVICLEVECTVAAEGCGHEFCTKCALYLCSTTSSSTSTRGVPGSISCPLCRHAIVSFMRLTSTTPIKELPWTSASLALCAAGSNTGRPEHGGSLHRRPDLRRLRSISVQLGCSSFRSIGSGKLSSMKLNCTGAEEAVPCLVSCLRPDVQRSSSYRGRIRRYSEF

SEQ ID NO: 176448 - protein, 235 aa, Zea Mays
MGAQNVNGLTPLLVARSWHKTSIEGILSKQPENRMRILPSPYLCLPLMSIVKIARECGWRKTSASSTCQDPCVICLEVECTVAAEGCGHEFCTKCALYLCSTTSSSTSTRGVPGSISCPLCRHAIVSFMRLTSTTPIKELPWTSASLALCAAGSNTGRPEHGGSLHRRPDLRRLRSISVQLGCSSFRSIGSGKLSSMKLNCTGAEEAVPCLVSCLRPDVQRSSSYRGRIRRYSEF

SEQ ID NO: 176449 - protein, 80 aa, Zea Mays
MLGGCLNPRRSSFFLWHQVLWVILFICYNLHPITPICSFCPSVWLCCNLMLKGGPSTAIEPTVYNRKVPGSSPSLCILCG

SEQ ID NO: 176450 - protein, 367 aa, Zea Mays
MGSRFPSHQLSNGLYVSGRPEQPKEKSPVICSSAMPYTGGDIKKSGELGKMFDLHRKSGPLGNQTSRNTSFGGAASNSGPVSNAVGRSNYSGSISSAIPNTGGSSRTKTNSGPLNKHGEPTKRSSGPQSGGVTPMARQNSGPLPPVLPTTGLITSGPITSGQLNSSGAQRKVSGPLDSSVSMKMRTTSFAHNPAVTNLNVGDGYSIKGSIPTTIIWLVALLFLVGFVAGGFILAAIHNPILLIVVVVIFGFVAALVTWNICWGTRGVIDFIGRYSDVDLRTAKDGEYVKVTGVVTCGNLPLESSFQRVPRCVYTSTCLYEYRGWDSKAANATHRRFTWGLSGTRWTSTSPISSPGCEHWSGQDPARA

SEQ ID NO: 176451 - protein, 330 aa, Zea Mays
MTPLMFALHHEGNKAIVKYLINNHADPNKGANSGIAPLHIAATEGYYEIVEYLLSRGADVDPLSQDGESPLFCAVFHGHERIVTLLLKHGADYNRVSNLMVTPLLVSLHGSSLDCLEILIEAGADINGAGCSVPPVALAAYKGLDGCIQCLLRNGANPNVPDEDNNIPIQIAAFKGWEKCVEILLPHAPHLPQYEGLSISEIIHWERTERFRRSSSAIEQGDVAYWKKEHDIALRFYNEAAQVGHEVATLYAKKSLCYLHLRDPAKFIDEAINYINMVQPDLSTLNPESDAKKLVLEFGRTWKAPGSSSRQDSGSSPTNKTGETSSREHQ

SEQ ID NO: 176452 - protein, 82 aa, Zea Mays
MESGWQVRTSEELEEDGVSTGENLLFSTPVAVSCVCVDVATAASHRRHLALSTLARGFFPRRGDEGCFPTRVELGIVRVGRS

SEQ ID NO: 176453 - protein, 132 aa, Zea Mays
MRLIRMGIRKVMKIWDMIYGKKHDLDRVCATRHQRFFFDATSAQGDWGSLAVKLWASIGCAGLISRVKHSRARKYQHQQNFILKRFHLLNSRLFGRGVFFMSRTNNTFFFATRVEQLPYHLDSQTRETHITT

SEQ ID NO: 176454 - protein, 182 aa, Zea Mays
MSAAEAKAAAVPESVLRKRKREEQWAADKKEKALADRKKALESRKIIFARAKQYAEEYHAQEKELVQLKREARLKGGFYVSPEAKLLFVVRIRGINAMHPKTRKILQLLRLRQIFNGVFLKVNKATINMLRRVEPYVAYGYPNLKSVRELIYKRGYGKLNKQRIPLSNNSVIEESLFYFLCV

SEQ ID NO: 176455 - protein, 243 aa, Zea Mays
MSAAEAKAAAVPESVLRKRKREEQWAADKKEKALADRKKALESRKIIFARAKQYAEEYHAQELVQLKREARLKGGFYVSPEAKLLFVVRIRGINAMHPKTRKILQLLRLRQIFNGVFLKVNKATINMLRRVEPYVAYGYPNLKSVRELIYKRGYGKLNKQRIPLSNNSVIEEGLGKHNIICIEDLVHEIMTVGPHFKEANNFLWPFKLKAPLGGLKKKRNHYVEGGDAGNRENYINELIKRMN

SEQ ID NO: 176456 - protein, 148 aa, Zea Mays
MHPKTRKILQLLRLRQIFNGVFLKVNKATINMLRRVEPYVAYGYPNLKSVRELIYKRGYGKLNKQRIPLSNNSVIEEGLGKHNIICIEDLVHEIMTVGPHFKEANNFLWPFKLKAPLGGLKKKRNHYVEGGDAGNRENYINELIKRMN

SEQ ID NO: 176457 - protein, 55 aa, Zea Mays
MCCVKDTRFPTTPRSSRESSTGSPAGTTPPTLSPSRPQRRPSPTWSAGSTSTSTE

SEQ ID NO: 176458 - protein, 85 aa, Zea Mays
MATQSPHVLVVDHSRVDCLVASIVLNSFNIRVTVAGGAMEALEFLDANNSHVDLILTDYCMPDMTGYDLLREVKTKAHSSGDYMH

SEQ ID NO: 176459 - protein, 294 aa, Zea Mays
MGFLLFCCAISHIYLYGGQVTSWKNDNGEELLFLSSKAIFKPPKAIRGGIPICFPQFGTHGNLEQHGFARNRFWTIDNNPPPLPVNPAIKAYVDLILKPSEEDLKIWPHSFEFRLRVSLGPSGDLSLTSRIRNTNTDGRPFSYTFAYHTYFSVSDISEVRVEGLETMDYLDNLKAKERFTEQGDAIVFESEVDKVYLAAPSKIAIIDHEKKRTFVVTKEGLPDAVVWNPWDKKAKAMQDFGDAEYKSMLCVEPAAVERPITLKPGEEWKGRLVLSAVPSSYCSGQLDPSKVLQG

SEQ ID NO: 176460 - protein, 446 aa, Zea Mays
MVGGGNEFRFFLSCDISHPLAFRVLHAEHILLTDQKVPELFVECKLYIDGIQFGLPVKTRLEPSGPKYCWNELITLSTKYRDLTSLSQLAFTVWDVSSGENPEVVGGATIFLFNSKRQLKTGRQKLRLWPTKEADGGVPTTTPGKVPRNERGEIERLERLVNKYERGQIQHVDWLDRLAFSAMDKAMEKECERKANLYPSLVVELCSFEHRIVFQESGANFYTPAPVSLSNELVTVWDPELGRTNPSEHKQLKLARSLTRGIVDRDLKPSSNERKLLQTIIKFPPTRTLEVDEKQLVWKFRFSLMSEKKALTKFVRSVDWSDNQEAKQAVELIGKWEMIDVADALELLSPDFESDEVRGYAVSVLERADDEELQCYLLQLVQALRFERSDKSRLALFLVNRALSNIEIASFLRWYILVELHSPAYARRYYGTYDMLENSMMKGGWG

SEQ ID NO: 176461 - protein, 621 aa, Zea Mays
MDKAMEKECERKANLYPSLVVELCSFEHRIVFQESGANFYTPAPVSLSNELVTVWDPELGRTNPSEHKQLKLARSLTRGIVDRDLKPSSNERKLLQTIIKFPPTRTLEVDEKQLVWKFRFSLMSEKKALTKFVRSVDWSDNQEAKQAVELIGKWEMIDVADALELLSPDFESDEVRGYAVSVLERADDEELQCYLLQLVQALRFERSDKSRLALFLVNRALSNIEIASFLRWYILVELHSPAYARRYYGTYDMLENSMMKLVGREDGDEDGFRLWQSLTRQTDLTAQLCSIMKDVRNVRGSAQKKIEKLRQLLSGVFSELTNFDEPIRSPLAPTLLLTGVVPQESSIFKSALNPLRLTFKTANGGTSKIIYKKGDDLRQDQLVIQTVSLMDRLLKLENLDLHLTPYRVLATGQDEGMLEFISSSSLAQILSEHRSITSYLQKFHPDEDGPFGITAQCLETFIKSCAGYSVITYILGVGDRHLDNLLLTDDGRLFHVDFAFILGRDPKPFPPPMKLCKEMVEAMGGAESQYYTRFKSYCCEAYNILRKSSSLILNLFKLMERSGIPDISADESGGLKLQEKFRLDLDDEEAIHFFQDLINDSVSALFPQMVETIHRWAQYWR

SEQ ID NO: 176462 - protein, 159 aa, Zea Mays
MRELGSSLSPPSVTVLTIAAHELRCRTRRSARTERPRIVAVQVAAITVAQPQPPQRPRRGAPSGVAAVAATPAPAPQRKKQQQQVRWHDMAFGTVRLPAATSMGEIRRRLRARQALQAGGAANEPSSSAAAWAPWRLIRSLSCRGVEAVSAAAAPVRLV

SEQ ID NO: 176463 - protein, 182 aa, Zea Mays
MDPSSKLLLEEIDKKLVAMDLKWEQRFGDFNRAKEDRLTALENSCAEFDNWRPKVDAAMEDVKLELHKMNKQWDHAARYMAGADSGILGKPDPLLDPRQQAPTHDGPIGHRDESRHREQGYGSVTFTPGPVKGLSQLLIQWSGMPTLLATWEDELLLRQKFPYAPAWGQAAFHRRGIVTDTT

SEQ ID NO: 176464 - protein, 832 aa, Zea Mays
MDELAGASWFSTLDLLSGYHQVRLKPGEEFKTAFQTHHGQYEFLVMAFGLCGAPGTFQSAMNTTLAPLLRKCVIVFFDDILIYSATLDDHLDHLQQVLTLLQQDTWFVKMSKCKFAQRKISYLGHVISEEGVATDEAKVEAVLSWPIPNNAKDLRSFLGLAGYYRKFVKHFAIIARPLHNLLKKGALFVWTQDHQLVFSTLKQALVSAPVLALPNFAKPFCLETDACKNGVGAVLMQEGHPLAFHSKPLGTKTQGLSTYEKEYLAILMAVDQWRHYLLHAEFIIFTDQKSLIHLSDQRLNTPWQQKVFTKLLGMQYKIVYKQGSDNRVADALSRRAHDIPTVLAISVCSPQWCQNIIDGYLQDEEAKQLLAKLIVDGSSVPHFSLQDGIIKFNNKIWVGNNRPMHQAILEAMHSSAVGGHSGFPVTYHKLKQLFAWSGMRKFAKHFVASCSVCQQSKPERVKYPGLLQPLSVPAGAWQTVTLDFVEGLPNSGNKNCVMVVVNKFSKFSHFIALKHPFSALVVAKHFMQHIYKLHGMPTAIVSDRDRIFTSQLWQALFKLADVKLHMSSSYHPQTDGQTERVNQCMETFLRCFVNACPSKWIDWLYLAEFWYNSCKHEALGLSPFEVLYGYSPKPFGLNAVDNSQNPSLDEWLQDKAVITTLVQQHLHRAQLRMKAQADKNRSERVFAVGDQVYLRLQPYIQSSLAPRSNQKLAFRYFGPFTVLNKGCLNCSSSGQACLLCWPPGKMNCYCARNFHMLLLGGKQPFIAGGLLQTLPRFVWWKADQRLKKAVFRDRSQSSQAATRSTGCQNASGSPMSVFQAQNGVCKVLRVCA

SEQ ID NO: 176465 - protein, 611 aa, Zea Mays
MSGAPKRLLEEGSHSTPTKRPLDDSSLYSSPGKFIQSGGSDFHGSSEHDGRFAKFQRVESRDDKRPSVHRMPVGSTNFAVHPISSDSRLESKQNKDARDSKADDRETKVDARDVHSDSRIEFQANKIESDVKVDNRADESEIRADRRGHPDYRTDIKFGKDSHSTVPANINWKDNKEHRGKRHFEPPADTVDWRLPRPSLQSIDEAPKGPISVEGRNSKDTNESAGDYKAEPKNEDRFRDKDRKKKDEKHRDFGAREGDRNDRRTGVPLGSSGVERREMQREDRDAEKWDRERKDSLRDKEGNDREKDSARKDSSVVIAKDNPILEKASSDGAVKSAEHENTTTESKAPKDDVWKAHDRDPKDKKREKDVDAGDWLEQRNKYNDKELDDNAIEGDMEKDKDVFGSVQRRRMVRPRGGSQVSQREPRFRSRMRDGEGSQGKSEVSAIVYKAGECMQELLKSWKEFDVTQDATIAESLQHGPTLEIRIPAEFVTSTNRQVKGAQLWGTDIYTNDSDLVAVLMHTGYCSPTSSPPPSAIQELRATVRVLPPQESYTSTLRNNVRSRAWGAGIGCSFRIERCCIFKVVAPLVLSHALATCQLWSLLSPQLQLSVQ

SEQ ID NO: 176466 - protein, 461 aa, Zea Mays
MSGAPKRLLEEGSHSTPTKRPLDDSSLYSSPGKFIQSGGSDFHGSSEHDGRFAKFQRVESRDDKRPSVHRMPVGSTNFAVHPISSDSRLESKQNKDARDSKADDRETKVDARDVHSDSRIEFQANKIESDVKVDNRADESEIRADRRGHPDYRTDIKFGKDSHSTVPANINWKDNKEHRGKRHFEPPADTVDWRLPRPSLQSIDEAPKGPISVEGRNSKDTNESAGDYKAEPKNEDRFRDKDRKKKDEKHRDFGAREGDRNDRRTGVPLGSSGVERREMQREDRDAEKWDRERKDSLRDKEGNDREKDSARKDSSVVIAKDNPILEKASSDGAVKSAEHENTTTESKAPKDDVWKAHDRDPKDKKREKDVDAGDWLEQRNKYNDKELDDNAIEGDMEKDKDVFGSVQRRRMVRPRGGSQVSQREPRFRSRMRDGEGSQGQSNIYIFIAEYNVYWCFPLELE

SEQ ID NO: 176467 - protein, 115 aa, Zea Mays
MGAGGDVHARSGIPMAKTKEHDSNKKSWLVRWGEAEKEKSTSSNTTCWETIMRLEEGSIHQYPLRSKEYLRKTHQVEGSASLWGASTEGWDSGRNQKRGGVRKRGRTTPHGGRRC

SEQ ID NO: 176468 - protein, 78 aa, Zea Mays
MVEDYDLQVIISKQADEYMNMAGPAFSSPLAIREIQKKSPSKFHYLINHLSFVWLATIIQLLFSFFSSLVGCIWWPCI

SEQ ID NO: 176469 - protein, 69 aa, Zea Mays
MPTSCLAEYRRSDLDASATLSSPHKRPPAFTGNTVLDLGENLLSGVLHPTLFDNLTSLLKCKICYSLVI

SEQ ID NO: 176470 - protein, 101 aa, Zea Mays
MGESDTTKCLTAGSLGTRWVTPRTTARWRRIWMPTSCLAEYRRSDLDASATLSSPHKRPPAFTGNTVLDLGENLLSGVLHPTLFDNLTSLLKCKICYSLVI

SEQ ID NO: 176471 - protein, 95 aa, Zea Mays
MPTSCLAEYRRSDLDASATLSSPHKRPPAFTGNTPIMSRREISSRRGSSRILQSCSIFFQVLDLGENLLSGVLHPTLFDNLTSLLKCKICYSLVI

SEQ ID NO: 176472 - protein, 65 aa, Zea Mays
MCRGKPQEHALARWAAAQEETRSCTLAQPPPPQLESVPAERIISSTNSTSNPTRTFPGDHRPCCL

SEQ ID NO: 176473 - protein, 76 aa, Zea Mays
MDFFGAAIGWGFNWKIALFLLAAVPELSTVHEEALDDADIDPITWTSSSGPASSSNTSSSKGLGKAHRWVERPQNA

SEQ ID NO: 176474 - protein, 60 aa, Zea Mays
MVALWRQVNRTSWHQYNLWRKLPKIVISICVVLHPLLSTFACLPLSIKFPSVCESAKQSL

SEQ ID NO: 176475 - protein, 63 aa, Zea Mays
MNCSTAETSPVKPAPSATATLFWHWLKLNASPGTPSWTSSEMSADDTAFLDSLSLFLQHGQKQ

SEQ ID NO: 176476 - protein, 991 aa, Zea Mays
MEHKFYYRYLPLNRLVFSAEPGQQAAAAAARSPMDAPAPTRGPASFLTQANALLRKNLCFQKRNLKTNIGITLFPVLLCVILVVLQGVIDRELDKPKYRCGCVCVDPGPAAVGDACRRTECGVQHSTLDQVGSCPIPNPTPWPALVQVPRPESRAVRTAGQPFDGLPDPTCRDTGSCPAAVLVTGSNRSLAQSLSVGLFPASTSSLNLTDYLDALSKIVAGSDTWPWTTELIESAFIPGNNLYLVQPRCLSNLTQTVSSNAGAIPLQLNIDCVQGLPLWRESASVVNDELFKGYRQNGGGSGGGKTNEFVAGYDFLNTNTNGLEMNIWYNSTYNNNTAYVPISLLRVPRLVNAASNEYIKFLKGSGVEMFLQYVKEMPKVGTKLKFDLSSLLGALFFTWIVELLFPVILTYLVYEKQQKLKIMMKMHGLKDGPYWLISYAYFFALSATYMILFVIFGSLIGLDFFRKNAYSIQFVFYFIYINLQISLAFLVSSFFSSVKIATVVGYIYVFGSGLLGEFLLRFFVEDTGFPKGWVVVMEIIPGFSLYRGLYEFGQYASAGNSMGTTGMKWSNLDDSLNGMRVVLIIMVVEWAIVLPLAFYVDQVSPLGGGFRKNPFFFLGCFKKSPLSLRRYSFGRQGSKVVVEMDNPDAVQEREVVEQLLLEPIANQAILSDNLKKVYHGKDGNPDKLAVRGLSLAIPKGQCFGMLGPNGAGKTSFISMMIGLIPPTSGTAYVHGMDIKTNMDAIYTTMGVCPQHDLLWETLTGREHVMFYGRLKNLKGTELLKAVDDSLKSVNLFHGGVGDKQVGKYSGGMKRRLSVAISLIGDPKVVFMDEPSTGLDPASRNNLWCVVKEAKKNRAIILTTHSMEEAEVLCDRLGIFVDGGFQCLGNPKELKARYGGTYVLTMTTPSENEQEVEQLVHRLSPNASRIYHISGTQKFELPKQEVKVADVFHAVESAKRRFSIYAWGLVDTTLEDVFIKVAKGAQAFSVVA

SEQ ID NO: 176477 - protein, 530 aa, Zea Mays
MANTSGTRPHTGAQQWLSLRETMTRANATYIDCVQGLPLWRESASVVNDELFKGYRQNGGGSGGGKTNEFVAGYDFLNTNTNGLEMNIWYNSTYNNNTAYVPISLLRVPRLVNAASNEYIKFLKGSGVEMFLQYVKEMPKVGTKLKFDLSSLLGALFFTWIVELLFPVILTYLVYEKQQKLKIMMKMHGLKDGPYWLISYAYFFALSATYMILFVIFGSLIGLDFFRKNAYSIQFVFYFIYINLQISLAFLVSSFFSSVKIATVVGYIYVFGSGLLGEFLLRFFVEDTGFPKGWVVVMEIIPGFSLYRGLYEFGQYASAGNSMGTTGMKWSNLDDSLNGMRVVLIIMVVEWAIVLPLAFYVDQVSPLGGGFRKNPFFFLGCFKKSPLSLRRYSFGRQGSKVVVEMDNPDAVQEREVVEQLLLEPIANQAILSDNLKKVYHGKDGNPDKLAVRGLSLAIPKGQCFGMLGPNGAGKTSFISMMIGLIPPTSGTAYVHGMDIKTNMDAIYTTMGVCPQHEKRACNVLWETEES

SEQ ID NO: 176478 - protein, 927 aa, Zea Mays
MESRRSRGLARFSRQRRNARTNAAIAAFPVLLCVLLVSIQHVVDSELERPPFRCGCAGADQCGIQHSTPIQALACAVPVPPRWPALLQVPATEARALTRLRPRPCKAPENCPATVLLTGQNRLLAQGLGSLLFPPLPPQYARRMPGAAAAASNSSDYLDLFSAVVPGSSSLPAHVLFIEPGLVPEETLYLLQPNCWSETRNISAHFDGIPIESELQCVQALSSWCDNSSVINRQMFMGYKGGDRRRRSNEFLAGYDFLDTSKRRFHVYVWYNSSFSRDNGHHSMTVLRVSRLVNMASTAYLNLLLKGGTTEMRLEFLKEMPKAAIKMRLDLTTLLDALFFTWTVQLLLPVMLTYLVYEKQQRLRLMMKMHGLKDAPYWLISYAYFLALSAAYMAFFTISGSIIGLDIFRLNSYGIQSLFYFVCINLQIVLAFLLATFFSSVRTASVIGYMYVFGSSLLGEALLKVFIEDATFPRRWLVAMELVPGFSLYRGIYELAEYAAAGRNMGKPGMRWGDMDDPVNGMRGVLVVMSVEWIVLLLVAFLLDRRPAWQPLFLFGFLSTKHSSPSERQKKESRRVHVYGTKPDVSLERKVVRRLLKDMDMGDMIICNNLKKVYPGKNGNPDKHAVRGLSLALRKGQCFGMLGPNGAGKTSFINMMIGLVKPTYGTAYVHGMDLRTEMNEIYTSIGVCPQHDLLWEPLTGREHLMFYGRMKNLTGAALTQAVEDSLKSVNLFHSGFGDKSVSKYSGGMKRRLSVAVALIGSPKVVYMDEPSTGLDSRSRSDLWSIIRRAKKDCTIILTTHSMEEAEQLCDRIGIFINGSFHCIGTPKELKARYGGTRILTITTSPEHEEAVELIVSRLAPGYSRIYSVSGTQKFALPRREVGLGCVFGAVEVARREFPVLGWGVADATLEDVFVRVAKEARAFHVLS

SEQ ID NO: 176479 - protein, 768 aa, Zea Mays
MESRRSRGLARFSRQVHALFLKNLSFQRRNARTNAAIAAFPVLLCVLLVSIQHVVDSELERPPFRCGCAGADQCGIQHSTPIQALACAVPVPPRWPALLQVPATEARALTRLRPRPCKAPENCPATVLLTGQNRLLAQGLGSLLFPPLPPQYARRMPGAAAAASNSSDYLDLFSAVVPGSSSLPAHVLFIEPGLVPEETLYLLQPNCWSETRNISAHFDGIPIESELQCVQALSSWCDNSSVINRQMFMGYKGGDRRRRSNEFLAGYDFLDTSKRRFHVYVWYNSSFSRDNGHHSMTVLRVSRLVNMASTAYLNLLLKGGTTEMRLEFLKEMPKAAIKMRLDLTTLLDALFFTWTVQLLLPVMLTYLVYEKQQRLRLMMKMHGLKDAPYWLISYAYFLALSAAYMAFFTISGSIIGLDIFRLNSYGIQSLFYFVCINLQIVLAFLLATFFSSVRTASVIGYMYVFGSSLLGEALLKVFIEDATFPRRWLVAMELVPGFSLYRGIYELAEYAAAGRNMGKPGMRWGDMDDPVNGMRGVLVVMSVEWIVLLLVAFLLDRRPAWQPLFLFGFLSTKHSSPSERQKKESRRVHVYGTKPDVSLERKVVRRLLKDMDMGDMIICNNLKKVYPGKNGNPDKHAVRGLSLALRKGQCFGMLGPNGAGKTSFINMMIGLVKPTYGTAYVHGMDLRTEMNEIYTSIGLAVGASDRTGASDVLWPDEESHRCCSNTGSGGLPEEREPIPQRLRRQICEQVQRRDEEEAQRRRRSHRQP

SEQ ID NO: 176480 - protein, 258 aa, Zea Mays
MRTAPPPPPPPPPFSRLLPLSSRFPRLAALYLCGALPLSYNPRAGSGEIRPNSMGLEMVEVMSETVPTVVPAAARENGVDIYPLSRYYFGARDAAGVPRGLETAADRALRLKANFAAHGLRTSVHGVLLVELFDHPHVLLLQVRGLKRKLSSKLSVVDDVEAVEEEDWQIGQCIGMWWRSEFEAIPFPYMPPRFRAAKECMKLFLIRLPMSRQFIVPRNMKLLAVPLSQIHGNAQVYGPIIAAIPSLLSKFSFNVISD

SEQ ID NO: 176481 - protein, 83 aa, Zea Mays
MWWRSEFEAIPFPYMPPRFRAAKECMKLFLIRLPMSRQFIVPRNMKLLAVPLSQIHGNAQVYGPIIAAIPSLLSKFSFNVISD

SEQ ID NO: 176482 - protein, 377 aa, Zea Mays
MGAVIPRSLSYSYDDDAPDLGVVRGSTTIAIAAACAIWRARGETMTSSVSPAAAASQPQLHITTTGTSTGSTAIISPSSNQSTSNARSSSPHSTSSPPRGPSTTGGTGSGGGSGSGCTNQACAACKYQRRKCNTDCPLAPYFPADQQERFLNSHRLFGVRKILKTLENTSPELSANAMATLIFQSDMRAQDPVGGCYHLILSLERQLQIEMAEHSAMVQRLALFRQAATTMPPDQGGGTVGLDYTASSKQPLFHNAQQEVVYALYKNNHGGGHGPNKDDHGGQQHQHFDENCQIDHKDYFEIKAAALVDDAFDMRQEVVDVCAEVDMDTKTVDVNAGIGGVDIKAMGMNANVDVNVSTPQMAAESSHCRLGLGFSSF

SEQ ID NO: 176483 - protein, 58 aa, Zea Mays
MPSLVDSIIFLTLTRLVVVIIFENFSFALFTPPLGDYQTCYQDADKSSGTATLGCLRQ

SEQ ID NO: 176484 - protein, 134 aa, Zea Mays
MRAGGMLCRSQAATAVCVPGDARSMVVARRAADRTRDSDDARALHDVRYARLGAGAGDGGRRTSASRRFSAPSRAAAPPPTATAATASCKPRVERPRRAPVAVTLPMVTVMGHVSPAGVLESISKVKKAELLLA

SEQ ID NO: 176485 - protein, 308 aa, Zea Mays
MIGLTEAVAIGRTFAAMKDYQLDGNKEMVALGTMNIVGSMTSCYIATGSFSRSAVNFMAGCRTPVSNVVMSTVVLLTLLLITPLFKYTPNAILGSIIISAVIGLVDYEAAILIWKVDKMDFVACMGAFFGVVFKSVEIGLLIAVSISFAKILVQVTRPRTVLLGNLPGTTIYRNTEQYPHARHVPGVVIVRVDSAIYFSNSNYVRERILRWLTDEEDRVSAEGLPRISFLVVEMSPVIDIDTSGIHALEDLYKNLQKRGIQLLLSNPGSAVIEKLQSSKLTEHIGNGHIFLTVADAVRFCTSKSMQEP

SEQ ID NO: 176486 - protein, 544 aa, Zea Mays
MARAAARLLPIFLPWRRPPPPCLLRRGFLNPSSPRTSARVDTLVLPGDERLPFPSPPRLPNQLRPDYGSGGGGGAPSTIAAIVTSLGGGPAAVGIVRISGPDAVAVADRVFRPAGTRRASTPWQPRSHFVEYGLALDADGSVIDEVLVVPMLSPRSYTREDVVELQCHGNDLCLRRVLRACLEAGARLADPGEFTLRAFLNGRLDLAQAENVSRLISAKSAAAADSALAGIQGGFSTLVKSLRSRCIELLTEIEARLDFEDEMPPLDPVMLVSKINCMRKEVQDALDTSNYDKLLQSGLQIAIIGRPNVGKSSLLNAWSKSERAIVTEIAGTTRDVVEANVSINGVPVTLLDTAGIRETDDVVEKIGVKRSEAAAMGADLIVMAISAVDGWTDDDTKLMEHVSVNRSSGSAVPMVLVINKVDCAPFVPGEQFKQFSGLFRKHVQTCAVTGKGISDLESAVIEVRGIEHVPSEGRRWTVNQRQFEQLLRTKEAFARLESSINEQLPMDFWTVDLREAALALATISGEDISEEVLSSIFSKFCIGK

SEQ ID NO: 176487 - protein, 699 aa, Zea Mays
MVSKSYSNLLDMTPGDGFDFRRPFKSLPRVVTSPSIISDHDWDSISDGDSVGSAFSIERKIIVANFLPLNCTRDETGELSFSLDHDSLLMQLKDGFSNETDAVYVGSLKVHVDPREQDQVAQKLLREYRCIPTFLPSDLQQQFYHGFCKQQLWPLFHYMLPICLDKGELFDRTLFQAYVRANKLFADKVMEAINTDDDYVWVHDYHLMLLPTFLRKRLHRIKIGFFLHSPFPSSEIYRTLPVRDEILKSLLNADLIGFQTFDYARHFLSCCSRLLGLHYESKRGYIGIEYFGRTVSLKILSVGVHVGRLESVLKLPATVSKVEEIEQRYKGKILMLGVDDMDIFKGISLKLLALELLLDRNPKLREKVVLVQIINPARSTGKDVQEAITEAVSVAERVNTKYGSSSYKPVVLIDNRIPFYEKVAFYAASDCCIVNAVRDGMNLVPYEYTVCRQGNEEIDRVRGLDKDTHHTSTLIVSEFVGCSPSLSGAFRVNPWSVDDVADALCRATDLSESEKRLRHEKHYRYVSTHDVAYWAHSFAQDLERACRDHYSRRCWAIGFGLNFRVIALSPGFRKLSSEHFVSSYNRASRRAIFLDYDGTLVPQSSINKAPSEEVISILNTLCNDPKNVVFIVSGRGRDSLDEWFSPCEKLRLAAEHGYFIRWSKEAAWESSYSSPRQEWKHIAEPVMQTMISVPSKRRS

SEQ ID NO: 176488 - protein, 662 aa, Zea Mays
MVSKSYSNLLDMTPGDGFDFRRPFKSLPRVVTSPSIISDHDWDSISDGDSVGSAFSIERKIIVANFLPLNCTRDETGELSFSLDHDSLLMQLKDGFSNETDAVYVGSLKVHVDPREQDQVAQKLLREYRCIPTFLPSDLQQQFYHGFCKQQLWPLFHYMLPICLDKGELFDRTLFQAYVRANKLFADKVMEAINTDDDYVWVHDYHLMLLPTFLRKRLHRIKIGFFLHSPFPSSEIYRTLPVRDEILKSLLNADLIGFQTFDYARHFLSCCSRLLGLHYESKRGYIGIEYFGRTVSLKILSVGVHVGRLESVLKLPATVSKVEEIEQRYKGKILMLGVDDMDIFKGISLKLLALELLLDRNPKLREKVVLVQIINPARSTGKDVQEAITEAVSVAERVNTKYGSSSYKPVVLIDNRIPFYEKVAFYAASDCCIVNAVRDGMNLVPYEYTVCRQGNEEIDRVRGLDKDTHHTSTLIVSEFVGCSPSLSGAFRVNPWSVDDVADALCRATDLSESEKRLRHEKHYRYVSTHDVAYWAHSFAQDLERACRDHYSRRCWAIGFGLNFRVIALSPGFRKLSSEHFVSSYNRASRRAIFLDYDGTLVPQSSINKAPSEEVISILNTLCNDPKNVVFIVSGRGRDSLDEWFSPCEKLRLAAEHGYFIRL

SEQ ID NO: 176489 - protein, 219 aa, Zea Mays
MKALSMLEHLVEPDHRRVVELNFRICLVYELVSKIRDAISYCAKAISLCKSRIQNLKSSKDALLAGIDGGDASAAEGGSENSTVEKELEQLTSILPDLEKKLEDLSEANPSADMDEMVKAIASMVIEVMPKAASFTSSQIATSSNGFDSSVMSTAATTGSSGSTVTDLGVVGRGVKRASIKPISVEPAAKKPALDSPSLQGDNNINSEVVPATQTDESS

SEQ ID NO: 176490 - protein, 386 aa, Zea Mays
MEDRVFQELPDDFWDTPRARASYKVKLDDSDSDFESALLEQKNHSPDVKKRRKRMKHVNTSTDRDVLNLQDNVSSVMARQCLHISSHRTSQSTSKHKGNLSHLLHNEVPIRMGERNNLTENSENDSLSDSFSEPQTSDTLCIEAQRKSSAPSSSLRQSTLDSLYEFGETSRHEPAGRKKLDNVELRETSRSLLPFDLSGQEPAFCTQEQVDKCSLGTLADKKPMEKSSNMERQPELSCVICWTDFSSTRGILPCGHRFCYSCIQGWVDCLASRGKVSTCPLCKASFTCISKVDEAGTSDQKIYSQTIPCEASTDVFVSGNVGYDFSRPTSGQGACYQCHFREPEELLLSCHVCRSQWVHSYCLDPPLTPWTCMHCRDLRMLFHRYR

SEQ ID NO: 176491 - protein, 248 aa, Zea Mays
MLIDGMRSVVATVSGYHGDERHRLVNLIAETGASYVGSMSRSITHLVCWRLEGKKYDIARRLGTRVVSHWWFTECLREGRRLPEDPYFMVSGEEAGPVPELPSRSRKQVKKNAIMEDRVFQELPDDFWDTPRARASYKVKLDDSDSDFESALLEQKNHSPDVKKRRKRMKHVNTSTVFVSGNVGYDFSRPTSGQGACYQCHFREPEELLLSCHVCRSQWVHSYCLDPPLTPWTCMHCRDLRMLFHRYR

SEQ ID NO: 176492 - protein, 209 aa, Zea Mays
MDVKSAFLNGPIKEEVYVEQPPGCEDSEYPNHVYKLSKALYGLKQVPRAWYECLRDFLIANGFKFGKADPTLFTKTIANDLFVCQIYVDDIIFGSTNKSTCEEFSRIMIQKFELSMMGELKYFLGFQVKQLLEGTFISQTKYTQDILTKFGMKDAKPIKTPMGTNGHLDLDTGGKSVDQKVYRSMIGSLLYLCASRPDIMLSVCMCARF

SEQ ID NO: 176493 - protein, 653 aa, Zea Mays
MPRYPAPYPMVRPGFVPRPMPPPGVVTIQRPPIISGIRAIPPLVALTARPPPPAVMLADKPPTAVYVGKIAPTVDNGFLLSLLQLCGPVKSWKRAEDPSNGKPKGFGFCEFESAEGILRATRLLNKLSLDGQELVININDATKEYLKKHVEEKKRAQVKSKDASGDGTTAVAENESSKSVPDESDKETGDAGDKDSDESTKKFGIVTDEDSQADKDVAEKISSMIEQWLKTRPPPPPPPVQPSADSSGVDKAKNDSADKTDADTVKRAVNETERSETASPDRRKDREHDKDKRDKDIERHDRERERERIRRDREKDHKHREVDRLYRDRLKEWESREREKEYQRYSEKEKEKDREHNRRREILKQEDESDEEDNRKRKRRSSSSLEDRKRRRQREKEEDLADKIREEEEIAEARRRAVELQQQADEAAAAAAAAAEESATLMEVDADDEKETDAQNEPSVVEADNIPSFANSVGAGGLGKENNSEEISMVPSHTKQNNNVPVKKLGFGLIGLGKRTSVPSVFAEEDDENNVDKSIRPLVPIDYNEELQAVQANSSTGANVAAAAEFAKRISVSNSKEEKADTEKDRNRRSSEGRPSDERREKLHDREKDKSKSENKKILDAKQLIDMIPRTKEELFAYDINWVIYDKMSCTRE

SEQ ID NO: 176494 - protein, 758 aa, Zea Mays
MCYVVSMCFTSLVYLLMWLHRCCLSVSAGMPRYPAPYPMVRPGFVPRPMPPPGVVTIQRPPIISGIRAIPPLVALTARPPPPAVMLADKPPTAVYVGKIAPTVDNGFLLSLLQLCGPVKSWKRAEDPSNGKPKGFGFCEFESAEGILRATRLLNKLSLDGQELVININDATKEYLKKHVEEKKRAQVKSKDASGDGTTAVAENESSKSVPDESDKETGDAGDKDSDESTKKFGIVTDEDSQADKDVAEKISSMIEQWLKTRPPPPPPPVQPSADSSGVDKAKNDSADKTDADTVKRAVNETERSETASPDRRKDREHDKDKRDKDIERHDRERERERIRRDREKDHKHREVDRLYRDRLKEWESREREKEYQRYSEKEKEKDREHNRRREILKQEDESDEEDNRKRKRRSSSSLEDRKRRRQREKEEDLADKIREEEEIAEARRRAVELQQQADEAAAAAAAAAEESATLMEVDADDEKETDAQNEPSVVEADNIPSFANSVGAGGLGKENNSEEISMVPSHTKQNNNVPVKKLGFGLIGLGKRTSVPSVFAEEDDENNVDKSIRPLVPIDYNEELQAVQANSSTGANVAAAAEFAKRISVSNSKEEKADTEKDRNRRSSEGRPSDERREKLHDREKDKSKSENKKILDAKQLIDMIPRTKEELFAYDINWVIYDKNELHERMRPWISKKIIEFLGEEESTLVDYIVSCTKDHVQAEKMLELLQSILDVEAEMFVLKMWRMLIFEIKKVESGLSGRAK

SEQ ID NO: 176495 - protein, 757 aa, Zea Mays
MPRYPAPYPMVRPGFVPRPMPPPGVVTIQRPPIISGIRAIPPLVALTARPPPPAVMLADKPPTAVYVGKIAPTVDNGFLLSLLQLCGPVKSWKRAEDPSNGKPKGFGFCEFESAEGILRATRLLNKLSLDGQELVININDATKEYLKKHVEEKKRAQVKSKDASGDGTTAVAENESSKSVPDESDKETGDAGDKDSDESTKKFGIVTDEDSQADKDVAEKISSMIEQWLKTRPPPPPPPVQPSADSSGVDKAKNDSADKTDADTVKRAVNETERSETASPDRRKDREHDKDKRDKDIERHDRERERERIRRDREKDHKHREVDRLYRDRLKEWESREREKEYQRYSEKEKEKDREHNRRREILKQEDESDEEDNRKRKRRSSSSLEDRKRRRQREKEEDLADKIREEEEIAEARRRAVELQQQADEAAAAAAAAAEESATLMEVDADDEKETDAQNEPSVVEADNIPSFANSVGAGGLGKENNSEEISMVPSHTKQNNNVPVKKLGFGLIGLGKRTSVPSVFAEEDDENNVDKSIRPLVPIDYNEELQAVQANSSTGANVAAAAEFAKRISVSNSKEEKADTEKDRNRRSSEGRPSDERREKLHDREKDKSKSENKKILDAKQLIDMIPRTKEELFAYDINWVIYDKNELHERMRPWISKKIIEFLGEEESTLVDYIVSCTKDHVQAEKMLELLQSILDVEAEMFVLKMWRMLIFEIKKVESGLSGRANSHASTAYSCSLVNDEECRRLAVVASINP

SEQ ID NO: 176496 - protein, 753 aa, Zea Mays
MHLDASALGCPENLLRCCLSVSAGMPRYPAPYPMVRPGFVPRPMPPPGVVTIQRPPIISGIRAIPPLVALTARPPPPAVMLADKPPTAVYVGKIAPTVDNGFLLSLLQLCGPVKSWKRAEDPSNGKPKGFGFCEFESAEGILRATRLLNKLSLDGQELVININDATKEYLKKHVEEKKRAQVKSKDASGDGTTAVAENESSKSVPDESDKETGDAGDKDSDESTKKFGIVTDEDSQADKDVAEKISSMIEQWLKTRPPPPPPPVQPSADSSGVDKAKNDSADKTDADTVKRAVNETERSETASPDRRKDREHDKDKRDKDIERHDRERERERIRRDREKDHKHREVDRLYRDRLKEWESREREKEYQRYSEKEKEKDREHNRRREILKQEDESDEEDNRKRKRRSSSSLEDRKRRRQREKEEDLADKIREEEEIAEARRRAVELQQQADEAAAAAAAAAEESATLMEVDADDEKETDAQNEPSVVEADNIPSFANSVGAGGLGKENNSEEISMVPSHTKQNNNVPVKKLGFGLIGLGKRTSVPSVFAEEDDENNVDKSIRPLVPIDYNEELQAVQANSSTGANVAAAAEFAKRISVSNSKEEKADTEKDRNRRSSEGRPSDERREKLHDREKDKSKSENKKILDAKQLIDMIPRTKEELFAYDINWVIYDKNELHERMRPWISKKIIEFLGEEESTLVDYIVSCTKDHVQAEKMLELLQSILDVEAEMFVLKMWRMLIFEIKKVESGLSGRAK

SEQ ID NO: 176497 - protein, 93 aa, Zea Mays
MWLLAMVLISPCLVLIDHGHFQYNCISLGLTLGAIAGVLSRNELVAAALFTLAINHKQVDRILDKENFILEELLDEDEINQECKALNSILINL

SEQ ID NO: 176498 - protein, 337 aa, Zea Mays
MQAAIDQSPHLRFRAGMDDKSCYVATGLSLAAILLVLHRLVVRAGGKGNAAARRLPPSPPAVPFLGHLHLLASECPLHSSLARLAARHGPVLSLRLGSRAAVVVSSPECAEACFTEHDVAFANRPRLTSQALASFGGAALAVSSYGPYWRNLRRVAAVRLLSTHRVACMCPVISAEVRAMLRRVGRAAEAAGRVQLKASLFELSLSVLMETIAQTKTSRADDADDAVSPEAHEFRRIVDEILPYLGATNLWDYLPLLRRFDVLGVRNKIRDVVGRRDAFLQRLIDAERRRLDGDGDGDEKKSMIAVMLSLQKSEPDVYTDTMIMALCGPERRRRRPR

SEQ ID NO: 176499 - protein, 137 aa, Zea Mays
MAKTKQGNKDVDSYTIGGTNKVVYVGDCVLMRASDSDNQPYVARVEKMEGDGRGSVRVQVRWYYRPEESKGGRRQFHGAKELFLSDHFDLQSAHTIEGKCVVHSFKNYTRLDNVGPEDFFCRFEYKAATGSIHLVWL

SEQ ID NO: 176500 - protein, 390 aa, Zea Mays
MPSELSTSNSRVSFSSNPRCEWQRASAHSRSSSPIGFSRSRPGTSHSHRSPKSSASHPMPPPVLRLFAAAPPRALGGRARAHRGDGGFARLRLRVRAAAGEAAPAPSRTQMIMDKISAGEGVGGAGGAYSYSALKRLDQIWSSICEAQADSKVPEVVTRVEGLLADSDLGSGSEIFDVIVCGGTLGIFVATALSSKGLRIGIIERNIIKGREQEWNISRKELMEIVEIGILSEAELEQIISSDFNPNRCGFEDKGEIWVENILNLGVSPAKLVENMKERFISSGGAIFEEKSLSSIYVYDDLAVLKLSDGDSLSCRLVVDAMGNFSPIVRQAFPAGSGPNDRTTYMFTYVDPTFGGPKLEELLEVFWDLMPAYQFFTTVGPVGFDFTTKV

SEQ ID NO: 176501 - protein, 589 aa, Zea Mays
MPPPVLRLFAAAPPRALGGRARAHRGDGGFARLRLRVRAAAGEAAPAPSRTQMIMDKISAGEGVGGAGGAYSYSALKRLDQIWSSICEAQADSKVPEVVTRVEGLLADSDLGSGSEIFDVIVCGGTLGIFVATALSSKGLRIGIIERNIIKGREQEWNISRKELMEIVEIGILSEAELEQIISSDFNPNRCGFEDKGEIWVENILNLGVSPAKLVENMKERFISSGGAIFEEKSLSSIYVYDDLAVLKLSDGDSLSCRLVVDAMGNFSPIVRQIRSGRKPDGMCLVVGACAHGFEKNTTSDIIFSSSSVKRAGNSGVQLFWEAFPAGSGPNDRTTYMFTYVDPTFGGPKLEELLEVFWDLMPAYQDVLLQNLDIRRVIFGIFPTYRDSPLPAAFDRILQVGDASGIQSPVSFGGFGSLTRHLGRLSSGICEAVEGDFLDAHSLQLLNPYMPNLSASWLFQRAMSVRPHVNVSPTFINELLFANFQSMQKLGDSVLRPFLQFGPLVKTLGLVMITRPQILPSIFKQVGLGVILEWSGHFMMLGYYTFLSTYIDPILRSWVESLPPRDKYQWKRYLEAWRYGAGLDYRQGE

SEQ ID NO: 176502 - protein, 381 aa, Zea Mays
MPPPVLRLFAAAPPRALGGRARAHRGDGGFARLRLRVRAAAGEAAPAPSRTQMIMDKISAGEGVGGAGGAYSYSALKRLDQIWSSICEAQADSKVPEVVTRVEGLLADSDLGSGSEIFDVIVCGGTLGIFVATALSSKGLRIGIIERNIIKGREQEWNISRKELMEIVEIGILSEAELEQIISSDFNPNRCGFEDKGEIWVENILNLGVSPAKLVENMKERFISSGGAIFEEKSLSSIYVYDDLAVLKLSDGDSLSCRLVVDAMGNFSPIVRQIRSGRKPDGMCLVVGACAHGFEKNTTSDIIFSSSSVKRAGNSGVQLFWEAFPAGSGPNDRTTYMFTYVDPTFGGPKLEELLEVFWDLMPAYQFFTTVGPVGFDFTTKV

SEQ ID NO: 176503 - protein, 436 aa, Zea Mays
MPPPVLRLFAAAPPRALGGRARAHRGDGGFARLRLRVRAAAGEAAPAPSRTQMIMDKISAGEGVGGAGGAYSYSALKRLDQIWSSICEAQADSKVPEVVTRVEGLLADSDLGSGSEIFDVIVCGGTLGIFVATALSSKGLRIGIIERNIIKGREQEWNISRKELMEIVEIGILSEAELEQIISSDFNPNRCGFEDKGEIWVENILNLGVSPAKLVENMKERFISSGGAIFEEKSLSSIYVYDDLAVLKLSDGDSLSCRLVVDAMGNFSPIVRQIRSGRKPDGMCLVVGACAHGFEKNTTSDIIFSSSSVKRAGNSGVQLFWEAFPAGSGPNDRTTYMFTYVDPTFGGPKLEELLEVFWDLMPAYQDVLLQNLDIRRVIFGIFPTYRDSPLPAAFDRILQVGDASGIQSPVSFGGFGSLTRHLGRLSSGLSVELSFS

SEQ ID NO: 176504 - protein, 429 aa, Zea Mays
MEIVEIGILSEAELEQIISSDFNPNRCGFEDKGEIWVENILNLGVSPAKLVENMKERFISSGGAIFEEKSLSSIYVYDDLAVLKLSDGDSLSCRLVVDAMGNFSPIVRQIRSGRKPDGMCLVVGACAHGFEKNTTSDIIFSSSSVKRAGNSGVQLFWEAFPAGSGPNDRTTYMFTYVDPTFGGPKLEELLEVFWDLMPAYQDVLLQNLDIRRVIFGIFPTYRDSPLPAAFDRILQVGDASGIQSPVSFGGFGSLTRHLGRLSSGICEAVEGDFLDAHSLQLLNPYMPNLSASWLFQRAMSVRPHVNVSPTFINELLFANFQSMQKLGDSVLRPFLQDVIQFGPLVKTLGLVMITRPQILPSIFKQVGLGVILEWSGHFMMLGYYTFLSTYIDPILRSWVESLPPRDKYQWKRYLEAWRYGAGLDYRQGE

SEQ ID NO: 176505 - protein, 144 aa, Zea Mays
MPNLSASWLFQRAMSVRPHVNVSPTFINELLFANFQSMQKLGDSVLRPFLQDVIQFGPLVKTLGLVMITRPQILPSIFKQVGLGVILEWSGHFMMLGYYTFLSTYIDPILRSWVESLPPRDKYQWKRYLEAWRYGAGLDYRQGE

SEQ ID NO: 176506 - protein, 83 aa, Zea Mays
MPSATPAIFAPSGTSVEAVAATTRGSSSLDGSRGTPQMRYYTMPGRRLAVMLSRSPRLVGDDPRLSIDVPTSSLKPLYELYHY

SEQ ID NO: 176507 - protein, 109 aa, Zea Mays
MVAWAKNIKVSDPLEEGCRLGPVVSEGQYEKIKKFISNAKSQGATILTGGVRPAHLEKGFFIEPTIITDITTSMEIWREEVFGPVLCVKEFSTEDEAIELANDTHILLL

SEQ ID NO: 176508 - protein, 243 aa, Zea Mays
MTPWDEWWGMALKDESNPQIALLPLHPDVRARFDESAAWEFARSMCGKPYGYHNMIFSWIDTASDNYPPPLDANLVMAIMSMWTRLQPRYASNMWNEALNKRLGTEKLDLHGIIRETERRGLSFNQLLTVPERDDWEYSDGKSTTCVAFILSMYKAAGVFAPYTESIQVTEFTIRDAYMLKIFEDNQTRLPSWCNAAADGLPFCQILGEYKMGLPEYNTIEPYANMNENCPSAPPTYSRPSRC

SEQ ID NO: 176509 - protein, 146 aa, Zea Mays
MDLYVFATPYRVAWDYYMRSNENHTFEIKAWEDAAEMEYVRKAARDRRLPDAIWDAWDAAVLGRRGAFVLQHRLGPGRQLGVPWEAHGGVVREASFREHNYKEGGRAVGRLLGALQDPGPVGRVPDAGEVGHRRLRRPHRGCPQRW

SEQ ID NO: 176510 - protein, 228 aa, Zea Mays
MFIHCCPLIYAILQRGCCRNLIYGRRKCSSVAFRVVCGTRSVTNTSFPFVFYIPLFIGSRKYAAHYSLIYSRFRLPPFVHPPPIPVKAEGKHCRLKVGYVSSDFGNHPLSHLMGSVFGMYDRANIEVFCYALSQNDGTEWRQRIRSEAEHFVDVSAMTSDNIAELINQDKIQILINLNGYTKDSDSHQVTPPPHDDFADRCLNSSGGATNNNSMSRSRAMELMFELVN

SEQ ID NO: 176511 - protein, 503 aa, Zea Mays
MGLSSAATGDGVQLCVFDLQRGQQEGQELDKILYFYPADCPILLQLSVIGLCEGIVTFTRIFSPEEDCEVIESEKHSHVFYQAETDIWMVLVVEKNKENELTWRCGALQGILKEAHSLFAMFHGPIRTLLHKQPSAELARGHLRTFLTDYLSDFNVGKKLQFPTYRDSLKERGTVQMLTVSREVALDVQSLATVLGSCLGNVTCQSLVLFEDLLVSTTLPPDDTLNLYTYAVLRLTPRALYSNASSWSYLRKGTSVSAGQTSSSSNGTTAGERYRSRSRDTSPGGQNQMNRNFRPLLREKLSKGKDGFVAADFTATEARCAVPSTPILWFQQADECMHLCIYQHKSLTILLLVPASSVINGEEGITHVKKAMLENKLTRGWGGENAYHVSGYRYLLVDPERRVSRASPPGKVTTLAKDSLLALNMLRQEVDLEKSRYKRGDPCHDKDFEVCIRTKNNAWVIAKISQGRELYMALEKGGETLLYASTAVEKFSNRYCEGAFSTD

SEQ ID NO: 176512 - protein, 394 aa, Zea Mays
MVLVVEKNKENELTWRCGALQGILKEAHSLFAMFHGPIRTLLHKQPSAELARGHLRTFLTDYLSDFNVGKKLQFPTYRDSLKERGTVQMLTVSREVALDVQSLATVLGSCLGNVTCQSLVLFEDLLVSTTLPPDDTLNLYTYAVLRLTPRALYSNASSWSYLRKGTSVSAGQTSSSSNGTTAGERPLLREKLSKGKDGFVAADFTATEARCAVPSTPILWFQQADECMHLCIYQHKSLTILLLVPASSVINGEEGITHVKKAMLENKLTRGWGGENAYHVSGYRYLLVDPERRVSRASPPGKVTTLAKDSLLALNMLRQEVDLEKSRYKRGDPCHDKDFEVCIRTKNNAWVIAKISQGRELYMALEKGGETLLYASTAVEKFSNRYCEGAFSTD

SEQ ID NO: 176513 - protein, 393 aa, Zea Mays
MFHGPIRTLLHKQPSAELARGHLRTFLTDYLSDFNVGKKLQFPTYRDSLKERGTVQMLTVSREVALDVQSLATVLGSCLGNVTCQSLVLFEDLLVSTTLPPDDTLNLYTYAVLRLTPRALYSNASSWSYLRKGTSVSAGQTSSSSNGTTAGERYRSRSRDTSPGGQNQMNRNFRPLLREKLSKGKDGFVAADFTATEARCAVPSTPILWFQQADECMHLCIYQHKSLTILLLVPASSVINGEEGITHVKKAMLENASQKIVTVEQKLTRGWGGENAYHVSGYRYLLVDPERRVSRASPPGKVTTLAKDSLLALNMLRQEVDLEKSRYKRGDPCHDKDFEVCIRTKNNAWVIAKISQGRELYMALEKGGETLLYASTAVEKFSNRYCEGAFSTD

SEQ ID NO: 176514 - protein, 316 aa, Zea Mays
MLTVSREVALDVQSLATVLGSCLGNVTCQSLVLFEDLLVSTTLPPDDTLNLYTYAVLRLTPRALYSNASSWSYLRKGTSVSAGQTSSSSNGTTAGERPLLREKLSKGKDGFVAADFTATEARCAVPSTPILWFQQADECMHLCIYQHKSLTILLLVPASSVINGEEGITHVKKAMLENASQKIVTVEQKLTRGWGGENAYHVSGYRYLLVDPERRVSRASPPGKVTTLAKDSLLALNMLRQEVDLEKSRYKRGDPCHDKDFEVCIRTKNNAWVIAKISQGRELYMALEKGGETLLYASTAVEKFSNRYCEGAFSTD

SEQ ID NO: 176515 - protein, 75 aa, Zea Mays
MFLLLAVRLLAEQLLHSHPSHMASCGSISTAELLSKDAIELCVIPIRKMQKRSKRPTPTHPHNDTKAYNLLSEYS

SEQ ID NO: 176516 - protein, 70 aa, Zea Mays
MDSQCKFFLWLAALQSCWTADRLQKRGLEHPDSCPLCDQEPETIDHLLADCVFTRQLWFRFLGQVNLQDL

SEQ ID NO: 176517 - protein, 118 aa, Zea Mays
MGSWRKVNDQVQGIAEKGLNSLIILGFWTLWNHRNGGTFDMTTPSVDFAIRRAEEERELWEMAGANSLSPFGPHSWTVGLGWFGFSYGYIYVFSFLATIRWSFPSMFWSISDPLILLI

SEQ ID NO: 176518 - protein, 245 aa, Zea Mays
MLTRVAKPDQLGVRFLGRPMVRPQRVEQSKASCFDVGAIVDAWWHGGWWEGIVLYQVGSGRLQVYFPGEKRTAEFGEDELRCSLEWVGNKWNPLKGRKDVTSKLTSTADCGSEYLIAKQDPLNFHVPKNSEPQLEGHQYDKRGIEKSSVSTISRDQKRVLADLTNDLKLDNLRWRPRKRSRRSGSRKQSDTSSGSSSGDMDLFSPSPSGSFGQHNLVPDEETCKSSGEQTFMGVPVQVPNLVMSR

SEQ ID NO: 176519 - protein, 98 aa, Zea Mays
MQCILPEDDGQICGHHIFGCPSGPGSGHIDGQPASRVLLRLVLVDVGDLEVWGPLDGPKTRSKRGYSTCVFLSTFMVSIPVRGVGDVSSRPSPDRATG

SEQ ID NO: 176520 - protein, 132 aa, Zea Mays
MHKLMFYAIFHCRQLLGQQLSGLNVGDLQNLENKLETSLRNIRLKKDQLFFYQIQELNRKGSLMHQESIELYNKVNLLHQHNTELRRKVYRQGVNNEQTSTTVRHSTRNTENLPINPELSVQRDKSETPSVG

SEQ ID NO: 176521 - protein, 92 aa, Zea Mays
MRTSKKLAPHAQATRKASYIVGMDPHQSVHPTLALFGRAAHQSAHPNSRSVGCGTARHINFRLLLRPKWRPNVQTTAALALLRQLQLQRVKP

SEQ ID NO: 176522 - protein, 51 aa, Zea Mays
MHNKTKQKQSLLILPIHRISKSTCTRMLLLISINSFNDQRMSICTKLVEHH

SEQ ID NO: 176523 - protein, 389 aa, Zea Mays
MTMAMDISSLIFMKGRFGEGVVVVVCAGREGRGVVTAPPQCSQYQELPCGGQELDIDTALKDRILGGALEPVGAATGDDGKQPVELRRMMDELDAAANTDEDEDEGGVGAGSRGRNSQCGSGGAGPQRPALLAKEARPNLARMASGSRPESWLLEALKSARRGRAAATSGTRPVSRLSWSLSVTSAVSPASAVAGGTGPLVLQRIRNLLLRWIRDLVAVTHSAPAALNEVLGRLRGEEGHGIAGPYIGQPHLLSHVTELADDKVHYMWPVHVDLGEHENVIHFGLFGRDIGYETYYESLDTRKTSEIADSLLGSLREANTSLECPIANLVVVGDIGEQECTPVTGGRHGAVQPASVLAASVVVRKLVQRELAEDNSKTIHKTSEIKCRI

SEQ ID NO: 176524 - protein, 354 aa, Zea Mays
MMDELDAAANTDEDEDEGGVGAGSRGRNSQCGSGGAGPQRPALLAKEARPNLARMASGSRPESWLLEALKSARRGRAAATSGTRPVSRLSWSLSVTSAVSPASAVAGGTGPLVLQRIRNLLLRWIRDLVAVTHSAPAALNEVLGRLRGEEGHGIAGPYIGQPHLLSHVTELADDKVHYMWPVHVDLGEHENVIHFGLFGRDIGYETYYESLDTRKTSEIADSLLGSLREANTSLECPIANLVVVGDIGEQECTPVTGGRHGAVQPASVLAASVVVRKLVQRELAEDNRREHKQISADKWATNLVKLLEPAAVTAWNGDGAPLLVSPAAGALMATGLEPPMGDAGQLVGGPERWV

SEQ ID NO: 176525 - protein, 58 aa, Zea Mays
MVCSQIAAQHAANSNLDKLFITKFVKKLFLVPSKRFKCKEMVWLLTRARRIMIWMSRW

SEQ ID NO: 176526 - protein, 63 aa, Zea Mays
MASHRHPCAPPFFTSCRHPAGNQAPSPTAYKRTAQSPYSPRTTHHPSSLSSICAHAATLPQLW

SEQ ID NO: 176527 - protein, 108 aa, Zea Mays
MSGASACEYGGKATKIARVGAAFACAPSGRPPCLPLLGVSLMSSDTSVRACLARTARSPPRRNAAGEAGRARSPTGPKPPASSLLPAMPCHLLLPMTIFFSLGRLTYL

SEQ ID NO: 176528 - protein, 239 aa, Zea Mays
MVSYYASSSEPAQVRGKTVYIQYSNRQEITNNKGTGDSSGNVLLVTFEGVQPNDVTIEVIHLVFSAFGFVHKIATFEKAAGFQALIQYTDAPTALEAKNSLDGRSIPKYLLPEHISACHMRITFSAHKDLNIKFQSHRSRDYTNPYLPVNQTAIEGIVQPTVGPDGKIKEPESNVLLASIENMQYAVTVDVLHTVFSAFGAVQKIAMFEKNGGMQALIQYPGICSPVRPTGYALDFGTL

SEQ ID NO: 176529 - protein, 318 aa, Zea Mays
MPSGSATQFRYTQTPSKVLHLRNMPWECTEEELVELCKPFGRVVNTMCNVGANRNQAFVEFADQNQAISMVSYYASSSEPAQVRGKTVYIQYSNRQEITNNKGTGDSSGNVLLVTFEGVQPNDVTIEVIHLVFSAFGFVHKIATFEKAAGFQALIQYTDAPTALEAKNSLDGRSIPKYLLPEHISACHMRITFSAHKDLNIKFQSHRSRDYTNPYLPVNQTAIEGIVQENLQPTVGPDGKIKEPESNVLLASIENMQYAVTVDVLHTVFSAFGAVQKIAMFEKNGGMQALIQYPDITTAAVAKQALEGHCIYDGGYCS

SEQ ID NO: 176530 - protein, 292 aa, Zea Mays
MPSGSATQFRYTQTPSKVLHLRNMPWECTEEELVELCKPFGRVVNTMCNVGANRNQAFVEFADQNQAISMVSYYASSSEPAQVRGKTVYIQYSNRQEITNNKGTGDSSGNVLLVTFEGVQPNDVTIEVIHLVFSAFGFVHKIATFEKAAGFQYTDAPTALEAKNSLDGRSIPKYLLPEHISACHMRITFSAHKDLNIKFQSHRSRDYTNPYLPVNQTAIEGIVQPTVGPDGKIKEPESNVLLASIENMQYAVTVDVLHTVFSAFGAVQKIAMFEKNGGMQALIQYPERCRSS

SEQ ID NO: 176531 - protein, 466 aa, Zea Mays
MPSGSATQFRYTQTPSKVLHLRNMPWECTEEELVELCKPFGRVVNTMCNVGANRNQAFVEFADQNQAISMVSYYASSSEPAQVRGKTVYIQYSNRQEITNNKGTGDSSGNVLLVTFEGVQPNDVTIEVIHLVFSAFGFVHKIATFEKAAGFQALIQYTDAPTALEAKNSLDGRSIPKYLLPEHISACHMRITFSAHKDLNIKFQSHRSRDYTNPYLPVNQTAIEGIVQENLQPTVGPDGKIKEPESNVLLASIENMQYAVTVDVLHTVFSAFGAVQKIAMFEKNGGMQALIQYPDITTAAVAKQALEGHCIYDGGYCKLHLSYSRHTDLNVKAHDDRSRDYTLSDPNAQLQAAAQAPVISSPGVAWQNPASAPAAPFYGSTAASTPVGQPPAWNPNMQAPGFASASTAYPNPPLMANSTPYYPAIGSSSGAPPVSFQASQQRPQYGMPPGAPPHAPPAGQPMYFQK

SEQ ID NO: 176532 - protein, 301 aa, Zea Mays
MPSGSATQFRYTQTPSKVLHLRNMPWECTEEELVELCKPFGRVVNTMCNVGANRNQAFVEFADQNQAISMVSYYASSSEPAQVRGKTVYIQYSNRQEITNNKGTGDSSGNVLLVTFEGVQPNDVTIEVIHLVFSAFGFVHKIATFEKAAGFQALIQYTDAPTALEAKNSLDGRSIPKYLLPEHISACHMRITFSAHKDLNIKFQSHRSRDYTNPYLPVNQTAIEGIVQENLQPTVGPDGKIKEPESNVLLASIENMQYAVTVDVLHTVFSAFGAVQKIAMFEKNGGMQALIQYPAERCRSS

SEQ ID NO: 176533 - protein, 308 aa, Zea Mays
MPSGSATQFRYTQTPSKVLHLRNMPWECTEEELVELCKPFGRVVNTMCNVGANRNQAFVEFADQNQAISMVSYYASSSEPAQVRGKTVYIQYSNRQEITNNKGTGDSSGNVLLVTFEGVQPNDVTIEVIHLVFSAFGFVHKIATFEKAAGFQYTDAPTALEAKNSLDGRSIPKYLLPEHISACHMRITFSAHKDLNIKFQSHRSRDYTNPYLPVNQTAIEGIVQENLQPTVGPDGKIKEPESNVLLASIENMQYAVTVDVLHTVFSAFGAVQKIAMFEKNGGMQALIQYPGICSPVRPTGYALDFGTL

SEQ ID NO: 176534 - protein, 233 aa, Zea Mays
MPSGSATQFRYTQTPSKVLHLRNMPWECTEEELVELCKPFGRVVNTMCNVGANRNQAFVEFADQNQAISMVSYYASSSEPAQVRGKTVYIQYSNRQEITNNKGTGDSSGNVLLVTFEGVQPNDVTIEVIHLVFSAFGFVHKIATFEKAAGFQALIQYTDAPTALEAKNSLDGRSIPKYLLPEHISACHMRITFSAHKDLNIKFQSHRSRDYTNPYLPVNQTAIEGIVQALMGR

SEQ ID NO: 176535 - protein, 312 aa, Zea Mays
MPSGSATQFRYTQTPSKVLHLRNMPWECTEEELVELCKPFGRVVNTMCNVGANRNQAFVEFADQNQAISMVSYYASSSEPAQVRGKTVYIQYSNRQEITNNKGTGDSSGNVLLVTFEGVQPNDVTIEVIHLVFSAFGFVHKIATFEKAAGFQALIQYTDAPTALEAKNSLDGRSIPKYLLPEHISACHMRITFSAHKDLNIKFQSHRSRDYTNPYLPVNQTAIEGIVQENLQPTVGPDGKIKEPESNVLLASIENMQYAVTVDVLHTVFSAFGAVQKIAMFEKNGGMQALIQYPGICSPVRPTGYALDFGTL

SEQ ID NO: 176536 - protein, 308 aa, Zea Mays
MPSGSATQFRYTQTPSKVLHLRNMPWECTEEELVELCKPFGRVVNTMCNVGANRNQAFVEFADQNQAISMVSYYASSSEPAQVRGKTVYIQYSNRQEITNNKGTGDSSGNVLLVTFEGVQPNDVTIEVIHLVFSAFGFVHKIATFEKAAGFQALIQYTDAPTALEAKNSLDGRSIPKYLLPEHISACHMRITFSAHKDLNIKFQSHRSRDYTNPYLPVNQTAIEGIVQPTVGPDGKIKEPESNVLLASIENMQYAVTVDVLHTVFSAFGAVQKIAMFEKNGGMQALIQYPGICSPVRPTGYALDFGTL

SEQ ID NO: 176537 - protein, 304 aa, Zea Mays
MPSGSATQFRYTQTPSKVLHLRNMPWECTEEELVELCKPFGRVVNTMCNVGANRNQAFVEFADQNQAISMVSYYASSSEPAQVRGKTVYIQYSNRQEITNNKGTGDSSGNVLLVTFEGVQPNDVTIEVIHLVFSAFGFVHKIATFEKAAGFQYTDAPTALEAKNSLDGRSIPKYLLPEHISACHMRITFSAHKDLNIKFQSHRSRDYTNPYLPVNQTAIEGIVQPTVGPDGKIKEPESNVLLASIENMQYAVTVDVLHTVFSAFGAVQKIAMFEKNGGMQALIQYPGICSPVRPTGYALDFGTL

SEQ ID NO: 176538 - protein, 300 aa, Zea Mays
MPSGSATQFRYTQTPSKVLHLRNMPWECTEEELVELCKPFGRVVNTMCNVGANRNQAFVEFADQNQAISMVSYYASSSEPAQVRGKTVYIQYSNRQEITNNKGTGDSSGNVLLVTFEGVQPNDVTIEVIHLVFSAFGFVHKIATFEKAAGFQALIQYTDAPTALEAKNSLDGRSIPKYLLPEHISACHMRITFSAHKDLNIKFQSHRSRDYTNPYLPVNQTAIEGIVQENLQPTVGPDGKIKEPESNVLLASIENMQYAVTVDVLHTVFSAFGAVQKIAMFEKNGGMQALIQYPERCRSS

SEQ ID NO: 176539 - protein, 139 aa, Zea Mays
MMVVTAHDDRSRDYTLSDPNAQLQAAAQAPVISSPGVAWQNPASAPAAPFYGSTAASTPVGQPPAWNPNMQAPGFASASTAYPNPPLMANSTPYYPAIGSSSGAPPVSFQASQQRPQYGMPPGAPPHAPPAGQPMYFQK

SEQ ID NO: 176540 - protein, 149 aa, Zea Mays
MAMLGVAGMLIPEVLTKAGLINAPQWYDAGKSEYFASSSTLFVIEFILFHYVEIRRWQDIKNPGSVNQDPIFKSYSLPPHECGYPGSVFNPLNFAPTLEAKEKELANAQRHRQGALRQPAAAPVRPMAQHHHPDPVGLSRRSIRSCGPS

SEQ ID NO: 176541 - protein, 305 aa, Zea Mays
MARPGPSCCPHARRHIPPCVVLCLAADSRPRAYPYIYRRRRRQGRNISGPGGAVVESQESKATDRRSQPAGRPIRAPARLAVASTVGRSPAELACFPAAVAAWPGPAACCRRLVCGYSGLSCWPRHRRCDTKRRGGHVGNGIVAGSGWSAAGARARARRGQGAAQVDAPAARPLRARRGPARRRRQGDTQVRAEGDGRAGAHAVPPQEAPAGPSGHRRIISLLKYRLVAVSRGVASPLGDSGDGTDERSSSSSENQPADECDDGTVAEPHGDSSRSVARMQRKLQEQIEVSGFQPIVCRRFVLGC

SEQ ID NO: 176542 - protein, 61 aa, Zea Mays
MSVESEEKLSLLLYTPFPMARIQLLNDNKSSYSSFDILLCRSRMFSERNIMLTWFQRYTKS

SEQ ID NO: 176543 - protein, 97 aa, Zea Mays
MDLLRSLNQKIASQCLHLYSSLPRYDLSVYDSFSCWIYSDGKSTIPLWEFKNLCMQIFLLEGSQFLDIFLFLILSPRLILLSSPKKLLLCKKRGVLK

SEQ ID NO: 176544 - protein, 283 aa, Zea Mays
MERTHMDEHVHSSRRGGLQTVPFIIINEGCERIVNVAVSANIIIYLTKEYHMGSAESAMVLFIYQAATNFLPIFGAIVSDALLGRFLTISLTLFACTIGAVLLWLTTVVPTLVAEDCSNEDQSCHSPTTLQFFVLLTSLLFLSIGASGVRPCSLPFGVDQFTHWSGAPKDRALKVLFGWYYVSMGGSAIISITLIVYLQDKLGWKIGFAISMVIAAFAAILNIVTSPLYIKVKPQKSTWISLVQVVFIAIRNRHIQLPKAAGENDLHYCNVGGLAMVPSSKMS

SEQ ID NO: 176545 - protein, 557 aa, Zea Mays
MDEHVHSSRRGGLQTVPFIIINEGCERIVNVAVSANIIIYLTKEYHMGSAESAMVLFIYQAATNFLPIFGAIVSDALLGRFLTISLTLFACTIGAVLLWLTTVVPTLVAEDCSNEDQSCHSPTTLQFFVLLTSLLFLSIGASGVRPCSLPFGVDQFTHWSGAPKDRALKVLFGWYYVSMGGSAIISITLIVYLQDKLGWKIGFAISMVIAAFAAILNIVTSPLYIKVKPQKSTWISLVQVVFIAIRNRHIQLPKAAGENDLHYCNVGGLAMVPSSKMRFLNRACVLRAHVESSNTEVLNSWSVCTVEQVEDIKRVLSVIPMWSATITSLLIQTASFRVLQAETMDRHVGSTRFQMPAGSVAIFEGITFTLVSGCITGREKTLSHKQKMGIGVLFSIACALSASVVEAIRRKQATRQGLENNTDDGGVVNMSVLWLAPQCVFAGLISAFGSIGQIEFYYEVLPKSMSSLALALLPLAIGVANIASTVVVKLVKVITCSGGRVGWLLDNLNQGHYDYFYFVLAMLGIAGFIYFVACCYWFEEPSPNQLVQSNEDEPNMR

SEQ ID NO: 176546 - protein, 379 aa, Zea Mays
MGGSAIISITLIVYLQDKLGWKIGFAISMVIAAFAAILNIVTSPLYIKVKPQKSTWISLVQVVFIAIRNRHIQLPKAAGENDLHYCNVGGLAMVPSSKMRFLNRACVLRAHVESSNTEVLNSWSVCTVEQVEDIKRVLSVIPMWSATITSLLIQTASFRVLQAETMDRHVGSTRFQMPAGSVAIFEGITFTLVSGCITGREKTLSHKQKMGIGVLFSIACALSASVVEAIRRKQATRQGLENNTDDGGVVNMSVLWLAPQCVFAGLISAFGSIGQIEFYYEVLPKSMSSLALALLPLAIGVANIASTVVVKLVKVITCSGGRVGWLLDNLNQGHYDYFYFVLAMLGIAGFIYFVACCYWFEEPSPNQLVQSNEDEPNMR

SEQ ID NO: 176547 - protein, 299 aa, Zea Mays
MEDQALAPLLQPLPLGETGAIKGRARRAALEWWVESKKLWHIVGPAIFQRIALYGVNVVTQSFIGHLGDLELAAFSIAATVVGGFNFGFLLGMASALETLCGQAFGAKKHHMLGVYLQRSWIVLLIFAAALTPTYIFMEDLLLLIGQSPELSRLAGQMSVWLLPQHFAMAMLLPLTRFLQSQLKNWVTAITAAVALAIHVVATYVLVRLLDFGIVGAVASADMAWWLVVLGQYVYVVGGWCPLSWKGFTMEAFADFWEFIKLSSASGVMLCLENWYYRVLVLLTGYLDNAEIAVDALSI

SEQ ID NO: 176548 - protein, 375 aa, Zea Mays
MIRSTIWPSTGCILRDLGMASALETLCGQAFGAKKHHMLGVYLQRSWIVLLIFAAALTPTYIFMEDLLLLIGQSPELSRLAGQMSVWLLPQHFAMAMLLPLTRFLQSQLKNWVTAITAAVALAIHVVATYVLVRLLDFGIVGAVASADMAWWLVVLGQYVYVVGGWCPLSWKGFTMEAFADFWEFIKLSSASGVMLCLENWYYRVLVLLTGYLDNAEIAVDALSICQTINGWEMMIPFGFLAATGVRVANELGAGSGKGARFAIVVSITTSVVIGLVFWCLILYFDDKIALLFTSSAVVLDAVHHLSVLLAFTILLNSVQPVLSGVAVGSGWQALVAYVNVGSYYLIGVPLGNLVRDDWRDRRSNAHTGIPHCQM

SEQ ID NO: 176549 - protein, 251 aa, Zea Mays
MSSRKYPSGSEKRKRKKQEDEFIQMTLLIRCVNLSYGKINIEEYFLGFLKVDDTSGLGIFNILIDAMESFGYFLGHRCLQTSASSLTSLSSQPLLPALTSPVWRSLAPRRCLCLSRPLDPSICSLAFTLSPACPEVCPLCVSSSSPWLASDPAREFPQRRQLAGLQLACIMVVAPSLLVGSCVAAHTCRTPLLLCWLRAPDYVLRSSLALAAGHHQPCLPRLVHSVAREVLDVMAELRNGGNENRSCARDL

SEQ ID NO: 176550 - protein, 296 aa, Zea Mays
MILLGLQKLQSNMHLRHPPLLMLKSSCMLRFYLLHMLILMTYVILTCPAMHLYVLVCSFHLMMPRLWIFPLLFLTFCRSTLMFSPRTCHRVFPRFAALNTRSTSSPAPSSQTAPCTVRIRMRRRRSSARCRCCLIKGYIRESLSPCSVPVLLVPKKDGSWRMCVDYRAINNITIRYRYPIPRLDDMLDELSGAIIFTKIDLRSGYHHIRMKLGDEWKTAFKMKFGLYEWLVMPFGLTNAPSTFMRLMNEVPRPFIGLFVIVYFDDILIYIKTMEEHFEHLSVVYLFLMRCVLPLIW

SEQ ID NO: 176551 - protein, 370 aa, Zea Mays
MTDDQIHWFSIVNSLMIVLFLSGMVAMIMLRTLYRDISRYNQLETEEEAQEETGWKLVHGDVFRPPANSDLLCVCVGTGVQFFGMLLVTMIFAVLGFLSPSNRGGLMTAMLLTWVLMGLFAGYASSRLYKMFKGSEWKSITLRTAFLFPGIAFGIFFILNALIWGEKSSGAVPFTTMFALVLLWFGISVPLVFVGSYLGFKQPAIEAPVKTNKIPRQVPEQAWYMNPAFTILIGGILPFGAVFIELFFILTSIWLHQFYYIFGFLFLVFIILIITCAEITIVLCYFQLCSEDYMWWWRSYLTSGSSAIYLFLYAGFYFFTKLQITKVVSGILYFGYMLLASFAFCVLTGTIGFCACFWFTRLIYSSVKID

SEQ ID NO: 176552 - protein, 247 aa, Zea Mays
MRAPAMHRWAAAALAAFLVALPAAAFYLPGVAPNDFHKKDPLLVKVNKLTSTKTQLPYSYYSLPFCKPNMIVDSAENLGEVLRGDRIENSPYVFEMGEPKMCQIICKTKIDDKQTKELKEKIEDEYRVNMILDNLPLVVSIARQDRGATVYQAGCQGPICWLKYHKDETTDLSRIVGFEVKPFSINHQFEGPWNDKTTRLITCDPHASKLVVNSDTPQEVEAGKEIIFTYDVGFEVIFLTSASLFVL

SEQ ID NO: 176553 - protein, 828 aa, Zea Mays
MNKPAVGSETSDLNHNLKSSNGKSKHTLSEAVCTSAKVPGGHQSNSTVEISENVPVSVDSSKMGSSMKHANANFGEDGSSTKDLNGVSPCKSQSSPSNINGHSSFVNDEFCNHSKEHQRAKDGSVVDDCLQTSSTRELEDSSIPQAAAYAVLEPKSSRTPIHVELERSKTKSVGNDSIQSMKPVPSALTVDKATSVRGNCSITLNSSKVADNLPDRNFEPSDRSGSTANNLATSLKKMVRQQTAPKVVRHYPSESTLFPYELFVRLYVKVELRPFGLHNLGNSCYANAVLQCLMFTRPLTTYLLEGLHSKNCSQNGWCFMCEFEKLIVEGKRRKIALSPTGILSHLNDIGSSFGPGKQEDAHEFLRYAIDAMQSVCTKEARKGGVLRSAEETTLVQLIFGGYLRSKIKCSRCHVSSEQCEPMLDLTVEIDGDISSLDEALVRFTSTEALDGENKYHCSRCKSYERAKKKLTIEEAPNILTIALKRYQSGKFGKISKAIRFPETLNIVCYMNPDTDDISPVYSLYAVVVHHDVMNAAFSGHYVCYVKDTHGKWFKADDSQVKPVSLDNVMSKCAYMLLYARCSPRAPSSVRQAISDPARPKKAKQKVVPGGTTWRGGSFNRHQDGQRHSNHTADDLTHAFDEYRNAPYSPSDSPSPSESSSLFSNSDAGSHSTVSTDSSESTRNSTSTEEYEYVFGAADQMYPGGPMGGAPVESDQMYPGGPMGGAPVESDYSTYSRSRSSLNTSSSGRDAYSAASSADHKHQVVGSGGQVEGDESTSLLYTDRSNQQLSSKLTDQYRQLDGSGHDPGETRGGVLLRRPSRDRTAQTFY

SEQ ID NO: 176554 - protein, 568 aa, Zea Mays
MNKPAVGSETSDLNHNLKSSNGKSKHTLSEAVCTSAKVPGGHQSNSTVEISENVPVSVDSSKMGSSMKHANANFGEDGSSTKDLNGVSPCKSQSSPSNINGHSSFVNDEFCNHSKEHQRAKDGSVVDDCLQTSSTRELEDSSIPQAAAYAVLEPKSSRTPIHVELERSKTKSVGNDSIQSMKPVPSALTVDKATSVRGNCSITLNSSKVADNLPDRNFEPSDRSGSTANNLATSLKKMVRQQTAPKVVRHYPSESTLFPYELFVRLYVKVELRPFGLHNLGNSCYANAVLQCLMFTRPLTTYLLEGLHSKNCSQNGWCFMCEFEKLIVEGKRRKIALSPTGILSHLNDIGSSFGPGKQEDAHEFLRYAIDAMQSVCTKEARKGGVLRSAEETTLVQLIFGGYLRSKIKCSRCHVSSEQCEPMLDLTVEIDGDISSLDEALVRFTSTEALDGENKYHCSRCKSYERAKKKLTIEEAPNILTIALKRYQSGKFGKISKAIRFPETLNIVCYMNPDTDDISPVYSLYAVVVHHDVMNAAFSGHYVCYVKDTHGKWFKADDSQVFTEGTELC

SEQ ID NO: 176555 - protein, 407 aa, Zea Mays
MLDLTVEIDGDISSLDEALVRFTSTEALDGENKYHCSRCKSYERAKKKLTIEEAPNILTIALKRYQSGKFGKISKAIRFPETLNIVCYMNPDTDDISPVYSLYAVVVHHDVMNAAFSGHYVCYVKDTHGKWFKADDSQVKPVSLDNVMSKCAYMLLYARCSPRAPSSVRQAISDPARPKKAKQKVVPGGTTWRGGSFNRHQDGQRHSNHTADDLTHAFDEYRNAPYSPSDSPSPSESSSLFSNSDAGSHSTVSTDSSESTRNSTSTEEYEYVFGAADQMYPGGPMGGAPVESDQMYPGGPMGGAPVESDYSTYSRSRSSLNTSSSGRDAYSAASSADHKHQVVGSGGQVEGDESTSLLYTDRSNQQLSSKLTDQYRQLDGSGHDPGETRGGVLLRRPSRDRTAQTFY

SEQ ID NO: 176556 - protein, 319 aa, Zea Mays
MNPDTDDISPVYSLYAVVVHHDVMNAAFSGHYVCYVKDTHGKWFKADDSQVKPVSLDNVMSKCAYMLLYARCSPRAPSSVRQAISDPARPKKAKQKVVPGGTTWRGGSFNRHQDGQRHSNHTADDLTHAFDEYRNAPYSPSDSPSPSESSSLFSNSDAGSHSTVSTDSSESTRNSTSTEEYEYVFGAADQMYPGGPMGGAPVESDQMYPGGPMGGAPVESDYSTYSRSRSSLNTSSSGRDAYSAASSADHKHQVVGSGGQVEGDESTSLLYTDRSNQQLSSKLTDQYRQLDGSGHDPGETRGGVLLRRPSRDRTAQTFY

SEQ ID NO: 176557 - protein, 77 aa, Zea Mays
MGQGKLELGYSIHEKTIVHWEWRDGESGTYPPGNGPPKRGCVLSGGVDLFMQWRIRGNSRHMQELRETYVVWLEILS

SEQ ID NO: 176558 - protein, 282 aa, Zea Mays
MALPKPRPPTPTASAATGTSSSRIDSPSLKAALAMALIHYNRLPGKANATAGTSPPSLLHWKRKAKDRKREILRLREELKVLQDGVRGEEMEPPVASCRCHFFDGCRDLRPQQGGGGGEHWVDEVLRRRFLRLVRWKEKRRRVDRSLPSSSLIDFNSEDEMQQLSMSTDFLVELSDGIFAKSEAGHSFATFSHQAVDFILATLKNILSSEREKDLVGEIIDSLVTRLMKRMCTVPEKLVTSDSGLQFSSARASDKPSGSPVVVRQELHLEALCPCTRRQYWL

SEQ ID NO: 176559 - protein, 353 aa, Zea Mays
MALPKPRPPTPTASAATGTSSSRIDSPSLKAALAMALIHYNRLPGKANATAGTSPPSLLHWKRKAKDRKREILRLREELKVLQDGVRGEEMEPPVASCRCHFFDGCRDLRPQQGGGGGEHWVDEVLRRRFLRLVRWKEKRRRVDRSLPSSSLIDFNSEDEMQQLSMSTDFLVELSDGIFAKSEAGHSFATFSHQAVDFILATLKNILSSEREKDLVGEIIDSLVTRLMKRMCTVPEKLVTSDSGSTGCSDAQFSVQHLFRKLGNDEFIGQRLLEFLISDYMKVWLCCEHINKRLFEECTRSILKARNDLQILENMNGLYVVYIERVVGRLARDVAPAAHQGKLDLEVFSKLLC

SEQ ID NO: 176560 - protein, 341 aa, Zea Mays
MALPKPRPPTPTASAATGTSSSRIDSPSLKAALAMALIHYNRLPGKANATAGTSPPSLLHWKRKAKDRKREILRLREELKVLQVRWKEKRRRVDRSLPSSSLIDFNSEDEMQQLSMSTDFLVELSDGIFAKSEAGHSFATFSHQAVDFILATLKNILSSEREKDLVGEIIDSLVTRLMKRMCTVPEKLVTSDSGSTGCSDAQFSVQHLFRKLGNDEFIGQRVILVVSQKISNVSERLFLADPFADAFPDMHDNIFIMIQLLEFLISDYMKVWLCCEHINKRLFEECTRSILKARNDLQILENMNGLYVVYIERVVGRLARDVAPAAHQGKLDLEVFSKLLC

SEQ ID NO: 176561 - protein, 261 aa, Zea Mays
MALPKPRPPTPTASAATGTSSSRIDSPSLKAALAMALIHYNRLPGKANATAGTSPPSLLHWKRKAKDRKREILRLREELKVLQDGVRGEEMEPPVASCRCHFFDGCRDLRPQQGGGGGEHWVDEVLRRRFLRLVRWKEKRRRVDRSLPSSSLIDFNSEDEMQQLSMSTDFLVELSDGIFAKSEAGHSFATFSHQAVDFILATLKNILSSEREKDLVGEIIDSLVTRLMKRMCTVPEKLVTSDSGSTGCSDAQFSVQHLFLT

SEQ ID NO: 176562 - protein, 86 aa, Zea Mays
MVLDSETSSNRFVNTNIYRTDRRKWKCSTHTGEVLLLSMQILQFHSMNKKIVCFKFRIPIWMHTPISNGSPVKNGGPKKHGWSNLL

SEQ ID NO: 176563 - protein, 199 aa, Zea Mays
MALGITSVSPARRVSFPTPWRLPMAPQLPGSPAVQLGPAHPRSSRLQPPLPGRRRVPCARSWLGSNTSELSPCILPAVASMAPSSDFCLVACRFPVPWSRPAMSCQGCSCTRVLIPLLAIRPTVSSSPAMSSSITPSTGVSPSMSAQPLRIVGLIGTLLVHTSRVCDVVTCLLASSERLGEEIREGLYGKDNPYAVMPI

SEQ ID NO: 176564 - protein, 117 aa, Zea Mays
MQKPHQARSATSSPCSPHGDFPLDSSLLALLSPWLSSPPSLQSCQARQSSLRRPSLPPPATRCLSQLAGHRAPLLPSARPCPSPWHCRLGSQQLLPGTRQTPWFQPSSPSRPLPWSF

SEQ ID NO: 176565 - protein, 98 aa, Zea Mays
MGKLSLGWTNTRKAGPQWEWRDGESIVYLPGKRLDGGVLSSRLVGTRSGLEKTVGELTYARVKCYICRMVGDPQLSINRFGSLLLLGYEDWITALHRR

SEQ ID NO: 176566 - protein, 74 aa, Zea Mays
MSISLEKKKVAIPLLCHGHLRSVVDLFYSSVTSNGYFLISASKEIRCGRPLLVEGGFSCWKKRRVLPIRWSSLP

SEQ ID NO: 176567 - protein, 504 aa, Zea Mays
MTEAERRTHRFGGVSGSSLRPAHIKELEEVKLLKKLSHPNIVRYLVTVREEDTLNILLEFVPGGPINSVTFGEARFIPRAWHAQSGPISRLPLVTISYSSNLLRDVPVRQPLWHNPPPPQAQAQVDMDLPSLAVVLRAALSHVPEERKAAEESLNQYTPQHLVRLLQIIVDGSCDMAVRQVASIHFKNFIAKNWSPNDPDESPKVLESDKAMVRENILGFIVQVPPLLRAQLGESIKTIVHSDYPEQWPSLLHWVSHNLDLQNQIFGALYVLRVLARKYEFKSEDERIPLFHIVEETFPRLLSIFSKLVQIVNPPIEVADLIKLICKIFWSSIYLEIPKQLFDPNVFNAWMVLFINLLERPVPVEGQPIDPEIRKSWAWWKVKKWTIHILNRLYTRFGDLKLQKPESKAFAQMFQKTYSGKILACHMQLLNAIRGGDYLPDRVINLVLQYLTNSVTKNNIIEDLYSPRTAAMDFVSELVRKRGKNNLQKFIHFIVDIFRSIIDL

SEQ ID NO: 176568 - protein, 331 aa, Zea Mays
MARVNGTLDEGQFSLLKFQYTPQHLVRLLQIIVDGSCDMAVRQVASIHFKNFIAKNWSPNDPDESPKVLESDKAMVRENILGFIVQVPPLLRAQLGESIKTIVHSDYPEQWPSLLHWVSHNLDLQNQIFGALYVLRVLARKYEFKSEDERIPLFHIVEETFPRLLSIFSKLVQIVNPPIEVADLIKLICKIFWSSIYLEIPKQLFDPNVFNAWMVLFINLLERPVPVEGQPIDPEIRKSWAWWKVKKWTIHILNRLYTRFGDLKLQKPESKAFAQMFQKTYSGKILACHMQLLNAIRGGDYLPDRVINLVLQYLTNSVTKNSMYQMMQPQI

SEQ ID NO: 176569 - protein, 329 aa, Zea Mays
MAVRQVASIHFKNFIAKNWSPNDPDESPKVLESDKAMVRENILGFIVQVPPLLRAQLGESIKTIVHSDYPEQWPSLLHWVSHNLDLQNQIFGALYVLRVLARKYEFKSEDERIPLFHIVEETFPRLLSIFSKLVQIVNPPIEVADLIKLICKIFWSSIYLEIPKQLFDPNVFNAWMVLFINLLERPVPVEGQPIDPEIRKSWAWWKVKKWTIHILNRLYTRFGDLKLQKPESKAFAQMFQKTYSGKILACHMQLLNAIRGGDYLPDRVINLVLQYLTNSVTKNNIIEDLYSPRTAAMDFVSELVRKRGKNNLQKFIHFIVDIFRSIIDL

SEQ ID NO: 176570 - protein, 154 aa, Zea Mays
MVLFINLLERPVPVEGQPIDPEIRKSWAWWKVKKWTIHILNRLYTRFGDLKLQKPESKAFAQMFQKTYSGKILACHMQLLNAIRGGDYLPDRVINLVLQYLTNSVTKNNIIEDLYSPRTAAMDFVSELVRKRGKNNLQKFIHFIVDIFRSIIDL

SEQ ID NO: 176571 - protein, 293 aa, Zea Mays
MAVRQVASIHFKNFIAKNWSPNDPDESPKVLESDKAMVRENILGFIVQVPPLLRAQLGESIKTIVHSDYPEQWPSLLHWVSHNLDLQNQIFGALYVLRVLARKYEFKSEDERIPLFHIVEETFPRLLSIFSKLVQIVNPPIEVADLIKLICKIFWSSIYLEIPKQLFDPNVFNAWMVLFINLLERPVPVEGQPIDPEIRKSWAWWKVKKWTIHILNRLYTRFGDLKLQKPESKAFAQMFQKTYSGKILACHMQLLNAIRGGDYLPDRVINLVLQYLTNSVTKNSMYQMMQPQI

SEQ ID NO: 176572 - protein, 433 aa, Zea Mays
MASSEADDEADDSGALAAVGCLRAISTILESISSLPHLFTQIEPTLLPIMRRMLTSDGQDVYEEVLEIVSYMSFYSPTISLDMWTLWPVMMEALNDWAIDFFENILVPLDNYISRGTDHFLACKDPDYQQSLWKALQSIMMDENMEDSDIEPAPKLIEVVFQNCKGNVDHWVEHYLRITIERLRRAHKPYLKCLLVQVIANALYYNPALTLEILNKLGVAADIFNHWFAMLRQVKKSGARVNFKREHDKKVCCLGLTSLIALPAAKIPADALDRIFKATLELLVAYKDQVAEAKKQNEEAADDMDGFDADEEDDDEVDSDKEMGLDDEDGDEVSSLQLQKLAAEARGFQPADDDDSDDDFSDDELHSPIDEVDPFIFFVETVQGLQASDPARFQNLMHTLDFSYQALASGIAQHAEQRKNEIEKEKSEKANAQ

SEQ ID NO: 176573 - protein, 381 aa, Zea Mays
MLVRHVFPEFSSRVGHLRAKAAWVAGQYAHINFSDPNNFRQAMHCIVSGMHDPDLPVRVDSVFALRSFVEACKDLNEIRPILPQLLDEFFKLMNEVENEDLVFTLETIVDKFGEEMAPYALGLCQNLAAAFWRCMASSEADDEADDSGALAAVGCLRAISTILESISSLPHLFTQIEPTLLPIMRRMLTSDGQDVYEEVLEIVSYMSFYSPTISLDMWTLWPVMMEALNDWAIDFFENILVPLDNYISRGTDHFLACKDPDYQQSLWKALQSIMMDENMEDSDIEPAPKLIEVVFQNCKGNVDHWVEHYLRITIERLRRAHKPYLKCLLVQVIANALYYNPALTLEILNKLGVAADIFNHWFAMLRQVKKRSMIRKFAAWA

SEQ ID NO: 176574 - protein, 568 aa, Zea Mays
MLVRHVFPEFSSRVGHLRAKAAWVAGQYAHINFSDPNNFRQAMHCIVSGMHDPDLPVRVDSVFALRSFVEACKDLNEIRPILPQLLDEFFKLMNEVENEDLVFTLETIVDKFGEEMAPYALGLCQNLAAAFWRCMASSEADDEADDSGALAAVGCLRAISTILESISSLPHLFTQIEPTLLPIMRRMLTSDGQDVYEEVLEIVSYMSFYSPTISLDMWTLWPVMMEALNDWAIDFFENILVPLDNYISRGTDHFLACKDPDYQQSLWKALQSIMMDENMEDSDIEPAPKLIEVVFQNCKGNVDHWVEHYLRITIERLRRAHKPYLKCLLVQVCCCVLLSTKTMWSVFLSDELIVVFLDLVLGLSIYFYDNWKKIKTVEVREHDKKVCCLGLTSLIALPAAKIPADALDRIFKATLELLVAYKDQVAEAKKQNEEAADDMDGFDADEEDDDEVDSDKEMGLDDEDGDEVSSLQLQKLAAEARGFQPADDDDSDDDFSDDELHSPIDEVDPFIFFVETVQGLQASDPARFQNLMHTLDFSYQALASGIAQHAEQRKNEIEKEKSEKANAQ

SEQ ID NO: 176575 - protein, 587 aa, Zea Mays
MLVRHVFPEFSSRVGHLRAKAAWVAGQYAHINFSDPNNFRQAMHCIVSGMHDPDLPVRVDSVFALRSFVEACKDLNEIRPILPQLLDEFFKLMNEVENEDLVFTLETIVDKFGEEMAPYALGLCQNLAAAFWRCMASSEADDEADDSGALAAVGCLRAISTILESISSLPHLFTQIEPTLLPIMRRMLTSDGQDVYEEVLEIVSYMSFYSPTISLDMWTLWPVMMEALNDWAIDFFENILVPLDNYISRGTDHFLACKDPDYQQSLWKALQSIMMDENMEDSDIEPAPKLIEVVFQNCKGNVDHWVEHYLRITIERLRRAHKPYLKCLLVQVCCCVLLSTKTMWSVFLSDELIVVFLDLVLGLSIYFYDNWKKIKTVEVREHDKKVCCLGLTSLIALPAAKIPADALDRIFKATLELLVAYKDQVAGGVIHVFSCACVFFPGEYTEAKKQNEEAADDMDGFDADEEDDDEVDSDKEMGLDDEDGDEVSSLQLQKLAAEARGFQPADDDDSDDDFSDDELHSPIDEVDPFIFFVETVQGLQASDPARFQNLMHTLDFSYQALASGIAQHAEQRKNEIEKEKSEKANAQ

SEQ ID NO: 176576 - protein, 362 aa, Zea Mays
MSFYSPTISLDMWTLWPVMMEALNDWAIDFFENILVPLDNYISRGTDHFLACKDPDYQQSLWKALQSIMMDENMEDSDIEPAPKLIEVVFQNCKGNVDHWVEHYLRITIERLRRAHKPYLKCLLVQVIANALYYNPALTLEILNKLGVAADIFNHWFAMLRQVKKSGARVNFKREHDKKVCCLGLTSLIALPAAKIPADALDRIFKATLELLVAYKDQVAEAKKQNEEAADDMDGFDADEEDDDEVDSDKEMGLDDEDGDEVSSLQLQKLAAEARGFQPADDDDSDDDFSDDELHSPIDEVDPFIFFVETVQGLQASDPARFQNLMHTLDFSYQALASGIAQHAEQRKNEIEKEKSEKANAQ

SEQ ID NO: 176577 - protein, 165 aa, Zea Mays
MGSSSSPSPPPPPMIGRAGNLTVFITPPSPASTPRGALRTPPPESPRSDFSTPTRQRIAPSPSPSPSPQKHESPFAAPAVVFTPPPPSAPVKVAPPPVQVPPPQYEKASAGGKHDGSAFGFFWDAVARVQEASTSTWLPGSGWISPSTSGRSTTTTRPQARTWIV

SEQ ID NO: 176578 - protein, 94 aa, Zea Mays
MSGEACSISYILVGAFLKSGHLCFARQLDNWRPRLNQRSGRCFVPVFRICCNPKVMSKHRMGLICNGSNLDAVRCLPPHPRLFSYLDSKSTPIT

SEQ ID NO: 176579 - protein, 72 aa, Zea Mays
MPSRSSSSSSSRPTSWPSCSGCTSWLPRSNHPGGRHSDGADLRHRRSFASLFIESSFFFLFWVYGLTATPRE

SEQ ID NO: 176580 - protein, 58 aa, Zea Mays
MPSRSSSSSSSRPTSWPSCSGCTSWLPRSNHPGGRHSDGADLRHRRSFASLFIELIKK

SEQ ID NO: 176581 - protein, 87 aa, Zea Mays
MCVPPFLYIFSWWHVILVAFNNFDVQIPLYLASSSHVYFVACFVVEAVQSHTPLDYLQQLTHPHTCIQTLLCEQCSLQCKTMHVGKF

SEQ ID NO: 176582 - protein, 70 aa, Zea Mays
MPSRSSSSSSSRPTSWPSCSGCTSWLPRSNHPGGRHSDGADLRHRRSFASLFIAGGTRVGVAHRRQEETW

SEQ ID NO: 176583 - protein, 760 aa, Zea Mays
MASNTGASGWLRGKVKAVTSGDCLLIMGSSKAEIPPEKSITLSYLMAPRLARRGGVDEPFAWESREFLRKLCIGKEVTFRVDYTAPNIGREFGTVYLGDKNVAYSVISAGWARVKEQGPKGGEQNSYLAELLRLEEVAKQQGVGRWSKEPGAAEESIRDLPPSAIGEGSGFDAKGFAVSNKGKSLEAIVEQVRDGSTVRVYLLPNFQFVQIYVAGVQAPSMGRRPSVPTVIAETDDNANIANAEDPEGTPAQLTTAQRLVASAASAEIPPDRYGREAKHFTETRVLNRDVRIVVEGTDSFSNIIGSVYYPDGETAKDLALELVENGLAKYVEWSANMLDVEVKIKLKNAELQAKKDQLRIWTGFKPPATNSKPIHDQKFNGKVVEVVSGDCIIVADDSAPYGSPSAERRVNLSSIRAPKLGNARTDVKPDHFAREAKEFLRTRLIGKQVAVEMEYSRRISTVDGQSAAPTANMADTRVLDYGSVFLGSPSQTDGDDTSSAPSSASQPGVNVAELLLSRGFAKTSKHRDYEERSHYYDALLAAESRAEKAKKGVHSQKESPVMHITDLTTVSAKKAKDFLPFLQRNRRHSAIVEYVFSGHRFKLTIPKETCSIAFSLSGVRCPGKGEPYSDEAIALMRRRILQRDVEIEVEAVDRTGTFIGSLWESKTNMGSVLLEAGLAKLSSFGLDRTSDAYILTRAEQSAKQQKIKIWENYVEGENASNGSTPESKQKQILKFLVVGSFMFRQWVTRGWLQFNSSLHL

SEQ ID NO: 176584 - protein, 608 aa, Zea Mays
MTRKVVEVVSGDCIIVADDSAPYGSPSAERRVNLSSIRAPKLGNARTDVKPDHFAREAKEFLRTRLIGKQVAVEMEYSRRISTVDGQSAAPTANMADTRVLDYGSVFLGSPSQTDGDDTSSAPSSASQPGVNVAELLLSRGFAKTSKHRDYEERSHYYDALLAAESRAEKAKKGVHSQKESPVMHITDLTTVSAKKAKDFLPFLQRNRRHSAIVEYVFSGHRFKLTIPKETCSIAFSLSGVRCPGKGEPYSDEAIALMRRRILQRDVEIEVEAVDRTGTFIGSLWESKTNMGSVLLEAGLAKLSSFGLDRTSDAYILTRAEQSAKQQKIKIWENYVEGENASNGSTPESKQKQILKVVVTEVLGGGKFYVQTMGDQRVASIQQQLASLKLKDAPVIGAFNPVKGEIVLAQFSVDNSWNRAMIVNGPRSVESPDDKFEVFYIDYGNQEVVTYSRLRPVDPSVSSSPALAQLCSLAFIKVPSLEDDFGQEAAEYLSECLLSSSKQYRAMIEEHDTSGGKSKGQGTGNVLIVTLVDAETESSINATMLEEGLARLERSKRWDTRERKTALQNLEQFQDKAKKERLRIWQYGDVESDEDEQAPPARKPGGRR

SEQ ID NO: 176585 - protein, 81 aa, Zea Mays
MERVGGGCPWGGEQEREGAAAHGEESKRGRGRLQPNWGEGEGAARVGEERGAPIHRIEINGPNSLSPLSSQPQRKKCQKIY

SEQ ID NO: 176586 - protein, 81 aa, Zea Mays
MWTRLGSDSWAPSLTPGSSSHPCVDMRGSGGSHSSSHLSITSLAHGPSLLGAVIRRRRRAHFICVWVPLGRTISHADLKHQ

SEQ ID NO: 176587 - protein, 313 aa, Zea Mays
MMRNMGYPKLELGLSAMSKDDLADNLAYNSLKGLILIKALRAQKGADDESCQIALGNHRSEVISLRNEVLKKDKILFSLVDKIKTREVKLSAQTEAHKAEVESLKKKLAEMSENFEVEKAKQEISEMVTSRVQKNVEELWDSKERCYETTLECAKKLENSFARVGAYSLEQKFIRGDPEGVIQWIGEEAEAFDEILSDRGDFCAFAGARGVAAILEKAGCEHVKATAQPESIFSADDTKDPSAEASLLGGRFYSDVWMKGGHEMANEAIKKNERESHNAREEAKRAEEVAEHARIIAGLSPPWSHTILKPTRL

SEQ ID NO: 176588 - protein, 131 aa, Zea Mays
MGPMLDCERIVVSSYCGTSSCSTMPMTPYAISSLPWYNAAVRSSLQPAMASRVLAFVVELLNPSSLARDFIVARVLTVFVSSPARCRLQSKVVVVPCVVKKSQVLGEDEASSVIFTKCSTKSSNKSSILWV

SEQ ID NO: 176589 - protein, 86 aa, Zea Mays
MAEKGTDLKGKRLSSPYRIVYKSIISVKGMYVISHRPRPVPIIDEQYPRTVHADLYLLVRHACTFTFCQVEGTYVIQYCLYFFMII

SEQ ID NO: 176590 - protein, 67 aa, Zea Mays
MSSDTDMSKVFEDRTFVSSILNSLPGVDPNDPSIKDLLASLHSQGEEEKKEDKLDKTEDEKNCFKLE

SEQ ID NO: 176591 - protein, 369 aa, Zea Mays
MAKPPNSIGRSSMPRSNEGLRLIFSAVIGIMLGYLFGISFPTVNITKLHFPSSIISYIEDRNSGITTQTLLNHAWASANNRKKNSSESNTDEIPKIYVPTNPKGAERLPPGIVVSETDLYPRRLWGDPSEDLTSEPRYLVTFTVGIGQKANIDAAVKKFSDKFTIMLFHYDGRTTEWDEFEWSKRAIHVSVRKQTKWWYAKRFLHPDVVARYDYIFIWDEDLGVEHFNAEKYIELVRKHGLEISQPGLQPDKGLTWQMTKRRGDQEVHKVTEERPGWCTDPHLPPCAAFVEIMATVFSRNAWRCVWHMIQNDLVHGWGLDFALRKCVEVFPAIIMHNTSPPHFFANPRTSHTVHTFPLTREHIAASTVI

SEQ ID NO: 176592 - protein, 368 aa, Zea Mays
MAKPPNSIGRSMPRSNEGLRLIFSAVIGIMLGYLFGISFPTVNITKLHFPSSIISYIEDRNSGITTQTLLNHAWASANNRKKNSSESNTDEIPKIYVPTNPKGAERLPPGIVVSETDLYPRRLWGDPSEDLTSEPRYLVTFTVGIGQKANIDAAVKKFSDKFTIMLFHYDGRTTEWDEFEWSKRAIHVSVRKQTKWWYAKRFLHPDVVARYDYIFIWDEDLGVEHFNAEKYIELVRKHGLEISQPGLQPDKGLTWQMTKRRGDQEVHKVTEERPGWCTDPHLPPCAAFVEIMATVFSRNAWRCVWHMIQNDLVHGWGLDFALRKCVEVFPAIIMHNTSPPHFFANPRTSHTVHTFPLTREHIAASTVI

SEQ ID NO: 176593 - protein, 366 aa, Zea Mays
MAKPPNSIGRSMPRSNEGLRLIFSAVIGIMLGYLFGISFPTVNITKLHFPSSIISYIEDRNSGITTQTLLNHAWASANNRKKNSSESNTDEIPKIYVPTNPKGAERLPPGIVVSETDLYPRRLWGDPSEDLTSEPRYLVTFTVGIGQKANIDAAVKKFSDKFTIMLFHYDGRTTEWDEFEWSKRAIHVSVRKQTKWWYAKRFLHPDVVARYDYIFIWDEDLGVEHFNAEKYIELVRKHGLEISQPGLQPDKGLTWQMTKRRGDQEVHKVTEERPGWCTDPHLPPCAAFVEIMATVFSRNAWRCVWHMIQNDLVHGWGLDFALRKCVEPAHEKIGVVDAQWIVHQAVPSLGNQGKSDNGRAPWEGVR

SEQ ID NO: 176594 - protein, 119 aa, Zea Mays
MGNSRYLAKILHKRIRTERLTTRRQTELCRVRVPAFLFRRPFRRRRRGDVSRGSSRSGVGCGSRAERSRAAACSPRRPLPPRRRSTGTARAPESFGFRMKACNMRIQPEGNMDERRSYG

SEQ ID NO: 176595 - protein, 93 aa, Zea Mays
MFSSFTTSNLILSISSSNVLVCLFMEVTHLFNMCNSLDMWGILSINRKQINRCPRNVTINNLKGAHLCRRMCCTIISKFNMKQAVLPTSQIFV

SEQ ID NO: 176596 - protein, 87 aa, Zea Mays
MVYLRKERLPAGVHGKLRQRKYGPFSILKISDNAYVVDLPREMNISNTFNVADISLYHPEQALYEENSRSSFNQVGENDEGHHMQGS

SEQ ID NO: 176597 - protein, 152 aa, Zea Mays
MKEVSLPAPAPPTRTAPPKPEKQSPALAPVKDVLPFSSNPENGNIQEPEDDAHAIYVRNLPLNATETQLEDEFKKFGTIKQNGIQVRSNKIQGFCYGFVEFEDSTSVQSAIEASPVMIGGRQCYIEEKRTPGSRGQSIYKLILNLMQCLCQS

SEQ ID NO: 176598 - protein, 396 aa, Zea Mays
MAYLPPHKRQPSTTASTPIPAPNPPPPSLSSSLRSLSLSSPRGRGRGRGAVGRHPLASTKIFRAAGCISRWFPLPPFSPAGDGEEYILRLEPFPCPPIEHRTGAKPLALVVASTPGQGSSGSTAAAVTSIAEQFLPDLLAAAERVKAEGAPKDELVKLSLVARLGTVLFECQPGGSPVSLDELRQAAKAGEDGSRSQLRKTFYTSLSSECLDDMERTMVKRIGLDFDSSKKHYHVKVSDKNRSDSTISCKCTVEEDGSLAIHKVELNQVRHLVEDISCLFKGLDLRLMLSKKRILKNLDSEVENAVKSLVSTAIIDPNVKGGVRWPLGKESIGERFSIVGVWHTDYKAFRNETMRLKLRHADRFDHRTSTGGVSDEVTFKLTAISCKLEMIWRRAL

SEQ ID NO: 176599 - protein, 227 aa, Zea Mays
MAGLSLLCGDCGAQLRSVEEAQAHAEATNHANFVESTEAVLNFVCSDCGKPCRSQTEVDLHTKRTGHTEFADKTAEAAKPIDLEAPLKPASEDVMDVDTSASASGEPQEMVVPEVNKEMLTDLEGMGFSTARATRVLHFSGNSTIEGAINWLSEHQEDIDIDEMPLVPANSKTEDNKPSLTPEEMKIKAQELRDRARKKKEEEERRMEREREKMLSSVMCGRTYTRR

SEQ ID NO: 176600 - protein, 232 aa, Zea Mays
MKIKAQELRDRARKKKEEEERRMEREREKERIRIGKELLEAKRIEEQNERKRMIELRKLEKEEEKRAREKIRQKLEEDKAERRRKLGLPPEDPAAAKPSAPLPVEEKKSALPVRPATKAERMRDCLRNLKQQNKDDDAKVKRAFQTLLTYIGNVAKNPDEEKFRKIRLTNATFQERVGNLHVGIEFLELCGFEKLEGNEYLFLAREKVDKAILNTAGAELNSAITNPFFGVL

SEQ ID NO: 176601 - protein, 365 aa, Zea Mays
MPLPDQVDLHTKRTGHTEFADKTAEAAKPIDLEAPLKPASEDVMDVDTSASASGEPQEMVVPEVNKEMLTDLEGMGFSTARATRVLHFSGNSTIEGAINWLSEHQEDIDIDEMPLVPANSKTEDNKPSLTPEEMKIKAQELRDRARKKKEEEERRMEREREKERIRIGKELLEAKRIEEQNERKRMIELRKLEKEEEKRAREKIRQKLEEDKAERRRKLGLPPEDPAAAKPSAPLPVEEKKSALPVRPATKAERMRDCLRNLKQQNKDDDAKVKRAFQTLLTYIGNVAKNPDEEKFRKIRLTNATFQERVGNLHVGIEFLELCGFEKLEGNEYLFLAREKVDKAILNTAGAELNSAITNPFFGVL

SEQ ID NO: 176602 - protein, 51 aa, Zea Mays
MVAPVVIASAGLGMLAGVAMANRSLGDGLPAAYRCDARPRSAAAGRLQLME

SEQ ID NO: 176603 - protein, 176 aa, Zea Mays
MILVTFISIHFIIICDVLFCAHMRCTRFYLLNLGVTVSADTVVPQLELEEWLKERELMTRVIKLHLTRAHERMKRQADKHRSERHFEIEDCVYLKLQPYIQSLVATQENQKLAFKFFGPYQILDKVGSVAYRLHLPSSSFIHPVMYVSQLKKAVGKTRKWFHLYLRLLDLSRCQFG

SEQ ID NO: 176604 - protein, 674 aa, Zea Mays
MVLSFSVPARSQDQPSTVLKMKVGADPSTQDVMEEAALKAKHVAERKFHARNTKGARRILSLNAMADEEEVKKQYRKLTLQLHPDKNKSVGAEVAFRLISEAWSVLSDKSRKMLYDQKRRDHCVASVSNGADTFWTSCNSCRMQYEYLRVYLNHNLLCPNCHHAFMAVETGFPCNGTSSSFTWTTKSQQQQNHDTVADHSYQSASRTSSIPDTGHGAYQQENTYELYKNQSFQFTQYPKTTCVAATNGYSTHASEKSKRKHEENYIYNYISSGKSNEYPSGRGRHSKRRQNFSNGCASVEVNGQNLAATAGMSGIADGGRFNGTSGEKFRSAVNARKANVLREIFQLDTRGLLLEKAKAEVREKLQVWNILTSSQFVEKRKSDRREKHIQNNIKANGILSDNPTNKCKKCISKDADTEIPVTDVMNPEQMRVPMSIDVPDPDFHDFDKDRTERAFGNDQIWATYDSEDGMPRLYAMVQKAISMKPFRIRMSFLNSKSNNELAPINWIASGFTKTCGDFRIGRYQITETVNIFSHRVCWSKGPRGIIRIIPQKGDTWAVYRNWSPDWNELTPDDVIYKYEIVEVIDDFTEEQGVTVVPLLKVAGFRAVFHRLTGSSVVRRIPKEELFRFSHRVPSCLLTGEERNNAPKGCHELDPAATPVDLLKIITDVKDDTTR

SEQ ID NO: 176605 - protein, 53 aa, Zea Mays
MSQHQGALLHHREHLATTIHATAAVRLRSRRRFNLGSWHMSIACAHHTYPWPH

SEQ ID NO: 176606 - protein, 127 aa, Zea Mays
MCRTEGDKPMKQSSSIGTMEESAMLLHTRRRTTQRRAVRDRRLSKDSASNDVRSKARSWPGKLNGADCPAARTRDGHAARDPSIRNRRTTTRGARRALQHGQQHSIDKNTVHRHGRLGRAGRRRAET

SEQ ID NO: 176607 - protein, 99 aa, Zea Mays
MPVTFGFVHNTRTEHVVFDIVDMEYPYNAIIGHGTLNAFEAILYPAYICMNIPSEQGPIAIHGSQEAARKAEGTWTDSKAIHNIDGANACEQYKYRREK

SEQ ID NO: 176608 - protein, 71 aa, Zea Mays
MLGCRDPSSSQNGPTSQSPSPRRTFSSRITLTMMLWLYLVSSRDFWSIMFWLIKAVQWISYLLRPSDKCKS

SEQ ID NO: 176609 - protein, 76 aa, Zea Mays
MQSMTKLQKAVPKGAQCKFFAQKSFLRECRAKYRRNIRRSAKSQREYRRNRRRRSSKDVPKGMQNLHKKISGAAKK

SEQ ID NO: 176610 - protein, 262 aa, Zea Mays
MRQSGLVVTEGASEEGAPATEAEQADIEEGNADEEEIDYNTVMPSKPSHLDFGKSTVSEADMPMMLKLGYFGEAEKKLIRFGREETTPKPENDEVVVFRSYFKAGLRFPLHEMIGDVLEDFEIYLHQLTPNAIVRLSVFIWALRSQGVEPLVKALCRVHELHYQTKAREDGLHKNFGYYNFAYRKDMKTPVISYRTKWPTGWKNEWFYVKVDEKNEKIVQSPLDLTFGLTRPLCDMLQGSPCREAVGEFRVVSEHIGNRDLV

SEQ ID NO: 176611 - protein, 416 aa, Zea Mays
MRPIRLPEPPGVDGMETPEIFSGSGTGGAAVVRRAVLIGNGSPGAENQCLGLARALGLADNLTFYRVTRPRGGINEWLHFLPISMHKFIDQILRQFFRNTRFAIVVQGRKPRVLNGASVGLSAVLEANVKKIVTVARDTYEKEGPTLVVACGWDTISYSSLIRKVASDNVFVIQIQHPRSRLDRFDLVVTPRHDYYALTASGQQEVPHLFRRWITPQEPPRSNVADSAALRLAAIAWHDELAPLPKPLLIVSIGGPTRNCKYGVDLARQLITSLYNVLDSCGSVRISFSPRTPWKVADTIFKEFAGHPKVYIWNGEEPNPHMGHLAWADAFVITADSISMLSEAGSTGKPVYVIGTEHCKWKFSAFHKTLRERGVVRPFTGLEDISNSWSYPPLNDAIEVATRVREVIAERGWTVG

SEQ ID NO: 176612 - protein, 230 aa, Zea Mays
MACSFSAAITVSSAPTPAARPLAAATQSVCIARSAVATTARPLRLAASRSARATRLVARASVVDDLPLVGNKAPDFEAEAVFDQEFINVKLSDYIGKKYVILFFYPLDFTFVCPTEITAFSDRYEEFEKLNTEVLGVSIDSVFSHLAWVQTDRKSGGLGDLKYPLVSDVTKSISKAFGVLIPDQGIALRGLFIIDKEGVIQHSTINNLAIGRSVDETMRTLQELNGVFPS

SEQ ID NO: 176613 - protein, 193 aa, Zea Mays
MPMKKLIVIAQARMFSRSTSFPDNFLNAKYIPETSINIPSKEGPHRQLSPSNRIIRSTSGNDNVNSRSLFDNIQQKKLAAHGANAARRSFKDFLSTLTRTKESISRATRLAMECAKFGIAGEVMYDAFGVRLQAGKQAKVLNQIVYELPSEHPLAETRPLRELLGHTPPQVFAGEVLGFAVATFIAMIAGLGS

SEQ ID NO: 176614 - protein, 242 aa, Zea Mays
MKSLQFYEVLIVSLCFAIFAHGFRHTFSSFALKELNHKKNKDRSTSLDSMPMKKLIVIAQARMFSRSTSFPDNFLNAKYIPETSINIPSKEGPHRQLSPSNRIIRSTSGNDNVNSRSLFDNIQQKKLAAHGANAARRSFKDFLSTLTRTKESISRATRLAMECAKFGIAGEVMYDAFGVRLQAGKQAKVLNQIVYELPSEHPLAETRPLRELLGHTPPQVFAGEVLGFAVATFIAMIAGLGS

SEQ ID NO: 176615 - protein, 214 aa, Zea Mays
MIFRVKCPLELYGNILSCGILGYPFYVNLQQGIQDSHIWRLSSSRQYTNNSAYDALFHGTILFEPCERIWKSRAPPKCNFFMWLVAHNRCWTADRLDKRGLPHPARSLFDQVDENLQHLLIKCVFARQLWFSILQHSGLSALAPQPPDLSLGCLFRLISSFCPPEAAANCQTPSFSARFCENRFGKNVQNQREHKIDSVVTKVGICHFLDSKPY

SEQ ID NO: 176616 - protein, 51 aa, Zea Mays
MYHFREIAMHSIHSIEFYTHLCYRVRCPFGYVCIMEWNRLAQCSQGENYTE

SEQ ID NO: 176617 - protein, 81 aa, Zea Mays
MPVHEPYPSAVLDEQVHQMLHNSRAELDAPSAASSLQGVAICLLMRFQLQNWWCHFLMDNPKQPGAYGGSQCSSSVQKAVC

SEQ ID NO: 176618 - protein, 108 aa, Zea Mays
MPVHEPYPSAVLDEQVHQMLHNSRAELDAPSAASSLQGVAICLLMRFQLQNWWCHFLMDNPKQPGAYGGSQFISSKGSLHILRSIIVRRRKRFYTAKRACFFTKVQQP

SEQ ID NO: 176619 - protein, 124 aa, Zea Mays
MVGSVGNGLADLDAGAISMNGVGKALYPAKAAAAAAAETLPVELEPPEAVVAPTGEEAANGKREIVMGRNVHTSCFAVKEPDADDEETGEREATMASILALYRRSLVERTKHHLEYDMDAERVC

SEQ ID NO: 176620 - protein, 489 aa, Zea Mays
MVGSVGNGLADLDAGAISMNGVGKALYPAKAAAAAAAETLPVELEPPEAVVAPTGEEAANGKREIVMGRNVHTSCFAVKEPDADDEETGEREATMASILALYRRSLVERTKHHLGYPYNLDFDYGALAQLQHFSINNLGDPFIESNYGVHSRQFEVGVLDWFASLWELEKDEYWGYITNCGTEGNLHGILVGREVFPKGILYASRESHYSVFKAARMYRMDCVKVDTLMSGEIDCADFQRKLLQNRDKPAIINVNIGTTVKGAVDDLDLVIKTLEENGFKGRFYIHCDGALFGLMIPFVKKAPQVTFKKPIGSVSVSGHKFVGCPMPCGVQITRLEYINALSSNVEYLASRDATIMGSRNGHAPIFLWYTLNRKGYRGFQKEVQKCLRNAHYLKDRLKEAGIGAMLNELSSTVVFERPKDEVFVRRWQLACEGNICHVVVMPSVNIDKLDYFLNELVEKRATWYQDGISQPPCIARVVGFENCLCGRHK

SEQ ID NO: 176621 - protein, 273 aa, Zea Mays
MYRMDCVKVDTLMSGEIDCADFQRKLLQNRDKPAIINVNIGTTVKGAVDDLDLVIKTLEENGFKGRFYIHCDGALFGLMIPFVKKAPQVTFKKPIGSVSVSGHKFVGCPMPCGVQITRLEYINALSSNVEYLASRDATIMGSRNGHAPIFLWYTLNRKGYRGFQKEVQKCLRNAHYLKDRLKEAGIGAMLNELSSTVVFERPKDEVFVRRWQLACEGNICHVVVMPSVNIDKLDYFLNELVEKRATWYQDGISQPPCIARVVGFENCLCGRHK

SEQ ID NO: 176622 - protein, 164 aa, Zea Mays
MPCGVQITRLEYINALSSNVEYLASRDATIMGSRNGHAPIFLWYTLNRKGYRGFQKEVQKCLRNAHYLKDRLKEAGIGAMLNELSSTVVFERPKDEVFVRRWQLACEGNICHVVVMPSVNIDKLDYFLNELVEKRATWYQDGISQPPCIARVVGFENCLCGRHK

SEQ ID NO: 176623 - protein, 68 aa, Zea Mays
MTSSGTVAQQLPRTEARSLSGHEGAVLAVRFNRDGNYCLSCGKDRTLRLWNPHTGAQVKTYKSHAREG

SEQ ID NO: 176624 - protein, 140 aa, Zea Mays
MTSSGTVAQQLPRTEARSLSGHEGAVLAVRFNRDGNYCLSCGKDRTLRLWNPHTGAQVKTYKSHAREVRDVHSSSDNAKLVSCGADRQIFYWDVASGRVIRKFRGHNSESQLVMTVRCVHLTAGLKTTTLFRQLILFKIV

SEQ ID NO: 176625 - protein, 238 aa, Zea Mays
MTSSGTVAQQLPRTEARSLSGHEGAVLAVRFNRDGNYCLSCGKDRTLRLWNPHTGAQVKTYKSHAREVRDVHSSSDNAKLVSCGADRQIFYWDVASGRVIRKFRGHNSEVNSVKFNEYNAVVVSAGYDRTVRAFDCRSQNNDPIQTIDTFQDSVMSVNLTKTEIIAGSVDGTVRAFDIRMGRETVDNLGHPVNCVSLSNDNNCLLANCLDSTVRLLDNRLAADPLFLGSWRLLSSPPP

SEQ ID NO: 176626 - protein, 84 aa, Zea Mays
MSVNLTKTEIIAGSVDGTVRAFDIRMGRETVDNLGHPVNCVSLSNDNNCLLANCLDSTVRLLDNRLAADPLFLGSWRLLSSPPP

SEQ ID NO: 176627 - protein, 142 aa, Zea Mays
MPISKAMKDLSSSKPAQEMPRDRPSKPIYIEIGRSTLREKDLQSMKKLGYFSSKVNMRLTGNETTLNPGKDEVVVYRSFFKVGLQLLKYKMIVKVLQRYEVYMHQLNLNAIVRLSVFIWVVRSQRGVAALPSYRAHVHQSLP

SEQ ID NO: 176628 - protein, 56 aa, Zea Mays
MESIEQAQPGQTPVCVDLAKARWANLVLRSPLVDHHMQTLGLGRLSGWGEELWLAT

SEQ ID NO: 176629 - protein, 61 aa, Zea Mays
MTYVSRNSCICLPFPRILHCMNRFAPPESTPPLLGGTLPGGYVPLSPSIHSQCPIVFSCME

SEQ ID NO: 176630 - protein, 1234 aa, Zea Mays
MASNLISASSLETETAMADPGEGPTAPPPPRLQEIAHDVPDHTVTQFSASQDTETAAGDAATHDSAQPKAESAHCAVGEPEQTTTEADGQPHVATMPQEVAALPSPAETPVQESAAQPTLPPQKQESPVPELASSVHEEEKDASKARGDEGEEKPTAARRPQLKETVNLGAVEQTTTQEVAALPSPAETPAQESAAKATPPPEKQEGGAPELASSVHEEEKDASKASGDEGLEKPASRRWRWLRAVVGLLFLRPKSGETKMPTPPSDKQPVSGLEDTKPTTGEMPPPHKDSGSPVLVPSKPEVGKTEGEMKTAAVDVKKPVSGQEEQKPAAKKKPSRKYSSGAPRREMEDGERSKGGRVEIETQVGKATPQLEGERPMRKKLQKAIRLVQLLMSLYNKHRSQSQEKKPDTASDPGGEEDSEARLESAPEDKKPASAEQEEQKPAAKKKPSRKYSDGAARKLKDDGEMGKGRRDEIQVGKAIPQLEGERPMRKKLQKAIKLVQLLMSLYNKHRSQSQDRKPGTASGPGGEEDSEAKRASAPEEKKPQHRNWPREEVRLEHILEETFTRLLLTEYNKQLSGVSQKCLLTFSIFELASEVKKQIMIYWWVAEFNLRHRSDPARALSGGGETSDSPALQGKGADAADSRDDAESIFIMLSDHGFLVPMKNWCSKVIHGCQVNPLVHWMLKRMARGCRFAELDDKGSPEDLQPNSNILCLTAGNRHVLQQMHMADESQTQAKARKKDESQTQTKKKDHSQAWGKSKVTNEPSMQGKGNDVQDQQQPEAHVGSTSTAAADKTPSQKDEDPTQVTEQLTNKGPQDVKPSSEPEHGDEIPPPSFEGKRVILNLNAHVYPICKSAFSNLAECLVVLQLGRWNNLDDKTYMEVDGLESRDAIGSLKNLRYLSLRGLSRLTELPKGIESLKKLEILDMRGCQNLARVSAGVIKQLKQLTHLDLTECYMLEHIGRGITSLTELQVFKGFVFATGTRGKEACRIQDLRRLKKLQKLTICITTDANVGKREMADLKYLASLRKLTITWSEIPSILEGGTKKAREKRRGLVKTWTSFQLPPDLMKLDIRCYPKEELELECNEKLERLYLRGGDMRRCSTKEPSSIKTLRLRYLRHFEMGWSDIRSKFEKLEYVEIVVNDKNPMEIPDFTLDWDGVWTKDEKEEHNNHQRLQAAPNKKDVGMDKDVQDDGSGNHKEPTKAASTITKVNKDKAATKERAGKQERVASRKGP

SEQ ID NO: 176631 - protein, 135 aa, Zea Mays
MHGASLSLQPSAIHSCSNVLNVQTSSSLPQFWSRFGARWCRMVQPSLFSLSPNTMPSQQHSTITLALRPPISLLAARRAPLLGLPAAVVVSASARDRGRVYRVVANTLLLIRLSLRLCALLRARCGVVYCTPALA

SEQ ID NO: 176632 - protein, 55 aa, Zea Mays
MNRYFRIQNYGYGARPGRRLSQTKVGGSRSCTQGSFGAMAQGGTDLKMKRLRGPQ

SEQ ID NO: 176633 - protein, 221 aa, Zea Mays
MKAFSLDFNLKAHMKTHSADNYHVCQYPECGRRFTQESKLRAHIRAQHEKAVGLQNPGASSMNHSAIGGPHQPPRPAKVSAAPPAPSAERPYVCPYDGCDKAYIHEYKLNLHLKKEHPNHYQDGGPNGAAAPSKRSISKSSHRSKLDITSRMPPANIPKHRGYATPLPAVVSLPEEQQLLRKVVYEDDSEETEEEGDNNGEDRWNYKRAASSDDEETEDEE

SEQ ID NO: 176634 - protein, 1209 aa, Zea Mays
MGVPEAVALEIPAVEEGSPTPLARVPPRIRRRLLQAGSGENGGKAPTAEEIETKLRQAHLRRQQFHEALSSKARRSIKSPSGSLQEEDRGQLLEAKLLAARQKRLTLLEKEQSRLAKLDKLRQAVKSDAEMRFEREREELGMKVESRVQKAENNRMQLMHDRLKRQAALEERTKRYFMQRLTWENKYRERVQSAIQKCNAAEKRRLGLLESEKRRAQSRLLQVQLAVKTASNQRETERSKLNEQLEEKLQKAEQQRADYLKQRGNPHSSMHSSSVKNGEFLSRKLARCWRRFRTSRKTTVVLARAFDALGINQRSVVSMPFEELALCIESPAVLQTTKALLDRLESRFVFSQSSTSSKPENIDHLLKHLGSPKRKIPLSNVGTSEATLKNAVGNYDSSTLSRYSQRIALCAYMILGHPKSVLSGQGEQEKFLMESATIFVKEFELLVKTVLDALDGACILSWSVIDDATPVRSSYEESSSIVADLKKFRTQLLAFDKAWCAYLYHFVAWKAKDAKSLEDELIRAACKLELSMIQTCKITEGESDNLGGDLKAIRKQVAEDQKLLRESIQHLGGEAGIGMMESALFETRSKFFQAKEKRSSIATTVANVASPSVTCSSGQSNDSETGIGMMESALFETRSKFFQAKEKRSSIATTVANVASPSVTCYSGQSNDSDTGENCNMDAEKASRVVQSLFGALSSRYENSKGGKLMSNAAPEKMPTENEQIVNEILHDIHGSFADISDGAGTVEGDFKVKVKETMEKAFWDVVADSMRGDMPDYCYLVSLVKEIREALEELSPTGWKEEISDNINLEILTQLLESGSQDRQYLGQILQYSLDKLRKLSSPVKEHEMKKSHDTLLGELVEDSKSNYKDPNSFVLCVIKGLRFTMEELQALKTEVTRARIQLLEPLIKGSGGVEYLQKSFAGRCGSPSDALASLPSTARWIFSLKDVVEEQWNEHVSSLSILPEADHVQTLVATLRTGHAVAGVQSVIPAAGLPECRGEILGKLIRIGLLQLISSMEGVERESVPETFMLNWLRLRSVQSKFQQVIVIATSMLVLHQVLASENPKITSSELENATSELFNVLTRLLDNFPDVGTEKIIEAMMYSSTSRSLSDHERMNARKEILTRVFLRSLQTDDTVFKKVSQSVYCAFRAVTLGGSGEKGRMLADASLRRVGATKLTARLVKAAEVLIKAAMVSEQVHGPWYTQLL

SEQ ID NO: 176635 - protein, 1052 aa, Zea Mays
MGVPEAVALEIPAVEEGSPTPLARVPPRIRRRLLQAGSGENGGKAPTAEEIETKLRQAHLRRQQFHEALSSKARRSIKSPSGSLQEEDRGQLLEAKLLAARQKRLTLLEKEQSRLAKLDKLRQAVKSDAEMRFEREREELGMKVESRVQKAENNRMQLMHDRLKRQAALEERTKRYFMQRLTWENKYRERVQSAIQKCNAAEKRRLGLLESEKRRAQSRLLQVQLAVKTASNQRETERSKLNEQLEEKLQKAEQQRADYLKQRGNPHSSMHSSSVKNGEFLSRKLARCWRRFRTSRKTTVVLARAFDALGINQRSVVSMPFEELALCIESPAVLQTTKALLDRLESRFVFSQSSTSSKPENIDHLLKHLGSPKRKIPLSNVGTSEATLKNAVGNYDSSTLSRYSQRIALCAYMILGHPKSVLSGQGEQEKFLMESATIFVKEFELLVKTVLDALDGACILSWSVIDDATPVRSSYEESSSIVADLKKFRTQLLAFDKAWCAYLYHFVAWKAKDAKSLEDELIRAACKLELSMIQTCKITEGESDNLGGDLKAIRKQVAEDQKLLRESIQHLGGEAGIGMMESALFETRSKFFQAKEKRSSIATTVANVASPSVTCSSGQSNDSETGIGMMESALFETRSKFFQAKEKRSSIATTVANVASPSVTCYSGQSNDSDTGENCNMDAEKASRVVQSLFGALSSRYENSKGGKLMSNAAPEKMPTENEQIVNEILHDIHGSFADISDGAGTVEGDFKVKVKETMEKAFWDVVADSMRGDMPDYCYLVSLVKEIREALEELSPTGWKEEISDNINLEILTQLLESGSQDRQYLGQILQYSLDKLRKLSSPVKEHEMKKSHDTLLGELVEDSKSNYKDPNSFVLCVIKGLRFTMEELQALKTEVTRARIQLLEPLIKGSGGVEYLQKSFAGRCGSPSDALASLPSTARWIFSLKDVVEEQWNEHVSSLSILPEADHVQTLVATLRTGHAVAGVQSVIPAADNTGLPECRGEILGKLIRIGLLQLISSMEGVERESVPETFMLNWLRLRSVQTCLFCIRC

SEQ ID NO: 176636 - protein, 51 aa, Zea Mays
MVSVSDWDRCAILMFFLFLLIYYTKLHFRVTCSNLLIDTLAISCAVAYNIL

SEQ ID NO: 176637 - protein, 50 aa, Zea Mays
MPSSGVILRKDGFCLQEYFRLEHGWDLTAKFPIMLFFILRNTNDPKDGST

SEQ ID NO: 176638 - protein, 142 aa, Zea Mays
MPEMTGYDLLKAIKALSSPNPIPVVVMSSENEPQRISRCLTAGAEDFILKPLKTKDVQRLRNCSSAARPRDDAAHQCESLRRSSRKLRSDQVAAPGHRSQPTTGLTMVLLFIVSCCSSFRRSARAYNFNGCPPPPGAACLQH

SEQ ID NO: 176639 - protein, 118 aa, Zea Mays
MGQGGEVKAAPAVRVLVVDDSPVDRKVVELLLRNHNHQGGAAPFHVTAVDSGKKAMEHLRLMEQGGQLDSCAADANVSTTSTTPIPSLMYSPPNRRPPYMSADAELSLRNGERFPLVY

SEQ ID NO: 176640 - protein, 187 aa, Zea Mays
MEHLRLMEQGGQLDSCAADANRITIDIVLTDYCMPEMTGYDLLKAIKALSSPNPIPVVVMSSENEPQRISRCLTAGAEDFILKPLKTKDVQRLRNCSSAARPRDDAAHQCESLRRSSRKLRSDQVAAPGHRSQPTTGLTMVLHASSIELSHYFQFLLKFVLLAYAVLCLTELLHRWSNGSVLSLWSA

SEQ ID NO: 176641 - protein, 492 aa, Zea Mays
MLCSGNSGMLVLGRWSQCLAKASWFTTSHRLEASTDQQLDQHLPLFDLPPKILCKVVNVELRAETDSDEVYAQIMLQPEADQSEPTSPDSEPPEPERCNVYSFCKTLTASDTSTHGGFSVLRRHAEECLPQLDMTQNPPWQELLAKDLHGNEWHFRHIFRGQPRRHLLTTGWSVFVSSKRLVAGDAFIFLRGENGELRVGVRRLMRQLNNMPSSVISSHNMHLGVLATASHAISTGTLFSVFYKPRTSRSEFVVSVNKYLEAKNHKVSVGMRFKMRFEGDESPERRLSGTIIGLGSMPANSTSPWANSDWRSLRVQWDEPSAILRPDRVSPWELEPLDATNPQPPQPHLRNKRARPPALLSIAPELPQVFGFLKSPAEPAQAFSFSRPQQTQELYHSNPSSIFSSSLNVGFSSKNDRSTPINSHLYWTMRQTRTESYSASINKAPTEKKQESATSGCRLFGIEIGSAVSPVATVASVGQDQPPALSVDVESD

SEQ ID NO: 176642 - protein, 61 aa, Zea Mays
MWLLFRAHLRSVVLAKLGFLTLLLCISLNVVVPPWSGAAVGPTVDPSTSVVPGQTHTSKRI

SEQ ID NO: 176643 - protein, 342 aa, Zea Mays
MSNKMWDSLVDHAKTCVLSGKHYVYYARDSRNVGAIFNNIYEFTGLIADDQFISAENLTDNQKGYADALVKKAYEDWMQVVEYDGKALLSFKQKKKSVMTRSDAAVASTNHPASNGSAISQKQLSLPAKAGQTSSAGIMNEDGTRNAYNANGNQSARYAATTQNIPANVAMQYDRSAVSPESQFSGSSLQSQASRGSNTLALGPPQQHQSFAFPALGQSMRPTGLNPFEEWPQQQENCGGVDDYLMEEIRMRSHEILENEEMQQMLRLLSTGGAGTNLTEDGFSFPSYMPAPSPKLSYEDDRTRAPGKAVVGWLKIKAAMRWGIFVRKKAAERRAQLVELDD

SEQ ID NO: 176644 - protein, 607 aa, Zea Mays
MPRPGRLQRSGSKRGLDPTGGGGGGDNDDHAPKRPRIPALARSSPKRIEGPDGRNLQLQFRSQLALPIFTGGKVEGEQGAAIHVVLLDANTGCVVTSGPESFAKLDILVLEGDFNKDEDEDWTEEEFESNIVKEREGKRPLLTGDLQVTLKEGVGTIGELTFTDNSSWIRSRKFILGLRIAPGFYEGIRVREAKTEAFPVKDHRGELYKKHYPPTLKDDVWRLEKIGKDGAFHKKLNASGIYTVEDFLQLLVRDQQRLRSILGSGMSNKMWDSLVDHAKTCVLSGKHYVYYARDSRNVGAIFNNIYEFTGLIADDQFISAENLTDNQKGYADALVKKAYEDWMQVVEYDGKALLSFKQKKKSVMTRSDAAVASTNHPASNGSAISQKQLSLPAKAGQTSSAGIMNEDGTRNAYNANGNQSARYAATTQNIPANVAMQYDRSAVSPESQFSGSSLQSQASRGSNTLALGPPQQHQSFAFPALGQSMRPTGLNPFEEWPQQQENCGGVDDYLMEEIRMRSHEILENEEMQQMLRLLSTGGAGTNLTEDGFSFPSYMPAPSPKLSYEDDRTRAPGKAVVGWLKIKAAMRWGIFVRKKAAERRAQLVELDD

SEQ ID NO: 176645 - protein, 520 aa, Zea Mays
MEEIFSSSSEVSWLFQSSLVEKLKGDFNKDEDEDWTEEEFESNIVKEREGKRPLLTGDLQVTLKEGVGTIGELTFTDNSSWIRSRKFILGLRIAPGFYEGIRVREAKTEAFPVKDHRGELYKKHYPPTLKDDVWRLEKIGKDGAFHKKLNASGIYTVEDFLQLLVRDQQRLRSILGSGMSNKMWDSLVDHAKTCVLSGKHYVYYARDSRNVGAIFNNIYEFTGLIADDQFISAENLTDNQKGYADALVKKAYEDWMQVVEYDGKALLSFKQKKKSVMTRSDAAVASTNHPASNGSAISQKQLSLPAKAGQTSSAGIMNEDGTRNAYNANGNQSARYAATTQNIPANVAMQYDRSAVSPESQFSGSSLQSQASRGSNTLALGPPQQHQSFAFPALGQSMRPTGLNPFEEWPQQQENCGGVDDYLMEEIRMRSHEILENEEMQQMLRLLSTGGAGTNLTEDGFSFPSYMPAPSPKLSYEDDRTRAPGKAVVGWLKIKAAMRWGIFVRKKAAERRAQLVELDD

SEQ ID NO: 176646 - protein, 603 aa, Zea Mays
MDSLQKLCSSLEPILRRVVSEEVERALAKLGPARIQGRSSPKRIEGPDGRNLQLQFRSQLALPIFTGGKVEGEQGAAIHVVLLDANTGCVVTSGPESFAKLDILVLEGDFNKDEDEDWTEEEFESNIVKEREGKRPLLTGDLQVTLKEGVGTIGELTFTDNSSWIRSRKFILGLRIAPGFYEGIRVREAKTEAFPVKDHRGELYKKHYPPTLKDDVWRLEKIGKDGAFHKKLNASGIYTVEDFLQLLVRDQQRLRSILGSGMSNKMWDSLVDHAKTCVLSGKHYVYYARDSRNVGAIFNNIYEFTGLIADDQFISAENLTDNQKGYADALVKKAYEDWMQVVEYDGKALLSFKQKKKSVMTRSDAAVASTNHPASNGSAISQKQLSLPAKAGQTSSAGIMNEDGTRNAYNANGNQSARYAATTQNIPANVAMQYDRSAVSPESQFSGSSLQSQASRGSNTLALGPPQQHQSFAFPALGQSMRPTGLNPFEEWPQQQENCGGVDDYLMEEIRMRSHEILENEEMQQMLRLLSTGGAGTNLTEDGFSFPSYMPAPSPKLSYEDDRTRAPGKAVVGWLKIKAAMRWGIFVRKKAAERRAQLVELDD

SEQ ID NO: 176647 - protein, 100 aa, Zea Mays
MDGDREGAAAVHHHARSPEDVFRDFRARRAGIVKALTTAASVVRADVEKFYQQCDPGDAPDFAPLFFFPSVCTALIFELSFAFHYMPIRRLFMELDPVAV

SEQ ID NO: 176648 - protein, 244 aa, Zea Mays
MDGDREGAAAVHHHARSPEDVFRDFRARRAGIVKALTTEKENLCLYGLPNETWEVTLPAEEVPPELPEPALGINFARDGMVEKDWLSLVAVHSDAWLLSVAFYFGARFGFDKDARRRLFTMINNLPTVYEVVTGVAKKQSKAPNGSSKSSKSNSKPSKQINSNSKPVKPAHPNEEEDSGREDAEEDQAYLCGSCGESYANGEFWICCDICEKWFHGKCVRITPAKAEHIKQYKCPSCSTKRSRE

SEQ ID NO: 176649 - protein, 72 aa, Zea Mays
MLARVCPRRQQLGLYVSPSASRHRNSIMSVCVWKNEIEGSEKKAKPMWFVRSFGLELELWILEKKFREISGR

SEQ ID NO: 176650 - protein, 175 aa, Zea Mays
MSLLFQVESGDLIAYGLIPEFIGRFPILVSLAALNEDQLVQVLIEPKNALGKQFKKLFSMNNVKLHFTDGALRIIAKKAMSKNTGARGLRTILENILMDSMYEIPDAKSGEKRIDAVVVDEDAVGSVDQPGCGAKILYGDGALDQYLSQIKVSGDGVGSEMDGEAELSSSRAIGM

SEQ ID NO: 176651 - protein, 68 aa, Zea Mays
MPWIWDRVSLNPAIPYMKRQSRTGSGEMARVARTLLAKDRLKRMVCSQVARTCSCSGGSVGMVDMCKG

SEQ ID NO: 176652 - protein, 187 aa, Zea Mays
MAGATTPASGALVRLCLPSLLLFLYRCCRCEAVEMERTLAMIKPDGLSGKYTEAIKEVILDSGFHIVKETEVQLDAERASVFYAEHSQRSFFDSLVKYITSGPVLAMVLERPDAVAQWRTLIGPTDAKKAKTSHPNSTLCHFSIRAMCGLDSEKNCVHGSDSPESADREISFFFGEAESVTVEHDEL

SEQ ID NO: 176653 - protein, 184 aa, Zea Mays
MAGATTPASGALVRLCLPSLLLFLYRCEAVEMERTLAMIKPDGLSGKYTEAIKEVILDSGFHIVKETEVQLDAERASVFYAEHSQRSFFDSLVKYITSGPVLAMVLERPDAVAQWRTLIGPTDAKKAKTSHPNSTLCHFSIRAMCGLDSEKNCVHGSDSPESADREISFFFGEAESVTVEHDEL

SEQ ID NO: 176654 - protein, 116 aa, Zea Mays
MPNTDRAFKLNWASYSMGEKRSEISSDHSIFVGDLAVDVTDAMLLELFSNKYRSVKGAKVIIDANTGRSRGYGFVRFGDDNDKIHAMTEMNGVYCSTRPIRVGPATPRRSQVAYFR

SEQ ID NO: 176655 - protein, 261 aa, Zea Mays
MPNTDRAFKLNWASYSMGEKRSEISSDHSIFVGDLAVDVTDAMLLELFSNKYRSVKGAKVIIDANTGRSRGYGFVRFGDDNDKIHAMTEMNGVYCSTRPIRVGPATPRRSQGDSGTSPPRQSHVDSTNRTVYVGGLDPNVSEDELRKAFAKYGDLASVKIPFGKQCGFVQFVNRVDAEEALHGLNGSTIGKQAVRLSWGRSPASKQSRGDSGHRRNGNCNGMYYGTPFYGGYGYASPIPHPNMYAAAYEAYPYYGNQQLVS

SEQ ID NO: 176656 - protein, 117 aa, Zea Mays
MPNTDRAFKLNWASYSMGEKRSEISSDHSIFVGDLAVDVTDAMLLELFSNKYRSVKGAKVIIDANTGRSRGYGFVRFGDDNDKIHAMTEMNGVYCSTRPIRVGPATPRRSQGICWWA

SEQ ID NO: 176657 - protein, 515 aa, Zea Mays
MLSSTGDLSRCPWDELIFEDESEKGSNALLARAWSPGWQNADKALTAFLDGPLVDYSANHKKADSASTSLLSPYLHFGELSVRKVFHQVRMKQLMWSNDGDRAGEESCTLFLRAIGLREYSRYLTFNHPCSLEKPLLSHLRFFPWVVDEVHFKVWRQGRTGYPLVDAGMRELWATGWVHDRIRVVVSSFFVKVLQLPWRWGMKYFWDTLLDADLESDALGWQYISGSLPDGRELDRIDNPQFEGYKFDPHGEYVRRWLPELARLPTEWIHHPWDAPESVLQAAGVELGSNYPRPIVELDAANSRLQGALSEMWELEAASCAAIENGMEEGLGDSTDEPPIDFPQELRMEVDRQPAQPAIIHTPVVAGWRREDQRVPSMTSSLIRAETELTADFGNTSEDSRPEVPSNIHLQARAEREETVDGATGNTVRVNGNQQQQNLQNNMHRVLGIAPSISEASSSWTGREGGLVPVWSPPAASVHSDPYTADEADISSRSYLDRHQQSNTMMNWSQLSQSL

SEQ ID NO: 176658 - protein, 699 aa, Zea Mays
MTASQSSMSGGGEPGVRTVVWFRRDLRVEDNPALAAAARTAGEVVPAYVWSPEEDGPYYPGRVSRWWLSQSLKHLDASLRRLGACRLVTRRSSDAVVALIDLVRSTGATHLFFNRLYDPLSLVRDHRVKEQLSAEGITVQSFNADLLYEPWEVLDDDGFPFTMFAPFWNRCLCMPDPAAPLLPPKRINSGDLSRCPWDELIFEDESEKGSNALLARAWSPGWQNADKALTAFLDGPLVDYSANHKKADSASTSLLSPYLHFGELSVRKVFHQVRMKQLMWSNDGDRAGEESCTLFLRAIGLREYSRYLTFNHPCSLEKPLLSHLRFFPWVVDEVHFKVWRQGRTGYPLVDAGMRELWATGWVHDRIRVVVSSFFVKVLQLPWRWGMKYFWDTLLDADLESDALGWQYISGSLPDGRELDRIDNPQFEGYKFDPHGEYVRRWLPELARLPTEWIHHPWDAPESVLQAAGVELGSNYPRPIVELDAANSRLQGALSEMWELEAASCAAIENGMEEGLGDSTDEPPIDFPQELRMEVDRQPAQPAIIHTPVVAGWRREDQRVPSMTSSLIRAETELTADFGNTSEDSRPEVPSNIHLQARAEREETVDGATGNTVRVNGNQQQQNLQNNMHRVLGIAPSISEASSSWTGREGGLVPVWSPPAASVHSDPYTADEADISSRSYLDRHQQSNTMMNWSQLSQSL

SEQ ID NO: 176659 - protein, 50 aa, Zea Mays
MGPAYRALFSHLEFPFFSRIDELALFRFGGTRTVRCQIRAFCYHYICHEF

SEQ ID NO: 176660 - protein, 82 aa, Zea Mays
MAYPANTSAARHDARLHECCGWHAQRRPAMLTSIACHSPVTSPPKSPVEEAPEEFDHIIFSVNHNHSICLAEGLALNLLGVA

SEQ ID NO: 176661 - protein, 250 aa, Zea Mays
MGDHVAVDVGELVASRVGEAAGLLSGGKEEMKALAGMVECRICQEEDLAKNLESPCACSGSLKYAHRECVQRWCNEKGDIICEICHESYKPGYTAPTQVHHDETTIEISGGDWTISGNRLDLHDPRILAMAAAQHRLLEDEYDEYTATNNNAAVFCRSIFLILMALLLLRHTLTITNSDDEDDASAIFSLFLLRAAGFLLPCYIMAWAISIMQRQRQRQVGGSVPMEMFLFHVYTVLTFDGKEFHETIYT

SEQ ID NO: 176662 - protein, 258 aa, Zea Mays
MGDHVAVDVGELVASRVGEAAGLLSGGKEEMKALAGMVECRICQEEDLAKNLESPCACSGSLKYAHRECVQRWCNEKGDIICEICHESYKPGYTAPTQVHHDETTIEISGGDWTISGNRLDLHDPRILAMAAAQHRLLEDEYDEYTATNNNAAVFCRSIFLIVSFVLMALLLLRHTLTITNSDDEDDASAIFSLFLLRAAGFLLPCYIMAWAISIMQRQRQRQEEAMLLPTEVAIILHPDGRTMQFAVAPAESPASHQ

SEQ ID NO: 176663 - protein, 98 aa, Zea Mays
MALPAPAKRPSSRSPGGCTPQRLSTQIRTIPANRRTPYLPCNFSSSPASRLGTAFSLHFTSVSRPPHHNSSSASRRRLSWGSIGIRKDCRMNAPEWTS

SEQ ID NO: 176664 - protein, 335 aa, Zea Mays
MAGECSSSFLQAPPPLAEQLPQDARVGEQPPPGSEAGGDEQARVPDLGEDLVFEVLMRAEARTLAAAACVSRGWRLLARDERLWEAACVREWAYTGFSEQMLRSVVLSLGGFRRLHEMYIRPVQQRAAGAPPGQQRRQLPVRMGRDQVQVSLSLLSTSFFLKMPNAPPPPPKDKDRDRDKNGGGQSFNSKISLEIRVDSEKYEELIEFMEKVAKTVDSEEHYVLSIAYKIVMEPNVLHGASYPPLSRGKKAVSTWTVSLSLRTTITRLKLNSARSVMESSSSLIPTVSASLTAAESKVFYLKMKGDYYGYLAEFETGSRRKDAARIPWWHTNLLR

SEQ ID NO: 176665 - protein, 581 aa, Zea Mays
MTDCQVVAMKKAYARIMLNMAQESAARVLTAERRAVALAASLEAAKEDGVAALLRLKAIMEVRIKEKELESLVHVKMIKELEEQLNGSQNAMASLKVELQRANTELELTRKTLADERMNSLPTSNNVYYSNKNVSPCSKIHPQGGNILLKNKKNADNSDDTCLVLITEENEAVDKLEDKDRRSPDLPSFMKRNKKPKFCHNGCTQRIHALKQQTQSTDAFLKQNQKQATAFNSHSKARKKNAAKNSCHTRSVTEQILQTKFLGKFKRKRGRRNRPSYKHDNSSEHGEAEYKLSDRSESDGNGCLLLLQALEQDLSPPKLSTEHDGEALTDLKEDFEMSGGDAELSRCTAFSELVNVLAVNSVQIKRRKRTKTVRVLEVDFSDTKSVPEPANTQLRTSSKSMSGNQSVSEMTENRSDTPIRNSSPFLKCATANLMHQIAAGNGQFDPEIGSAVSLQSTKSETTDYGNLVVDQQELITPNNNTTSLKEVNEDGSCSLASPKADASTPVQALEKYDISVGSSLNKEEHTKASCGASIQAEGSFDRFSTRPQSTSSGCRTAHFVVRAYVMRVLKHKAEGMTSLVM

SEQ ID NO: 176666 - protein, 125 aa, Zea Mays
MYAAGFYTYSIFALMFWETRRSDFGVSMSHHVATVVLIVLSYVFRFARVGSIVLAIHDASDVFLEVGKMSKYSHCDWLANVSFLFFVISWVLLRLTYFPFWILRSTRFAPLQCWSGSQFLCCGAC

SEQ ID NO: 176667 - protein, 257 aa, Zea Mays
MGLGEAAGRLLAAVDWEREAYPAYDDFLALPVFVLFFPTVRYLLDRFVFEWVARRLINRNGHQSTNNETEEGRKKIRKFKESAWKCVYFLSGELLALSVTYNEPWFTNTRYFWVGPGEQVWPDQKIKLKLKAVYMYAAGFYTYSIFALMFWETRRSDFGVSMSHHVATVVLIVLSYVFRFARVGSIVLAIHDASDVFLEVGKMSKYSHCDWLANVSFLFFVISWVLLRLTYFPFWILRSTSVGLVHSFFVVVLVELL

SEQ ID NO: 176668 - protein, 165 aa, Zea Mays
MITMCLCPLTTLSATEHPPLRRRARRHDVPSPLVHDLPCYLLRHHAKTLANTFKETYQWLRRRQVLTMANGGSTMTLGSFARLSCAPKDLMPIYALVHIPLDLAMLPYSPQGLATNPIVTSSSKKQKESTTTNYFPKPCNERVHLQFSWTGSITHGTKIRDVQKP

SEQ ID NO: 176669 - protein, 65 aa, Zea Mays
MFGRTPFRKEKPRMVRPRIDKASFSKAVRNDVHFIGKPIGPPSLVVIDKVHLHPFFPISIIQLVK

SEQ ID NO: 176670 - protein, 186 aa, Zea Mays
MSYAYLFKYIIIGDTGVGKSCLLLQFTIGVEFGARMITIDNKPIKLQIWDTAGQESFRSITRSYYRGAAGALLVYDITRRETFNHLASWLEDARQHANANMTVMLIGNKCDLSHRRAVSYEEGEQFAKEHGLVFMEASAKTAQNVEEAFIKTAGTIYKKIQDGIFDVSNEFGMEGVHVFRMNCPGA

SEQ ID NO: 176671 - protein, 475 aa, Zea Mays
MPAMGRSSRACSLLGSTHLLLLLLLSVGSAVAQNGSTWKTLSGKAPAVVAKGGFSGLFPDSSDYAYQFVGISSSPDTTVWCDVRLTKDGAGICLPSINMDNCTIIASVFPQGKKTYKVNGVSTAGWFSVDYTSTVLLQNVSLKQSVLSRTPAYDGLFQINPVENIFTLYKAPAVWLNVQHDSFYSQFKLSMRSYILSLSKQFIVDYISSPEVNFLTSISGRVSKKTKLVFRFLDERSIEPSTNQTYGSMLKNLTFVKTFASGILVPKSYIWPVTPDNYLLPYTSVVDDAHKAGLEIYAADFANDLTISYNYSFDPLAEYLFFIDNGAFSVDGVLTDFPITPSEAVGCFSNLNTSKIDHAKPLVISHNGASGDYPDCTDQAYEKAVADGADVIDCPVQVTKDGILICMSSVDLMDVTTVAKSQFASQVTTINSLKAGSGVFTFNLTWDDISKNLKPCCIHGRGAWVWCGRCSDQST

SEQ ID NO: 176672 - protein, 216 aa, Zea Mays
MAPTSKLSTGIKRASRSHAYHRRGLWAIKAKNGGAFPKADKAAAAVEPKFYPADDVKPRVPSTRKPKPTKLRSSITPGTVLILLAGRFMGKRVVFLKQLKSGLLLISGPFKINGVPIRRVNQTYVIATSTKVDISGVDVAKFDDKYFAREKKQKVKKTEGELFETEKESLPDFKKDDQKAVDSALIKAIEAVPELKTYLGARFSLRDGDKPHEMVF

SEQ ID NO: 176673 - protein, 209 aa, Zea Mays
MAPTSKLSTGIKRASRSHAYHRRGLWAIKAKNGGAFPKADKAAAAVEPKFYPADDVKPRVPSTRKPKPTKLRSSITPGTVLILLAGRFMGKRVVFLKQLKSGLLLISGPFKINGVPIRRVNQTYVIATSTKVDISGVDVAKFDDKYFAREKKQKVKKTEGELFETEKEDDQKAVDSALIKAIEAVPELKTYLGARFSLRDGDKPHEMVF

SEQ ID NO: 176674 - protein, 495 aa, Zea Mays
MSAMLSLLCMDNHRQLHIEMGIEEDVIRKHTTPAYRPPEMWDLYRREVISEKVDIWALGCLLYRICYFKSAFDGESKLQILNGNYRIPEQPKYSTAVTGLIKDMLEASPNSRPDITQVWFRVNELLPLELQKSLPDGPSPAVSLSLQDEGAHKRAHVMPRRNPPPPPREQSNSSLSHGSSKAGDAPLGAFWATQHAQGAQAADNRNPLFDEEPSKVSLSSKQNQSRVDTSISIPGDRHGHSGQTSRISKTPNNSLSNDGFRGVSDTEIHNSVKTKVQQPQPKPKCDKDPFNIFVADFDTHNLNIAVGKASELELEVSSLKEQLKKTTLEKAEMTAKYEKLSAICRSQRQEIQELKRTLAEATPPSNKVSSRTQDSGSQRKEKIQGTLWELEQGMLASNTSSASSDVKTWQAFPDTQTQARPKVDHGTNGSQNITKNTTSGASPDAWGFGTDSFRTSSAPVKAATQINRAAQGSSSQRFNSGVAKKVEQPSGWAGF

SEQ ID NO: 176675 - protein, 496 aa, Zea Mays
MSAMLSLLCMDNHRQLHIEEMGIEEDVIRKHTTPAYRPPEMWDLYRREVISEKVDIWALGCLLYRICYFKSAFDGESKLQILNGNYRIPEQPKYSTAVTGLIKDMLEASPNSRPDITQVWFRVNELLPLELQKSLPDGPSPAVSLSLQDEGAHKRAHVMPRRNPPPPPREQSNSSLSHGSSKAGDAPLGAFWATQHAQGAQAADNRNPLFDEEPSKVSLSSKQNQSRVDTSISIPGDRHGHSGQTSRISKTPNNSLSNDGFRGVSDTEIHNSVKTKVQQPQPKPKCDKDPFNIFVADFDTHNLNIAVGKASELELEVSSLKEQLKKTTLEKAEMTAKYEKLSAICRSQRQEIQELKRTLAEATPPSNKVSSRTQDSGSQRKEKIQGTLWELEQGMLASNTSSASSDVKTWQAFPDTQTQARPKVDHGTNGSQNITKNTTSGASPDAWGFGTDSFRTSSAPVKAATQINRAAQGSSSQRFNSGVAKKVEQPSGWAGF

SEQ ID NO: 176676 - protein, 147 aa, Zea Mays
MPENEIIMVQHRHCLETIFHCLENQNREDDELITNMLETLVNLAPVLDLRIFSSSKPSFIKMTEKGAIHAIMGMLSSSVKPWHCAAAELIGRLIINPDNEPFLLPIIPQIYKRLVDLLSVPAYDAQAAAVSALYNVAEVNMDCRLKL

SEQ ID NO: 176677 - protein, 372 aa, Zea Mays
MSITIMSNTGTQNRLPPSKMESGSTFYGGEGLSIDPKWFIDPKLLFVGPRIGEGAHAKVYEGKYKNQNVAIKIVHKGDTPEEMTKREGRFLREVTMLSRVQHKNLVKFIGACLEPVMVVVTELLVGGSLRKYLVSLRPRSLEPRVAVGFALDIARAMECLHAHGIIHRDLKPENLLLTADQRTVKLVDLGLAREETLTEMMTAETGTYRWMAPELYSTVTLRHGEKKHYNHKVDVYSFAIVLWELLHNKLPFEGMSNLQAAYAAAFKNIRPSADNLPEELSEILTSCWKEDPNDRPNFTQIIQMLLHYLSTLSPQETLAGPRRTFSSENTILPPESPGTSSLMASRGDLGDTPKGKKEDKPRGFFFCFSECY

SEQ ID NO: 176678 - protein, 118 aa, Zea Mays
MSNLQAAYAAAFKNIRPSADNLPEELSEILTSCWKEDPNDRPNFTQIIQMLLHYLSTLSPQETLAGPRRTFSSENTILPPESPGTSSLMASRGDLGDTPKGKKEDKPRGFFFCFSECY

SEQ ID NO: 176679 - protein, 256 aa, Zea Mays
MVVVFEDFPTEKAAEVMRLATGDDLPIARKASLQRFLAKRKDRLVQRAPYARPSYPTEEPEKKTVKPASALASWLGLGSTEADRLTIALFCGSAHPRQIEDAVLEACPERIQPLPSNVAEPVDVKVHLKVVLSLAMQTWQIRRVFSWIFNHLKKRCFKQFVNPKYIMLYSGATTTVLKEKLLALGSSRILAEHQLQAQLQEQHLKGIWFSFSLCFLNEKKQTTNYSEGSSHPLSHGGSPPWNQPSQRQVFYTLFLR

SEQ ID NO: 176680 - protein, 54 aa, Zea Mays
MARTPGTATGDERRDVFSRTRDDSPALMRRNDAAAKLKAPTSRDCGRDGGEQNS

SEQ ID NO: 176681 - protein, 82 aa, Zea Mays
MDIRANETKIFMNELNETTKEAGDYSIKQCLDLPESIEELSDEEKAQATNVLKSEVNREIFMNFKIPKVRLLWVKGEIAPKV

SEQ ID NO: 176682 - protein, 93 aa, Zea Mays
MINAEPVIWEKLIHDIPRLKKFQAKSFTLFYELEKLHEGSIATGDLNFTSTEPAPQPTEHVSTIDIDAHDSHLNPFLANVDDHMPSSGPIDIE

SEQ ID NO: 176683 - protein, 55 aa, Zea Mays
MKCLDLPESIEELSDEEKAQATNVLKSEVNREIFMNFKIPKVRLLWVKGEIAPKV

SEQ ID NO: 176684 - protein, 64 aa, Zea Mays
MQPFTRYHYFFFFSTSSPNTFLLSQSLVSLYHMVTTPISPPHSPGRGTRPHASLLPQSCLMPCR

SEQ ID NO: 176685 - protein, 564 aa, Zea Mays
MWLVSSLRAALCLLLAVLASHRQPAAAVVTLSTSSRWIVDPAGHRVKLACVNWPSHLESVVTEGLGRQPVGAISGMIVSMGFNCVRLTYPIALVTNASLSVLTVRQSLLANGLAETVGGVEVNNPSFLDLTLIESLKAVVNALGEKNVMVILDNHVSTPGWCCSNDDGNGFFGDRDFDPNVWVDGLGSMATIFADVPNVVGMSLRNELRGPRQNPQDWYTYMQRGAEAVHAASPRALVIMGGLSYDYDLSFLAARQVGVSFAAENKLVFEVHWYSFSDARAWETESANEVCGRAARDFARRGGFLLARGFPLFLSEFGADSRGGDPKDNRFFPCAAAVAAEHDVDWAYWALQGSYALRQGVAGMDEVYGVLDWSWSKPRNETVLPRIQALQRPLQGPGYGEALPYTVLFHPLTGLCAVRRAAAVTTTLELGPCNETDAWAYAPPSSTLVLRDAAAAGLPCLRAEGPGQPARLGIRDCGDPMSTWRLATDSGMHVAVDAALGLGGGEDGGGGGGMLCLDVGTDGRSIVTNPCACQRGDGTCDPEGQWFKLVTSTRRVVRRPPTLA

SEQ ID NO: 176686 - protein, 200 aa, Zea Mays
MQRSAALSQCHARTNPALPEAEKDRDQKQVRSPLLQSPPPANPEIYLPSSRSFVSRVQTTSPALHSALVLVVASGGGWVAGWRCCWDARRDGDRRPPPTAAAKSSPPLALLEPAPLQLPPPLTSDHTLGARHGRLVPPRCCHRQRHRVHEDGVRGERGALLHHPHCRRRQRFLFRFRPAGGEGRPCQGELARSAQCRRHG

SEQ ID NO: 176687 - protein, 238 aa, Zea Mays
MWVMGLPTSFQLLMVMSLGAVSDLFQLQERGENIPPEESFDVARRIKEMYCYTSSDVVKEFNKHDREPSKYVKHWTGIKPKTGAKYTCDIGYERFLGPEIFFNPEMYNNDFTTPLQVVIDRCIQSSPIDTRRALYKNIVLSGGSTMFKDFHRRLQRDLKKIVDARVRASNSRLLSGDAKAQPIEVNVVSHPIQRYAVWFGGSVLASTAEFYEACRTKAEYEEYGASICRSNPVFKGMY

SEQ ID NO: 176688 - protein, 340 aa, Zea Mays
MDALSRPAVVIDNGTGYTKMGFAGNVEPCFITPTVVAVNDSFSGSGQPAARGAPARGNWLAQHSAGVMADLDFYIGQEALARSRASSSHSLSYPIRNGQVENWDSMERFWQQCIFNYLRCDPEDHYFLLTESPLTAPEIREYTGEIMFETFNVPGLYIAVQPVLALAAGYTTTKCEMTGVVVDVGDGATHIVPVADGYVIGSSIRSIPITGKDVTQFIHQLLKERGENIPPEESFDVARRIKEMYCYTSSDVVKEFNKHDREPSKYVKHWTGIKPKTGAKYTCDIGYERFLGPEIFFNPEMYNNDFTTPLQVVIDRILSCLEARLCLKISIGGYSGTSKR

SEQ ID NO: 176689 - protein, 110 aa, Zea Mays
MDQAVSLAARSRRFGSSFYPCKVNLNTRQVGALRPHTHQPSPSIPRQQIRAHRLGVQCLTDPDCRRAVTALVPTITGMGDHVSGRVRGYVHCQVHSGTRLTDLPYFSAYV

SEQ ID NO: 176690 - protein, 81 aa, Zea Mays
MNMAKQIVMDAKIDYPAACNAMETLLVHKDLIKAPRLDDLLLSLKTEGVAIFGGPVAHEVLCILEANSFHHKAATPSSGGR

SEQ ID NO: 176691 - protein, 332 aa, Zea Mays
MAKIKIGINGFGRIGRLVARVALQSDDVELVAVNDPFISTDYMYDTVHGQWKHHEVKVKDSKTLLFGEKEVAVFGCRNPEEIPWGSVGAEYVVESTGVFTDQEKAAAHLKGGAKKVVISAPSKDAPMFVVGVNEKEYKSDINIVSNASCTTNCLAPLAKVINDKFGIVEGLMTTVHAITATQKTVDGPSSKDWRGGRAASFNIIPSSTGAAKAVGKVLPVLNGKLTGMSFRVPTVDVSVVDLTVRLEKSATYDEIKAAVKAEAEGSLKGILGYVEEDLVSTDFQGDSRSSIFDAKAGIALNGNFVKLVSWYDNEWGYSTRVVDLIRHMNSTK

SEQ ID NO: 176692 - protein, 187 aa, Zea Mays
MAKIKIGINGFGRIGRLVARVALQSDDVELVAVNDPFISTDYMTYMFKYDTVHGQWKHHEVKVKDSKTLLFGEKEVAVFGCRNPEEIPWGSVGAEYVVESTGVFTDQEKAAAHLKGGAKKVVISAPSKDAPMFVVGVNEKEYKSDINIVSNASCTTNCLAPLAKVINDKFGIVEGLMTTVHAITEDC

SEQ ID NO: 176693 - protein, 206 aa, Zea Mays
MMGLSYDADSGRRLLARYAKAKPRPSKWDDAQRWLSSSRAHDDDDRRRSSCADDRLLLPSASQKARHSWSAADGGAALPAALGLGARDDAGAEAETKRVDSVLAYGQPPRCPSLRDVGTEMTPAGSKEPSRANTPRATLPATPPSTAGRAIHAPLRPPDLSTVDGGSPPGLAAADRDETAPGAPTTTAVSPAATWDAAERAKHMAR

SEQ ID NO: 176694 - protein, 266 aa, Zea Mays
MQLYFNPATVKMLSNLKVLVIAFLLKFIMRRRFSVIQWEALALLLIGISINQLRTVPVGNTAFGLPVTAIAYIYTLIFVTVPSVASVYNEYALKSQYDTSIYLQNLFLYGYGAIFNLLGILGTVLFQGPESFNILRGHSRATIFLICNNAAQGILSSFFFKYADTILKKYSSTVATIFTGLASAAFLGHSLTINFLLGISVVFISMHQFFSPLAKVKDDKPADSIELEDTQNDRPSESSFVNMTAGAADDASHRIGTDERQPLLPI

SEQ ID NO: 176695 - protein, 409 aa, Zea Mays
MQRNGVVECSVCRSRVVVPSPRSVSRAYDKHRNKMSSKFRALNVFLVVGDCILVGLQPILVFMSKVDGKFQFSPISVNFLTEVMKVIFAVVMLIIQSRKQKVGEKPLLARSTFIQAARNNVLLAVPALLYAINNYLKFIMQLYFNPATVKMLSNLKVLVIAFLLKFIMRRRFSVIQWEALALLLIGISINQLRTVPVGNTAFGLPVTAIAYIYTLIFVTVPSVASVYNEYALKSQYDTSIYLQNLFLYGYGAIFNLLGILGTVLFQGPESFNILRGHSRATIFLICNNAAQGILSSFFFKYADTILKKYSSTVATIFTGLASAAFLGHSLTINFLLGISVVFISMHQFFSPLAKVKDDKPADSIELEDTQNDRPSESSFVNMTAGAADDVGQKRGDRRRGSFLPCEQQI

SEQ ID NO: 176696 - protein, 256 aa, Zea Mays
MQRNGVVECSVCRSRVVVPSPRSVSRAYDKHRNKMSSKFRALNVFLVVGDCILVGLQPILVFMSKVDGKFQFSPISVNFLTEVMKVIFAVVMLIIQSRKQKVGEKPLLARSTFIQAARNNVLLAVPALLYAINNYLKFIMQLYFNPATVKMLSNLKVCFSCTTGLCCFSFTLCAHISRYLWSSLGTGYSFSSEIYNEKEILSYSVGSSCSIAYWNQHQSTPNCTCGQHSIWSSCHCYCVHIYIDFCNCSFSGFCLQ

SEQ ID NO: 176697 - protein, 238 aa, Zea Mays
MRRRFSVIQWEALALLLIGISINQLRTVPVGNTAFGLPVTAIAYIYTLIFVTVPSVASVYNEYALKSQYDTSIYLQNLFLYGYGAIFNLLGILGTVLFQGPESFNILRGHSRATIFLICNNAAQGILSSFFFKYADTILKKYSSTVATIFTGLASAAFLGHSLTINFLLGISVVFISMHQFFSPLAKVKDDKPADSIELEDTQNDRPSESSFVNMTAGAADDASHRIGTDERQPLLPI

SEQ ID NO: 176698 - protein, 225 aa, Zea Mays
MVTEIKQYGATFRLDYGLVYWNSRLEHEHIRLVSLFKKGDVICDMFAGIGPFSIPSAQKGCVVYANDLNPDSVHYLRTNAKINKVEDYIFAYNMDARVFMQKLMTVPGLETRSDSQVATDESYSKEGVPPNEISSSNGNHNDVREDIKNGANESSAASTTTKKRQQTSEEGDEPDCQDADANKTKRQNKKRVRGLGPLPSKPWEHFDHVLMNLPASALQFLGSSE

SEQ ID NO: 176699 - protein, 272 aa, Zea Mays
MVTEIKQYGATFRLDYGLVYWNSRLEHEHIRLVSLFKKGDVICDMFAGIGPFSIPSAQKGCVVYANDLNPDSVHYLRTNAKINKVEDYIFAYNMDARVFMQKLMTVPGLETRSDSQVATDESYSKEGVPPNEISSSNGNHNVFLQLFLDVREDIKNGANESSAASTTTKKRQQTSEEGDEPDCQDADANKTKRQNKKRVRGLGPLPSKPWEHFDHVLMNLPASALQFLDCFDGLIQKKYWTGSLPWIHCYCFIRSCESEESILSVSSITDTY

SEQ ID NO: 176700 - protein, 56 aa, Zea Mays
MVPTTRCRWWTTQGRMDLTSGCSPSEYLPSKHCLSVKLKASPGFMHNRLYMLFYYT

SEQ ID NO: 176701 - protein, 73 aa, Zea Mays
MHLASHLGSRDGDRARDMVPTTGCRWWTTQGRMDLTSGCSPSEYLPSKHCLSVKLKASPGFMHNRLYMLFYYT

SEQ ID NO: 176702 - protein, 70 aa, Zea Mays
MDGQFQGMMTHIDGRFDYPQTHMDGQYTSLTNMFDVMDTQFDSLHHEVGGLCDHVHESVHEPLMTRMNNM

SEQ ID NO: 176703 - protein, 172 aa, Zea Mays
MGNEKANSHWEAELPPKYDRVGIENFIRAKYEDKRWVPRNGTLRLSSGVRDEKSQESPASANWSGHHRSSFEQNHASPALPSKVAPVASRIPSQASPQPPKVEPPVPKVVSPPQPQKSPAKVEATPPKRKSQSHLQTTIMPGMASSLHNQYLAPRKKILPNQQKARPSLHLE

SEQ ID NO: 176704 - protein, 53 aa, Zea Mays
MAPMDPKGIYNDHQSLMLSAGYANNPQMRYGAYCPVSTIGYGQQYFPVHFPFS

SEQ ID NO: 176705 - protein, 88 aa, Zea Mays
MLSAGYANNPQMRYGAYCPVSTIGYGQQYFPVHFPFSSPYYQPPASSSMGYSNSVTGMSQGVAMLQQEYFLPCGLLYSPTPGYHQPSL

SEQ ID NO: 176706 - protein, 111 aa, Zea Mays
MLSAGYANNPQMRYGAYCPVSTIGYGQQYFPVHFPFSSPYYQPPASSSMGYSNSVTGMSQGVAMLQQEYFLPCGLLYSPTPGYHQPFRACLGARIPERIEGVTISFLFKTK

SEQ ID NO: 176707 - protein, 81 aa, Zea Mays
MAPTLVWVVPPHRDRHRLGLRGVVLFLRIFQQLRWEEFCLSLWAQFISVATLGLSHGLRRACSAAVPRIRGQVTTWDYLHS

SEQ ID NO: 176708 - protein, 504 aa, Zea Mays
MTLPSPIFCGRRVFTTSPSRRMLPPVISSVATYWSLRVAVGVRRDLGWPPESSGRIKRLWCSRQFLSVDGEGAVSRIVADRNASIGIVEVLKCKYSKAEANIVILKRLGAMVLHGVDAKRMRFHTDLKNRRFDHIVFNFPRGAFRGKQNDLRMIDLHKELVWGFFRNACHIVRQLGEVHVTHKSGEPYDSWDLEHLASEPSFAMVDKVPFQREDYPGYNQKRGDGKRCNKPFDLGACCTFKFQIRNLKKLKQMNRRSRLIPNLGGNNFHPGHSESCHPVVSMPGPCLNDLSAQGGIPPPLPMSRIPSPDLLAPREQPWYQQRTILDHLGVDDYFFAREHQMSLQREYEMKRQVIPLEHRHTDRESVEKLEWLHRMIALYDGKDTEEQSHCSPSWSSEGNLKYTLIFILELLPMAKLAKLRRELLTPTSKGGGGAGEGFDVTKSGDARVGLVGFPSIGKSTLLNKLTGTFSEGNPRVRILHNVFKLHVSDSIVMRVQWFMLVLLE

SEQ ID NO: 176709 - protein, 244 aa, Zea Mays
MVAKNVVGRGPGAVLRMDSKSVDLERGSTRRQTVCSEVLKCKYSKAEANIVILKRLGAMVLHGVDAKRMRFHTDLKNRRFDHIVFNFPRGAFRGKQNDLRMIDLHKELVWGFFRNACHIVRQLGEVHVTHKSGEPYDSWDLEHLASEPSFAMVDKVPFQREDYPGYNQKRGDGKRCNKPFDLGACCTFKFQIRNLKKLKQMNRRSRLIPNLGGNNFHPGHSVTDRGVFHPVAPVEARSWHHFSR

SEQ ID NO: 176710 - protein, 431 aa, Zea Mays
MVAKNVVGRGPGAVLRMDSKSVDLERGSTRRQTVCSEVLKCKYSKAEANIVILKRLGAMVLHGVDAKRMRFHTDLKNRRFDHIVFNFPRGAFRGKQNDLRMIDLHKELVWGFFRNACHIVRQLGEVHVTHKSGEPYDSWDLEHLASEPSFAMVDKVPFQREDYPGYNQKRGDGKRCNKPFDLGACCTFKFQIRNLKKLKQMNRRSRLIPNLGGNNFHPGHSESCHPVVSMPGPCLNDLSAQGGIPPPLPMSRIPSPDLLAPREQPWYQQRTILDHLGVDDYFFAREHQMSLQREYEMKRQVIPLEHRHTDRESVEKLEWLHRMIALYDGKDTEEQSHCSPSWSSEGNLKYTLIFILELLPMAKLAKLRRELLTPTSKGGGGAGEGFDVTKSGDARVGLVGFPSIGKSTLLNKLTGTFSEVAAYEFTTLIMY

SEQ ID NO: 176711 - protein, 306 aa, Zea Mays
MKDNVTIKVKKNPHRHGCSSLRRSKTVKNATKFWVCEIVKDWIMEDARLTAKELQRRIKDKHKVDVPYKRVYDGRFRGQLACAIAVDGHNWMYPVVVGVLGSETNENWSWFMQMLRDAIGTPEGLAICTDAGQGVMAGVKEVFPNAEHRECMLHLVMNFKKRFSGKIFDDHLWAAAYTWSPYLFEKHWTIMDEAMPAAMAYIRQYHTRIWTRSQFGTHCKVDYVTNNLADCFNNWIKKYKGLNLDDLLDNIRQLIMKKWDVRRTISRKMEGVILPRIIKDLKEQSFNLDMDVQRSGDTLGEVSVKG

SEQ ID NO: 176712 - protein, 622 aa, Zea Mays
MTPPGQRVDPFWLPAGMDPNSSYLLKIRLTGNPKKRRKEFSCFNITKVVDSDVCNFKDLVEEIVDKYPHGYNEIVHVFYYDNVEKTFPQITTDQELLKMFSKHADSKVVCMTITYTEPTDDVPIPKCYADEVLDIPDTPSMACPSLVVGSQLTEPTSQSTKPCTSKPSIDQDGDDDYLANPEPHNEHVGVDDEILYLANLEPYNEHVGVSRAHQNVSEGSDSESGSESDEEYEEEDGLIGKDPPPPMPIICYDKLDPPMSVGSIYPNMQAFKLALSQHVVNHEFEFNTEKSDPGRLRAYCSRKREEGCRWRIHASTMKDNVTIKVKKNPHRHGCSSLRRSKTVKNATKFWVCEIVKDWIMEDARLTAKELQRRIKDKHKVDVPYKRVYDGRFRGQLACAIAVDGHNWMYPVVVGVLGSETNENWSWFMQMLRDAIGTPEGLAICTDAGQGVMAGVKEVFPNAEHRECMLHLVMNFKKRFSGKIFDDHLWAAAYTWSPYLFEKHWTIMDEAMPAAMAYIRQYHTRIWTRSQFGTHCKVDYVTNNLADCFNNWIKKYKGLNLDDLLDNIRQLIMKKWDVRRTISRKMEGVILPRIIKDLKEQSFNLDMDVQRSGDTLGEVSVKG

SEQ ID NO: 176713 - protein, 131 aa, Zea Mays
MKQSSTRLPPQDMLGLGSVLDARAASPFAGRSLNSALHGELCKRRQPWRTTPLHGRWSSAMDEPNVALSFASGGRRLSSLSSTASRGSRLDLVVPARQRFGMPLSFASPRRQAGYEAPPHCIAATTPRHQA

SEQ ID NO: 176714 - protein, 130 aa, Zea Mays
MKQSSTRLPPQDMLGLGSVLDARAASPFAGRSLNSALHGELCKRRQPWRTTPLHGRWSSAMDEPNVALSFASGGRRLSSLSSTASRGSRLDLVVPARQRFGMPLSFASPRRQGYEAPPHCIAATTPRHQA

SEQ ID NO: 176715 - protein, 429 aa, Zea Mays
MAYLPPHKRQPSTTASTPIPAPNPPPPSLSSSLRSLSLSSPRGRGRGAVGRHPLASTKIFRAAGCISRWFPLPPFSPAGDGEEYTLRLEPFPCSPIEHRTGAKPLALVVASTPGQGSSGSTAAAVTSIAEQFLPDLLAAAERAKAEGAPKDELVKLSLVARLGTVLFECQPIRRFIVNYVFRGGSPVSLDELRQAAKAGEDGSRSQLRKTFYTSLSSECLDDMERTMVKRIGLDFDSSKKHYHVKVSDKNRSDSTISCKCTVEEDGSLAIHKVELNQVRHLVEDISCLFKGLDLRLMLSKKRILKNLDSEVENAVKSLVSTAIIDPNVKGGVRWPLGKESIGERFSIVGVWHTGYKAFRNETMRLKLRHADRFDHRTSTGGVSDEVTFKLTAISCKLEEDDLAESAVKEMLESAVQMLWDNALNYRVVP

SEQ ID NO: 176716 - protein, 372 aa, Zea Mays
MAYLPPHKRQPSTTASTPIPAPNPPPPSLSSSLRSLSLSSPRGRGRGAVGRHPLASTKIFRAAGCISRQGSSGSTAAAVTSIAEQFLPDLLAAAERAKAEGAPKDELVKLSLVARLGTVLFECQPGGSPVSLDELRQAAKAGEDGSRSQLRKTFYTSLSSECLDDMERTMVKRIGLDFDSSKKHYHVKVSDKNRSDSTISCKCTVEEDGSLAIHKVELNQVRHLVEDISCLFKGLDLRLMLSKKRILKNLDSEVENAVKSLVSTAIIDPNVKGGVRWPLGKESIGERFSIVGVWHTGYKAFRNETMRLKLRHADRFDHRTSTGGVSDEVTFKLTAISCKLEEDDLAESAVKEMLESAVQMLWDNALNYRVVP

SEQ ID NO: 176717 - protein, 92 aa, Zea Mays
MKSESNIQNTREQICHVTLQSLQETTPNTTDWTPIVTHACLLDKRHQEQTTVVLPLSQFLQVLKQLLLYPLSIIWQECLNRVIITAYGKGST

SEQ ID NO: 176718 - protein, 284 aa, Zea Mays
MLFDTNGDGVISFSEYIFFVTLLSIPESSFHVAFKMFDLDHNGEIDKDEFRKVMTLMRSYNRQGAAHRDGLRFGRKVGQPVENGGLVEYFFGKDGNEHLHYDKFSSFLKKLHDEIVRLEFSHYDVKSSNTIPVKDFALSMVASADMIYIDKLLDRVEDLDDNLDLKDLRITFEEFKAFADLRRRLEPFRMAIFSYGKVNGLLTKQDLKRAASHVCGVDLTDKVVDIIFHVFDANCDGNLSSEEFLRSLQRRESDIRQPATSGFLGVIACWLNCTKCSLQQMLSQ

SEQ ID NO: 176719 - protein, 179 aa, Zea Mays
MLMNMTMLYIVRLEFSHYDVKSSNTIPVKDFALSMVASADMIYIDKLLDRVEDLDDNLDLKDLRITFEEFKAFADLRRRLEPFRMAIFSYGKVNGLLTKQDLKRAASHVCGVDLTDKVVDIIFHVFDANCDGNLSSEEFLRSLQRRESDIRQPATSGFLGVIACWLNCTKCSLQQMLSQ

SEQ ID NO: 176720 - protein, 118 aa, Zea Mays
MCRQIRKCFYSSTSLNSILEIEIEKASISFLVKYFASGHLVPIFFKGIWFQIRAWTCQDSIVFAVSSCFGTCRSTSKCFFISLNFNECRLCSVCILLNFIILFSFGKVVHIKCMLHSF

SEQ ID NO: 176721 - protein, 296 aa, Zea Mays
MHVLLVMFNKAALSSYNFPCANVITLLQMVCSTCLLYVLRRLKIISFTNSDPSVPSDSLFFVPFRLLLRTTPLSLAYLLYMLASMESVRGVNVPMYTTLRRTTVVFTMTMEYFLAKQKHTPPIIGSVALIVFGAFVAGARDLSFDARGYAIVFVANITTAIYLATINRIGKSSGLNSFGLMWCNGLVCGPSVLLLTYIQGDLKRAMEFPYLYSPGFMTVLLFSCILAFLLNYTIFWNTILNSALTQSMCGNLKDFFTVGIGWVLFGGLPFDLLNVIGQGLGFLGSGLYAYCKIKGK

SEQ ID NO: 176722 - protein, 212 aa, Zea Mays
MESVRGVNVPMYTTLRRTTVVFTMTMEYFLAKQKHTPPIIGSVALIVFGAFVAGARDLSFDARGYAIVFVANITTAIYLATINRIGKSSGLNSFGLMWCNGLVCGPSVLLLTYIQGDLKRAMEFPYLYSPGFMTVLLFSCILAFLLNYTIFWNTILNSALTQSMCGNLKDFFTVGIGWVLFGGLPFDLLNVIGQGLGFLGSGLYAYCKIKGK

SEQ ID NO: 176723 - protein, 235 aa, Zea Mays
MHVLLVMFNKAALSSYNFPCANVITLLQMVCSTCLLYVLRRLKIISFTNSDPSVPSDSLFFVPFRLLLRTTPLSLAYLLYMLASMESVRGVNVPMYTTLRRTTVVFTMTMEYFLAKQKHTPPIIGSVALIVFGAFVAGARDLSFDARGYAIVFVANITTAIYLATINRIGKSSGLNSFGLMWCNGLVCGPSVLLLTYIQGDLKRAMEFPYLYSPGFMVTLICALLTLLLSVLVGI

SEQ ID NO: 176724 - protein, 153 aa, Zea Mays
MQGADKSFLVECETLRSIQHRNLLPIITACSSIDTTGNSFKALIYELMPNGNLDKWIHHKDNEALPKRLSLAQRIAVVVNVADALDYLHHDCGRPTIHCDLKPSNILLGDDMNAVLADFGIAHLYSDSQSTWTSSFSSIGVKGSIGYIPPAPY

SEQ ID NO: 176725 - protein, 606 aa, Zea Mays
MSDNHLSGVVPPSIGKLNGLIELELDGNNFTGTIEDWMPKLTSLQKLYLHDNSFEGTIPPSISNLAHLTLLDFSNNKFTGSIPPSMGNIQLLINLSLSNNNFRGTIPAKFGDLKQLVFLDVSSNELGGEIPNSLGQCQNLAAIKMDQNVLIGNIPTSFSNLKSLSLLNLSHNKLSGPLPNYLNDLKLLNKIDLSYNNFHGEIPKAGILDNSTLVSLDGNSGLCGGAMNLHMPSCHTISRRARTISDLVKILIPMFGLMSLLHLVYLVFGKKTSRRPHLSQRSFGEHFEKVTYNDLAKATRDFSEYNLIGRGSYGSVYSGKLKEVEVAVKVFNLEMQGADKSFLVECETLRSIQHRNLLPIITACSSIDTTGNSFKALIYELMPNGNLDKWIHHKDNEALPKRLSLAQRIAVVVNVADALDYLHHDCGRPTIHCDLKPSNILLGDDMNAVLADFGIAHLYSDSQSTWTSSFSSIGVKGSIGYIPPEYGGGGSVSTSGDVYSFGVVCLEILIGKRPIDPVFIGGLDIISFVKNSFPDQIFHIMDSHLVEECEHLIQDNKVTNEEMYQCLVDLLQVALSCTCSLPSERSNMKQVASKLHAIKTSQIGYK

SEQ ID NO: 176726 - protein, 258 aa, Zea Mays
MCATTHSLCILYISMEYNQAIPNKSHFHGISRGSDPHASATHDRAVADPIAALVELVTQSVADPIAALSVKIACPVAGSAGCGRWSPQICSRRRSASRRGASSPTGSRQASWICSRRPTAPPAGAASFHLLPGEVARPTAPPAGAAPFLLLPAEVARLISSQARSRWRPTMQQPPRPRRTAASQLRPKPAVLKTPAAPKKPTFVLPLWTSLSAPMRPSGRKPLPSSTSRRSSLSSSTRQRTPTPSGAACSSPSSANTP

SEQ ID NO: 176727 - protein, 326 aa, Zea Mays
MTGRTPAPTPSLSRPAPPPSSGDKPRASSTNSATKSAQKPEGSASSVPSTGRTRDVLCYRCKGYGHVQCDCPNQRVLVVKDDGGYSSASDLDEAILALLAADDVGTKEPLEEQIGADDAEHYESLIVQRVLSAQMEKAEQNQQHTLFQSKCVIKEHSCRLIIDGGSCNNLASSDMVEKLALTTKPHPHPYHIQWLNNSGKVKVTKLVRINFAIGSYRDVVDCDVVPMDACNILLGRPWHHGRSNQYFLIHHDKKIILLPMSLEVIVRDDVAKAMKTKTENNKNIKVVGNNKDGIKLKGHCLLATKSNVNELMLPLLLPTLWYARMI

SEQ ID NO: 176728 - protein, 83 aa, Zea Mays
MWPQRDQLGSRAEHWTWHGASSLRRALWLADQLPGGHGWQWEGATMTGADVQGPRPWSLAAAMGSVKAGHGERREGHGRERGK

SEQ ID NO: 176729 - protein, 182 aa, Zea Mays
MEVAVNFFDLEIRGAGRSFLSECEALRSIQHWNILPIIVSCSIVDNVRNVFIDLIYEYMPNGSLDTWLHHKGDEEATKCHGLTQSISIAVNIADALDYLHHDCGQQTICCDLKPSNILLDCDMNALLGDFEIARLYHDSESKWTEYGGGGHASTSGDVYSFGIVLLEILTSRSPIDPTFKDG

SEQ ID NO: 176730 - protein, 78 aa, Zea Mays
MVRLVDGSMVVSHRSFPPPRKAPCRGPALLLHHCRCEVTSHLKTKLVPENLESKANCALDHFSPYPIMFVLISVTCLG

SEQ ID NO: 176731 - protein, 164 aa, Zea Mays
MYICFDIIFFHMTNLWASLFSYYQYTNDVRQIPPARVLGDYIVFSIVFLDFEVLSMSKLGYDGVVALLVADISLSIGLDQIEALYQYAQFQFECGNYSGAADYLYQYGALCTNSERNVSALWGKLAAEILMQNWDLALEELNRLKEIIDSKVLECYTDKCTPSY

SEQ ID NO: 176732 - protein, 199 aa, Zea Mays
MQLSGLASNRPQPLCIPRVCGADEHVDVQIPPARVLGDYIVFSIVFLDFEVLSMSKLGYDGVVALLVADISLSIGLDQIEALYQYAQFQFECGNYSGAADYLYQYGALCTNSERNVSALWGKLAAEILMQNWDLALEELNRLKEIIDSKLQNRIWLMHWALFIFFNHIRYLNAIQTNAHHLIRYLATAVVVNKKEKEYA

SEQ ID NO: 176733 - protein, 141 aa, Zea Mays
MYICFDIIFFHMTNLWASLFSYYQYTNDVRQIPPARVLGDYIVFSIVFLDFEIGLDQIEALYQYAQFQFECGNYSGAADYLYQYGALCTNSERNVSALWGKLAAEILMQNWDLALEELNRLKEIIDSKVLECYTDKCTPSY

SEQ ID NO: 176734 - protein, 178 aa, Zea Mays
MYICFDIIFFHMTNLWASLFSYYQYTNDVRQIPPARVLGDYIVFSIVFLDFEIGLDQIEALYQYAQFQFECGNYSGAADYLYQYGALCTNSERNVSALWGKLAAEILMQNWDLALEELNRLKEIIDSKLQNRIWLMHWALFIFFNHIRYLNAIQTNAHHLIRYLATAVVVNKKEKEYA

SEQ ID NO: 176735 - protein, 209 aa, Zea Mays
MYICFDIIFFHMTNLWASLFSYYQYTNDVRQIPPARVLGDYIVFSIVFLDFEVLSMSKLGYDGVVALLVADISLSIGLDQIEALYQYAQFQFECGNYSGAADYLYQYGALCTNSERNVSALWGKLAAEILMQNWDLALEELNRLKEIIDSKNFSSPLNQLQNRIWLMHWALFIFFNHIRYLNAIQTNAHHLIRYLATAVVVNKKEKEYA

SEQ ID NO: 176736 - protein, 223 aa, Zea Mays
MQLASYTDVEIIQVARMQLSGLASNRPQPLCIPRVCGADEHVDVQIPPARVLGDYIVFSIVFLDFEVLSMSKLGYDGVVALLVADISLSIGLDQIEALYQYAQFQFECGNYSGAADYLYQYGALCTNSERNVSALWGKLAAEILMQNWDLALEELNRLKEIIDSKNFSSPLNQLQNRIWLMHWALFIFFNHIRYLNAIQTNAHHLIRYLATAVVVNKKEKEYA

SEQ ID NO: 176737 - protein, 1286 aa, Zea Mays
MGSLADPYALRCVSDLPPPFRSMFRFRYFNSLQSECFHVCFFSDVNMVISAPTGSGKTVLFELCILRLLSRFLSPDWRFNLNKGTLKTIYIAPSKALVQEKLRDWNMKLGPLGINCLEMTGDGEFCNTKAIHDADLILTTPEKFDSMSRHGIKSGRLGFFCDIALVLIDEVHLLNDPRGAALEAVVSRIKMLSRHDNMKSFPLANVRLIAVSATIPNIEDIAQWLLAPREGIKRFGEEMRPVKLTTKVMLQLKMTFFLRGNINGIWITDILMQHSRGKSALIFCSTRKGAQEAAQCLSQTGASLGYSNPFMKSMQQYEHLKAASLTCSDKQLQACIIHGVGFHNGGLCLKDRGLVEGLFLKGDLQVLCTTNTLAHGVNLPAHTVVIKSTQFFNKEKGLYVEYERSMVLQMCGRAGRPPFDDTGTIIIMTRKETVHLYENLLNGCEMVESQLLSCAVEHLNAEIVQLTVSDIILAVEWIKCSYLYIRIRKNPENYGVKRGTPQDLLEKQIQDICVDKIHELVEYGLIWTDEGAFVLQPLEPGRLMAKFYLKFDTMKLIVKASGYCSLEDLLHVICHSAEITWIQLRRNDKKILNDINADKDGRLLFHIVMKNGKRKKRVQTREEKIFLLANDCLTGDSLIHDLSLNQETNAICSNGCRIAKCMREYFIYKKNYRSAINSMILANSLHQKLWESSPFLLKQLPGIGIVTAKALKTAGVYSFETLATADARKIELATGRNYPFGNHIKESMSSLPPKIDIHIEETGNRLGKSTITVTLTRLSQAVKSSKRNCADMVVASEEDNVILFHENISPYSVKVFVPCPQNARVTLKVDLIFEEYVGLDVHKKHVVSREDGLYVTKEHGIDNLEPTYNIPSEICLVSSRTTRTSRSQSHTEQNPLSKEVYVIEDDGAAVSAVSALEKADDAVGTIKFNNLASLEVPSFDLLPEEEYGAPGPAEAECKGATDSTIFDHIRKKSKDFPTLMLSKSMDCSYEPLILKKMKISRDQFGVKHGCLHAGEATTMDFDPVEPRVSPTNTAEKFRGILGRSSERSRMLFGKMDSPFEKSEMLGTTPAESSLRFAGGKDSSLEKNKTLIRTPAENSLQIAARGKESKVSKVLTNLDKSPLGFAGGKESKMSNVPSTSAENSLQFAARRVRSSEKSKMLTTPYESSQAFLGEKDSPSEKSKILINSPVEYPFKKGSPGENPFKTCSPVENSLKFAAQRDSPSEKRKSCISNPLPPFQQAVQCTKQVGVAGQPFDIKEYCKEILRSRNDSQGGDPFAGYKSIFSFL

SEQ ID NO: 176738 - protein, 1015 aa, Zea Mays
MQHSRGKSALIFCSTRKGAQEAAQCLSQTGASLGYSNPFMKSMQQYEHLKAASLTCSDKQLQACIIHGVGFHNGGLCLKDRGLVEGLFLKGDLQVLCTTNTLAHGVNLPAHTVVIKSTQFFNKEKGLYVEYERSMVLQMCGRAGRPPFDDTGTIIIMTRKETVHLYENLLNGCEMVESQLLSCAVEHLNAEIVQLTVSDIILAVEWIKCSYLYIRIRKNPENYGVKRGTPQDLLEKQIQDICVDKIHELVEYGLIWTDEGAFVLQPLEPGRLMAKFYLKFDTMKLIVKASGYCSLEDLLHVICHSAEITWIQLRRNDKKILNDINADKDGRLLFHIVMKNGKRKKRVQTREEKIFLLANDCLTGDSLIHDLSLNQETNAICSNGCRIAKCMREYFIYKKNYRSAINSMILANSLHQKLWESSPFLLKQLPGIGIVTAKALKTAGVYSFETLATADARKIELATGRNYPFGNHIKESMSSLPPKIDIHIEETGNRLGKSTITVTLTRLSQAVKSSKRNCADMVVASEEDNVILFHENISPYSVKVFVPCPQNARVTLKVDLIFEEYVGLDVHKKHVVSREDGLYVTKEHGIDNLEPTYNIPSEICLVSSRTTRTSRSQSHTEQNPLSKEVYVIEDDGAAVSAVSALEKADDAVGTIKFNNLASLEVPSFDLLPEEEYGAPGPAEAECKGATDSTIFDHIRKKSKDFPTLMLSKSMDCSYEPLILKKMKISRDQFGVKHGCLHAGEATTMDFDPVEPRVSPTNTAEKFRGILGRSSERSRMLFGKMDSPFEKSEMLGTTPAESSLRFAGGKDSSLEKNKTLIRTPAENSLQIAARGKESKVSKVLTNLDKSPLGFAGGKESKMSNVPSTSAENSLQFAARRVRSSEKSKMLTTPYESSQAFLGEKDSPSEKSKILINSPVEYPFKKGSPGENPFKTCSPVENSLKFAAQRDSPSEKRKSCISNPLPPFQQAVQCTKQVGVAGQPFDIKEYCKEILRSRNDSQGGDPFAGYKSIFSFL

SEQ ID NO: 176739 - protein, 1038 aa, Zea Mays
MLQLKMTFFLRGNINGIWITDILMQHSRGKSALIFCSTRKGAQEAAQCLSQTGASLGYSNPFMKSMQQYEHLKAASLTCSDKQLQACIIHGVGFHNGGLCLKDRGLVEGLFLKGDLQVLCTTNTLAHGVNLPAHTVVIKSTQFFNKEKGLYVEYERSMVLQMCGRAGRPPFDDTGTIIIMTRKETVHLYENLLNGCEMVESQLLSCAVEHLNAEIVQLTVSDIILAVEWIKCSYLYIRIRKNPENYGVKRGTPQDLLEKQIQDICVDKIHELVEYGLIWTDEGAFVLQPLEPGRLMAKFYLKFDTMKLIVKASGYCSLEDLLHVICHSAEITWIQLRRNDKKILNDINADKDGRLLFHIVMKNGKRKKRVQTREEKIFLLANDCLTGDSLIHDLSLNQETNAICSNGCRIAKCMREYFIYKKNYRSAINSMILANSLHQKLWESSPFLLKQLPGIGIVTAKALKTAGVYSFETLATADARKIELATGRNYPFGNHIKESMSSLPPKIDIHIEETGNRLGKSTITVTLTRLSQAVKSSKRNCADMVVASEEDNVILFHENISPYSVKVFVPCPQNARVTLKVDLIFEEYVGLDVHKKHVVSREDGLYVTKEHGIDNLEPTYNIPSEICLVSSRTTRTSRSQSHTEQNPLSKEVYVIEDDGAAVSAVSALEKADDAVGTIKFNNLASLEVPSFDLLPEEEYGAPGPAEAECKGATDSTIFDHIRKKSKDFPTLMLSKSMDCSYEPLILKKMKISRDQFGVKHGCLHAGEATTMDFDPVEPRVSPTNTAEKFRGILGRSSERSRMLFGKMDSPFEKSEMLGTTPAESSLRFAGGKDSSLEKNKTLIRTPAENSLQIAARGKESKVSKVLTNLDKSPLGFAGGKESKMSNVPSTSAENSLQFAARRVRSSEKSKMLTTPYESSQAFLGEKDSPSEKSKILINSPVEYPFKKGSPGENPFKTCSPVENSLKFAAQRDSPSEKRKSCISNPLPPFQQAVQCTKQVGVAGQPFDIKEYCKEILRSRNDSQGGDPFAGYKSIFSFL

SEQ ID NO: 176740 - protein, 865 aa, Zea Mays
MVLQMCGRAGRPPFDDTGTIIIMTRKETVHLYENLLNGCEMVESQLLSCAVEHLNAEIVQLTVSDIILAVEWIKCSYLYIRIRKNPENYGVKRGTPQDLLEKQIQDICVDKIHELVEYGLIWTDEGAFVLQPLEPGRLMAKFYLKFDTMKLIVKASGYCRIQLRRNDKKILNDINADKDGRLLFHIVMKNGKRKKRVQTREEKIFLLANDCLTGDSLIHDLSLNQETNAICSNGCRIAKCMREYFIYKKNYRSAINSMILANSLHQKLWESSPFLLKQLPGIGIVTAKALKTAGVYSFETLATADARKIELATGRNYPFGNHIKESMSSLPPKIDIHIEETGNRLGKSTITVTLTRLSQAVKSSKRNCADMVVASEEDNVILFHENISPYSVKVFVPCPQNARVTLKVDLIFEEYVGLDVHKKHVVSREDGLYVTKEHGIDNLEPTYNIPSEICLVSSRTTRTSRSQSHTEQNPLSKEVYVIEDDGAAVSAVSALEKADDAVGTIKFNNLASLEVPSFDLLPEEEYGAPGPAEAECKGATDSTIFDHIRKKSKDFPTLMLSKSMDCSYEPLILKKMKISRDQFGVKHGCLHAGEATTMDFDPVEPRVSPTNTAEKFRGILGRSSERSRMLFGKMDSPFEKSEMLGTTPAESSLRFAGGKDSSLEKNKTLIRTPAENSLQIAARGKESKVSKVLTNLDKSPLGFAGGKESKMSNVPSTSAENSLQFAARRVRSSEKSKMLTTPYESSQAFLGEKDSPSEKSKILINSPVEYPFKKGSPGENPFKTCSPVENSLKFAAQRDSPSEKRKSCISNPLPPFQQAVQCTKQVGVAGQPFDIKEYCKEILRSRNDSQGGDPFAGYKSIFSFL

SEQ ID NO: 176741 - protein, 764 aa, Zea Mays
MNTPFLCPPNSEVGHTEPGRLMAKFYLKFDTMKLIVKASGYCSLEDLLHVICHSAEITWIQLRRNDKKILNDINADKDGRLLFHIVMKNGKRKKRVQTREEKIFLLANDCLTGDSLIHDLSLNQETNAICSNGCRIAKCMREYFIYKKNYRSAINSMILANSLHQKLWESSPFLLKQLPGIGIVTAKALKTAGVYSFETLATADARKIELATGRNYPFGNHIKESMSSLPPKIDIHIEETGNRLGKSTITVTLTRLSQAVKSSKRNCADMVVASEEDNVILFHENISPYSVKVFVPCPQNARVTLKVDLIFEEYVGLDVHKKHVVSREDGLYVTKEHGIDNLEPTYNIPSEICLVSSRTTRTSRSQSHTEQNPLSKEVYVIEDDGAAVSAVSALEKADDAVGTIKFNNLASLEVPSFDLLPEEEYGAPGPAEAECKGATDSTIFDHIRKKSKDFPTLMLSKSMDCSYEPLILKKMKISRDQFGVKHGCLHAGEATTMDFDPVEPRVSPTNTAEKFRGILGRSSERSRMLFGKMDSPFEKSEMLGTTPAESSLRFAGGKDSSLEKNKTLIRTPAENSLQIAARGKESKVSKVLTNLDKSPLGFAGGKESKMSNVPSTSAENSLQFAARRVRSSEKSKMLTTPYESSQAFLGEKDSPSEKSKILINSPVEYPFKKGSPGENPFKTCSPVENSLKFAAQRDSPSEKRKSCISNPLPPFQQAVQCTKQVGVAGQPFDIKEYCKEILRSRNDSQGGDPFAGYKSIFSFL

SEQ ID NO: 176742 - protein, 727 aa, Zea Mays
MAKFYLKFDTMKLIVKASGYCRIQLRRNDKKILNDINADKDGRLLFHIVMKNGKRKKRVQTREEKIFLLANDCLTGDSLIHDLSLNQETNAICSNGCRIAKCMREYFIYKKNYRSAINSMILANSLHQKLWESSPFLLKQLPGIGIVTAKALKTAGVYSFETLATADARKIELATGRNYPFGNHIKESMSSLPPKIDIHIEETGNRLGKSTITVTLTRLSQAVKSSKRNCADMVVASEEDNVILFHENISPYSVKVFVPCPQNARVTLKVDLIFEEYVGLDVHKKHVVSREDGLYVTKEHGIDNLEPTYNIPSEICLVSSRTTRTSRSQSHTEQNPLSKEVYVIEDDGAAVSAVSALEKADDAVGTIKFNNLASLEVPSFDLLPEEEYGAPGPAEAECKGATDSTIFDHIRKKSKDFPTLMLSKSMDCSYEPLILKKMKISRDQFGVKHGCLHAGEATTMDFDPVEPRVSPTNTAEKFRGILGRSSERSRMLFGKMDSPFEKSEMLGTTPAESSLRFAGGKDSSLEKNKTLIRTPAENSLQIAARGKESKVSKVLTNLDKSPLGFAGGKESKMSNVPSTSAENSLQFAARRVRSSEKSKMLTTPYESSQAFLGEKDSPSEKSKILINSPVEYPFKKGSPGENPFKTCSPVENSLKFAAQRDSPSEKRKSCISNPLPPFQQAVQCTKQVGVAGQPFDIKEYCKEILRSRNDSQGGDPFAGYKSIFSFL

SEQ ID NO: 176743 - protein, 87 aa, Zea Mays
MLAPKLYSKKFHRSALTPLLTYVIDNANPLDFPVFSLAALFSFSHSTDKKMQAGMEHDKCGHGEHRGALKQILLAASDMLQAGAGTR

SEQ ID NO: 176744 - protein, 161 aa, Zea Mays
MEAERAGACLPLPYQATKSIVRNGRRCLHPRRPVQLWRPPARDVHGEAADGCLVPGRPDSAELRRVLLPGQGTGGSRPWPTASAGQRVFERRGRLLRRDRRRKAAQVHGVGISSRLAMLPGTTQSENACRDCHQRTRGGQGCPAKRLSLDRISRQQKHNKT

SEQ ID NO: 176745 - protein, 359 aa, Zea Mays
MEAERAGACLPLPYQATKSMCVLLLAAASMLSSSHTTTAAAHGAASATASPPPAALLIATADDQQALLAFKDLVTGDPHGVLTSWTAAGNTTAGVCSWRGVGCRSRRRRPGRVTSLELASANLTFTVSPFLANLTFLGTLNLSHNFLSGNIPRELGFLPRLSYLDLRHNSLQGVVPGSLAGASRLLVLQLEVLDVGSNQLSGAIPQSLGSLSRLTYLGLYLNNLSGSVPASLEYGMDGDVSIQGDLYSYGVLLLEMFTGKRPTDASFQGGRTLQSYVASCYPDKVLEVADPGLRHQLGNGCLSGGDVCCDEIDAEKLRRCMASVFRVGLQCSQEPPRARMHVGTAIKELEAVKDALLND

SEQ ID NO: 176746 - protein, 460 aa, Zea Mays
MEHVFGGKFKLGKKIGSGSFGELYLGVNIQSGEEESVKSRHPQLHYESKLYMLLQGGTGIPHLKWFGVDGEYNVMVIDLLGPSLEDVFNQCNRKFSLKTVLMLADQMITRVEYMHTRGFLHRDIKPDNFLVGLGRKANQVYIIDYGLAKKYRDLQTHKHIPYRENKNLTGTARYASVNTHLGVEQSRRDDLESLGYVLMYFLRGSLPWQGLKAGTKKQKYDKISEKKMLTSIEALCKSYPSEFITYFHYCRSLRFEDKPDYSYLKKNFRDLFIREGYQLDYVFDWTVSRQAVDNNRLRLSGKTGGLVGPSVDRAERAAARQDVPDRFTGQAGAFARRTGSGSGQYGEHTKHRTLLDSLMASKMAVDSDKRKHSSSRNGSTSRKALLSSSRGSGDPSDPNRSSHLVPTTSSSSRPSTNQRLHQSTGLEGRTSSFPKPGRIGQDDPTMRSFERLTISAERRR

SEQ ID NO: 176747 - protein, 317 aa, Zea Mays
MSYIVLVPYYHCKKRTTYHRENKNLTGTARYASVNTHLGVEQSRRDDLESLGYVLMYFLRGSLPWQGLKAGTKKQKYDKISEKKMLTSIEALCKSYPSEFITYFHYCRSLRFEDKPDYSYLKKNFRDLFIREGYQLDYVFDWTVSRQAVDNNRLRLSGKTGGLVGPSVDRAERAAARQDVPDRFTGQAGAFARRTGSGSGQYGEHTKHRTLLDSLMASKMAVDSDKRKHSSSRNGSTSRKALLSSSRGSGDPSDPNRSSHLVPTTSSSSRPSTNQRLHQSTGLEGRTSSFPKPGRIGQDDPTMRSFERLTISAERRR

SEQ ID NO: 176748 - protein, 143 aa, Zea Mays
MATFTKLEDSPMFRKQVNSLEHLTDELKERCSNLHKGCKRFMGSLDEAYAGDLSFADSLQAFGAGLDDPISVAIGGPVMSKFTTAFRELGTYKELLRSQLEHMLSDRLSQFINVDLNGVKVNSPLFSPLETAQHSILVTIGCN

SEQ ID NO: 176749 - protein, 66 aa, Zea Mays
MATFTKLEDSPMFRKQVNSLEHLTDELKERCSNLHKGCKRFMARDVQVYYCFQGAWDIQGTPSFSA

SEQ ID NO: 176750 - protein, 119 aa, Zea Mays
MFHELVLFYYVANYLSFRGSLDEAYAGDLSFADSLQAFGAGLDDPISVAIGGPVMSKFTTAFRELGTYKELLRSQLEHMLSDRLSQFINVDLNGVKVLHTEAAKARSPTAVVVSCHQPC

SEQ ID NO: 176751 - protein, 65 aa, Zea Mays
MSKFTTAFRELGTYKELLRSQLEHMLSDRLSQFINVDLNGVKVNSPLFSPLETAQHSILVTIGCN

SEQ ID NO: 176752 - protein, 363 aa, Zea Mays
MCSRLFSRDVLDYFKCSVLYNLSKDANLLMLFFLYFTCTCSFYSLGSKECHHNKQLKIDADENDLRFCFRIISPVKAYTLQAESGADQKDWIQKITGVIASLLNSPFPQQLSYGNVAAESNRSTSSVDSLSIEDNKSSEGHDDIFNLLRNIPGNDSCAECRSPDPDWASLNLGILICIECSGAHRNLGVHISKVRSLRLDVKVWEPVIMDLFHALGNDYANSIWEALLPKEDQGMNDSNGAILFIEKPKPSDAFSIKERYIQTKYVDKLLFARDPDQNTINILEAIRKNDVRAAYRILAIAEVSANMTYDALSKDVHHVQPVTDKMLLDPISCEIIQDSGKPEGCLQGFPWPNTIASLCPKEK

SEQ ID NO: 176753 - protein, 132 aa, Zea Mays
MTYDALSKDVHHVQPVTDKMLLDPISCEIIQDSGKPEGCLQGCSLLHFACEYGYPIMVELLLLFGADINMQDFHGRTPLHHCVQKKNDELTKHLLKRGARTTIKDGGGLTALERRMELGAITDEDLFILFVR

SEQ ID NO: 176754 - protein, 155 aa, Zea Mays
MDLFHALGNDYANSIWEALLPKEDQGMNDSNGAILFIEKPKPSDAFSIKERYIQTKYVDKLLFARDPDQNTINILEAIRKNDVRAAYRILAIAEVSANMTYDALSKDVHHVQPVTDKMLLDPISCEIIQDSGKPEGCLQGFPWPNTIASLCPKEK

SEQ ID NO: 176755 - protein, 129 aa, Zea Mays
MLDLSSNDLTGKIPVAFENLHFLSTFNVSNNDLEGPIPTGGQFGTFQNSSFLGNPKLCGFMIGRRCDSADVPLVSTGGRNKKAILAIAFGVIMVPQGKVNENKLTFSDIVKATNNFNKENIIGFPFLFI

SEQ ID NO: 176756 - protein, 56 aa, Zea Mays
MRLAVEGRSDMEGRRNRGWKGALSKEGVRRNRGRAAAVGRRVEGSTWGRSALIAAA

SEQ ID NO: 176757 - protein, 420 aa, Zea Mays
MICPYIVNVSVLLGGILSWGLMWPLIAKKKGSWYPANLEDSSLHGLQAYRVFISIALILGDGLYNFIKVLIRTIAGFISMVQQNSKSMLPVSDNGSSMSSMEAVSFDDERRIENFLKDQIPKSVAYGGYVAVAAISIGTLPQIFPQLKWYYILVAYVVAPVLAFCNAYGSGLTDWSLASTYGKLAIFVFGAWAGLSHGGVLVGLAACGVMMSIVSTASDLMQDFKTGYLTLASPRSMFISQVIGTGMGCVIGPCIFWLFYKAFGDIGESGTEYPAPYAIVYRNMAILGVDGFGSLPKNCLTLCYIFFAAAITINLVRDLTPYKVSRFIPLPMAMAIPFYIGSYFAIDMFLGSAILFVWERLNKAKADAFGPAVASGLICGDGIWTLPQSILALAKVQPPICMKFLSRSTNAKVDSFLGLS

SEQ ID NO: 176758 - protein, 124 aa, Zea Mays
MLASSLKLRPRLSHIDGVLTASPSRRTTLQDLDPSWALLYVVRARLGLDIGLFSDQLSRQSSCPTRCQTCLDPSLAKPLRRCSMLLVWIVAMRLGLIALIVSTTSLVQQRCRFLCSRWKTEEKP

SEQ ID NO: 176759 - protein, 121 aa, Zea Mays
MLASSLKLRPRLSHIDGVLTASPSRRTTLQDLDPSWALLYVVRARLGLDIGLFSDQLSRQSSCPTRCQTCLDPSLAKPLRRCSMLLVWIVAMRLGLIALIVSTTSLVQQRCRFLCSRWYAS

SEQ ID NO: 176760 - protein, 94 aa, Zea Mays
MASIWLRVRRSSVRVQPQVYVRAHHCSVRRVPRCHSYPVFGPRRFAFAHIAIVVLSLVIASVRVKLPRRVFYLLTARPLGSLGLNSHHIIDSAG

SEQ ID NO: 176761 - protein, 54 aa, Zea Mays
MELDDAIHTAILTLKEGYEGQISSNNIEIGIIRADREFKVLSPSEIKDFLEEVE

SEQ ID NO: 176762 - protein, 275 aa, Zea Mays
MNSKRRRSHSPVEYKEGREKDYEASGRKDKSRDLDDTFDAKRGHESGRHSDRHSYGTSRESRRHDDYRRYHDKSGDDYGRSYPRASWSDRESRADTYYDRSKHDSTSGRSRGDQQDVGSRYGEKSVNRDQRSINEEKQEPPRGYQKSDVGEYNKCTDARKQEYRGYGDDRDHYRVVHKNKETIKEEVLKRRNGKEVEKEALVETREKKRSLFSSTGPNVDNPGDAKPSATTEAFDNSAGTVDGVNAAKVAAMKAAELACSPISNAAWFEENGNCI

SEQ ID NO: 176763 - protein, 171 aa, Zea Mays
MSGREVREYTNLSDPKDRKFGKGKDKIDDEDITFQRMVAKMQEVAGDRGGYLHGRGAILADSTPAVPVALRVEPKPKSDIRQQDLLKNIVGIKPKRPKVSSPSQPPDSNKPKHTEEDPVGELSPSRNPLGPSHGTVNPDHTAPRLDEPTEVKQQNRAGSLLGLAYESSDEE

SEQ ID NO: 176764 - protein, 797 aa, Zea Mays
MNVDEEVESGEEEEEDLFYESLDRILSSSGSSTSASDDDGADSPRRRRGCDAPVAAAAAALDLWTSQPSPVQERRRRLLQLMGLIGDPSLAGFETGRSASEDAAGPPPASPVSRSRSGGAALGSAGKPPLGGVRLRSSLSDGPDPADEDPRCLIRNLDDGREYVVKEEFGLREVGTGRHLTVEELARSPIVQELMRRQAFSTPNSNCNSNSQSGASTPIERSSSGSSNGGSRSKRRSSWLRSIRCAAGSLVTHSRDRSSSDEKDTSSEKGGHHSSSATDDSQDSVPRHGPARVKVRQYGKSYKELSGLFMTQEIHAHNGSIWSIKFSPDGRYLASAGEDCIIHVWEVLEFKRAGKEREVKENGVCNPLVAMVYSESSETMVASGAPSGSHWEKKLRSKVLQGGGSVSSDRLMVPEYVFALSEKPVITFAGHSEDVLDLSWSKSQYLLSSSMDKTVRLWHMSSTYCLKTFSHTDYVTCIQFNPVDDRYFISGSLDEKVRIWSIPKREIVDWVDLHEMVTAACYTPDGKVLSQGALIGSHKGSCHLYDTSDDMLCYKTQIDLQNKRRKSSQKKITGFQFVPGDSSMVIITSADSRIRVLDDFELVHRFKGFRNTSSQISACLAGNGRYIISASEDSRVYIWRNDDGSKPSKKKGIVSVTNTHEHFHCESVTVAVTWPFTSTTMTSLMNPRKQELELGSENGYSPQDLQTKLAKAQEMTDVEYRSTNITSYNSKHNSDRTSPAWPEELVTPPNQSLSATTCHANEGDQALNRSAWGLVIVTAGRGGQIRTFQNFGFPVRV

SEQ ID NO: 176765 - protein, 525 aa, Zea Mays
MVGRAPSGEAAGSAASAAQLGPWSPTPVTAAAATRRTRLQRKAGTTPAPLRMTARTVFHAMARPVSSAGEDCIIHVWEVLEFKRAGKEREVKENGVCNPLVAMVYSESSETMVASGAPSGSHWEKKLRSKVLQGGGSVSSDRLMVPEYVFALSEKPVITFAGHSEDVLDLSWSKSQYLLSSSMDKTVRLWHMSSTYCLKTFSHTDYVTCIQFNPVDDRYFISGSLDEKVRIWSIPKREIVDWVDLHEMVTAACYTPDGKGALIGSHKGSCHLYDTSDDMLCYKTQIDLQNKRRKSSQKKITGFQFVPGDSSMVIITSADSRIRVLDDFELVHRFKGFRNTSSQISACLAGNGRYIISASEDSRVYIWRNDDGSKPSKKKGIVSVTNTHEHFHCESVTVAVTWPFTSTTMTSLMNPRKQELELGSENGYSPQDLQTKLAKAQEMTDVEYRSTNITSYNSKHNSDRTSPAWPEELVTPPNQSLSATTCHANEGDQALNRSAWGLVIVTAGRGGQIRTFQNFGFPVRV

SEQ ID NO: 176766 - protein, 454 aa, Zea Mays
MNVDEEVESGEEEEEDLFYESLDRILSSSGSSTSASDDDGADSPRRRRGCDAPVAAAAAALDLWTSQPSPVQERRRRLLQLMGLIGDPSLAGFETGRSASEDAAGPPPASPVSRSRSGGAALGSAGKPPLGGVRLRSSLSDGPDPADEDPRCLIRNLDDGREYVVKEEFGLREVGTGRHLTVEELARSPIVQELMRRQAFSTPNSNCNSNSQSGASTPIERSSSGSSNGGSRSKRRSSWLRSIRCAAGSLVTHSRDRSSSDEKDTSSEKGGHHSSSATDDSQDSVPRHGPARVKVRQYGKSYKELSGLFMTQEIHAHNGSIWSIKFSPDGRYLASAGEDCIIHVWEVLEFKRAGKEREVKENGVCNPLVAMVYSESSETMVASGAPSGSHWEKKLRSKVLQGGGSVSSDRLMVPEYVFALSEKPVITFAGHSEDVLDLSWSKSQGLGVTTVRIE

SEQ ID NO: 176767 - protein, 315 aa, Zea Mays
MFNPVDDRYFISGSLDEKVRIWSIPKREIVDWVDLHEMVTAACYTPDGKGALIGSHKGSCHLYDTSDDMLCYKTQIDLQNKRRKSSQKKITGFQFVPGDSSMVIITSADSRIRVLDDFELVHRFKGFRNTSSQISACLAGNGRYIISASEDSRVYIWRNDDGSKPSKKKGIVSVTNTHEHFHCESVTVAVTWPFTSTTMTSLMNPRKQELELGSENGYSPQDLQTKLAKAQEMTDVEYRSTNITSYNSKHNSDRTSPAWPEELVTPPNQSLSATTCHANEGDQALNRSAWGLVIVTAGRGGQIRTFQNFGFPVRV

SEQ ID NO: 176768 - protein, 317 aa, Zea Mays
MDKTVRLWHMSSTYCLKTFSHTDYVTCIQFNPVDDRYFISGSLDEKVRIWSIPKREIVDWVDLHEMVTAACYTPDGKIDLQNKRRKSSQKKITGFQFVPGDSSMVIITSADSRIRVLDDFELVHRFKGFRNTSSQISACLAGNGRYIISASEDSRVYIWRNDDGSKPSKKKGIVSVTNTHEHFHCESVTVAVTWPFTSTTMTSLMNPRKQELELGSENGYSPQDLQTKLAKAQEMTDVEYRSTNITSYNSKHNSDRTSPAWPEELVTPPNQSLSATTCHANEGDQALNRSAWGLVIVTAGRGGQIRTFQNFGFPVRV

SEQ ID NO: 176769 - protein, 768 aa, Zea Mays
MFKSMVYYVNTSIGEVEVWPKGEASAGLTMAAWAREIRVERISPPSERCPPLAVMHTVAVGARCLVMESRPPVVADVVPPLVVMHTACLRENKTAVVPLGDEELHLVAMTSRRNLTNHACFWGYKLPFGLYNSCLTMLNLRCLGIVFDLDETLIVANTSRSFEDRIDALQRKLSNETDPQRRNGMLSEIKRYQDDKSILKQYIEGDQVYDDGKVYKAQPEIVPPLSDNQQPMTRPVIRLQDKNIILTRINPLIRDTSVLVCLRPAWEDLRSYLIARGRKRFEVYVCTMAERDYALEMWRLLDPDSRLINSVQLHDRMVCVKSGLKKSLLNVFHDGSCHPGMALVIDDRLKVWDEKDQLRVHVVPAFTPYYAPQAEANCSIPVLCVARNVACNVRGGFFKDFDEGLLPRISNVHYEDEVNEISAPDVGNYLITDDENVALVNGNRDSLPFDGMADAEVERRMKEANAQSFHQTAGDFVMPVAPAQNFVSTSVASLAPPLGMMPSPFSQPVAPPGFSDSLQGSPAREEGEVPESELDPDTRRRLLILQHGQDTRDPTSPLPAIPPVQVPVPPVQPHGNWFPTEDGINQSNLNRGSAGFTVESDSIVYEKKQPPHPSFFHGGDSPMPSDRFGYQNQRFPSQLPHEDHPMMQNHAPPKYRSFSGEELASWHVPSSQRNNQIESGRHFAQYAGTSAGILEGIALKCGSKVEYKSALCDTAELQFSIEVWIVGEKVGEGIGRTRREAQRQAAEMSLRNLARSFHQEHDRQVEVE

SEQ ID NO: 176770 - protein, 936 aa, Zea Mays
MFKSMVYYVNTSIGEVEVWPKGEASAGLTMAAWAREIRVERISPPSERCPPLAVMHTVAVGARCLVMESRPPVVADVVPPLVVMHTACLRENKTAVVPLGDEELHLVAMTSRRNLTNHACFWGYKLPFGLYNSCLTMLNLRCLGIVFDLDETLIVANTSRSFEDRIDALQRKLSNETDPQRRNGMLSEIKRYQDDKSILKQYIEGDQVYDDGKVYKAQPEIVPPLSDNQQPMTRPVIRLQDKNIILTRINPLIRDTSVLVCLRPAWEDLRSYLIARGRKRFEVYVCTMAERDYALEMWRLLDPDSRLINSVQLHDRMVCVKSGLKKSLLNVFHDGSCHPGMALVIDDRLKVWDEKDQLRVHVVPAFTPYYAPQAEANCSIPVLCVARNVACNVRGGFFKDFDEGLLPRISNVHYEDEVNEISAPDVGNYLITDDENVALVNGNRDSLPFDGMADAEVERRMKEANAQSFHQTAGDFVMPVAPAQNFVSTSVASLAPPLGMMPSPFSQPVAPPGFSDSLQGSPAREEGEVPESELDPDTRRRLLILQHGQDTRDPTSPLPAIPPVQVPVPPVQPHGNWFPTEDGINQSNLNRGSAGFTVESDSIVYEKKQPPHPSFFHGGDSPMPSDRFGYQNQRFPSQLPHEDHPMMQNHAPPKYRSFSGEELASWHVPSSQRNNQIESGRHFAQYAGTSAGILEGIALKCGSKVEYKSALCDTAELQFSIEVWIVGEKVGEGIGRTRREAQRQAAEMSLRNLANLLADKYLSSDPNKLSDMKENDFSSNRNVFGYSGNTRDDMLPLSSTSEESRFMKMENNNSRKTGSSVAALKELCTVEGYNLVFQACPSSADGLVGKESYAQVQVGGQILGKGVGLTWEEAKLQAAAEALGTLRSMLGQLGHKRSGSPRSLAPNFNKRFKPDFPRTVQRVPYGTYSRIEGHVP

SEQ ID NO: 176771 - protein, 599 aa, Zea Mays
MLSEIKRYQDDKSILKQYIEGDQVYDDGKVYKAQPEIVPPLSDNQQPMTRPVIRLQDKNIILTRINPLIRDTSVLVCLRPAWEDLRSYLIARGRKRFEVYVCTMAERDYALEMWRLLDPDSRLINSVQLHDRMVCVKSGLKKSLLNVFHDGSCHPGMALVIDDRLKVWDEKDQLRVHVVPAFTPYYAPQAEANCSIPVLCVARNVACNVRGGFFKDFDEGLLPRISNVHYEDEVNEISAPDVGNYLITDDENVALVNGNRDSLPFDGMADAEVERRMKEANAQSFHQTAGDFVMPVAPAQNFVSTSVASLAPPLGMMPSPFSQPVAPPGFSDSLQGSPAREEGEVPESELDPDTRRRLLILQHGQDTRDPTSPLPAIPPVQVPVPPVQPHGNWFPTEDGINQSNLNRGSAGFTVESDSIVYEKKQPPHPSFFHGGDSPMPSDRFGYQNQRFPSQLPHEDHPMMQNHAPPKYRSFSGEELASWHVPSSQRNNQIESGRHFAQYAGTSAGILEGIALKCGSKVEYKSALCDTAELQFSIEVWIVGEKVGEGIGRTRREAQRQAAEMSLRNLAIATEMSLVTLEIRGMICCHFQVLPRNLAL

SEQ ID NO: 176772 - protein, 832 aa, Zea Mays
MFKSMVYYVNTSIGEVEVWPKGEASAGLTMAAWAREIRVERISPPSERCPPLAVMHTVAVGARCLVMESRPPVVADVVPPLVVMHTACLRENKTAVVPLGDEELHLVAMTSRRNLTNHACFWGYKLPFGLYNSCLTMLNLRCLGIVFDLDETLIVANTSRSFEDRIDALQRKLSNETDPQRRNGMLSEIKRYQDDKSILKQYIEGDQVYDDGKVYKAQPEIVPPLSDNQQPMTRPVIRLQDKNIILTRINPLIRDTSVLVCLRPAWEDLRSYLIARGRKRFEVYVCTMAERDYALEMWRLLDPDSRLINSVQLHDRMVCVKSGLKKSLLNVFHDGSCHPGMALVIDDRLKVWDEKDQLRVHVVPAFTPYYAPQAEANCSIPVLCVARNVACNVRGGFFKDFDEGLLPRISNVHYEDEVNEISAPDVGNYLITDDENVALVNGNRDSLPFDGMADAEVERRMKEANAQSFHQTAGDFVMPVAPAQNFVSTSVASLAPPLGMMPSPFSQPVAPPGFSDSLQGSPAREEGEVPESELDPDTRRRLLILQHGQDTRDPTSPLPAIPPVQVPVPPVQPHGNWFPTEDGINQSNLNRGSAGFTVESDSIVYEKKQPPHPSFFHGGDSPMPSDRFGYQNQRFPSQLPHEDHPMMQNHAPPKYRSFSGEELASWHVPSSQRNNQIESGRHFAQYAGTSAGILEGIALKCGSKVEYKSALCDTAELQFSIEVWIVGEKVGEGIGRTRREAQRQAAEMSLRNLANKYLSSDPNKLSDMKENDFSSNRNVFGYSGNTRDDMLPLSSTSEESRFMKMENNNSRKTGNLMIHVKTHRSALLRDIT

SEQ ID NO: 176773 - protein, 783 aa, Zea Mays
MFKSMVYYVNTSIGEVEVWPKGEASAGLTMAAWAREIRVERISPPSERCPPLAVMHTVAVGARCLVMESRPPVVADVVPPLVVMHTACLRENKTAVVPLGDEELHLVAMTSRRNLTNHACFWGYKLPFGLYNSCLTMLNLRCLGIVFDLDETLIVANTSRSFEDRIDALQRKLSNETDPQRRNGMLSEIKRYQDDKSILKQYIEGDQVYDDGKVYKAQPEIVPPLSDNQQPMTRPVIRLQDKNIILTRINPLIRDTSVLVCLRPAWEDLRSYLIARGRKRFEVYVCTMAERDYALEMWRLLDPDSRLINSVQLHDRMVCVKSGLKKSLLNVFHDGSCHPGMALVIDDRLKVWDEKDQLRVHVVPAFTPYYAPQAEANCSIPVLCVARNVACNVRGGFFKDFDEGLLPRISNVHYEDEVNEISAPDVGNYLITDDENVALVNGNRDSLPFDGMADAEVERRMKEANAQSFHQTAGDFVMPVAPAQNFVSTSVASLAPPLGMMPSPFSQPVAPPGFSDSLQGSPAREEGEVPESELDPDTRRRLLILQHGQDTRDPTSPLPAIPPVQVPVPPVQPHGNWFPTEDGINQSNLNRGSAGFTVESDSIVYEKKQPPHPSFFHGGDSPMPSDRFGYQNQRFPSQLPHEDHPMMQNHAPPKYRSFSGEELASWHVPSSQRNNQIESGRHFAQYAGTSAGILEGIALKCGSKVEYKSALCDTAELQFSIEVWIVGEKVGEGIGRTRREAQRQAAEMSLRNLAIATEMSLVTLEIRGMICCHFQVLPRNLAL

SEQ ID NO: 176774 - protein, 917 aa, Zea Mays
MFKSMVYYVNTSIGEVEVWPKGEASAGLTMAAWAREIRVERISPPSERCPPLAVMHTVAVGARCLVMESRPPVVADVVPPLVVMHTACLRENKTAVVPLGDEELHLVAMTSRRNLTNHACFWGYKLPFGLYNSCLTMLNLRCLGIVFDLDETLIVANTSRSFEDRIDALQRKLSNETDPQRRNGMLSEIKRYQDDKSILKQYIEGDQVYDDGKVYKAQPEIVPPLSDNQQPMTRPVIRLQDKNIILTRINPLIRDTSVLVCLRPAWEDLRSYLIARGRKRFEVYVCTMAERDYALEMWRLLDPDSRLINSVQLHDRMVCVKSGLKKSLLNVFHDGSCHPGMALVIDDRLKVWDEKDQLRVHVVPAFTPYYAPQAEANCSIPVLCVARNVACNVRGGFFKDFDEGLLPRISNVHYEDEVNEISAPDVGNYLITDDENVALVNGNRDSLPFDGMADAEVERRMKEANAQSFHQTAGDFVMPVAPAQNFVSTSVASLAPPLGMMPSPFSQPVAPPGFSDSLQGSPAREEGEVPESELDPDTRRRLLILQHGQDTRDPTSPLPAIPPVQVPVPPVQPHGNWFPTEDGINQSNLNRGSAGFTVESDSIVYEKKQPPHPSFFHGGDSPMPSDRFGYQNQRFPSQLPHEDHPMMQNHAPPKYRSFSGEELASWHVPSSQRNNQIESGRHFAQYAGTSAGILEGIALKCGSKVEYKSALCDTAELQFSIEVWIVGEKVGEGIGRTRREAQRQAAEMSLRNLAKNDFSSNRNVFGYSGNTRDDMLPLSSTSEESRFMKMENNNSRKTGSSVAALKELCTVEGYNLVFQACPSSADGLVGKESYAQVQVGGQILGKGVGLTWEEAKLQAAAEALGTLRSMLGQLGHKRSGSPRSLAPNFNKRFKPDFPRTVQRVPYGTYSRIEGHVP

SEQ ID NO: 176775 - protein, 350 aa, Zea Mays
MDLSQALTSSSDDETRALGTLLDMFSSSFSLDDIADAYIKANGDVNKAGDFLYDLQHSLPHTKDVESSVEANLSHTDKAVEENCMDNSSQPRTLLRTEQAVEENHFENSDHTKMPENLHKSSAAFGTVSSMLRKESIRATTTASRASKKGKPLRVELPEYMRDDFKVTSDESDSAPRRETLNNRDVEEFLFCMLGEGFKLSKELIHEVLGSCGYDIKKAADAFREGNQKEVDYLIQEGKRYYQMARLADEKSAREIIKPRETESKNEFCLDLRKQDAGNVSNLLRLHLKQLANIPSFDYLRVIIGIDDSSFKMGQRRRKYVEKNSLQWTEEEPRSGNILIRINQVENRQG

SEQ ID NO: 176776 - protein, 303 aa, Zea Mays
MEGDTGSRSEKEVAVVTGGNRGIGLEICRQLASSGVTVVLTARDAERGAEAASTLGLPNVVFHQLDVGDPSSAARLAGFIEEKFGRLDILVNNAAITGTTSNVDDPEAFRQELAGMDLMQRIEAINKHNTEPYEQAQKCLRTNYHGTKAVTKALLPLLQSSSHGRIVNLSSSYGLLRRRRTERGAQQHRWPVRTEAGRAVRAVSQGLQGWAAGGSRGWPNEGGFVTYKASKALANAYSRILAKEHPSLCVNCVHPGYVQTDMNFRSGHLTVEEGARGALMLAMAPKGGVTGAFLDHTEVASFV

SEQ ID NO: 176777 - protein, 340 aa, Zea Mays
MGIYEKGFERPSPIQEESIPIALTGSDILARAKNGTGKTAAFCIPALEKIDQEKNAIQVVILVPTRELALQTSQVCKELGKHLKIQVMVTTGGTSLKDDIVRLYQPVHLIVGTPGRILDLTKKGVCILKDCSMLIMDEADKLLSPEFQPSIEQLIRYLPASRQILMFSATFPVTVKEFKDKYLPKPYVINLMDELTLKGITQFYAFVEERQKVHCLNTLFSKITELGYSCFYIHAKMLQDHRNRVFHDFRNGACRNLVCTDLFTRGIDIQAVNVVINFDFPKNSETYLHRVGRSGRFGHLGLAVNLITYEDRFNLYRIEQELGTEIKPIPPQIDQAIYCQ

SEQ ID NO: 176778 - protein, 283 aa, Zea Mays
MPWPHGPSSTRKTRTAELEASALLPSQSIPSLPFRFPHATRLLRRLVAGSRWKSPPLIAHPGDPPRPQTKPSSSSAAAFPLTPASTNPPSHTHHTHKTKKSAFERRATSGAWCRRDALVSERARAFVLWGLGRAEERGGSAIESGSAGGGRADGKGTLLRQEQGPQEGALDAGGGQAPRRLHPDQRPWQLAPAPQARRAEPVRQELPTAVDQLPPAGHQARALHSRGGEVHRPAPRHRRQQVRKLFCRAEVATACPSHSICGTGREQHVSSLVMLSSHSLIIA

SEQ ID NO: 176779 - protein, 273 aa, Zea Mays
MLGVGFSCVTNRVGYQTDHPCTINRHPKARIKGKLSNPKPDSLLTHVKSASKQQLHTTTHDCASSAITLLMHISTQFYLWKFFMYQMTTEFLNKAARTKNYSGAELEGVVKSAVSFALNRQITMDDLTKPLDEESIKVTMDDFVNALHEITPAFGASTDDLERCRLRGIVDCGKAHKHIYQRAMLLVEQVKVSKGSPLVTCLLEGPAGSGKTAMAASVGIDSDFAYVKIISAETMIGFSESSKCAQICKVFEDAYKSQFSMIILDDIERCLSP

SEQ ID NO: 176780 - protein, 337 aa, Zea Mays
MHISTQFYLWKFFMYQMTTEFLNKAARTKNYSGAELEGVVKSAVSFALNRQITMDDLTKPLDEESIKVTMDDFVNALHEITPAFGASTDDLERCRLRGIVDCGKAHKHIYQRAMLLVEQVKVSKGSPLVTCLLEGPAGSGKTAMAASVGIDSDFAYVKIISAETMIGFSESSKCAQICKVFEDAYKSQFSMIILDDIERLLEYVAIGPRFSNLISQTLLVLLKRVPPKGKNLLVVGTTSEVGFLESVGMCDVFSVTYHVPKLKKEDAKKVLHHLDVFDDGDLDAAAEALDDMPIKKLYTLVEMAAQGPTGGSAEAIYAGEKIDINHFFSILSDIIRY

SEQ ID NO: 176781 - protein, 407 aa, Zea Mays
MLGVGFSCVTNRVGYQTDHPCTINRHPKARIKGKLSNPKPDSLLTHVKSASKQQLHTTTHDCASSAITLLMHISTQFYLWKFFMYQMTTEFLNKAARTKNYSGAELEGVVKSAVSFALNRQITMDDLTKPLDEESIKVTMDDFVNALHEITPAFGASTDDLERCRLRGIVDCGKAHKHIYQRAMLLVEQVKVSKGSPLVTCLLEGPAGSGKTAMAASVGIDSDFAYVKIISAETMIGFSESSKCAQICKVFEDAYKSQFSMIILDDIERLLEYVAIGPRFSNLISQTLLVLLKRVPPKGKNLLVVGTTSEVGFLESVGMCDVFSVTYHVPKLKKEDAKKVLHHLDVFDDGDLDAAAEALDDMPIKKLYTLVEMAAQGPTGGSAEAIYAGEKIDINHFFSILSDIIRY

SEQ ID NO: 176782 - protein, 360 aa, Zea Mays
MAGRYHQDQGGDGGASMEVVSTPNQELALTNCAYVSPADLRRFPNGLALVADAWVFTLRDHNAVASGRIALNAIQRRQAKVSAGDSVTVSSFVPPDDFKLALLTLDLDYAKARANRNDELDAVVLAQQLRKRFLNQVMTSGQRVPFEFYGTNYVFTVNQALLEGQESSTPLDRGFLSSDTYIIFEAAPNSGIKVINQKEAASSKLFKHKEFNLEKLGIGGLSAEFTDIFRRAFASRVFPPHVVSKLGIKHVKGILLYGPPGTGKTLMARQIGKLLNGKDPKIVNGPEVLSKFVGETEKNVRDLFADAENEQRTRGDQSDLHVIIFDEIDAICKSRGSTRDGTGVHDSIVNQLLTKMVLRR

SEQ ID NO: 176783 - protein, 531 aa, Zea Mays
MAGRYHQDQGGDGGASMEVVSTPNQELALTNCAYVSPADLRRFPNGLALVADAWVFTLRDHNAVASGRIALNAIQRRQAKVSAGDSVTVSSFVPPDDFKLALLTLDLDYAKARANRNDELDAVVLAQQLRKRFLNQVMTSGQRVPFEFYGTNYVFTVNQALLEGQESSTPLDRGFLSSDTYIIFEAAPNSGIKVINQKEAASSKLFKHKEFNLEKLGIGGLSAEFTDIFRRAFASRVFPPHVVSKLGIKHVKGILLYGPPGTGKTLMARQIGKLLNGKDPKIVNGPEVLSKFVGETEKNVRDLFADAENEQRTRGDQSDLHVIIFDEIDAICKSRGSTRDGTGVHDSIVNQLLTKIDGVEALNNVLLIGMTNRKDLLDEALLRPGRLEVHIEINLPDENGRLQILQIHTNKMKENSFLSPDINLQELAARTKNYSGAELEGVVKSAVSFALNRQITMDDLTKPLDEESIKVTMDDFVNALHEITPAFGASTDDLERCRLRGIVDCGKAHKHIYQRAMLLVEQVKVSKGLLL

SEQ ID NO: 176784 - protein, 445 aa, Zea Mays
MAGRYHQDQGGDGGASMEVVSTPNQELALTNCAYVSPADLRRFPNGLALVADAWVFTLRDHNAVASGRIALNAIQRRQAKVSAGDSVTVSSFVPPDDFKLALLTLDLDYAKARANRNDELDAVVLAQQLRKRFLNQVMTSGQRVPFEFYGTNYVFTVNQALLEGQESSTPLDRGFLSSDTYIIFEAAPNSGIKVINQKEAASSKLFKHKEFNLEKLGIGGLSAEFTDIFRRAFASRVFPPHVVSKLGIKHVKGILLYGPPGTGKTLMARQIGKLLNGKDPKIVNGPEVLSKFVGETEKNVRDLFADAENEQRTRGDQSDLHVIIFDEIDAICKSRGSTRDGTGVHDSIVNQLLTKIDGVEALNNVLLIGMTNRKDLLDEALLRPGRLEVHIEINLPDENGRLQILQIHTNKMKENSFLSPDINLQELGLPLFFFGKLIYFQALHL

SEQ ID NO: 176785 - protein, 431 aa, Zea Mays
MAGRYHQDQGGDGGASMEVVSTPNQELALTNCAYVSPADLRRFPNGLALVADAWVFTLRDHNAVASGRIALNAIQRRQAKVSAGDSVTVSSFVPPDDFKLALLTLDLDYAKARANRNDELDAVVLAQQLRKRFLNQVMTSGQRVPFEFYGTNYVFTVNQALLEGQESSTPLDRGFLSSDTYIIFEAAPNSGIKVINQKEAASSKLFKHKEFNLEKLGIGGLSAEFTDIFRRAFASRVFPPHVVSKLGIKHVKGILLYGPPGTGKTLMARQIGKLLNGKDPKIVNGPEVLSKFVGETEKNVRDLFADAENEQRTRGDQSDLHVIIFDEIDAICKSRGSTRDGTGVHDSIVNQLLTKIDGVEALNNVLLIGMTNRKDLLDEALLRPGRLEVHIEINLPDENGRLQILQIHTNKMKENSFLSPDINLQELDNHG

SEQ ID NO: 176786 - protein, 453 aa, Zea Mays
MAGRYHQDQGGDGGASMEVVSTPNQELALTNCAYVSPADLRRFPNGLALVADAWVFTLRDHNAVASGRIALNAIQRRQAKVSAGDSVTVSSFVPPDDFKLALLTLDLDYAKARANRNDELDAVVLAQQLRKRFLNQVMTSGQRVPFEFYGTNYVFTVNQALLEGQESSTPLDRGFLSSDTYIIFEAAPNSGIKVINQKEAASSKLFKHKEFNLEKLGIGGLSAEFTDIFRRAFASRVFPPHVVSKLGIKHVKGILLYGPPGTGKTLMARQIGKLLNGKDPKIVNGPEVLSKFVGETEKNVRDLFADAENEQRTRGDQSDLHVIIFDEIDAICKSRGSTRDGTGVHDSIVNQLLTKIDGVEALNNVLLIGMTNRKDLLDEALLRPGRLEVHIEINLPDENGRLQILQIHTNKMKENSFLSPDINLQELELQWSRVGRCCQKCCLICFEPADNHG

SEQ ID NO: 176787 - protein, 291 aa, Zea Mays
MVDRARATANFRLVVIRGRAYIERIAPAFQTRDLFTIWGILQLLRRYPGRVPDLDLMFDCVDWPVVHADQYQGENATLLPPLFRYCGDNETLDVVFPDWSFWGWPEINIKPWDALQKELNGGNKRVKWLAREPYAYWKGNPDVAVTRQELVKCNVSSKHEWNARIYKQDWLKEIKAGYKQSDLASQCTHRYKIYIEGSAWSVSEKYILACDSMTLVVTPKYYDFYSRVLMPMQHYWPIWDDNKCSSIKFAVDWGNSHKQKVSFRVHLYYIIKKGRPSAAVRALSHQITGSK

SEQ ID NO: 176788 - protein, 462 aa, Zea Mays
MASAAAAVIPDGRRWSKGPGSSSSPVTTAIFLFFFVVVVGVLVSARWITTTTHLSTTNLDQWSSKLAILTATHTTSSIPAIPAAPPPPRPTYSLSCPAPPLHRDPTIPSNISQTLDLVLSPNASSASTCAAFPDPPPLPANSNASSTCPAYFRFIHEDLHPWRAAGGITRAMVDRARATANFRLVVIRGRAYIERIAPAFQTRDLFTIWGILQLLRRYPGRVPDLDLMFDCVDWPVVHADQYQGENATLLPPLFRYCGDNETLDVVFPDWSFWGWPEINIKPWDALQKELNGGNKRVKWLAREPYAYWKGNPDVAVTRQELVKCNVSSKHEWNARIYKQDWLKEIKAGYKQSDLASQCTHRYKIYIEGSAWSVSEKYILACDSMTLVVTPKYYDFYSRVLMPMQHYWPIWDDNKCSSIKFAVDWGNSHKQKVSFRVHLYYIIKKGRPSAAVRALSHQITGSK

SEQ ID NO: 176789 - protein, 277 aa, Zea Mays
MHLLISGLVAAALFLHVDAARGTFVYAGCSPSRYAPNTAFESNLNSLLSSMAPTASSGATYSTFTAPGAGLAEAESPAAYGLYQCRGGLRPGECVACVRDTVARIGAVCAGAAAASLQSDGCYVRYGGASAAYHSCGAGTSGDPWFLRSRDAVLSELQGVDATAASGSGSGGYKVSASGPVRGAAQCLGGIAAGDCAACLAQAAAQLRGTCGAALAADVYLVQCSVRYWTDGANQLRSSQDNPEDDAGRTLAIAIGISAGVAALVVFISFLRKACSS

SEQ ID NO: 176790 - protein, 598 aa, Zea Mays
MADEAKAKGNAAFSAGRFEEAARHFTDAIALAPDNHVLYSNRSAALASLHRYSDALADAQKTVDLKPDWAKGYSRLGAAHLGLGDAASAVAAYEKGLELDPSNEGLKAGLQDAKKAAAAPPRRGSSGPDAIGQMFQGPELWSKIASDPSTRAYLNEPDFMHMMREVQRNPSSISMYLSDPRMMQVLSLMLNVKIQRPEASEPSQSTPPPPKQQQQQQTPPSETKARDVEPEPEAEPMDLTDEEKDRKQTKAAAQKEKELGNAAYKKKDFEVAIQHYTKALELDDEDISYLTNRAAVYIEMGKYDECIKDCDKAVERGRELRADFKMISRALTRKGTALVKLAKTSKDFDIAIETFQKALTEHRNPDTLKKLNEAEKAKKELEQQEYYDPKLADEEREKGNEFFKEQKYPEAIKHYTEALKRNPKDPRVYSNRAACYTKLGAMPEGLKDAEKCLELDPTFTKGYTRKGAIQFFMKEYDKAVETYQAGLKHDPNNQELLDGVKRCVEQINKANRGEISQDELQERQNKAMQDPEIQNILTDPIMRQVLIDFQENPSAAQEHLKNPGVMQKIQKLQRHKNEPVRGLILFLLDWLPHCSLPV

SEQ ID NO: 176791 - protein, 85 aa, Zea Mays
MCCLLWRIYEMHPALSLKSGCDTSGRVTSTCPIPPTQLICSRFGHFTKLRLQIPSLYVTSPSSTTSNWKSPYATSTSATYYRRNF

SEQ ID NO: 176792 - protein, 55 aa, Zea Mays
MKELLGVCFVAEDPKGREHLRQILSEAAPKLSPIKLRHGDRSQDEGVNRLKDEMT

SEQ ID NO: 176793 - protein, 89 aa, Zea Mays
MTSKILIFIVCNTDNFVLEPYETEITTKSSPFAIALARHLHSIGAKEYGAFWCSHCNEQKQDSLRCWATTWRRLSKGLPSSYSRSSWVA

SEQ ID NO: 176794 - protein, 91 aa, Zea Mays
MTSKILIFIVCNTDNFVLEPYETEITTKSSPFAIALARHLHSIGAKEYGAFWCSHCNEQKQLQDSLRCWATTWRRLSKGLPSSYSRSSWVA

SEQ ID NO: 176795 - protein, 73 aa, Zea Mays
MLSGSRCRNTQISSRSSWLLLISDQASFPSSRAPGSIDLSRSCLSRACMTEQICRELEQAEKTMCIQNIFTSK

SEQ ID NO: 176796 - protein, 358 aa, Zea Mays
MLRPEIALPGSEPRPQTTYVSVPYSDFLASIDKDQVKKVEVDGVHVMFRLRPEVESQVRVEQTPSQRGTDAVVDNAGVSRRIVFTTTRPVDIKTPYEKMVENMVEFGSPDKRSGGTLNSALVALIYVVLIAVVLQRLPISFSQHSAGQLRNRKNSNSGRAKVSESTDIVTFADVAGVDEAKEELEEIVEFLRNPERYVRLGARPPRGVLLVGLPGTGKTLLAKAVAGEAEVPFISCSASEFVELYVGMGAARVRDLFAKAKKESPSIIFIDEIDAVAKSRDGRYRIVSNDEREQTLNQLLTEMDGFDTNSAVIVLGATNRADVLDPALRRPGRFDRVVMVWKRINSKSSCEQKRASTE

SEQ ID NO: 176797 - protein, 1303 aa, Zea Mays
MPAPPSTEAGRSRTMTRVIILLDSDKEDDGTGRQAGRELGGAAIASAGEASKLVKPEVVDDVGSNPVRPGALPTSLRVQGHRAPSSPSPVPAAVRKQPEIIAISDEDNDGSRFRRVRRVKDEASDWVLSAKAKRAMVSGVPPGSSDVKRKRKRGSSGAGDFHALDRNLSASGAGRRTSWMAEDAGSSRNVSSSELSRGGVGDRSGSTKKARGAPGKTRRGGGTRRERSTSAAPANLVGGSATVGSRIRLRSRQQGRVQCATYSARVSSEDTGEDEKHMQEQTRVEDVEFMEVDDDYDDVNVAGNVIDQESEQDEALEGRSSQDSHGYSEDKEGKDSAALSDNEEDVGGKELLEEEEEGADQEESHIIYDGEGEQEEDASEEETQELDETGEAQPFNPSNTMAGSTMRSGGDGKQVFRRRVFEGIYLPENPHRTVGKGIQGRTRSQRKCKDKKLLKRGTFSKPYNIDIPDSTSDSEEEIEPPAPQQGLLSSSEEDNMTFGKRKRRRAAINKRWDKRLSASSDEEDYGASAMDAKERPFRRLKKGLSNLQAAKEGCRNYEGSNPGHARYSGPNGGNLENMSSAQDDISFKRNVHMIRIKKRGRAAKAVYDELLDSLFSGWENHIGNPVHAEAGNSLPLVFSFGDEDAEENTENDKYQEQEDLWMECGIAFQSMNIGSNGCEEDGKEIPPVKVTSCNIGQHEFIIDEQIGVRCKHCHVVDLEIRDVLPTLGKCSAERGSAINPEFDRMLKEMLNVFEQNDVLVSNGHELPCNFGDHKAGSVWNLIPGVKETMFPHQQDAFEFMWTKLAGGTTIEQLKHTIKSDAGGGCVISHAPGTGKTRLAITFVQSYLEVFPHCSPVIIAPRGMLATWEKEFRKWKATGEARVLDERKLANHEGMDGDKVRKLLLEKPNLLVLDEGHTPRNKKSLIWKVLKRVHTEKRIILSGTLFQNNFEELYNTLRLVRPKDADALHLETDESKDFWSSLRLNDITKANINEVRKKLDPIVHIHSGRFLQKSLPGLRESVVILNPLLYQKEVIASMEKTVAMGLDAEYKISLASIHPSLLASAKLSMKEESILDKPKLESLRSNPSGGVKTRFVLEIVRLCEALNERVLVFSQYLEPLSLIMEQLKERFSWAEGEEILLMSGKVLVKKRQTMMEVFNNMKSKAKVMLASTKACCEGITLVGASRVVLLDVVWNPSVGRQAIGRAYRIGQRKIVYTYNLIAEGTTEKRKYDRQAKKEHMSKLLFSNELERGGCNLPPELTFNDRVLEELTAREDLKNLFVKIYVDNQTDGSRGEMKNNTCLQS

SEQ ID NO: 176798 - protein, 161 aa, Zea Mays
MGKRWIPLEANPDVLNQFIWGLGVHEEDVQFCDVYGLDDELLAMVPQPVLAVLFLYPLTSLDEEKEESSVSAATSTSAGKELSKKVYFTKQTVGNACGTVGVIHAIGNATSQIKLVEGSYFEKFYKQTADMDPAQRAAFLEEDDEMEDAHSVAASAGDTDL

SEQ ID NO: 176799 - protein, 202 aa, Zea Mays
MGKRWIPLEANPDVLNQFIWGLGVHEEDVQFCDVYGLDDELLAMVPQPVLAVLFLYPLTSLDEEKEESSVSAATSTSAGKELSKKVYFTKQTVGNACGTVGVIHAIGNATSQIKLVEGSYFEKFYKQTADMDPAQRAAFLEEDDEMEDAHSVAASAGDTDVNFMSLMDENHNPHPMALHHLKPCCRMLQKSSKLELQRTLTR

SEQ ID NO: 176800 - protein, 122 aa, Zea Mays
MGKRWIPLEANPDVLNQFIWGLGVHEEDVQFCDVYGLDDELLAMVPQPVLAVLFLYPLTSLDEEKEESSVSAATSTSAGKELSKKVYFTKQTVGNACGTVGVIHAIGNATSQIKLGNYEDLH

SEQ ID NO: 176801 - protein, 166 aa, Zea Mays
MLLVNELLKEYLQFLDQELSKKVYFTKQTVGNACGTVGVIHAIGNATSQIKLVEGSYFEKFYKQTADMDPAQRAAFLEEDDEMEDAHSVAASAGDTDANVDVNEHFVCFSCVDGELYELDGRKSQPTSHGPSSPETLLQDAAKVIKARIAENPNSMNFNVMALSKK

SEQ ID NO: 176802 - protein, 132 aa, Zea Mays
MDRWTGVVYVPLSRGGPLFRVAASLLLSPAKTLAVPRVNAILFTGDRVRGTGDPVIERLSDAAHLAGVLAGKLPGEANAWVVDAARFAGPFAVYRELVPTVDAAGDPKGYDPTGFPAAAGVANILARSIGEV

SEQ ID NO: 176803 - protein, 67 aa, Zea Mays
MDRWTGVVYVPLSRGGPLFRVAASLLLSPAKTLATRLRSLNYSDGSRFHESTRSFSRATASAARAIR

SEQ ID NO: 176804 - protein, 240 aa, Zea Mays
MDRWTGVVYVPLSRGGPLFRVAASLLLSPAKTLAIQNQVPGLSAKDSAGNQHPPSYHPPARTIILGFSKGGVVVNQLVTELSRWGASGSTNQAAAADVPRPAAAGPGPPPHPTQNDLLLLGAPTRSSDDLLSSISELHYVDAGLNRAGAYVADRAVIGRIREHVVRAGDKSLRFALHGTPRQWCDPSRPWIREEKDAMVQVLADEARRSEGRLVLSEKLYFEGRPRSLLMHFEVLEAMDI

SEQ ID NO: 176805 - protein, 64 aa, Zea Mays
MLIVCILVTRLHAAGYDDLPRMMLARSSWSLATRRTRRLHGAKMSVIGMSQTPNASINIAVFCE

SEQ ID NO: 176806 - protein, 56 aa, Zea Mays
MCTAPFTPPESTCPNLKHQPFWDRVGTIGSFLKKEKTCFHGTNLNKRKKGISRFIK

SEQ ID NO: 176807 - protein, 90 aa, Zea Mays
MASTCFRAAARVASAAGRSAAATRSAPSAARAAAAAHRASSFSRMPVELGCCAGLSLLPLHSAVAAARLTSRLSTASSCRALSQDENDGT

SEQ ID NO: 176808 - protein, 217 aa, Zea Mays
MATEMVLLCRFVAFVAALACLLRPGAPVELHRKLSGWSDDAGATWYGAATGAGSDGGACGYQNAVDQPPFASMIAAGSPSIFLNGKGCGSCYQVKCTGHASCSGSPVTVVLTDECPGGACLDEPVHFDLSGTAFGAMAKPGQADQLRSAGRLRIQYTRFTSSIAYSLIQDPEAPDARLHTGAQAQEPEEHAHLAERQLRRVQQRGCRLAGSSVPLAT

SEQ ID NO: 176809 - protein, 203 aa, Zea Mays
MGKKRIPNKSLPGARPGYVHAVFFVFVLLLYCRWCMRVPERRRPAAFRVHDRRRQPVHLPERQGLRLLLPVVINNTGTALPYVVVVINCAGEMHRPRVVLRQPGDGGPHRRVPRRRVPGRARALRPERHGVRSHGEARPGRPAPQRRTPQDPVHPDPEAPDARLHTGAQAQEPEEHAHLAERQLRRVQQRGCRLAGSSVPLAT

SEQ ID NO: 176810 - protein, 105 aa, Zea Mays
MDEEGIIQQQPQEEDSRLEQDEDPMIERTEQRSTATRRSTASTINQDKEAKRMKKDSLEGLVGRYLDLKSKQVEDEITQMAKGKESAQDRKYWSYGDSSAHCFEC

SEQ ID NO: 176811 - protein, 194 aa, Zea Mays
MQAPKEVPPDYQCKDKFLVQSVAAAEGTTHKGIVPGMFSKAPGKLVEEFKLRVVYVPANPPSPVPEETEEDDGSLDSDVDHEVGTPSTSNCAAGQGHTCRSQASDDEGDSTSKLGLESRYAEENKMVQKDLIQDASISELELESRYAEENKKIQKELDLLRKTHASPGDFSATSVLLVFLLSSLVGYLMFGSKT

SEQ ID NO: 176812 - protein, 122 aa, Zea Mays
MPTQTPPPPPDSRARAHPIRNFFFPYQTDRALRYAANRTTLVSRHSLAFVCLSRNFCFREQKNVAGALPRLGIFHQFSGSWLLGSDLPYSLVLETPEERRERERERERERERERERERRKRG

SEQ ID NO: 176813 - protein, 233 aa, Zea Mays
MSRARQQDRSVKTTNPRKYSVRPASGVVQPRGSCGITITMQAPKEVPPDYQCKDKFLVQSVAAAEGTTHKGIVPGMFSKAPGKLVEEFKLRVVYVPANPPSPVPEETEEDDGSLDSDVDHEVGTPSTSNCAAGQGHTCRSQASDDEGDSTSKLGLESRYAEENKMVQKDLIQDASISELELESRYAEENKKIQKELDLLRKTHASPGDFSATSVLLVFLLSSLVGYLMFGSKT

SEQ ID NO: 176814 - protein, 183 aa, Zea Mays
MSNTLLRVCPSDLKMPFEVKKHSSACLELVNRTDRWVAFKVKTTNPRKYSVRPASGVVQPRGSCGITITMQAPKEVPPDYQCKDKFLVQSVAAAEGTTHKGIVPGMFSKAPGKLVEEFKLRVVYVPANPPSPVPEETEEDDGSLDSDVDHEVGTPSTSNCAAGQGHTCRSQASDDEVTLVSPS

SEQ ID NO: 176815 - protein, 112 aa, Zea Mays
MQAPKEVPPDYQCKDKFLVQSVAAAEGTTHKGIVPGMFSKAPGKLVEEFKLRVVYVPANPPSPVPEETEEDDGSLDSDVDHEVGTPSTSNCQDKGIHVDHKLQMTRVTLHPS

SEQ ID NO: 176816 - protein, 165 aa, Zea Mays
MGPSSFPDPAAFQDASGKDVDLSTYKGKVLLIVNVASQCGLTNSNYTELSQLYEKYKDQGFEILAFPCNQFGGQEPGTNEEIVQFACTRFKAEYPIFDKVDVNGDNTAPIYKFLKSSKGSLFGDNIKWNFSKFLVDKEGHVVERYAPTTSPLSIEKDIKKLLGSS

SEQ ID NO: 176817 - protein, 512 aa, Zea Mays
MNSTRRASKAAKSTINYHRFSLDEHHLFEPDALITKERDANHQSRQSSQSCRTYAYRRLTTPQFVSALSGIWNLVGQPESSGTAQRSSIHGISSREDPVCFSRDQQGNILTPCCVENSSGLRSQYCFSTPKEIYEDLIYVKKKMLTLTPFNNIVGASSTWMHMHSTNKVEGAHYLQFGTIYSVQAEKMEKIETSQNSKRSMCEETCASSNNMDIRDNSYSNQTRHMPNELFTISNEEASSTHDCESSRHNTECNLEKNQEDSNFLACPVHEMEIAKEVRIMPGSQVFSKACTDAQLDKSKHMSCLVGDAVVLNSANADESACREDVCLQLSLDKCSQELQPTFQHRFDGAVTINRHAVAGALAGTAVSVSLHPIDTVKTIIQANSYGQSSVYHTLRRTLIERGVLGLYGGLASKLACSAPISAIYTLTYETVKGALLPVFPKEYHSIAHCAAGGCSSIATSFVFTPSECIKQQMQECFSRMPQKGWHCFIIYWMGCCPLQKYPTFHSEVLCL

SEQ ID NO: 176818 - protein, 547 aa, Zea Mays
MNSTRRASKAAKSTINYHRFSLDEHHLFEPDALITKERDANHQSRQSSQSCRTYAYRRLTTPQFVSALSGIWNLVGQPESSGTAQRSSIHGISSREDPVCFSRDQQGNILTPCCVENSSGLRSQYCFSTPKEIYEDLIYVKKKMLTLTPFNNIVGASSTWMHMHSTNKVEGAHYLQFGTIYSVQAEKMEKIETSQNSKRSMCEETCASSNNMDIRDNSYSNQTRHMPNELFTISNEEASSTHDCESSRHNTECNLEKNQEDSNFLACPVHEMEIAKEVRIMPGSQVFSKACTDAQLDKSKHMSCLVGDAVVLNSANADESACREDVCLQLSLDKCSQELQPTFQHRFDGAVTINRHAVAGALAGTAVSVSLHPIDTVKTIIQANSYGQSSVYHTLRRTLIERGVLGLYGGLASKLACSAPISAIYTLTYETVKGALLPVFPKEYHSIAHCAAGGCSSIATSFVFTPSECIKQQMQVGSHYQNCWNALVGCLKKGGIASLYTGWGAVLCRNIPHSIVKFYAYESLKQSLLKSAPDRAKLNSGQTHKTK

SEQ ID NO: 176819 - protein, 620 aa, Zea Mays
MNSTRRASKAAKSTINYHRFSLDEHHLFEPDALITKERDANHQSRQSSQSCRTYAYRRLTTPQFVSALSGIWNLVGQPESSGTAQRSSIHGISSREDPVCFSRDQQGNILTPCCVENSSGLRSQYCFSTPKEIYEDLIYVKKKMLTLTPFNNIVGASSTWMHMHSTNKVEGAHYLQFGTIYSVQAEKMEKIETSQNSKRSMCEETCASSNNMDIRDNSYSNQTRHMPNELFTISNEEASSTHDCESSRHNTECNLEKNQEDSNFLACPVHEMEIAKEVRIMPGSQVFSKACTDAQLDKSKHMSCLVGDAVVLNSANADESACREDVCLQLSLDKCSQELQPTFQHRFDGAVTINRHAVAGALAGTAVSVSLHPIDTVKTIIQANSYGQSSVYHTLRRTLIERGVLGLYGGLASKLACSAPISAIYTLTYETVKGALLPVFPKEYHSIAHCAAGGCSSIATSFVFTPSECIKQQMQVGSHYQNCWNALVGCLKKGGIASLYTGWGAVLCRNIPHSIVKFYAYESLKQSLLKSAPDRAKLNSGQTVQHCDFSYTSRIHISQCSYSKPIPYISHLIVQVLSFYVEVLLGQLLLSVQHRLMLSRHECNYRHSALFASMMGWFMH

SEQ ID NO: 176820 - protein, 614 aa, Zea Mays
MNSTRRASKAAKSTINYHRFSLDEHHLFEPDALITKERDANHQSRQSSQSCRTYAYRRLTTPQFVSALSGIWNLVGQPESSGTAQRSSIHGISSREDPVCFSRDQQGNILTPCCVENSSGLRSQYCFSTPKEIYEDLIYVKKKMLTLTPFNNIVGASSTWMHMHSTNKVEGAHYLQFGTIYSVQAEKMEKIETSQNSKRSMCEETCASSNNMDIRDNSYSNQTRHMPNELFTISNEEASSTHDCESSRHNTECNLEKNQEDSNFLACPVHEMEIAKEVRIMPGSQVFSKACTDAQLDKSKHMSCLVGDAVVLNSANADESACREDVCLQLSLDKCSQELQPTFQHRFDGAVTINRHAVAGALAGTAVSVSLHPIDTVKTIIQANSYGQSSVYHTLRRTLIERGVLGLYGGLASKLACSAPISAIYTLTYETVKGALLPVFPKEYHSIAHCAAGGCSSIATSFVFTPSECIKQQMQVGSHYQNCWNALVGCLKKGGIASLYTGWGAVLCRNIPHSIVKLLCGGFAGSTAALCTTPFDVIKTRVQLQALSPVCKYDGVVHALKEIFRHEGLCGLYRGLTPRLAMYMSQGAIFFTSYEFLSTLMFPEPEQEVHARSV

SEQ ID NO: 176821 - protein, 594 aa, Zea Mays
MNSTRRASKAAKSTINYHRFSLDEHHLFEPDALITKERDANHQSRQSSQSCRTYAYRRLTTPQFVSALSGIWNLVGQPESSGTAQRSSIHGISSREDPVCFSRDQQGNILTPCCVENSSGLRSQYCFSTPKEIYEDLIYVKKKMLTLTPFNNIVGASSTWMHMHSTNKVEGAHYLQFGTIYSVQAEKMEKIETSQNSKRSMCEETCASSNNMDIRDNSYSNQTRHMPNELFTISNEEASSTHDCESSRHNTECNLEKNQEDSNFLACPVHEMEIAKEVRIMPGSQVFSKACTDAQLDKSKHMSCLVGDAVVLNSANADESACREDVCLQLSLDKCSQELQPTFQHRFDGAVTINRHAVAGALAGTAVSVSLHPIDTVKTIIQANSYGQSSVYHTLRRTLIERGVLGLYGGLASKLACSAPISAIYTLTYETVKGALLPVFPKEYHSIAHCAAGGCSSIATSFVFTPSECIKQQMQVGSHYQNCWNALVGCLKKGGIASLYTGWGAVLCRNIPHSIVKVQHCDFSYTSRIHISQCSYSKPIPYISHLIVQVLSFYVEVLLGQLLLSVQHRLMLSRHECNYRHSALFASMMGWFMH

SEQ ID NO: 176822 - protein, 580 aa, Zea Mays
MNSTRRASKAAKSTINYHRFSLDEHHLFEPDALITKERDANHQSRQSSQSCRTYAYRRLTTPQFVSALSGIWNLVGQPESSGTAQRSSIHGISSREDPVCFSRDQQGNILTPCCVENSSGLRSQYCFSTPKEIYEDLIYVKKKMLTLTPFNNIVGASSTWMHMHSTNKVEGAHYLQFGTIYSVQAEKMEKIETSQNSKRSMCEETCASSNNMDIRDNSYSNQTRHMPNELFTISNEEASSTHDCESSRHNTECNLEKNQEDSNFLACPVHEMEIAKEVRIMPGSQVFSKACTDAQLDKSKHMSCLVGDAVVLNSANADESACREDVCLQLSLDKCSQELQPTFQHRFDGAVTINRHAVAGALAGTAVSVSLHPIDTVKTIIQANSYGQSSVYHTLRRTLIERGVLGLYGGLASKLACSAPISAIYTLTYETVKGALLPVFPKEYHSIAHCAAGGCSSIATSFVFTPSECIKQQMQVGSHYQNCWNALVGCLKKGGIASLYTGWGAVLCRNIPHSIVKFYAYESLKQSLLKSAPDRAKLNSGQTVQHCDFSYTSRIHISQCSYSKPIPYISHLIVQVLRQG

SEQ ID NO: 176823 - protein, 527 aa, Zea Mays
MNSTRRASKAAKSTINYHRFSLDEHHLFEPDALITKERDANHQSRQSSQSCRTYAYRRLTTPQFVSALSGIWNLVGQPESSGTAQRSSIHGISSREDPVCFSRDQQGNILTPCCVENSSGLRSQYCFSTPKEIYEDLIYVKKKMLTLTPFNNIVGASSTWMHMHSTNKVEGAHYLQFGTIYSVQAEKMEKIETSQNSKRSMCEETCASSNNMDIRDNSYSNQTRHMPNELFTISNEEASSTHDCESSRHNTECNLEKNQEDSNFLACPVHEMEIAKEVRIMPGSQVFSKACTDAQLDKSKHMSCLVGDAVVLNSANADESACREDVCLQLSLDKCSQELQPTFQHRFDGAVTINRHAVAGALAGTAVSVSLHPIDTVKTIIQANSYGQSSVYHTLRRTLIERGVLGLYGGLASKLACSAPISAIYTLTYETVKGALLPVFPKEYHSIAHCAAGGCSSIATSFVFTPSECIKQQMQECFSRMPQKGWHCFIIYWMGCCPLQKYPTFHSEGIKSKYLLLSPIKFKISLI

SEQ ID NO: 176824 - protein, 525 aa, Zea Mays
MNSTRRASKAAKSTINYHRFSLDEHHLFEPDALITKERDANHQSRQSSQSCRTYAYRRLTTPQFVSALSGIWNLVGQPESSGTAQRSSIHGISSREDPVCFSRDQQGNILTPCCVENSSGLRSQYCFSTPKEIYEDLIYVKKKMLTLTPFNNIVGASSTWMHMHSTNKVEGAHYLQFGTIYSVQAEKMEKIETSQNSKRSMCEETCASSNNMDIRDNSYSNQTRHMPNELFTISNEEASSTHDCESSRHNTECNLEKNQEDSNFLACPVHEMEIAKEVRIMPGSQVFSKACTDAQLDKSKHMSCLVGDAVVLNSANADESACREDVCLQLSLDKCSQELQPTFQHRFDGAVTINRHAVAGALAGTAVSVSLHPIDTVKTIIQANSYGQSSVYHTLRRTLIERGVLGLYGGLASKLACSAPISAIYTLTYETVKGALLPVFPKEYHSIAHCAAGGCSSIATSFVFTPSECIKQQMQVGSHYQNCWNALVGCLKKGGIASLYTGWGAVLCRNIPHSIVKDIIPFLNL

SEQ ID NO: 176825 - protein, 526 aa, Zea Mays
MNSTRRASKAAKSTINYHRFSLDEHHLFEPDALITKERDANHQSRQSSQSCRTYAYRRLTTPQFVSALSGIWNLVGQPESSGTAQRSSIHGISSREDPVCFSRDQQGNILTPCCVENSSGLRSQYCFSTPKEIYEDLIYVKKKMLTLTPFNNIVGASSTWMHMHSTNKVEGAHYLQFGTIYSVQAEKMEKIETSQNSKRSMCEETCASSNNMDIRDNSYSNQTRHMPNELFTISNEEASSTHDCESSRHNTECNLEKNQEDSNFLACPVHEMEIAKEVRIMPGSQVFSKACTDAQLDKSKHMSCLVGDAVVLNSANADESACREDVCLQLSLDKCSQELQPTFQHRFDGAVTINRHAVAGALAGTAVSVSLHPIDTVKTIIQANSYGQSSVYHTLRRTLIERGVLGLYGGLASKLACSAPISAIYTLTYETVKGALLPVFPKEYHSIAHCAAGGCSSIATSFVFTPSECIKQQMQVGSHYQNCCFYVEVLLGQLLLSVQHRLMLSRHECNYRHSALFASMMGWFMH

SEQ ID NO: 176826 - protein, 428 aa, Zea Mays
MNSTRRASKAAKSTINYHRFSLDEHHLFEPDALITKERDANHQSRQSSQSCRTYAYRRLTTPQFVSALSGIWNLVGQPESSGTAQRSSIHGISSREDPVCFSRDQQGNILTPCCVENSSGLRSQYCFSTPKEIYEDLIYVKKKMLTLTPFNNIVGASSTWMHMHSTNKVEGAHYLQFGTIYSVQAEKMEKIETSQNSKRSMCEETCASSNNMDIRDNSYSNQTRHMPNELFTISNEEASSTHDCESSRHNTECNLEKNQEDSNFLACPVHEMEIAKEVRIMPGSQVFSKACTDAQLDKSKHMSCLVGDAVVLNSANADESACREDVCLQLSLDKCSQELQPTFQHRFDGAVTINRHAVAGALAGTAVSVSLHPIDTVKTIIQANSYGQSSVYHTLRRTLIERVKVFWGYMEDLLANLLVLHQFLQFIP

SEQ ID NO: 176827 - protein, 862 aa, Zea Mays
MEGGSGAAHRPWDTASQLQYSFRTSVSSLSEVEEEEASPPPVAVEDRVFVAVPEDAKNGKSTLLWALENPAKDCAGVVVAHVHCPAQMIPMMGAKVHHSTVNPQRVNEYRKKVRAEVEEKLDEYVLVCRRQKVSCQKVVIEMDDAVRGLEQLITLHGVAKLVMGAAADKHYSKKMKSLKSKTALRLTEVAAPSCKIWFTCKGRLICTREANTTVPAMPPPSPALTSASRSSVSSVASQLRSMLLSRSESDGSSSNGSPRHDLTRSRTEAGLLLYPSHETVNIGTPSRLYESYGRRPPTTASVSSSDSWNEFGRRSQNSWHDDLSRNDGAATTTVVVSGSAMQEPDDENFSSPSHELENPGVDANIYRRLTEALSEAERCRKEAYQESAKRLRAELDMASALENVNELYQHEVRQRKAIEETLARQAQEMEEMKRQHGVASKELHDVKEQRLVLERQVTEMASAVQGYEEKVAAAETLNTAEFSYSELEQATQGFDEGLKIGEGGFGSVYRGFLRNTAVAVKLLDPESMQGPSEFNQEVAVLGRVRHPNLVTLIGACREALGLVYEYLPNGSLEDRLACTNDTPPLTWQVRTRIICEMCSALIFLHSNRPHPVVHGDLKPGNILLDANLVSKLGDFGICRLLMMSQSTTTTTMPVATTKLHRTTTPKGTFAYMDPEFLSTGELTPRSDVYSLGIIILRLLTGRPPKSIAEVVEDALERGQLHAVLDAAAGDWPFVQANQLAHIGLRCAEMSRRRRPDLAGEVWKVVAPLTMAAAGRPLPFAPSPLDDARAPSYFVCPIFQEVMSDPRIAADGFTYEAEAITGWFDSGRDTSPMTNLKLEHCELTPNRALRSAILEWRQQQQRR

SEQ ID NO: 176828 - protein, 748 aa, Zea Mays
MPKIKATIFRSWKSTHSHMRYMSTKRRGFLCEQSEAAFSHATILKVVTLIFHCDDNTDWRMIVYGSSGTDDAVSFSETAALPSVIGDTHETTQVVHFTTQEPDSTYLLLASTYNQEDEPSVHEEKYEKLQDSCIEAKLLKDEADDDESNKIRKAEMDLLSALQRVQCDQNSEISLQIKELEDSYIHEVSQRKEIEKTLARQRLEIDEMRRQRCTLSDKLHDSDKHKLVLEQRITQIKSAAKDHVEEITEHFIRQSSEESKKHQKVKMGLLSTLQRVKEVESLLQNEKAQREYMEEKVSRQRTEIEETRRQRDKLYHDLQDLKEQKLKLEQVGMSEETNRRRKAERDRLSYLQRIKDLEHQHIHQVKKQETMEETMTRQKEEIQASKRKLHETHGKHMSEIKSAVKVHEEKLADSKQLLQELQAKHDKLLRERDTAAMEAKESRQKNKQRALGTTETANTEFSIVELQKATRGFDAELKISEDGFASVYRGFVRNTDVAIKLFHSRSLKGQARFYQEVAVLSRVRHPNIVTLVGVCPDDFALVSEFLPNGSLEDWLSCKKSMPPLTWKARTRIVGEICSALAFIHSHKPYPIVHGDLNLGNILLDANFVSKLGGLGICCLLLGGGEDDITATSLRSRPSAADRSKGTLRYTEQGGGFKSAAELMLWSDVNSFGVTILRLLTGRSQQGIGEMVEEAMEKGNLHSIIDASAGEWPLVQASQMAHLLGLGASPWARGASQISPGRCGRRSSN

SEQ ID NO: 176829 - protein, 476 aa, Zea Mays
MEEWEPLRSARCSPAATPSSLLQDELAAHEVFVAVPEEVSDGRSTLLWALRNLVKDGSKLAIAHVHYCPAPAIAQNRSHTSMKPEEIKEYRKQKRAKAEKSLDAYVQMAKAVTFQVACAKVIIETDDVAEGLEELISLNNVTEFVMGAAADRHFSREMNTPKSMTALKLFKTAAPSCKMWFTCKGHLICTREANESLPAILASPEKSNAPLSPAHNVSSQMGSMATELEYKESSHKGYISSSSAAAEMTEWDYLFGDWRMIVYGSSGTDDAVSFSETAALPSVIGDTHETTQVVHFTTQEPDSTYLLLASTYNQEDEPSVHEEKYEKLQDSCIEAKLLKDEADDDESNKIRKAEMDLLSALQRIKELEDSYIHEVSQRKEIEKTLARQRLEIDEMRRQRCTLSDKLHDSDKHKLVLEQRITQIKSAAKDHVEEITEHFIRQSSEESKKHQKVKMGLLSTLQRVSVLYQDFRSLRFN

SEQ ID NO: 176830 - protein, 416 aa, Zea Mays
MSEETNRRRKAERDRLSYLQRIKDLEHQHIHQVKKQETMEETMTRQKEEIQASKRKLHETHGKHMSEIKSAVKVHEEKLADSKQLLQELQAKHDKLLRERDTAAMEAKESRQKNKQRALGTTETANTEFSIVELQKATRGFDAELKISEDGFASVYRGFVRNTDVAIKLFHSRSLKGQARFYQEVAVLSRVRHPNIVTLVGVCPDDFALVSEFLPNGSLEDWLSCKKSMPPLTWKARTRIVGEICSALAFIHSHKPYPIVHGDLNLGNILLDANFVSKLGGLGICCLLLGGGEDDITATSLRSRPSAADRSKGTLRYTEQGGGFKSAAELMLWSDVNSFGVTILRLLTGRSQQGIGEMVEEAMEKGNLHSIIDASAGEWPLVQASQMAHLLGLGASPWARGASQISPGRCGRRSSN

SEQ ID NO: 176831 - protein, 68 aa, Zea Mays
MPSQSSSFIREECKDSPLLPVYWGEIYLHDSRPIDWNAINDSVCCCCWPFQLLDFFLLLVFWYKRRGE

SEQ ID NO: 176832 - protein, 111 aa, Zea Mays
MTSSCLSLRDGMIIPAILFFVSGHILSSYFHVMSGRRGHSDVEFSIDSPRTLVCGRNSRRRRCGRAQSRKMCRCSPALAENESVDVLQSGKEGVDLRPRCTVPSADSFIDQ

SEQ ID NO: 176833 - protein, 179 aa, Zea Mays
MEEHNCFPNIALQKTQPPSMTKLLILLQVLSLESTAGLESVRCMSRTDLKLDGSFADMILIPDIGVPDKSRTSALFISTNPGQLNFYDGGYLFFVQNSKEGNPLPESHKFPVAITTFDPNITITGLYSLTKTEFPNISLKKFCARKNVGHFISENMKWPLTGGVPNEMSLNEDHAVERI

SEQ ID NO: 176834 - protein, 487 aa, Zea Mays
MDRGRSESGLRSHGSGKVSSRPGSGSLAFPEEQPILADRDGGDRREVVVKIDGSGNGHAPFSFHGADAGADGGGGKAENATSSTNSTATTPQAESRSMSSETNYPMPPANVCRREGSYEFWNNDGGSAEAFSFQNRPPQGPHSSSPSISPPLPPEGGGMDPPARLNGSFHRKQVASDGEMSLDLDLEMDELGRTAAQLRSHPSFSSSLERDDRVSLQEPQKRHSASSCSFDSDTGDGRKRRGDDGEVVRCTSSSSAAGAGPLLRVNTRSRLMDPPPQSQRAPAPAASSVVDEERKSSGLRTPTKSGRLFSRLMSGNKSGPIAGKSGPMDDEEDDPFVDEDIPDDFKRGKLDALTVLQWLGLFLIIAALACSLSIKILSTKKVLGLHLWKWELLVFVLICGRLVSGWVIRIAVFGVERNFLLRKRVLYFVYGVRSAVQNALWLGLVLASWHFLFDENVQQETNSPVLPYVTKRHCSINTSSRHSLGRH

SEQ ID NO: 176835 - protein, 88 aa, Zea Mays
MQYKGIVDPPIGYSLYPSDYLEVSNNHSKSTPTVSLKYIHPPSPLSTCEGIGKLLRMTKKSIHIYYDIEQYQKMHHINYFYNLLILML

SEQ ID NO: 176836 - protein, 342 aa, Zea Mays
MAPVRDRLTKLMERFYKRKAPEPNSNAIGGSPKGDINWEEEIKYDPGLRKLIDEYHPNQRERVRRKYLQNGPSQPRTCSFPCSEIGGNLRRFILEWFDEFGSWLEYSESKDKAYCFCCFLFRDKKDPGYDAFVVTGWNGYHRKERLKLHVGNVGSLHNKAMKKCDDLLKTKQHINVAFRSQSEAGKKAYLTHLNGSINVARILVKQGLSFRGHDESEKSYNKGNFREFRDYTTEQNPELRKVTGKNASANSLLVAPEIQRDIVKCFANEILHSILEELGADVFSLLVDESRDVSWKEQMAIVLRYVDQCGIVKERFVGLVYVAETTSFPSSLLLMSCLQNLN

SEQ ID NO: 176837 - protein, 179 aa, Zea Mays
MAKLYVQAFPPADLNKNTEWFMYPGVWTTYILIVFFSWLLVLSVFGCTPGTAWTVVNLFHFAITYHFFHWKKGTPFADDQGMYNALTWWEQMDNGKQLTRNRKFLIVVPVVLSAHHRLPTTYALPQYPCRQCACGRETTEYAQGPDFRNKCRELSNVILRQTFTLYALFRTVLCVPPPF

SEQ ID NO: 176838 - protein, 60 aa, Zea Mays
MREGKEHNGLHKVALAVVEDGLLTYDNNSTMWTADSAGAKAWCLPYIHIPSFSFSPRRRP

SEQ ID NO: 176839 - protein, 235 aa, Zea Mays
MAPGGGGGIRAPSPDLPVPARQKFANSTRRPRAYSAASALPRLPRPQSIRRGAVVVVVACARGSEQQSSPAVAAKVRPEPGTLSVEFRTRDGCRLGIARYPDFAYNAQGGRGVGAGRGSKSGEDDGIGTVLVDFDVATLYIPPMSGATTRFLGLPLPPYLKIDILPEALGGTIDRATGQIEVLLLGWERLQSAATVRRDNTDLRGVEGSHKIRHRRKNGRRRQMQAGWGGRRRPN

SEQ ID NO: 176840 - protein, 161 aa, Zea Mays
MGRGRVELKRIENKINRQVTFSKRRNGLLKKAYELSVLCDAEVALIIFSGRGKLYEFGSAGVTKTLERYQHCCYNAQDSNNGALSESQSWYQEISKLRAKFEALQRTQRHLLGEDLGPLSVKELQQLEKQLECALSQTQLMMEQVEELRRTIQPFTLMSKV

SEQ ID NO: 176841 - protein, 274 aa, Zea Mays
MGRGRVELKRIENKINRQVTFSKRRNGLLKKAYELSVLCDAEVALIIFSGRGKLYEFGSAGVTKTLERYQHCCYNAQDSNNGALSESQSWYQEISKLRAKFEALQRTQRHLLGEDLGPLSVKELQQLEKQLECALSQARQRKTQLMMEQVEELRRTIQPFTLMSKVFATFSWTAQERHLGEMNRQLKHKLEAEGCSNYTTLQHAACWPAPGGTIVEHDGATYQVHPPAHSVAMDCEPTLQIGYPHHQFPPPEAANNIPRSAATGENNFMLGWVL

SEQ ID NO: 176842 - protein, 242 aa, Zea Mays
MGRGRVELKRIENKINRQVTFSKRRNGLLKKAYELSVLCDAEVALIIFSGRGKLYEFGSAGVTKTLERYQHCCYNAQDSNNGALSESQSWYQEISKLRAKFEALQRTQRHLLGEDLGPLSVKELQQLEKQLECALSQARQRKTQLMMEQVEELRRTERHLGEMNRQLKHKHAACWPAPGGTIVEHDGATYQVHPPAHSVAMDCEPTLQIGYPHHQFPPPEAANNIPRSAATGENNFMLGWVL

SEQ ID NO: 176843 - protein, 231 aa, Zea Mays
MSRPFPANRYLFPENNICSWRIYPRPWPRVLGDAVLLWNGRTAIGVALVQLTVNVGLLSLAAVFIRFVPAALLHRRPSIQAGGRLGRWLENASLLEDAEEHHLVERVVGRGDERAHGLRRLREARVSSVEIDMDRQKVTVTGYVDRREALRAARRTGRAAEFWPWPYDGEYYPFAIQYLEDNTYMATNKYYRHGYNDPTIGSYPCHAFTHVLDDDALAVFHDDNVHACAVM

SEQ ID NO: 176844 - protein, 429 aa, Zea Mays
MDCAPPRGASFDAVGQRWLAVFAFQAAFSAAASALHLTVSPRGRRHPLLGVPTGLLLGFHPFLACAATGMLALALLLSVSPHPRPTPLPRRALATALFAAAGALCVGAAAAMLPEDAGWAAVAGLGFRGAVLGAIFAARYFGRRRWLLQFPVVQVVHTRRCSFAPPQSTAAADTNPTEFILESLEQSDPRSLIQYLAYQDLCVASECNLEPWRRAAFFEESGETYKRIVTTCLKPLEEFTSKIAESLEDFSSDKPELMLQQSKLFSAFDDFQICAWCARTLTGLTACSRQEDRYGVAQLTGCNAAVMTTLLSALVAIETCLGKKTNPQPVHSLGPENIRWVNFSTGRKGTGVAIACTQKGGLHKKAYTMADVLRTSVYQIVSAFIDDLRANAKPSSLEKNWISEGRKPVYGSQAVLVQKLILFIEYRAV

SEQ ID NO: 176845 - protein, 172 aa, Zea Mays
MLQQSKLFSAFDDFQICAWCARTLTGLTACSRQEDRYGVAQLTGCNAAVMTTLLSALVAIETCLGKKTNPQPVHSLGPENIRWVNFSTGRKGTGVAIACTQKGGLHKKAYTMADVLRTSVYQIVSAFIDDLRANAKPSSLEKNWISEGRKPVYGSQAVLVQKLILFIEYRAV

SEQ ID NO: 176846 - protein, 123 aa, Zea Mays
MTTLLSALVAIETCLGKKTNPQPVHSLGPENIRWVNFSTGRKGTGVAIACTQKGGLHKKAYTMADVLRTSVYQIVSAFIDDLRANAKPSSLEKNWISEGRKPVYGSQAVLVQKLILFIEYRAV

SEQ ID NO: 176847 - protein, 1067 aa, Zea Mays
MAGGFEWSSSASTTRGVELQQSIVALKKGAHLLKCGKRGKPKFCTVRLSYDERALIWYSKERGKRLSLNSVSSVVLGQKTTKLLRLHWPEKESHSLSIIYKNGESSLDLVCKDRDQAECWYLGLTAVISAPCTPLLLIDSTNSRRINSCTNSPPSYIQQRSRLFAVHDGRNFPKVNSLYGSPRLIQNKYLRNNLDCSEPFFSPRQRAWSELDFYLEKISPELVDRVKNNLRDIKSAEIINDQRIMQIPKLKQSEGSNAAADSLKDIFVWGDALGRMSDHGHVSASNISLPRLLKSSEILDVQSIACGEKHAAIVTKQGQVFSWGEENGGRLGHKTSDSVSDPKIIDSLSSTPVKTIAFGAKFTCAVSVSGELYEWGEGIDSLGFGTNQCQRSPWFPHKLIRTSDGISVAKIACGQWHTAIVSSTGKLFTYGHGAFGVLGHGDTRSFVQPKEVESLRGLRVKSVACGPWHTAAIVETSGTLKSNAPGGKLFTWGDAGGEKLGHTDKKSKLVPTRVESLVDCDFTQVSCGISLTAVLTITGVVFTIGSKDHGQLGNPRSDTDSACICMVEGPLKTEFVKDISCGSSHVAVLAMNGKVFTWGKGTEGQLGLGDYVDRSSPTLVEALEDKQVDSIVCSSNSTAAICVHGEISSKDQSVCSSCRLAFRFTRKKHNCYNCGSMVCNSCSSNKVHRAALAPDKSKRCRVCDACFNELNKTAEHGKMSCGSKIQKEPSYLAETRTYTPKLSRMLKEANFIMEKMGSSAQSPGQRNQEPATPNQMQKERWGQVECPDRFKCARDNIPHRLTPKKQTIDDYPMRRMADPVSQKTAAPLTQTTSDRRKEQDLIEKILLEEVKQLQAQVTTLAEECRHRSLKVRLYKRKLEETWLIVRDEATKCEAAEEIIKVLTNQRNALSNKLLDGLELDGSSIVPNPPDKALATCKTPPLNSIRDQHNAEAEEVLDTRSTASSNTVAVDDSAAHQNGRSRASSSSRGYYDDGGTDSTAAPTDSNGVIEQIERGVYITVVTSPSGKKGIKRIRFSRKHFGEAEAQKWWERNESRVFAKYDSVEYLAA

SEQ ID NO: 176848 - protein, 328 aa, Zea Mays
MLAAAWRLSQRAVTSPLLGIGRSQIRNPFSTMASLSPAAASPKRLRVYSSAAADGDGAGSGKRVGTHNGSFHCDEALGCFLIRLTSQFAGADVVRTRDSQILDTLDAVLDVGGVYDPSRHRYDHHQKGFSEVFGHGFNTKLSSAGLVYKHFGKEIIAKELGVNEDHEDVHCLYLAIYKSFVEALDAIDNGINQYDTDQPPKYVNNTHLSSRVGRFNLDWTDPDQSLEKENAAFEQAMVLAGSEFMESVRFHVKSWLPARSIVLECLLSKGNIDPSGEIMVLDRFCPWKLHLFELEEELKTDPLTKYVLYQVSAFPSQTTVQHEFHDAS

SEQ ID NO: 176849 - protein, 261 aa, Zea Mays
MLAAAWRLSQRAVTSPLLGIGRSQIRNPFSTMASLSPAAASPKRLRVYSSAAADGDGAGSGKRVGTHNGSFHCDEALGCFLIRLTSQFAGADVVRTRDSQHFGKEIIAKELGVNEDHEDVHYQPPKYVNNTHLSSRVGRFNLDWTDPDQSLEKENAAFEQAMVLAGSEFMESVRFHVKSWLPARSIVLECLLSKGNIDPSGEIMVLDRFCPWKLHLFELEEELKTDPLTKMRGARVGESKQSQLLLTGSRAERLCQRSGGA

SEQ ID NO: 176850 - protein, 237 aa, Zea Mays
MRRSAASSSASPPSSPAPTSSAPAIPSRHRYDHHQKGFSEVFGHGFNTKLSSAGLVYKHFGKEIIAKELGVNEDHEDVHCLYLAIYKSFVEALDAIDNGINQYDTDQPPKYVNNTHLSSRVGRFNLDWTDPDQSLEKENAAFEQAMVLAGSEFMESVRFHVKSWLPARSIVLECLLSKGNIDPSGEIMVLDRFCPWKLHLFELEEELKTDPLTKYVLYQVSAFPSQTTVQHEFHDAS

SEQ ID NO: 176851 - protein, 218 aa, Zea Mays
MAKPSRQNLTHASVTSLRRFGGQSSLPPSGASPALRLAAAALLLAAAVALPCAVLYRATVETMEPIHVPRVHRPLLPAPPLPPVQVPEDDSDFDPFPTGDLDSEDLKLELVLQEASMDNKTIILTTLNAAWASPGSVIDLFIDSFRRGVGTSSLLRHLVIVAFDFKAYEHCVKIHPYCYALPTKDVDFSEEKRFQTTGYLEMMWKRLDFLRLVLEKGC

SEQ ID NO: 176852 - protein, 274 aa, Zea Mays
MDNKTIILTTLNAAWASPGSVIDLFIDSFRRGVGTSSLLRHLVIVAFDFKAYEHCVKIHPYCYALPTKDVDFSEEKRFQTTGYLEMMWKRLDFLRLVLEKGYSFVFSDADIVWFRNPFPHFYTDGDFQIACDHYVGNATDLRNIANGGFNYVKSNDQSIEFYKFWYSSRFRYPGYHDQDVFNFIKHDRYTTDIGLTIKFLSTTYFGGICEPSRDLNKVCTMHANCCIGLQSKIHDLRIMMEDWSNYMSMPPSLKQFRALSWRVPQNCSLSLLSL

SEQ ID NO: 176853 - protein, 206 aa, Zea Mays
MPPSHPCAASADSRRCRLRARRRRYGSRRRRSSSRPQWRCPAPCYTAPPWRLWSPSTSRVCTGPYCLRRRFLRFRSPRMTATSIPSPQAICEDLKLELVLQEASMDNKTIILTTLNAAWASPGSVIDLFIDSFRRGVGTSSLLRHLVIVAFDFKAYEHCVKIHPYCYALPTKDVDFSEEKRFQTTGYLEMMWKRLDFLRLVLEKGC

SEQ ID NO: 176854 - protein, 69 aa, Zea Mays
MSLIKNKILPLLSLKHFRVLYDKPICCDANMEEIWFHPALTLLLSLLCASEISQYFKSRTPLKKFSLPI

SEQ ID NO: 176855 - protein, 352 aa, Zea Mays
MSKGKGSSFDEESIVNEIFGGQLKSHLSCCECGHSSETFEPFLDLSLEIDQVDHLVDALQSFTKVEQIGDSENKLTCESCNAQVSKNKQLTLHRAPDVIAFHLKRFTTLDNSVEKIDKHVVYPLEVDLKPFHSNPDTVGGLKYDLYGVVEHSGLPNYGHYTCTIRSSPSTWYFMNDSKVDSCTDSSALNQEAYILFYVRQGKFPWFSSLLEGGSGSSSGDKLEKNEASQLEETEKDEMGRYKPSFLPEEPSTRSSLGASNSNNTIDENNPPRASLQNDVATCLRCVETTNLDKPSTPPRSKRLAFDNEFSVFEFEDFGKDAFSTIFMNIWFCFHNASTLFPFLNSHSNLLCS

SEQ ID NO: 176856 - protein, 548 aa, Zea Mays
MAEQDDAAGQSPLDSVPIDETCDAEDMHSPLSFSYRSQPKSVGAGLSNMGNTCFLNATLQCITHTVPLFLKLRSTDHSTPCSYNKDGFCSFCALKEHVDESIQRSGSVIAPAKFRDNLRKLSSDFWPGQQEDAHEFLRCLLDNLHKCTLDPMSKGKGSSFDEESIVNEIFGGQLKSHLSCCECGHSSETFEPFLDLSLEIDQVDHLVDALQSFTKVEQIGDSENKLTCESCNAQVSKNKQLTLHRAPDVIAFHLKRFTTLDNSVEKIDKHVVYPLEVDLKPFHSNPDTVHSGLPNYGHYTCTIRSSPSTWYFMNDSKVDSCTDSSALNQEAYILFYVRQGKFPWFSSLLEGGSGSSSGDKLEKNEASQLEETEKDEMGRYKPSFLPEEPSTRSSLGASNSNNTIDENNPPRASLQNDVATCLRCVETTNLDKPSTPPRSKRLAFDNEFSVFEFEDFGEEDETLFPNLKLTPKAKKAKAASASKAEKGPCIDQNAVRLMRGMTSTRRKGLMDCIAQQTAKHESSRYPASDPLDKKKRKPVLQYYVNVKN

SEQ ID NO: 176857 - protein, 503 aa, Zea Mays
MAEQDDAAGQSPLDSVPIDETCDAEDMHSPLSFSYRSQPKSVGAGLSNMGNTCFLNATLQCITHTVPLFLKLRSTDHSTPCSYNKDGFCSFCALKEHVDESIQRSGSVIAPAKFRDNLRKLSSDFWPGQQEDAHEFLRCLLDNLHKCTLDPMSKGKGSSFDEESIVNEIFGGQLKSHLSCCECGHSSETFEPFLDLSLEIDQVDHLVDALQSFTKVEQIGDSENKLTCESCNAQVSKNKQLTLHRAPDVIAFHLKRFTTLDNSVEKIDKHVVYPLEVDLKPFHSNPDTVGGLKYDLYGVVEHSGLPNYGHYTCTIRSSPSTWYFMNDSKVDSCTDSSALNQEAYILFYVRQGKFPWFSSLLEGGSGSSSGDKLEKNEASQLEETEKDEMGRYKPSFLPEEPSTRSSLGASNSNNTIDENNPPRASLQNDVATCLRCVETTNLDKPSTPPRSKRLAFDNEFSVFEFEDFGKDAFSTIFMNIWFCFHNASTLFPFLNSHSNLLCS

SEQ ID NO: 176858 - protein, 122 aa, Zea Mays
MAVKARVSPTGLLAAATWAGLLSLVAASALDVPTVAFDERFSPLFGDGNLVRSPDDRSVRLLLDRRSGSGFVSSDYYLHGFFSASIKLPRGYTAGVVVAFYLSNVLENRVCLSMLRKYWFVS

SEQ ID NO: 176859 - protein, 375 aa, Zea Mays
MELFPAHPDLQLHISPPPATKPTELGFWKRALDTTPTATTTAAAATTAPSLAFASSAPTAVGHHAAAGAHHNDHHHQVPTTSSHSHLVGLPFLHHTQPILLPEGRGGGLRRDLAAARPIRGIPVYNASQPLLHFLQSHTHCHDAIVGAAGPRLSPKAALRLAAKRGARAPRMRWTTSLHARFVHAVELLGGHERATPKSVLELMDVKDLTLAHVKSHLQMYRTIKTTDHKPANSASSYGMYGQAAAAKPVIDIPDPDDDSLFDLITTSAGSDQSSSSAQHSNPDGGGGNEHGSSMCALWCSSSTSISRGGWFHDRPRDDDAATPGPGDDIKSFEDVQSHSLLDDVADLNSSPFQVVAGMFGSDKKPNLDFTLGRI

SEQ ID NO: 176860 - protein, 322 aa, Zea Mays
MELFPAHPDLQLHISPPPATKPTELGFWKRALDTTPTATTTAAAATTAPSLAFASSAPTAVGHHAAAGAHHNDHHHQVPTTSSHSHLVGLPFLHHTQPILLPEGRGGGLRRDLAAARPIRGIPVYNASQPLLHFLQSHTHCHDAIVGAAGPRLSPKAALRLAAKRGARAPRMRWTTSLHARFVHAVELLGGHERATPKSVLELMDVKDLTLAHVKSHLQMYRTIKTTDHKPANSASSYGQAAAAKPVIDIPDPDDDSLFDLITTSAGSDQSSSSAQHSNPDGGGGNEHGSSMCALWCSSSTRTCNHTAFLTMSPTSTRRRSR

SEQ ID NO: 176861 - protein, 323 aa, Zea Mays
MGMGDELWDDSALVVAFDRAISTFNEMHCKSRRATPSKDAKKEHAAAPAAEEEPITAGAVDEEEDDNDNAQTVEQQQPSDDRQTVEQASLQETDPGKETHVSEAKTLTADADGNLSSSQQTGEYNELLRQYYELEEKSRNILEQLQQTNSWNYQAPGYASTTQQQQVPVYSATAPDLHSSTTQSSCCNWNVPLVSVYCCSTGQPSGGSAYMPPTAGCSATLTCDQCPDANSAYPSVSNFMQVPTNVSINDDQVAKAAMKTAEGAFNFMRSTISGQPGAQRNESDTGKEESTDMGTNLNLDSDLAALLNSWYAAGFYTCRAPKP

SEQ ID NO: 176862 - protein, 325 aa, Zea Mays
MGMGDELWDDSALVVAFDRAISTFNEMHCKSRRATPSKDAKKEHAAAPAAEEEPITAGAVDECREEDDNDNAQTVEQQQPSDDRQTVEQASLQETDPGKETHVSEAKTLTADADGNLSSSQQTGEYNELLRQYYELEEKSRNILEQLQQTNSWNYQAPGYASTTQQQQVPVYSATAPDLHSSTTQSSCCNWNVPLVSVYCCSTGQPSGGSAYMPPTAGCSATLTCDQCPDANSAYPSVSNFMQVPTNVSINDDQVAKAAMKTAEGAFNFMRSTISGQPGAQRNESDTGKEESTDMGTNLNLDSDLAALLNSWYAAGFYTCRAPKP

SEQ ID NO: 176863 - protein, 321 aa, Zea Mays
MGMGDELWDDSALVVAFDRAISTFNEMHCKSRRATPSKDAKKEHAAAPAAEEEPITAGAVDECREEDDNDNAQTVEQQQPSDDRQTVEQASLQETDPGKETHVSEAKTLTADADGNLSSSQQTGEYNELLRQYYELEEKSRNILEQLQQTNSWNYQAPGYASTTQQQQVPVYSATAPDLHSSTTQSSCCNWNVPLVSVYCCSTGQPSGGSAYMPPTAGCSATLTCDQCPDANSAYPSVSNFMQVPTNVSINDDQVAKAAMKTAEGAFNFMRSTISGQPGAQRNESDTGKEESTDMGTNLNLDSDLAALLNSWYAAGFYTCR

SEQ ID NO: 176864 - protein, 307 aa, Zea Mays
MHCKSRRATPSKDAKKEHAAAPAAEEEPITAGAVDECREEDDNDNAQTVEQQQPSDDRQTVEQASLQETDPGKETHVSEAKTLTADADGNLSSSQQTGEYNELLRQYYELEEKSRNILEQLQQTNSWNYQAPGYASTTQQQQVPVYSATAPDLHSSTTQSSCCNWNVPLVSVYCCSTGQPSGGSAYMPPTAGCSATLTCDQCPDANSAYPSVSNFMQVPTNVSINDDQVAKAAMKTAEGAFNFMRSTISGQPGAQRNESDTGKEESTDMGTNLNLDSDLAALLNSWYAAGFYTCRYLTLQSTRNSRP

SEQ ID NO: 176865 - protein, 405 aa, Zea Mays
MPIFSTNSEFLQQKMSDNLMEKVSAFGERLKITGTEVSKKMTAGMSSMSFKMKELFQGQTPADKIVEDATSENLDGPDWNSNLEICDLINTEKVNSVELIHGIKKRIMMKDARVQYLSLVLLETIVKNCEKAFSEVAAERVLDEMVRLIDDPQTVVNNRNKALMLIEAWGESGDELRYLPVYEETYKSLKSRVRFPGRDNESLAPIFTPPRSVAEADVETSLPQQAFEDVHVHTYTAEETKEAFDVARNSIELLSTVLSSSPEQDASQDDLTATLVQQCYQSQHTIQRIIETVGDNEAVLFEALSVNDEIQKVLSKYEEMKQPRASEHAEQRAVVIPVATEHEDLTAAVNEDALVRKPAAARTRSGGDDDILDDLDEMIFGKKGGSSSQEGPKKPDPKKDDLITF

SEQ ID NO: 176866 - protein, 600 aa, Zea Mays
MAAAAKAAAVAVSAGAAFVLSSERAHADGGSSTFRFPGFYSSAPAPAPPPAAPPHQQPPPPSGGQREEAPEEAPKVSTQHPRTSAAGFDPAPLERGVEAIDKLKQSSDPKKLFEFMKKQEETHQQEIAAKKLELQKAVAEIELEQKRVDFEERKKLDQQRAKFKSQTAQYEDELKRKRLQAEHEAQRLRNQELVKMQEESGIRLEQIRRATEEQIQEQRRQTERQRADLEQATLSKKAMAEAEGRILVTKQTEDVKRRLLLEEINADREKWIQVINTTFEHIGGGLRTILTDQNKLVVAVGGVTALAAGIYTTREGARVVWGYVDRILGQPSLIRESSRGKYPWSGSLSRATSTLTSKLKSGSNLGKDGNGFGDVILNPSLQKRVKQLANATANTKLHQAPFRNMLFYGPPGTGKTMAARELARNSGLDYALMTGGDVAPLGSQAVTKIHQLFDWAKKSNRGLLLFIDEADAFLCERPVQGHRPCACHQQAWRSRLGRRRPYRRGPGIPPARGRRAVQAPEAIPGQVRHQSRRQAREELAPFLPPPAPEDRGEGRHRRPDPRGGGQDPGLLRTRDSQDDGQRPGGCLREQGLRANPWPVP

SEQ ID NO: 176867 - protein, 325 aa, Zea Mays
MAAAAKAAAVAVSAGAAFVLSSERAHADGGSSTFRFPGFYSSAPAPAPPPAAPPHQQPPPPSGGQREEAPEEAPKVSTQHPRTSAAGFDPAPLERGVEAIDKLKQSSDPKKLFEFMKKQEETHQQEIAAKKLELQKAVAEIELEQKRVDFEERKKLDQQRAKFKSQTAQYEDELKRKRLQAEHEAQRLRNQELVKMQEESGIRLEQIRRATEEQIQEQRRQTERQRADLEQATLSKKAMAEAEGRILVTKQTEDVKRRLLLEEINADREKWIQVINTTFEHIGGGLRTILTDQNKLVVAVGGVTALAAGIYTTRFTYFSPGRVQE

SEQ ID NO: 176868 - protein, 281 aa, Zea Mays
MQEESGIRLEQIRRATEEQIQEQRRQTERQRADLEQATLSKKAMAEAEGRILVTKQTEDVKRRLLLEEINADREKWIQVINTTFEHIGGGLRTILTDQNKLVVAVGGVTALAAGIYTTREGARVVWGYVDRILGQPSLIRESSRGKYPWSGSLSRATSTLTSKLKSGSNLGKDGNGFGDVILNPSLQKRVKQLANATANTKLHQAPFRNMLFYGPPGTGKTMAARELARNSGLDYALMTGGDVAPLGSQAVTKIHQLFDWAKKSNRGLLLFIDEADAFLCE

SEQ ID NO: 176869 - protein, 193 aa, Zea Mays
MTGPLHSSSGHNAAAGGGGKTIEEMYQKKTQLEHILLRPDTYIGSVEKHTQTLWVYEDGAMVNRSVTYVPGLYKIFDEILVNAADNKQRDPKMDALRVEIDVDGCSISVYNNGDGIPVEVHQEEGVYVPEMIFGHLLTSSNYNDNEKKTTGGRNGYGAKLTNIFSTEFVIETADGRRQKKYKQVKFQDTERGY

SEQ ID NO: 176870 - protein, 71 aa, Zea Mays
MQVSGEDVRGNRCSPRSYLSQLVRSLVVESGDVVELEPVELVFQAPNLIVVGFHLWVAAVGVLHDLVDDEL

SEQ ID NO: 176871 - protein, 97 aa, Zea Mays
MAQAISSSLSIPIPIFKLHSTNSAVYNAEQYKTVFLKTVFLSKLWIDCCRQPYNGSRQSFRAMVASNGLGARPCRPSLYSYYSHVYMTSVAFRSLTY

SEQ ID NO: 176872 - protein, 59 aa, Zea Mays
MRSFLWRPRPNLAAVSLTLSSGTTVGVSQAALSSCQAGQWSGEVTAVTSALATEGRASG

SEQ ID NO: 176873 - protein, 60 aa, Zea Mays
MDECMYACNRIENDPVEEPEELAGEAPEHRSFGGGKCPLTYLCPNHYLIHLPHYTFMPKD

SEQ ID NO: 176874 - protein, 64 aa, Zea Mays
MAYERSIVQLCPLNCNFALKKIRSQQIAWQGNKWGLRSQLWIQFCCWSSKRCWDLLYGLSDCSI

SEQ ID NO: 176875 - protein, 365 aa, Zea Mays
MDAGSRSISSAKNRAAAVAAAPRPPLQEAGSRPYMPSLSSGPRNPSAKCYGDRFIPDRSAMDMDLAHYLLTEPRRDKENASGMAASPSKEAYRRLLAEKLLNNRTRILAFRSKPPEPENVSFADTTSSNLQAKPAKQRRHIPQSAERTLDAPELVDDYYLNLLDWGSNNVLSIALGDTVYLWDASSGSTSELVTVGEDSGPVTSVSWAPDGRHMAVGLNSSDVQLWDTSSNRLLRTLRGAHEARVGSLAWNNSVLTTGCMDGKIVNNDVCALLWNKNERELLSSHGFTQNQLTLWKYPSMVKMAELNGHTSRVLFMAQSPDGCTVASAAADETLRFWNVFGTPETPKPAAKASHTGMFNSFKHIR

SEQ ID NO: 176876 - protein, 211 aa, Zea Mays
MDRFKLIKEVGDGTFGSVWRAMNKQNGEVVAVKKMKKKYYSFEECMSLREVKSLRRMNHPNIVKLKEVIRENDILYFIMEYMECNLYQLMKERVKPFSESEVRNWCFQIFQALAYMHQRGYFHRDLKPENLLVSKGVIKLADFGLAREVSSLPPYTEYVSTRWYRAPEVLLQSSAYDSAVDMWAMGAIMAELLTLHPLFPGTRPKAVNCLR

SEQ ID NO: 176877 - protein, 433 aa, Zea Mays
MDRFKLIKEVGDGTFGSVWRAMNKQNGEVVAVKKMKKKYYSFEECMSLREVKSLRRMNHPNIVKLKEVIRENDILYFIMEYMIFQALAYMHQRGYFHRDLKPENLLVSKGVIKLADFGLAREVSSLPPYTEYVSTRWYRAPEVLLQSSAYDSAVDMWAMGAIMAELLTLHPLFPGTSEPDEIHKICNVIGSPDEQSWPQGLSLAEAMKYQFPQTKGSQLSEVMTTASSEAIDLISSLCSWDPSKRPKATEVLQHTFFQGCTCVPLPVRRKASSLPKTPPCVGSKRISENSVARRFSTGTLSTMKSHSNAPAKSNGLSRTGVQRKLHLDRQPPQKSTKPTENSNKLATNRVPARNSPGNPVLRHSRSLPETGRRAVQKVSSITEKLSQMSVTSRTRSAVKPAAPTMKAGHGKSDFLGKSDDIPPAKRLTRKLVS

SEQ ID NO: 176878 - protein, 269 aa, Zea Mays
MDRFKLIKEVGDGTFGSVWRAMNKQNGEVVAVKKMKKKYYSFEECMSLREVKSLRRMNHPNIVKLKEVIRENDILYFIMEYMECNLYQLMKERVKPFSESEVRNWCFQIFQALAYMHQRGYFHRDLKPENLLVSKGVIKLADFGLAREVSSLPPYTEYVSTRWYRAPEVLLQSSAYDSAVDMWAMGAIMAELLTLHPLFPGTSEPDEIHKICNVIGSPDEQSWPQGLSLAEAMKYQFPQTKGHRSPPAYLLPGLYMCSASCPSESFIAS

SEQ ID NO: 176879 - protein, 228 aa, Zea Mays
MAVALLLLLVTPVGLLAALALLTRPRAARVPLKGRHVFITGGSSGIGLAMATAAAREGARVSILARNLARLEDARAAIQRDSGRDDVGVHAADVRDAGAVARALQEAGPVDVLVCNHGVFVPQELEGQDVDEIKWMVDINLMGSFHLIKAALPAMKARTRETRLPGSIAIMSSQAGQVDTRRPSPAMQRRCSMLVFMVTLPTQRASSLFADWVRRCSMRSSRTTFMSR

SEQ ID NO: 176880 - protein, 109 aa, Zea Mays
MPCLLFLLAPPPRPCLADSVSRSPLPNKYRFFLPQTRRRPSPRLGDGVRMAEMTRVWSGGEPLEVGVSMESDPIVGGEAPSRSRWEASRWAPVEAALNRMCTTGLGQII

SEQ ID NO: 176881 - protein, 116 aa, Zea Mays
MTPAAAISGSSSHVVVSSARLRQPFTLPPRTACPIAAAASPVTRRGVAVAAVSSPVVSAAAGKDGACTRTGRDGERARSSKMTSGLDGIPSRIEKRGRKSVCWIKFWTPFFYFYRY

SEQ ID NO: 176882 - protein, 210 aa, Zea Mays
MLFIWVQMISRWANDILDLAKYASVPVINGLTDYNHPCQIMADALTMLEQIGRIENTKVVYVGDGNNIVHSWLLLAAVLPFHFVCACPKGFEPDANTVEIARSAGISKIEITNSPREAVKGADIVYTDVWASMGQKEEADYRKQKFQGFTVDEALMEIAGPQAYLMHCLPAERGVEVTDGAIEAPNSIVFPQAENRMHAQNAIMLHVLGA

SEQ ID NO: 176883 - protein, 179 aa, Zea Mays
MTPAAAISGSSSHVVVSSARLRQPFTLPPRTACPIAAAASPVTRRGVAVAAVSSPVVSAAAGKDAKQAPKDFLQIIDFDKDTIMKILNRAIEVKALIKSGDKSFQPFKGKTMAMIFAKPSMRTRVSFETGFFLLGGHAIYLGPDDIQMGKREETRDVARVLSGYNDIIMARVFAHQVWS

SEQ ID NO: 176884 - protein, 328 aa, Zea Mays
MTPAAAISGSSSHVVVSSARLRQPFTLPPRTACPIAAAASPVTRRGVAVAAVSSPVVSAAAGKDAKQAPKDFLQIIDFDKDTIMKILNRAIEVKALIKSGDKSFQPFKGKTMAMIFAKPSMRTRVSFETGFFLLGGHAIYLGPDDIQMGKREETRDVARVLSGYNDIIMARVFAHQVVYVGDGNNIVHSWLLLAAVLPFHFVCACPKGFEPDANTVEIARSAGISKIEITNSPREAVKGADIVYTDVWASMGQKEEADYRKQKFQGFTVDEALMEIAGPQAYLMHCLPAERGVEVTDGAIEAPNSIVFPQAENRMHAQNAIMLHVLGA

SEQ ID NO: 176885 - protein, 314 aa, Zea Mays
MHSNVLAKQAPKDFLQIIDFDKDTIMKILNRAIEVKALIKSGDKSFQPFKGKTMAMIFAKPSMRTRVSFETGFFLLGGHAIYLGPDDIQMGKREETRDVARVLSGYNDIIMARVFAHQDILDLAKYASVPVINGLTDYNHPCQIMADALTMLEQIGRIENTKVVYVGDGNNIVHSWLLLAAVLPFHFVCACPKGFEPDANTVEIARSAGISKIEITNSPREAVKGADIVYTDVWASMGQKEEADYRKQKFQGFTVDEALMEIAGPQAYLMHCLPAERGVEVTDGAIEAPNSIVFPQAENRMHAQNAIMLHVLGA

SEQ ID NO: 176886 - protein, 55 aa, Zea Mays
MEIAGPQAYLMHCLPAERGVEVTDGAIEAPNSIVFPQAENRMHAQNAIMLHVLGA

SEQ ID NO: 176887 - protein, 75 aa, Zea Mays
MRKVQIEIGSKTRKSTFVGYQKHPKSVFPNFARRFSIILLIKWGTKMLMPFVILLAVVKTSTEGHQSLGKGIREK

SEQ ID NO: 176888 - protein, 79 aa, Zea Mays
MMTAMEAEADGVGPAGQGPAPGLARGVDASDGRSFKERRRTLLIGRPAALGGAAEADWGQGQPSCSHPERREGRADLGA

SEQ ID NO: 176889 - protein, 75 aa, Zea Mays
MKVDKSPCLVLLNGCHLLYRRLAPVGIVSSLLERSRFIITDDNEQLLIHHKLPFCTTTTTTTTTKPFCPKHVGVG

SEQ ID NO: 176890 - protein, 168 aa, Zea Mays
MSLKSIVRELKEMRDGIGSMSRRGGSGSDGRAFHGRSGSRHSWPSLWAEQQQSHRQGQGLGPGPEGPHHQHQGRWANLPPELLLDVIQRVESSEATWPARRQVVACAAICRSWREVTKEVVKTLEECGRITFPISLKQEGEGNIHISTLPRAQPIYECGERQVIACCP

SEQ ID NO: 176891 - protein, 157 aa, Zea Mays
MDSGGGGGSGAHKAASGSAPSPAPNPTAMLSALMSKRAKLQEELRSIERQETNQFGSVLKGFESFLSSSKNTSNLKRSRKFQADERLFSLSSVTSPAVDEHLAGRDDGREYGAGRSKGGSTPANGQGKPKKGGRPGGRDGKRLRPSNDPDLDDEDDY

SEQ ID NO: 176892 - protein, 75 aa, Zea Mays
METTYLQETNQFGSVLKGFESFLSSSKNTSNLKRSRKFQADERLFSLSSVTSPAVDEHLAGRDGKLSLISFLFEI

SEQ ID NO: 176893 - protein, 578 aa, Zea Mays
MLRRLRLRLPGRAASAAAGAAAAMASLTNVAYADGLFRRQSAPSNPGDEDNLGASAFGRDPETLERMARALREINNSPLAKQVFELMRKQEETRLTELEVEKVQYAIYEKLRDIERMQKKAEDYRNSLQQEAQAKAQALRFEDELARKRMQTDHAAQRRQDAELVKMQEASALRREEARRATEQKILEEMIRTEKEKAEIDQETNRVKAIAEAEARVHEDKQSEEVVKRMLLERMKGEKEKWLTAINTTFSHIEGGFKALLTDRSKLMMGIGGVTALAAGVYTTREGARVTWSYINRILGQPSLIRFEKVILHPSLKRRIEHLARATANTKSHGAPFRNMLFYGPPGTGKTLVAREMARKSGLDYAMMTGGDVAPLGSEAVTKIHQIFDWAKKSKKGMLVFIDEADAFLCERNSTHMSEAQRSALNALLFRTGDQSRDIVLVLATNRPGDLDAAITDRIDEVIEFPLPGEEERFQLLKLYLNQYILKEEGKGSSWSALFKKQQRKIQVNGISDDLLREAARKIDGFSGREIAKLVASVQAAVYGRPDCILDPQLFSEVVDYKVTEHHQRIKLASEGMV

SEQ ID NO: 176894 - protein, 263 aa, Zea Mays
MQEASALRREEARRATEQKILEEMIRTEKEKAEIDQETNRVKAIAEAEARVHEDKQSEEVVKRMLLERMKGEKEKWLTAINTTFSHIEGGFKALLTDRSKLMMGIGGVTALAAGVYTTREGARVTWSYINRILGQPSLIRESSMSKFPLPMSRLLKPSSASLSEGAGFEKVILHPSLKRRIEHLARATANTKSHGAPFRNMLFYGPPGTGKTLVAREMARKSGLDYAMMTGGDVAPLGSEAVTKIHQIFDWAKKSKKGVTVPI

SEQ ID NO: 176895 - protein, 54 aa, Zea Mays
MLSMSSNPFNWHQNKKSSYIKTQNSDALKFQASIQYLSIVQKDKLGKCLKTYKH

SEQ ID NO: 176896 - protein, 432 aa, Zea Mays
MAIISPCEPLHPNPHLKTSPLAKKLVRPCLSLHSTMAAPPATAPATARCLSVAKSCWAAERSSSSFVLSAPATGLRQSGSRVLSIRAKVATGLQRACIADDGAERPWKLSDARLVLEDGSVWTAKSFGASGTQVGEVVFNTSLTGYQEILTDPSYAGQFVLMTNPHIGNTGVNPDDEESNQCFLGGLIIRNLSICTSNWRCKETLEKYLIKRNIMGIYDVDTRAITRRLREDGSLIGVLSTDQSLTDNELLEMAQKWKIVGVDLISGVTCDAPYEWSDKTDSEWEFKRDPSSETFHVVAYDFGIKHNILRRLTSYGCKITVVPANWPASEALGGKTFKMKFGHHGGNHPVCDLRSGRVDISAQNHNYAVDPESLPEGAKVTHVNLNDNSCAGLQYSKMKLMSLQYHPESSPGPHDSDTAFGEFIELMKSNRL

SEQ ID NO: 176897 - protein, 101 aa, Zea Mays
MRVNRIASVISPIRDATRWTHGRTTDTSTVLRSCHHVNLPERRWHVRWLASGCDLAQVCTADRRDELSSDAARDTGLRRPAWVTTTGRYGFIAVVSREIES

SEQ ID NO: 176898 - protein, 1345 aa, Zea Mays
MGNVGDEDHAVALWVKWRGKWQTGIRCCRADCPLPTLRAKPTHDRKTYIVVFFPRTKTYSWVDMLLVLPIEECPLPLVNGTHRKWRKLVKDLNIPRRFNIQNLAILMINLIDELHIEAVVDNARKATTWKEFALEASCCRDYTDLGKMLLKFQNMILPDCISCEWVQNSIETWNQKCMNAHDAETIEMLCEELRQSILGNKLKELRDASVQPELVPEWKTWKQELLKQYFSLHPAGNVGNFEKTNCYDDPALDQQGSRKRPKLEVRRGEIQILHMGEADYRTPTEDPNQNKLPSNSVMHENIGALGATSQKNAVMFPGSSGTNENTISGSSNAALQNARLDLDSFKSSRQCSAYIEAKGRQCGRWANDGDIYCCVHQSMHFLDHSSREDKTLTIEAPLCSGMTNMGRKCKHRAQHGSTFCKKHRLQTNLDVMHPGNLLDPSEVLHMGEEPPNKWVEGISKSQALYSIDLETDKNVQAVVQVKLMPTVAIENSGEKGCAMEKTDMCAASTSMTNTDDTSLCIGIRSHDSIVECQDYAKRHTLYCEKHLPKFLKRARNGKSRLVSKDVFVNLLKGCSSRKDKICLHQACEFLYWFLRNNLSHQRTGLASEHMPQILAEVSKNPDFGEFLLKLISTEREKLANIWGFGTDRSKQIYSENKEGSVALQEEKTNLSSGPKCKICGHQFSDDQALGLHWTTVHKKEARWLFRGYSCAACMESFTNKKVLERHVQDVHGAQYLQYSILIRCMSCNSNFLNTDLLYPHIVSDHAQQFRLLDVPQRPSGQSAQQTEGMSGLPLYDSHNVEDENGSQKFVCRLCGLKFDLLPDLGRHHKVAHMVSGAVGHIPLGRGKYQLNRGRHYYSAFKKSLRPTSTLKKSSSSGIDKNLKFQISGLTSQIVESETSSLGKLQDFQCLDVAQTLFSKIQKTRPHPSNFDVLSVARSVCCKTSLLAALEVKYGPLPENIFVKAAKLCSDNGIQIDWHQEGFICPKGCKSRYNSNALLPMQLTAVDFLEAPVDSRNDDEMWGMEEYHYVLDSKHFGWKPKNESVVLCEDISFGREKVPIVCVIDVDAKDSLGMKPEELLPHGSSLPWEGFHYITNRVMDSSLIDSENSMPGCACSHPECSPENCGHVSLFDGVYNSLVDINGTPMHGRFAYDEDSKIILQEGYPIYECNSSCICDSSCQNKVLQKGLLVKLELFRSENKGWAIRAAEPILQGTFVCEYIGEVVKADKAMKNAESVSSKGGCSYLFSIASQIDRERVRTVGAIEYFIDATRSGNVSRYISHSCSPNLSTRLVLVESKDCQLAHIGLFANQDIAVGEELAYDYRQKLVAGDGCPCHCGTTNCRGRVY

SEQ ID NO: 176899 - protein, 56 aa, Zea Mays
MVMLSFVGISKTVEHSAEPMVPIHNRNRFMDPNGRVEHLGVSIFTGTILLHVETYS

SEQ ID NO: 176900 - protein, 892 aa, Zea Mays
MHHPQEEIHSSPNTMSLPSPCRLNGDVTPCEAEKIAEDRGKVDGIVDAVSKEVKTDLVGCHARQEELQCTLQDLSEIACSIDLVRNKSSPQEEKKSVSPLNDMGHNVDNNSCNGDTNYKGQELNMGNVGDEDHAVALWVKWRGKWQTGIRCCRADCPLPTLRAKPTHDRKTYIVVFFPRTKTYSWVDMLLVLPIEECPLPLVNGTHRKWRKLVKDLNIPRRFNIQNLAILMINLIDELHIEAVVDNARKATTWKEFALEASCCRDYTDLGKMLLKFQNMILPDCISCEWVQNSIETWNQKCMNAHDAETIEMLCEFRLLDVPQRPSGQSAQQTEGMSGLPLYDSHNVEDENGSQKFVCRLCGLKFDLLPDLGRHHKVAHMVSGAVGHIPLGRGKYQLNRGRHYYSAFKKSLRPTSTLKKSSSSGIDKNLKFQISGLTSQIVESETSSLGKLQDFQCLDVAQTLFSKIQKTRPHPSNFDVLSVARSVCCKTSLLAALEVKYGPLPENIFVKAAKLCSDNGIQIDWHQEGFICPKGCKSRYNSNALLPMQLTAVDFLEAPVDSRNDDEMWGMEEYHYVLDSKHFGWKPKNESVVLCEDISFGREKVPIVCVIDVDAKDSLGMKPEELLPHGSSLPWEGFHYITNRVMDSSLIDSENSMPGCACSHPECSPENCGHVSLFDGVYNSLVDINGTPMHGRFAYDEDSKIILQEGYPIYECNSSCICDSSCQNKVLQKGLLVKLELFRSENKGWAIRAAEPILQGTFVCEYIGEVVKADKAMKNAESVSSKGGCSYLFSIASQIDRERVRTVGAIEYFIDATRSGNVSRYISHSCSPNLSTRLVLVESKDCQLAHIGLFANQDIAVGEELAYDYRQKLVAGDGCPCHCGTTNCRGRVY

SEQ ID NO: 176901 - protein, 1024 aa, Zea Mays
MLMDPPVMQMDCKLKNAMDKTPQIAYDRKLTVSHDDYGWAGSDVHLKDDTIVCSPVDLSDACQSGMDRVLDSASKNSSLNLGDLSQGTELREKNSDSSYSDVKLQLNLSAGNYNGLQTDDYSFNKQSFGKKDMHHPQEEIHSSPNTMSLPSPCRLNGDVTPCEAEKIAEDRGKVDGIVDAVSKEVKTDLVGCHARQEELQCTLQDLSEIACSIDLVRNKSSPQEEKKSVSPLNDMGHNVDNNSCNGDTNYKGQELNMGNVGDEDHAVALWVKWRGKWQTGIRCCRADCPLPTLRAKPTHDRKTYIVVFFPRTKTYSWVDMLLVLPIEECPLPLVNGTHRKWRKLVKDLNIPRRFNIQNLAILMINLIDELHIEAVVDNARKATTWKEFALEASCCRDYTDLGKMLLKFQNMILPDCISCEWVQNSIETWNQKCMNAHDAETIEMLCEFRLLDVPQRPSGQSAQQTEGMSGLPLYDSHNVEDENGSQKFVCRLCGLKFDLLPDLGRHHKVAHMVSGAVGHIPLGRGKYQLNRGRHYYSAFKKSLRPTSTLKKSSSSGIDKNLKFQISGLTSQIVESETSSLGKLQDFQCLDVAQTLFSKIQKTRPHPSNFDVLSVARSVCCKTSLLAALEVKYGPLPENIFVKAAKLCSDNGIQIDWHQEGFICPKGCKSRYNSNALLPMQLTAVDFLEAPVDSRNDDEMWGMEEYHYVLDSKHFGWKPKNESVVLCEDISFGREKVPIVCVIDVDAKDSLGMKPEELLPHGSSLPWEGFHYITNRVMDSSLIDSENSMPGCACSHPECSPENCGHVSLFDGVYNSLVDINGTPMHGRFAYDEDSKIILQEGYPIYECNSSCICDSSCQNKVLQKGLLVKLELFRSENKGWAIRAAEPILQGTFVCEYIGEVVKADKAMKNAESVSSKGGCSYLFSIASQIDRERVRTVGAIEYFIDATRSGNVSRYISHSCSPNLSTRLVLVESKDCQLAHIGLFANQDIAVGEELAYDYRQKLVAGDGCPCHCGTTNCRGRVY

SEQ ID NO: 176902 - protein, 1477 aa, Zea Mays
MLMDPPVMQMDCKLKNAMDKTPQIAYDRKLTVSHDDYGWAGSDVHLKDDTIVCSPVDLSDACQSGMDRVLDSASKNSSLNLGDLSQGTELREKNSDSSYSDVKLQLNLSAGNYNGLQTDDYSFNKQSFGKKDMHHPQEEIHSSPNTMSLPSPCRLNGDVTPCEAEKIAEDRGKVDGIVDAVSKEVKTDLVGCHARQEELQCTLQDLSEIACSIDLVRNKSSPQEEKKSVSPLNDMGHNVDNNSCNGDTNYKGQELNMGNVGDEDHAVALWVKWRGKWQTGIRCCRADCPLPTLRAKPTHDRKTYIVVFFPRTKTYSWVDMLLVLPIEECPLPLVNGTHRKWRKLVKDLNIPRRFNIQNLAILMINLIDELHIEAVVDNARKATTWKEFALEASCCRDYTDLGKMLLKFQNMILPDCISCEWVQNSIETWNQKCMNAHDAETIEMLCEELRQSILGNKLKELRDASVQPELVPEWKTWKQELLKQYFSLHPAGNVGNFEKTNCYDDPALDQQGSRKRPKLEVRRGEIQILHMGEADYRTPTEDPNQNKLPSNSVMHENIGALGATSQKNAVMFPGSSGTNENTISGSSNAALQNARLDLDSFKSSRQCSAYIEAKGRQCGRWANDGDIYCCVHQSMHFLDHSSREDKTLTIEAPLCSGMTNMGRKCKHRAQHGSTFCKKHRLQTNLDVMHPGNLLDPSEVLHMGEEPPNKWVEGISKSQALYSIDLETDKNVQAVVQVKLMPTVAIENSGEKGCAMEKTDMCAASTSMTNTDDTSLCIGIRSHDSIVECQDYAKRHTLYCEKHLPKFLKRARNGKSRLVSKDVFVNLLKGCSSRKDKICLHQACEFLYWFLRNNLSHQRTGLASEHMPQILAEVSKNPDFGEFLLKLISTEREKLANIWGFGTDRSKQIYSENKEGSVALQEEKTNLSSGPKCKICGHQFSDDQALGLHWTTVHKKEARWLFRGYSCAACMESFTNKKVLERHVQDVHGAQYLQYSILIRCMSCNSNFLNTDLLYPHIVSDHAQQFRLLDVPQRPSGQSAQQTEGMSGLPLYDSHNVEDENGSQKFVCRLCGLKFDLLPDLGRHHKVAHMVSGAVGHIPLGRGKYQLNRGRHYYSAFKKSLRPTSTLKKSSSSGIDKNLKFQISGLTSQIVESETSSLGKLQDFQCLDVAQTLFSKIQKTRPHPSNFDVLSVARSVCCKTSLLAALEVKYGPLPENIFVKAAKLCSDNGIQIDWHQEGFICPKGCKSRYNSNALLPMQLTAVDFLEAPVDSRNDDEMWGMEEYHYVLDSKHFGWKPKNESVVLCEDISFGREKVPIVCVIDVDAKDSLGMKPEELLPHGSSLPWEGFHYITNRVMDSSLIDSENSMPGCACSHPECSPENCGHVSLFDGVYNSLVDINGTPMHGRFAYDEDSKIILQGIQYMSAIHHVFVTRPARIKYCRKGCLLSWNSLEVRIRVGLLGLLNLFYRVPLSASILVKL

SEQ ID NO: 176903 - protein, 1071 aa, Zea Mays
MGEADYRTPTEDPNQNKLPSNSVMHENIGALGATSQKNAVMFPGSSGTNENTISGSSNAALQNARLDLDSFKSSRQCSAYIEAKGRQCGRWANDGDIYCCVHQSMHFLDHSSREDKTLTIEAPLCSGMTNMGRKCKHRAQHGSTFCKKHRLQTNLDVMHPGNLLDPSEVLHMGEEPPNKWVEGISKSQALYSIDLETDKNVQAVVQVKLMPTVAIENSGEKGCAMEKTDMCAASTSMTNTDDTSLCIGIRSHDSIVECQDYAKRHTLYCEKHLPKFLKRARNGKSRLVSKDVFVNLLKGCSSRKDKICLHQACEFLYWFLRNNLSHQRTGLASEHMPQILAEVSKNPDFGEFLLKLISTEREKLANIWGFGTDRSKQIYSENKEGSVALQEEKTNLSSGPKCKICGHQFSDDQALGLHWTTVHKKEARWLFRGYSCAACMESFTNKKVLERHVQDVHGAQYLQYSILIRCMSCNSNFLNTDLLYPHIVSDHAQQFRLLDVPQRPSGQSAQQTEGMSGLPLYDSHNVEDENGSQKFVCRLCGLKFDLLPDLGRHHKVAHMVSGAVGHIPLGRGKYQLNRGRHYYSAFKKSLRPTSTLKKSSSSGIDKNLKFQISGLTSQIVESETSSLGKLQDFQCLDVAQTLFSKIQKTRPHPSNFDVLSVARSVCCKTSLLAALEVKYGPLPENIFVKAAKLCSDNGIQIDWHQEGFICPKGCKSRYNSNALLPMQLTAVDFLEAPVDSRNDDEMWGMEEYHYVLDSKHFGWKPKNESVVLCEDISFGREKVPIVCVIDVDAKDSLGMKPEELLPHGSSLPWEGFHYITNRVMDSSLIDSENSMPGCACSHPECSPENCGHVSLFDGVYNSLVDINGTPMHGRFAYDEDSKIILQEGYPIYECNSSCICDSSCQNKVLQKGLLVKLELFRSENKGWAIRAAEPILQGTFVCEYIGEVVKADKAMKNAESVSSKGGCSYLFSIASQIDRERVRTVGAIEYFIDATRSGNVSRYISHSCSPNLSTRLVLVESKDCQLAHIGLFANQDIAVGEELAYDYRQKLVAGDGCPCHCGTTNCRGRVY

SEQ ID NO: 176904 - protein, 947 aa, Zea Mays
MGEADYRTPTEDPNQNKLPSNSVMHENIGALGATSQKNAVMFPGSSGTNENTISGSSNAALQNARLDLDSFKSSRQCSAYIEAKGRQCGRWANDGDIYCCVHQSMHFLDHSSREDKTLTIEAPLCSGMTNMGRKCKHRAQHGSTFCKKHRLQTNLDVMHPGNLLDPSEVLHMGEEPPNKWVEGISKSQALYSIDLETDKNVQAVVQVKLMPTVAIENSGEKGCAMEKTDMCAASTSMTNTDDTSLCIGIRSHDSIVECQDYAKRHTLYCEKHLPKFLKRARNGKSRLVSKDVFVNLLKGCSSRKDKICLHQACEFLYWFLRNNLSHQRTGLASEHMPQILAEVSKNPDFGEFLLKLISTEREKLANIWGFGTDRSKQIYSENKEGSVALQEEKTNLSSGPKCKICGHQFSDDQALGLHWTTVHKKEARWLFRGYSCAACMESFTNKKVLERHVQDVHGAQYLQYSILIRCMSCNSNFLNTDLLYPHIVSDHAQQFRLLDVPQRPSGQSAQQTEGMSGLPLYDSHNVEDENGSQKFVCRLCGLKFDLLPDLGRHHKVAHMVSGAVGHIPLGRGKYQLNRGRHYYSAFKKSLRPTSTLKKSSSSGIDKNLKFQISGLTSQIVESETSSLGKLQDFQCLDVAQTLFSKIQKTRPHPSNFDVLSVARSVCCKTSLLAALEVKYGPLPENIFVKAAKLCSDNGIQIDWHQEGFICPKGCKSRYNSNALLPMQLTAVDFLEAPVDSRNDDEMWGMEEYHYVLDSKHFGWKPKNESVVLCEDISFGREKVPIVCVIDVDAKDSLGMKPEELLPHGSSLPWEGFHYITNRVMDSSLIDSENSMPGCACSHPECSPENCGHVSLFDGVYNSLVDINGTPMHGRFAYDEDSKIILQGIQYMSAIHHVFVTRPARIKYCRKGCLLSWNSLEVRIRVGLLGLLNLFYRVPLSASILVKL

SEQ ID NO: 176905 - protein, 1076 aa, Zea Mays
MQGWIWFIRLHELRQSILGNKLKELRDASVQPELVPEWKTWKQELLKQYFSLHPAGNVGNFEKTNCYDDPALDQQGSRKRPKLEVRRGEIQILHMGEADYRTPTEDPNQNKLPSNSVMHENIGALGATSQKNAVMFPGSSGTNENTISGSSNAALQNARLDLDSFKSSRQCSAYIEAKGRQCGRWANDGDIYCCVHQSMHFLDHSSREDKTLTIEAPLCSGMTNMGRKCKHRAQHGSTFCKKHRLQTNLDVMHPGNLLDPSEVLHMGEEPPNKWVEGISKSQALYSIDLETDKNVQAVVQVKLMPTVAIENSGEKGCAMEKTDMCAASTSMTNTDDTSLCIGIRSHDSIVECQDYAKRHTLYCEKHLPKFLKRARNGKSRLVSKDVFVNLLKGCSSRKDKICLHQACEFLYWFLRNNLSHQRTGLASEHMPQILAEVSKNPDFGEFLLKLISTEREKLANIWGFGTDRSKQIYSENKEGSVALQEEKTNLSSGPKCKICGHQFSDDQALGLHWTTVHKKEARWLFRGYSCAACMESFTNKKVLERHVQDVHGAQYLQYSILIRCMSCNSNFLNTDLLYPHIVSDHAQQFRLLDVPQRPSGQSAQQTEGMSGLPLYDSHNVEDENGSQKFVCRLCGLKFDLLPDLGRHHKVAHMVSGAVGHIPLGRGKYQLNRGRHYYSAFKKSLRPTSTLKKSSSSGIDKNLKFQISGLTSQIVESETSSLGKLQDFQCLDVAQTLFSKIQKTRPHPSNFDVLSVARSVCCKTSLLAALEVKYGPLPENIFVKAAKLCSDNGIQIDWHQEGFICPKGCKSRYNSNALLPMQLTAVDFLEAPVDSRNDDEMWGMEEYHYVLDSKHFGWKPKNESVVLCEDISFGREKVPIVCVIDVDAKDSLGMKPEELLPHGSSLPWEGFHYITNRVMDSSLIDSENSMPGCACSHPECSPENCGHVSLFDGVYNSLVDINGTPMHGRFAYDEDSKIILQEGYPIYECNSSCICDSSCQNKVLQKGLLVKLELFRSENKGWAIRAAEPILQGTFVCEYIGEVVKADKAMKNAERKIHHWSELILEPVFICAYYFDN

SEQ ID NO: 176906 - protein, 1165 aa, Zea Mays
MQGWIWFIRLHELRQSILGNKLKELRDASVQPELVPEWKTWKQELLKQYFSLHPAGNVGNFEKTNCYDDPALDQQGSRKRPKLEVRRGEIQILHMGEADYRTPTEDPNQNKLPSNSVMHENIGALGATSQKNAVMFPGSSGTNENTISGSSNAALQNARLDLDSFKSSRQCSAYIEAKGRQCGRWANDGDIYCCVHQSMHFLDHSSREDKTLTIEAPLCSGMTNMGRKCKHRAQHGSTFCKKHRLQTNLDVMHPGNLLDPSEVLHMGEEPPNKWVEGISKSQALYSIDLETDKNVQAVVQVKLMPTVAIENSGEKGCAMEKTDMCAASTSMTNTDDTSLCIGIRSHDSIVECQDYAKRHTLYCEKHLPKFLKRARNGKSRLVSKDVFVNLLKGCSSRKDKICLHQACEFLYWFLRNNLSHQRTGLASEHMPQILAEVSKNPDFGEFLLKLISTEREKLANIWGFGTDRSKQIYSENKEGSVALQEEKTNLSSGPKCKICGHQFSDDQALGLHWTTVHKKEARWLFRGYSCAACMESFTNKKVLERHVQDVHGAQYLQYSILIRCMSCNSNFLNTDLLYPHIVSDHAQQFRLLDVPQRPSGQSAQQTEGMSGLPLYDSHNVEDENGSQKFVCRLCGLKFDLLPDLGRHHKVAHMVSGAVGHIPLGRGKYQLNRGRHYYSAFKKSLRPTSTLKKSSSSGIDKNLKFQISGLTSQIVESETSSLGKLQDFQCLDVAQTLFSKIQKTRPHPSNFDVLSVARSVCCKTSLLAALEVKYGPLPENIFVKAAKLCSDNGIQIDWHQEGFICPKGCKSRYNSNALLPMQLTAVDFLEAPVDSRNDDEMWGMEEYHYVLDSKHFGWKPKNESVVLCEDISFGREKVPIVCVIDVDAKDSLGMKPEELLPHGSSLPWEGFHYITNRVMDSSLIDSENSMPGCACSHPECSPENCGHVSLFDGVYNSLVDINGTPMHGRFAYDEDSKIILQEGYPIYECNSSCICDSSCQNKVLQKGLLVKLELFRSENKGWAIRAAEPILQGTFVCEYIGEVVKADKAMKNAESVSSKGGCSYLFSIASQIDRERVRTVGAIEYFIDATRSGNVSRYISHSCSPNLSTRLVLVESKDCQLAHIGLFANQDIAVGEELAYDYRQKLVAGDGCPCHCGTTNCRGRVY

SEQ ID NO: 176907 - protein, 122 aa, Zea Mays
MAPKAEKRLPAGKSAGKEGGDKKGRKKAKKSVETYKIYIFKVLKQVHPDIGISSKAMSIMNSFINDIFEKLAAEAAKLARYNKKPTITSREIQTSVRLVLPGELAKHAVSEGTKAVTKFTSS

SEQ ID NO: 176908 - protein, 185 aa, Zea Mays
MLISTAAINRKAYLAGFLPELYRAAPPLILGHVAGSQSSWAACKHDDLKHSAAACQLTSRAVTTQYPPPTHPPLLHRVLRMRRWRRAPPARPRCRRWSRLCRATATRALPRARARAASLCTAPRGRRPWAPSSGCSSRSWCSPCCPASSAGCARATPRGPTSATTARGWPRGGGAAGGGRLAGPL

SEQ ID NO: 176909 - protein, 197 aa, Zea Mays
MLLCELCQEINRSSAEFVWRFMFTNAQRQVERTGRSGTPRDQYLQDLVTQFQNATDEESKEKIVANLANFAYDPFNYAFMRQLNVLELFLDCITEPNERLIEFGIGGICNSCVDPANALIITQCGGIPLVIQCLSSPVRNTVTYALGALYYLCNPSTKKEILKPDVVSTIREYASAGTVNNNFSNLANAFLEKHVDP

SEQ ID NO: 176910 - protein, 482 aa, Zea Mays
MLRTRGPGSILDPPLGGRREAIERELKKLRAEREELDGRIRLLESQLEAGPAGFNGAAAGKGVGDDACGGSGACQSRVGNGFAPDGSLPADMIYRYSRHLLLPDFGVEGQRKLSQSSILVVGAGGLGSPLALYLAACGVGCLGIVDGDDVELNNLHRQIIHKEAYVGQSKVKSAADACLRINSSIKVVEHHHTLKPCNALEIARKYDIVVDATDNLPTRYMISDCCVLLNKPLVSGAALGLEGQLTVYHHNGSPCYRCLFPTPPPVAACQRCSDSGVLGVVPGVIGCLQALEAIKVATGVGEPLCGRMLLFDALSARIRVVKLRGSSPDCTHCGENSVFTEEDFQKFDYESFTQSPMSDKAAASVNVLPESARITCREYKKLADDGEPHLLLDVRPAHHFQIASISPSHNIPLSMLEEKLPALEASLKEAGEGSALVVLCRRGNDSQRAVQLLREKGFANAKDIIGGLQAWGQDVDPDFPVY

SEQ ID NO: 176911 - protein, 299 aa, Zea Mays
MLAVVEHHHTLKPCNALEIARKYDIVVDATDNLPTRYMISDCCVLLNKPLVSGAALGLEGQLTVYHHNGSPCYRCLFPTPPPVAACQRCSDSGVLGVVPGVIGCLQALEAIKVATGVGEPLCGRMLLFDALSARIRVVKLRGSSPDCTHCGENSVFTEEDFQKFDYESFTQSPMSDKAAASVNVLPESARITCREYKKLADDGEPHLLLDVRPAHHFQIASISPSHNIPLSMLEEKLPALEASLKEAGEGSALVVLCRRGNDSQRAVQLLREKGFANAKDIIGGLQAWGQDVDPDFPVY

SEQ ID NO: 176912 - protein, 376 aa, Zea Mays
MIYRYSRHLLLPDFGVEGQRKLSQSSILVVGAGGCLGIVDGDDVELNNLHRQIIHKEAYVGQSKVKSAADACLRINSSIKVVEHHHTLKPCNALEIARKYDIVVDATDNLPTRYMISDCCVLLNKPLVSGAALGLEGQLTVYHHNGSPCYRCLFPTPPPVAACQRCSDSGVLGVVPGVIGCLQALEAIKVATGVGEPLCGRMLLFDALSARIRVVKLRGSSPDCTHCGENSVFTEEDFQKFDYESFTQSPMSDKAAASVNVLPESARITCREYKKLADDGEPHLLLDVRPAHHFQIASISPSHNIPLSMLEEKLPALEASLKEAGEGSALVVLCRRGNDSQRAVQLLREKGFANAKDIIGGLQAWGQDVDPDFPVY

SEQ ID NO: 176913 - protein, 227 aa, Zea Mays
MLSVPLSNSTTCGSLPEMLRQWCPWVPGVIGCLQALEAIKVATGVGEPLCGRMLLFDALSARIRVVKLRGSSPDCTHCGENSVFTEEDFQKFDYESFTQSPMSDKAAASVNVLPESARITCREYKKLADDGEPHLLLDVRPAHHFQIASISPSHNIPLSMLEEKLPALEASLKEAGEGSALVVLCRRGNDSQRAVQLLREKGFANAKDIIGGLQAWGQDVDPDFPVY

SEQ ID NO: 176914 - protein, 81 aa, Zea Mays
MATQQQHAGPASGSASASSSSSGLHLPASPSAFGDTTHTKFSWVLLWCPSSKGFLFRRLWPPPTVSTWVLPRISGSPVQVI

SEQ ID NO: 176915 - protein, 89 aa, Zea Mays
MATQQQHAGPASGSASASSSSSGLHLPASPSAFGDTTHTKVFVGGLAWETNSGRLRRFYERFGDILEAVVITDRHSGRSKGYGFVGDIP

SEQ ID NO: 176916 - protein, 107 aa, Zea Mays
MSMPNGLARRALTYQTDTLLLLLLGTSIAKDLVVRNDRGWGMLNLVAGLLESTTTIISGSRQPFVMETVKADDAAKLGLISGKHLLFDTSIQEFTWRLFSHITILVN

SEQ ID NO: 176917 - protein, 76 aa, Zea Mays
MLNLVAGLLESTTTIISGSRQPFVMETVKADDAAKLGLISGKHLLFDTSIQVSRKEQVLIFYMCNVAFMLYERGEC

SEQ ID NO: 176918 - protein, 127 aa, Zea Mays
MEPGEVSGITRDNGVSQRLATSLDIANRRTWARGSGAGAPLYHPQRRAYGLLRGNAASRGGDTPPSPSTYAALHGACVGHGLHRGPGTSSPSADVSQRTSGRVTSSASDPHLGHQLSDLQLIYSVFG

SEQ ID NO: 176919 - protein, 86 aa, Zea Mays
MSSHDLFIPLSTEFMLSRGCQPGSGLLKSGFRNWSFCKHVRPLPRPFPPLCLSADGALMKKRSAFFMGVVQICLALPCEICCSGSA

SEQ ID NO: 176920 - protein, 50 aa, Zea Mays
MQVNRPCIFQYKVASFFFFLLHPSCLVAPNAGKTKCKLACSDYMPQFFFH

SEQ ID NO: 176921 - protein, 70 aa, Zea Mays
MPSFFPFNMVASIVSCRILIQDRSGSMYMGETKPHKKLSAMLVLLLVWLLYLIRYCLLDITYDVITLDSF

SEQ ID NO: 176922 - protein, 314 aa, Zea Mays
MLHIFPKLLKQFPFPPRPLSSSQRVPTRRRLLPLRLLMASPTQGDAPLAAPAPAADATDAAFAAAAAVPDPGAEFGFQRPELGKEKLVGTVGFHERHVFLCYKGPDLWPSHLEASESDRLPRLLAAAIKARKPNLKKTIKLTICEGEDGTESSNGDVLIFPDMIRYKGLTHFDVDNFVEEVLVKDIDWLPRSPEPMSGSYIFVCSHGSRDKRCGVCGPALIKRFKEEINELGLDDQVAVSACSHVGGHKYAGNVIIFSSDAKGEVTGHWYGYVVPDDVPVLLHKHIGQGEVVDHLWRWVYLWSSRSELSSFGTW

SEQ ID NO: 176923 - protein, 240 aa, Zea Mays
MLHIFPKLLKQFPFPPRPLSSSQRVPTRRRLLPLRLLMASPTQGDAPLAAPAPAADATDAAFAAAAAVPDPGAEFGFQRPELGKEKLVGTVGFHERHVFLCYKGPDLWPSHLEASESDRLPRLLAAAIKARKPNLKKTIKLTICEGEDGTESSNGDVLIFPDMIRYKGLTHFDVDNFVEEVLVKDIDWLPRSPEPMSGSYIFVCSHGSRDKRWLSVHAHTWEVISMQETSSFSVLMPREK

SEQ ID NO: 176924 - protein, 1085 aa, Zea Mays
MAFFAEDVHRLASASVDGRIFVWRIDEGPDEENKPQITGKIEIAIQIVGEAEAYHPRICWHSHKQEILFVGIGNCVLRIDTTKVGRGKDFTVEGPVKCHLEKLIDGVRLVGKHDGGVTDLSISQWMSTRLASGSKDGTVKIWDDRKQVPLSIFKPHDGQAVYSVAFLTAPERPNHINLITAGPVNREVKIWASTNEDGWLLPSDSETWKCTQTLELVSSLEPRVEEAFFNQVAVLHQASLILLANAKKNSIYAVHVEYGPDPASTRLDYIADFTVAMPILSLTGTHESQPDGEQVVQVYCVQTMAIQQYGLELSLCSPPTADSTGFGRDPAISRVYEAALEMAGTEPSIGTSCTDSYSVTALSKQPNVDQSAELDLKPSAPPLAYSEGDSSMPLPFTALAPKIEVPGSGPAPGTRDIEQSAFNYTNTTNRNMERDALKRQDTPMPIRKDILGKDEPRDGQSNVPMLPNPHMVFQVGGNATRLVTPSEIISGTLSSAENNDVSESGGENRDVSSGSSWVAEVEPKHIDESKPDQNLGLEAVKETQIVCENMAKTSMEQTVEMITKRSVTTDKHSVEESQSSSDRPASDQTCGTDENVLKKFVEMPEKIDYSASREQPSLFTKEKVLHPQTSGQPSPPVSAFNSTEPHEPLSSTYLPVSSFPEDAATQGMLQQLLDHQKDMEKQLSTVVPVSIAKEGKRLETLLGRTVEKSFKANIDAFWVRLQEENTKREKADRERMQQLCTLITSSINKDLPSNLEKSLKKEISSLGPVVARAITPVVEKSITSVVSDSVQKGVGDKVCNQLEKSITGKLEATLAKQIQMQFHTSGRQALQDALRTSFESLLVPAFEQACKTMFEQVDGAFQKGMSEHSNAIQQQVEAAHTPLALTLKETINSASSITQSFSSELLDGNRKLLALVTSGNAKAHNTSALQPINGPMGGPQEVEAPLDPMRELSRLISERKFDEAFTMALQRSDVSIVSWLCSQVDLRALCAMVPVPLNQGVLLALLQQLAIDIHNETSRKVQWMTDVAMAINPADQIIAVHVRPIFEQVYSQLAHQRTLPTTTASDGTSIRVIMHVINSVLLSYK

SEQ ID NO: 176925 - protein, 1009 aa, Zea Mays
MAFFAEDVHRLASASVDGRIFVWRIDEGPDEENKPQITGKIEIAIQIVGEAEAYHPRICWHSHKQEILFVGIGNCVLRIDTTKVGRGKDFTVEGPVKCHLEKLIDGVRLVGKHDGGVTDLSISQWMSTRLASGSKDGTVKIWDDRKQVPLSIFKPHDGQAVYSVAFLTAPERPNHINLITAGPVNREVKIWASTNEDGWLLPSDSETWKCTQTLELVSSLEPRVEEAFFNQVAVLHQASLILLANAKKNSIYAVHVEYGPDPASTRLDYIADFTVAMPILSLTGTHESQPDGEQVVQVYCVQTMAIQQYGLELSLCSPPTADSTGFGRDPAISRVYEAALEMAGTEPSIGTSCTDSYSVTALSKQPNVDQSAALAPKIEVPGSGPAPGTRDIEQSAFNYTNTTNRNMERDALKRQDTPMPIRKDILGKDEPRDGQSNVPMLPNPHMVFQVGGNATRLVTPSEIISGTLSSAENNDVSESGGENRDVSSGSSWVAEVEPKHIDESKPDQNLGLEAVKETQIVCENMAKTSMEQTVEMITKRSVTTDKHSVEESQSSSDRPASDQTCGTDENVLKKFVEMPEKIDYSASREQPSLFTKEKVLHPQTSGQPSPPVSAFNSTEPHEPLSSTYLPVSSFPEDAATQGMLQQEENTKREKADRERMQQLCTLITSSINKDLPSNLEKSLKKEISSLGPVVARAITPVVEKSITSVVSDSVQKGVGDKVCNQLEKSITGKLEATLAKQIQMQFHTSGRQALQDALRTSFESLLVPAFEQACKTMFEQVDGAFQKGMSEHSNAIQQQVEAAHTPLALTLKETINSASSITQSFSSELLDGNRKLLALVTSGNAKAHNTSALQPINGPMGGPQEVEAPLDPMRELSRLISERKFDEAFTMALQRSDVSIVSWLCSQVDLRALCAMVPVPLNQGVLLALLQQLAIDIHNETSRKVQWMTDVAMAINPADQIIAVHVRPIFEQVYSQLAHQRTLPTTTASDGTSIRVIMHVINSVLLSYK

SEQ ID NO: 176926 - protein, 1060 aa, Zea Mays
MAFFAEDVHRLASASVDGRIFVWRIDEGPDEENKPQITGKIEIAIQIVGEAEAYHPRICWHSHKQEILFVGIGNCVLRIDTTKVGRGKDFTVEGPVKCHLEKLIDGVRLVGKHDGGVTDLSISQWMSTRLASGSKDGTVKIWDDRKQVPLSIFKPHDGQAVYSVAFLTAPERPNHINLITAGPVNREVKIWASTNEDGWLLPSDSETWKCTQTLELVSSLEPRVEEAFFNQVAVLHQASLILLANAKKNSIYAVHVEYGPDPASTRLDYIADFTVAMPILSLTGTHESQPDGEQVVQVYCVQTMAIQQYGLELSLCSPPTADSTGFGRDPAISRVYEAALEMAGTEPSIGTSCTDSYSVTALSKQPNVDQSAALAPKIEVPGSGPAPGTRDIEQSAFNYTNTTNRNMERDALKRQDTPMPIRKDILGKDEPRDGQSNVPMLPNPHMVFQVGGNATRLVTPSEIISGTLSSAENNDVSESGGENRDVSSGSSWVAEVEPKHIDESKPDQNLGLEAVKETQIVCENMAKTSMEQTVEMITKRSVTTDKHSVEESQSSSDRPASDQTCGTDENVLKKFVEMPEKIDYSASREQPSLFTKEKVLHPQTSGQPSPPVSAFNSTEPHEPLSSTYLPVSSFPEDAATQGMLQQLLDHQKDMEKQLSTVVPVSIAKEGKRLETLLGRTVEKSFKANIDAFWVRLQEENTKREKADRERMQQLCTLITSSINKDLPSNLEKSLKKEISSLGPVVARAITPVVEKSITSVVSDSVQKGVGDKVCNQLEKSITGKLEATLAKQIQMQFHTSGRQALQDALRTSFESLLVPAFEQACKTMFEQVDGAFQKGMSEHSNAIQQQVEAAHTPLALTLKETINSASSITQSFSSELLDGNRKLLALVTSGNAKAHNTSALQPINGPMGGPQEVEAPLDPMRELSRLISERKFDEAFTMALQRSDVSIVSWLCSQVDLRALCAMVPVPLNQGVLLALLQQLAIDIHNETSRKVQWMTDVAMAINPADQIIAVHVRPIFEQVYSQLAHQRTLPTTTASDGTSIRVIMHVINSVLLSYK

SEQ ID NO: 176927 - protein, 716 aa, Zea Mays
MAFFAEDVHRLASASVDGRIFVWRIDEGPDEENKPQITGKIEIAIQIVGEAEAYHPRICWHSHKQEILFVGIGNCVLRIDTTKVGRGKDFTVEGPVKCHLEKLIDGVRLVGKHDGGVTDLSISQWMSTRLASGSKDGTVKIWDDRKQVPLSIFKPHDGQAVYSVAFLTAPERPNHINLITAGPVNREVKIWASTNEDGWLLPSDSETWKCTQTLELVSSLEPRVEEAFFNQVAVLHQASLILLANAKKNSIYAVHVEYGPDPASTRLDYIADFTVAMPILSLTGTHESQPDGEQVVQVYCVQTMAIQQYGLELSLCSPPTADSTGFGRDPAISRVYEAALEMAGTEPSIGTSCTDSYSVTALSKQPNVDQSAELDLKPSAPPLAYSEGDSSMPLPFTALAPKIEVPGSGPAPGTRDIEQSAFNYTNTTNRNMERDALKRQDTPMPIRKDILGKDEPRDGQSNVPMLPNPHMVFQVGGNATRLVTPSEIISGTLSSAENNDVSESGGENRDVSSGSSWVAEVEPKHIDESKPDQNLGLEAVKETQIVCENMAKTSMEQTVEMITKRSVTTDKHSVEESQSSSDRPASDQTCGTDENVLKKFVEMPEKIDYSASREQPSLFTKEKVLHPQTSGQPSPPVSAFNSTEPHEPLSSTYLPVSSFPEDAATQGMLQQKLLNILVQHCSLQLAATAALGSPEGHGKAAEYCGSCVHRKGGQKT

SEQ ID NO: 176928 - protein, 245 aa, Zea Mays
MSTANHYQHIKSTKPVVGKARKLKDLMIKSDNRICADCGAPDPKWASTNIGVFLCLKCGDVHRALGPDISKVLSVTLDDWSDSDIDSMVEVGGNSYANSIYEAFLPKDHPKPKPDSTMEYRTKFIRAKYETQDFLKPSLRISSRSSFKSTNSVKSVDSNFSSTSRKDISEDTREFVGELNITVVKGTNLAVRDMLTSDPYVVLTLGGQKAQSTVKKSDLNPVWNEMLKISVPRNYGPLKLVSFYH

SEQ ID NO: 176929 - protein, 393 aa, Zea Mays
MDNIEISVSNDERRNRTDADISEDEPRHTRMRSLRKKALHASSRLTHSLKKRGKRKVDCRVPRIAIEDVRDAEEEQAVSSFREVLFARGLLPIKHDGYHMMLRFLKARKFDFGKAAQMWADMLRWRKEFGTDTIFEDFEFHELEEVLQYYPHGYHGVDKEGRPVYIELLGKVEPNKLMQITTVERYIKYHVQEFERVFREKFPACSISAKRHIDTTTTILDVHGVGWKNFSKIARDLVRCMQKIDGDYYPETLHQMFIVNAGPGFKLIWSTVKGLLDPKTSSKIHVLGTRYQSRLLEAIDASQLPDYFGGSCTCSNHGGCLRSNKGPWSDPSIMKLVHSMELLKEVAHISDIEETITGSVRLRALKAQMLMTLDPLWLLKMLNILVWPQFERK

SEQ ID NO: 176930 - protein, 367 aa, Zea Mays
MQITTVERYIKYHVQEFERVFREKFPACSISAKRHIDTTTTILDVHGVGWKNFSKIARDLVRCMQKIDGDYYPETLHQMFIVNAGPGFKLIWSTVKGLLDPKTSSKIHVLGTRYQSRLLEAIDASQLPDYFGGSCTCSNHGGCLRSNKGPWSDPSIMKLVHSMELLKEVAHISDIEETITGSVRLRALKLPEQISDTSNAESGSDVDDLGSPVAPEDVEYPSLAPVREEVRESWSTTYSGSIGMSRMADKVVGSNRRYNSTGNEIRQFNTEQDSLTNGGLPAPAGWRAQNDGEGNDDGFLKYISRRVIAIFLKVLSFLRFFIRRRQHLANDHPHTATAPSNLADLQTFKEDRVNPCLERLDRLELIS

SEQ ID NO: 176931 - protein, 71 aa, Zea Mays
MSMAEPADFVHVYDVKSDYNKRQELDFFGEISGTSFSPDTDALFVGVWDRMYGSLLQFGRLYNYSYLDSVF

SEQ ID NO: 176932 - protein, 62 aa, Zea Mays
MTSYNARTNASRNGSAVSRPAPHNLEEANDREMVHCIAAAGRPAASELSGYLPVTVYSRRCK

SEQ ID NO: 176933 - protein, 535 aa, Zea Mays
MEAAPMRKASSQASLADPDDFDLTRLLNHKPRINVDRQRSFDDRSLGEISLAGAGTASRGGWGYGGGGMESYESMYSPGGGLRSYCGTPASSTRLSFEPHPLIGEAWDALRRSMVSFRGQPLGTIAAVDHSSGEVLNYDQGWEKRIDRFKLGEGAMPASFKVLKDPKRGVDKLVADFGESAIGRVAPVDSGFWWIIILRAYTKSTGDMTLAETPMCQKGIRLIMNQCLAEGFDTFPTLLCADGCCMIDRRMGVYGYPIEIQALFFMALRCALLMLKPDAEGKEIMERIVTRLTALSYHMRSYFWLDFQQLNDIYRFKTEEYSHTAVNKFNVNPESIPDWLFDFMPTRGGYFVGNVSPARMDFRWFALGNCVAILASLATPDQAAAIMDLIEERWEDLVGEMPVKICYPAIEGHEWQIVTGCDPKNTRWSYHNGGSWPVLLWLLTAACIKTGRLKIARRAIDLAEARLARDGWPEYYDGKLGRYIGKQARKLQTWSIAGYLVAKMMVEDPSHLGMISLEEEKPTKPVLRRSASWTG

SEQ ID NO: 176934 - protein, 90 aa, Zea Mays
MHMLSTDKFPMQESVPVELCQHVPGSASTNDAVPLMVSKARREVADELGGGFSMGLGNGHDVQADKAKWLGCKADVVPMVRGAEVEVREG

SEQ ID NO: 176935 - protein, 123 aa, Zea Mays
MCGTTSCHQGKWGCQSRTHRTTTCQQWRTTWGGCSSGLSASTIWRLPPIRLRIRLRHCPPAFGSGKLIMEGSLGFFERRETDSVQMQNVLSIRNPKPPNREACSSVSPGAATATCGSRRRRSF

SEQ ID NO: 176936 - protein, 59 aa, Zea Mays
MKNESSSSSSTRPLARSIRSFMPLAAQFFMGDSLKQMHTDTFSSLSTVLIFVTRKGVYH

SEQ ID NO: 176937 - protein, 156 aa, Zea Mays
MQIGPQIVRSNPIQQPNPIQSNQRKRKTAKGSCMCGTTSCHQGKWGCQSRTHRTTTCQQWRTTWGGCSSGLSASTIWRLPPIRLRIRLRHCPPAFGSGKLIMEGSLGFFERRETDSVQMQNVLSIRNPKPPNREACSSVSPGAATATCGSRRRRSF

SEQ ID NO: 176938 - protein, 150 aa, Zea Mays
MVAAARIALRPPPLSPFLLATPPPFVHQVTTRLGDGSRGAQQSGQDTLNESFKIAREMEAPPSARNRCITSSDSSPFRSFAFVVDEKKAAKGASEKRAWRRRHTILPLAHGVLKLSPHLAGIPGAIHHLCRQFVTSQPATRRDKISFPSC

SEQ ID NO: 176939 - protein, 415 aa, Zea Mays
MSGFVGVVVSDPSLQGQFTQVELRSLKAKFVSLKRDSGHVTTKNLPVMMKKLRGLNEVVSVEEIAAFLSESYPDSDQEIEFESFLREYLNLQARVSAKEGGAGGGRGGKSSFLKSSTTTLLHNLNQAEKSSYVAHINTYLREDPFLKKYLPMDPSGNQLFDLIRDGVLLCKLINVAVPGTIDERAINKKRVLNPWERNENHTLCLNSAKAIGCTVVNIGTQDLVEGRPHLVLGLISQIIKIQLLADLNLKKTPQLVELFDDSKDIDEVLSLSPEKMLLRWMNHHLKKAGYKKTVNNFSSDVKDGEAYAYLLKALAPEHSPETTLDTKDPNERAKLVLEQAAKLDCKRYLTPKDITEGSANLNLAFVAQIFQHRNGLTSDTKQVTLTQTATPDDVLVSREERAFRMWINSLGMGTS

SEQ ID NO: 176940 - protein, 535 aa, Zea Mays
MVFCSAVPGTIDERAINKKRVLNPWERNENHTLCLNSAKAIGCTVVNIGTQDLVEGRPHLVLGLISQIIKIQLLADLNLKKTPQLVELFDDSKDIDEVLSLSPEKMLLRWMNHHLKKAGYKKTVNNFSSDVKDGEAYAYLLKALAPEHSPETTLDTKDPNERAKLVLEQAAKLDCKRYLTPKDITEGSANLNLAFVAQIFQHRNGLTSDTKQVTLTQTATPDDVLVSREERAFRMWINSLGVESYVNNVFEDVRNGWVLLEVLDKVSPGSVNWKLATKPPIKLPFRKLENCNQVVKIGKQLKFSLVNLAGNDIVQGNKKLIVALLWQLMRFNILQLLNKLRFHSQGGSQGKEISDADILDWANSKVKASGRTSRMESFKDKSLSNGLFFLELLSTVQPRVVNWKVVTKGETDEDKKLNATYIISVARKIGCSVFLLPEDIVEVNQKMILTLTASIMYWSLQNQHQSQSEMPEQSEPSSMASDAASDIASEDGASTTAPSELDEVNSLSDSVSNLTTDDATSNAPSTENGNGVAGS

SEQ ID NO: 176941 - protein, 430 aa, Zea Mays
MLLRWMNHHLKKAGYKKTVNNFSSDVKDGEAYAYLLKALAPEHSPETTLDTKDPNERAKLVLEQAAKLDCKRYLTPKDITEGSANLNLAFVAQIFQHRNGLTSDTKQVTLTQTATPDDVLVSREERAFRMWINSLGVESYVNNVFEDVRNGWVLLEVLDKVSPGSVNWKLATKPPIKLPFRKLENCNQVVKIGKQLKFSLVNLAGNDIVQGNKKLIVALLWQLMRFNILQLLNKLRFHSQGGSQGKEISDADILDWANSKVKASGRTSRMESFKDKSLSNGLFFLELLSTVQPRVVNWKVVTKGETDEDKKLNATYIISVARKIGCSVFLLPEDIVEVNQKMILTLTASIMYWSLQNQHQSQSEMPEQSEPSSMASDAASDIASEDGASTTAPSELDEVNSLSDSVSNLTTDDATSNAPSTENGNGVAGS

SEQ ID NO: 176942 - protein, 155 aa, Zea Mays
MDLWERARAFAGEAAKRSQELSAEAAKRSSALVSETAKKSKEIFSETASKSREIAAEATKQADLLAGQIKHLASDLPVPSIPPIPAIPPIPAAASSVPDAAELECYGITDDLREFVKGMTINTFRDFPLQGSERVAGQTRHTCPLGSQGNIKVQI

SEQ ID NO: 176943 - protein, 167 aa, Zea Mays
MDLWERARAFAGEAAKRSQELSAEAAKRSSALVSETAKKSKEIFSETASKSREIAAEATKQADLLAGQIKHLASDLPVPSIPPIPAIPPIPAAASSVPDAAELECYGITDDLREFVKGMTINTFRDFPLQDEPEVSDVPTVSNVRQDLNEWQARHGTLVLSAVKIKQ

SEQ ID NO: 176944 - protein, 85 aa, Zea Mays
MCCSFLVAGSAWRCTTVPVCIIKADTMSPACCSSTRTHNPRGDAMQQYLLSVAPHLPTSTPTELSNCAVQLLACTLLAWSSHQPC

SEQ ID NO: 176945 - protein, 65 aa, Zea Mays
MPTTPRERPGCSPHACPRRILSLPGAPTSRLAVAPAAALATRSSEGATYHLTGVGDRGGGFAGQG

SEQ ID NO: 176946 - protein, 69 aa, Zea Mays
MSPACCSSTRTHNPRGDAMQQYLLSVAPHLPTSTPTELSNCAVQLLGKFRDNVLISIEIMIVCCCCIIY

SEQ ID NO: 176947 - protein, 114 aa, Zea Mays
MICLVAQFGKEKTVLRTEVDRGFTFYALRLIAVSLQKYLACILCHFVSFVTKADTMSPACCSSTRTHNPRGDAMQQYLLSVAPHLPTSTPTELSNCAVQLLACTLLAWSSHQPC

SEQ ID NO: 176948 - protein, 80 aa, Zea Mays
MESGRLIFNAPGSGAGQMLFLDCGAGGGPGGGLLHRGGRPMLGLEEGRGVKRPFYTSPDELLEEEYYDEQLPEKKRRLTP

SEQ ID NO: 176949 - protein, 369 aa, Zea Mays
MLMILCLAVTIGFRDTKHLANAQGLAVITVMLVTTCLMSLVIVLCWNKSIFLALGFLLFFGAIEVIYFSASLVKFHEGAWVPITLSFIFMVVMCVWHYGTIKKYEFDVQNKVSVNWLLNLGPSLGIVRVRGIGLIHTELMSGIPAIFSHFVTNLPAFHQVLVFLCVKSVPVPHVQPEERFLVGRIGPKEYRLYRVIVRYGYRDVQKDDLEFEKELVGNIAEFIRSSAEYDKNGFAEDTDKPSGKLSTISTGINMWEEDGEPDASSSPRKETDPRDAAPERKKARFMIPKSAQVDSEVRRELQELMDAREAGMSFILGRSYMKAKSGSGFVKRVVINLLYEFLRKNSRGPAYAASIPHASTLEVGMVYQV

SEQ ID NO: 176950 - protein, 457 aa, Zea Mays
MGQAAFISQHHNFESSYHIGFYVSVPETLRWPVLVIAILAAVVGSQAIITGTFSIIKQCSSLSCFPGVKIVHTSSTVHGQIYIPEINWMLMILCLAVTIGFRDTKHLANAQGLAVITVMLVTTCLMSLVIVLCWNKSIFLALGFLLFFGAIEVIYFSASLVKFHEGAWVPITLSFIFMVVMCVWHYGTIKKYEFDVQNKVSVNWLLNLGPSLGIVRVRGIGLIHTELMSGIPAIFSHFVTNLPAFHQVLVFLCVKSVPVPHVQPEERFLVGRIGPKEYRLYRVIVRYGYRDVQKDDLEFEKELVGNIAEFIRSSAEYDKNGFAEDTDKPSGKLSTISTGINMWEEDGEPDASSSPRKETDPRDAAPERKKARFMIPKSAQVDSEVRRELQELMDAREAGMSFILGRSYMKAKSGSGFVKRVVINLLYEFLRKNSRGPAYAASIPHASTLEVGMVYQV

SEQ ID NO: 176951 - protein, 513 aa, Zea Mays
MATKGGNARGVPVGALLVAALLLSSLVPTSASSYPARVVSGFLSNAASAVVKRLWSLKSTTKTASGGKSMVKYEGGYTVETVFDGSKLGIEPYSVEVTQSGELLVMDSMNSNIYRMALPLSRYSRPKLVAGSPEGFPGHVDGKLREARMNHPKGFTVDDKGNIYVADAMNMAIRKISDTGVTTIAGGKSGRGGHVDGPSDEAKFSTDFEVRYIGSSCSLLVIDRGNQAIREIQLHFDDCVYQYEAGFPLGVALLLAAAFFGYMLALLQRRVLGMYSNGDEDESPVKAKLSSIPPPYQKPLKSSLRPPLIPNDDEPVKQEEEGLFTSIGKLVGVARSSVAEIVGATFSRKKRVNVHHHQLGRPTSWPVQESYAIPRDETPPPLDTRAPTPRKSYAFMSKEPEKIHHIRHGRPQSHGWTGEAAAAPQQQAASLPPQQQQQQQQVHHQQYHNRQYSAGPQTFYEPSCDAAKEIVFGAVQEGDTGRRRPVEIKPVNHGDVAPFELNGLRFRSSYGMG

SEQ ID NO: 176952 - protein, 253 aa, Zea Mays
MLALLQRRVLGMYSNGDEQEDESPVKAKLSSIPPPYQKPLKSSLRPPLIPNDDEPVKQEEEGLFTSIGKLVGVARSSVAEIVGATFSRKKRVNVHHHQLGRPTSWPVQESYAIPRDETPPPLDTRAPTPRKSYAFMSKEPEKIHHIRHGRPQSHGWTGEAAAAPQQQAASLPPQQQQQQQQVHHQQYHNRQYSAGPQTFYEPSCDAAKEIVFGAVQEGDTGRRRPVEIKPVNHGDVAPFELNGLRFRSSYGMG

SEQ ID NO: 176953 - protein, 965 aa, Zea Mays
MDIVVEEGNADVGNTAEPSYEVVAKSGCSAQLSTNDTDEHELAIESEDSKVSVGNAAKQSHDVVGVGIDCIFNHAKVSTEADLGPQPDVIHLTSLDVPNESSQISSDADMVEQNKKDALDTLIRISQHKKPKKSNVARVVSEDYKCTPEDVQLIEYIKTLPGKQVVVNIDSAWLNRNDMECLFHGDIELSVEALSAYIHCIRDEEHLLHREGGKVFLENTFISSLLKRDGDPKVFIPMNIENFHWYMAVLNAKKSELKGLERQIKLAAEHKELYQGKWSNLDVASWPVIEKITTQMQTDGVSCGLWMINYMEYWTGSSLSDNVTQDDITMFRFKLPAILWDSRLNTKKGHQNLDHNVDEDGESSSDVQIIDTPLTSTNTQELMFVLWTYIMGIDNAKYLKKHWIQSTKPYPISLSLQKLKDILDVNKPMDTDCFNMAVWMIACNDALFLLEDKYHYMDLQFCSITKFGRDPRLRAKPDINMLAKLLECWPDMEYDVSDCKQILLPFSFMGHFTLYVLNMDTRSIYIMDSMPIPSWFKGDHPSMHYIHNIHYIANNMNAAMELANPTWKDDIYMWRRIVPTWVPRTLNWDLSGFLVINFMHDWNGIRLPCICTVWRDRAHRTFYLGVGVAFPKPTLLPSPSRRCDSTSCPTGRKPSGLCGAALYIAALSHGCNYTKADIVSVVHVCEATLTKRLIEFENTDSGSLTPVSKHSPKSGEIICKHKDKGFEHFAHGLCEKCYNKFTKLSGGLEGGSVPPAFQRAEKKRLEAAKRAEEAAAAKEAALEKSLCDTQNSEVESAMTPRKGLSGDKSSKMGSEGLINDSMPPKDPEEGGENCEGNADPESLSDIDDAEVDGYLHNEEETQYKKIIWEEMNKEYLEEQADKEALAAELAARGIDPEAGKKKRKRNEDTKSSTPAETPAEATCNMLKRKGLGSKINVGAVDELYKEALVTGDTCSGMYENRKNIL

SEQ ID NO: 176954 - protein, 240 aa, Zea Mays
MCSRPVGGIRIMLPVSSSCPMGMRTWTRRGPSLTVSASTPWSRLVLVRRATNSCCTTSHTTAVQLPQVQHEQKDKPVIHVKYEYSSPKKVKVTNTLDIKMNRVQNPGQAAMNPNVSRELARRAQVEHLRKVMDLANKKNLGAAKDEVERARNALNSITHDTDDAVDSLFNELDNIEEFLETYDIYNKLGRSYLLACISSHERQRYAERGGAAPVDLYLTQRMNKYLDQAHKVHKNPKTKI

SEQ ID NO: 176955 - protein, 638 aa, Zea Mays
MAAAAAAEIVREIAAVGAADLAAAADPLRADCLRLARKVSLLSHLVAEVADAGAGAGAGDAAAEAWLRDLVRALEAARRFVALGRTPAAAGASDQDAICKNTGLQFKYVTWQLQAALANLPHSCFEISDEVQEEVDLVRAQLRREMEKNGGLDVTVFMKVHDILAQIDNAAPQSQQPHQQPEQPQMEKFSNDDLELRNVVLLVSEISGLSKPDMSKIVSDLIQGLENVETPESPKPDNVDRQPPSDETKGSSEEVKKSDSVAIPEDFRCPISLELMRDPVIVSTGQTYERAFIQRWIDCGNRTCPKTQQKLQNLSLTPNYVLRSLILQWCEEKGMEPPSRSKSDGSPLEVAGNRLAIEALVRNLSSSSLDDRKSAAAEIRSLAKKSTDNRILLAESSAIPALVKLLSSKDPKTQEHAVTALLNLSIYDQNKELVVVAGAIVPITQVLRTGSMEARENAAAAIFSLSLMDDNKIMIGSTPGAIEALVELLQSGSSRGKKDAATALFNLCIYQANKVRAVRAGILVPLIRMLQDSSRSGAVDEALTILSVLASHHECKTAISKAHAIPFLIDLLRSGQARNRENAAAIILALCKRDAENLACVGRLGAQIPLAELAKTGTDRAKRKATSLLEHLSKLQVL

SEQ ID NO: 176956 - protein, 300 aa, Zea Mays
MAAAAAAEIVREIAAVGAADLAAAADPLRADCLRLARKVSLLSHLVAEVADAGAGAGAGDAAAEAWLRDLVRALEAARRFVALGRTPAAAGASDQDAICKNTGLQFKYVTWQLQAALANLPHSCFEISDEVQEEVDLVRAQLRREMEKNGGLDVTVFMKVHDILAQIDNAAPQSQQPHQQPEQPQMEKFSNDDLELRNVVLLVSEISGLSKPDMSKIVSDLIQGLENVETPESPKPDNVDRQPPSDETKGSSEEVKKSDSVAIPEDFRCPISLELMRDPVIVSTGQKKARFVELPDELIA

SEQ ID NO: 176957 - protein, 261 aa, Zea Mays
MWIRDLQLAFGNLSVIAALKFSCINVLVSLSHVLTFASLSNVSTICSDIPFLSLLVKDAICKNTGLQFKYVTWQLQAALANLPHSCFEISDEVQEEVDLVRAQLRREMEKNGGLDVTVFMKVHDILAQIDNAAPQSQQPHQQPEQPQMEKFSNDDLELRNVVLLVSEISGLSKPDMSKIVSDLIQGLENVETPESPKPDNVDRQPPSDETKGSSEEVKKSDSVAIPEDFRCPISLELMRDPVIVSTGQHLIPGATFSINLL

SEQ ID NO: 176958 - protein, 493 aa, Zea Mays
MEKNGGLDVTVFMKVHDILAQIDNAAPQSQQPHQQPEQPQMEKFSNDDLELRNVVLLVSEISGLSKPDMSKIVSDLIQGLENVETPESPKPDNVDRQPPSDETKGSSEEVKKSDSVAIPEDFRCPISLELMRDPVIVSTGQTYERAFIQRWIDCGNRTCPKTQQKLQNLSLTPNYVLRSLILQWCEEKGMEPPSRSKSDGSPLEVAGNRLAIEALVRNLSSSSLDDRKSAAAEIRSLAKKSTDNRILLAESSAIPALVKLLSSKDPKTQEHAVTALLNLSIYDQNKELVVVAGAIVPITQVLRTGSMEARENAAAAIFSLSLMDDNKIMIGSTPGAIEALVELLQSGSSRGKKDAATALFNLCIYQANKVRAVRAGILVPLIRMLQDSSRSGAVDEALTILSVLASHHECKTAISKAHAIPFLIDLLRSGQARNRENAAAIILALCKRDAENLACVGRLGAQIPLAELAKTGTDRAKRKATSLLEHLSKLQVL

SEQ ID NO: 176959 - protein, 102 aa, Zea Mays
MPRRPYDARHPHPGVPPPPAPLPPPHRRPAPLPSHTHSLPPSPCSAPSPSPLCLRSTSLTASDLTASPHRPNGIFASDAPIDVDAAMEDELREKEDVASNGL

SEQ ID NO: 176960 - protein, 243 aa, Zea Mays
MLLPLIDMCNHSFNPNARIVQERSVNSLDMSVKVLAEKKIKQNEAITLNYGCYPNDFFLLDYGFVITQNPYDQVELSYDGALLDAASMAAGVSSPNFSAPAKWQQDILSQLNLHGEGAVLKVSLGGPDVVDGRLLAALRVLLADDPEAVHKHDLNTLMSLDVQVPLGPTVEASALRTVLALCAIALQHFHTKIMDDQAILGGGPPLITQLAVQFRLQKKFTIVDVMQNISRRIKMLSPQKSTG

SEQ ID NO: 176961 - protein, 398 aa, Zea Mays
MAAAAAGFTPATARKALFTTTVTLLSSSLSRRASSIRSRNLSCSAAFTAATRLAPQPPDLVRWVQREGGFVHRALRVANHPEHGLGISASSAAAYGDIPIGDVLIALPSQLPLRLRRPTSAADDVLVQLAQQVPDELWAMKLGLRLLQERAKSDSFWWPYIANLPETFTVPIFFPGEDIKNLQYAPILHQVNKRCRFLLEFEKEVQQKLHTVPLVDHPFYGQDVNSSSLGWAMSAASSRAFRLHGEVPMLLPLIDMCNHSFNPNARIVQERSVNSLDMSVKVSILSCSCTLKFSIFTLLKFLFQNQTIFFLFLISTSQMGMILSHCNFKPLQLPTALFPASSIVTMKISVFHELSSLTSACHLIHSFLTSLHNLQPPCISCVRHYSFPYTISMLDCTC

SEQ ID NO: 176962 - protein, 224 aa, Zea Mays
MSAASSRAFRLHGEVPMLLPLIDMCNHSFNPNARIVQERSVNSLDMSVKNPYDQVELSYDGALLDAASMAAGVSSPNFSAPAKWQQDILSQLNLHGEGAVLKVSLGGPDVVDGRLLAALRVLLADDPEAVHKHDLNTLMSLDVQVPLGPTVEASALRTVLALCAIALQHFHTKIMDDQAILGGGPPLITQLAVQFRLQKKFTIVDVMQNISRRIKMLSPQKSTG

SEQ ID NO: 176963 - protein, 55 aa, Zea Mays
MEVGRTPRRRASPAAAAAAAAAAVPSLLLFAVLFGSFRRSSRRYSPGTRGRSPTP

SEQ ID NO: 176964 - protein, 168 aa, Zea Mays
MEVGRTPRRRASPAAAAAAAAAAVPSLLLFAVLFAKRDVVETGHLHRGHPEREARERLRLVRRPRKVRSGEVRGDIRQAREDGPRRPDLGRDRPAAPSEQRARGLQRLGWRGSGVEDPVQSRQGRGRPPPQGRREERLRRDTVPPARAQMEISRQRHGEKLISVVREN

SEQ ID NO: 176965 - protein, 189 aa, Zea Mays
MEVGRTPRRRASPAAAAAAAAAAVPSLLLFAVLFAFRALGFGLGLSSASAAFINGALGSKCRPQNATSSKLDIYIEDIRRGKHGSDSGSYDAQGRFVPEKFEEIFARHARTVPDALTSDEIDQLLQANREPGDYSGWAGAEAEWKILYSLGKDGDGLLRKDVARSVYDGTLFHRLAPRWKSPDSDMERS

SEQ ID NO: 176966 - protein, 109 aa, Zea Mays
MGKGTKRKQHPADSAPPPGDEGEGRSGRKGRKEKAEATLPSQIKNKDKRREVHAKLKREKKAQKRALARERGQAACCAEEQPPERLVPRTIENTREPDEAVCRPDDQEN

SEQ ID NO: 176967 - protein, 115 aa, Zea Mays
MLLLLTLPGLDGLRRGMVSVVRSALKPMMSVVPFCLFLLMDIYWKYETRPTCDDEHACTPSEHLRHHKSVMKSQRNALLIAAALLLYWILFSVTQLVVRLDQMQQRVDKLKKRDD

SEQ ID NO: 176968 - protein, 945 aa, Zea Mays
MGGNKYCAAMTKRRWRGLAAAAWVLVAVACSAVMHWTMRRESMDRAEERLVSMCEERARMLQEQFGVTVNHVHAIAILIATFNYDKSPSAIDQDTFAKYTARTSFERPLLNGVAYAQRVFHHEREMFESQQGWIMNTMQREPAPPQVEYAPVIFSQDTVSYLARIDMMSGEEDRENILRARTTGKAVLTNPFRLLGSNHLGVVLTFAVYRPDLPADASVEQRVEATIGYLGGAFDVESLVENLLSKLAGNQDIVVNVYDVTNASEAMVLYGPSSSDERVPFLHVSMLDFGDPFRRHEMRCRYRQKLPMQWSAITNPLGTFVIWMLLGYSIAAAYSRYDKVTEDCRKMEELKTQAEAADVAKSQFLATVSHEIRTPMNGVLGMLDMLLGTDLTMTQKDYAQTAQMCGRALITLINDVLDRAKIEAGKLELEAVPFDLRSLMDDVISLFSSKSREKCIELAVFVCDNVPKDVLGDPWRFRQILTNLVGNAVKFTERGHVFVRVCLADNSNMEAGQVLNGAMNGKDGRVDSTTNGAFNTLSGFEAADRRNSWQYFKMLLSDKESLLDDLEGTNSDQSDSDHVTLAISIEDTGVGIPLQAQDRVFTPFMQADSSTSRNYGGTGIGLSISKCLAELMVDSSRSLLEALPTAFKGMKAILIDGRPVRSAVTRYHLKRLGIIVQVVNNMSAVVKAFPGQNGATVSREKATILFIESDFWRPETDVQLLNHLREHKNRQLSDGHKVVLLVTSEADKDKYGSIFDIVMCKPIRASMIASSIQQLLKVEMPERRNNHNRPSFLRSLLVGKNILVVDDNKVNLRVAAAALKKYGANVSCVESGKDAISLLQPPHCFDACFMDVQMPEMDGFEATRQIRQTEMRVNEERKNKLVLIEGSTFVEYHLPVLAMTADVIQATYEKCIKSGMDGYVSKPFDEEQLYQAVSRLIVGTTDSTV

SEQ ID NO: 176969 - protein, 768 aa, Zea Mays
MGGNKYCAAMTKRRWRGLAAAAWVLVAVACSAVMHWTMRRESMDRAEERLVSMCEERARMLQEQFGVTVNHVHAIAILIATFNYDKSPSAIDQDTFAKYTARTSFERPLLNGVAYAQRVFHHEREMFESQQGWIMNTMQREPAPPQVEYAPVIFSQDTVSYLARIDMMSGEEDRENILRARTTGKAVLTNPFRLLGSNHLGVVLTFAVYRPDLPADASVEQRVEATIGYLGGAFDVESLVENLLSKLAGNQDIVVNVYDVTNASEAMVLYGPSSSDERVPFLHVSMLDFGDPFRRHEMRCRYRQKLPMQWSAITNPLGTFVIWMLLGYSIAAAYSRYDKVTEDCRKMEELKTQAEAADVAKSQFLATVSHEIRTPMNGVLGMLDMLLGTDLTMTQKDYAQTAQMCGRALITLINDVLDRAKIEAGKLELEAVPFDLRSLMDDVISLFSSKSREKCIELAVFVCDNVPKDVLGDPWRFRQILTNLVGNAVKFTERGHVFVRVCLADNSNMEAGQVLNGAMNGKDGRVDSTTNGAFNTLSGFEAADRRNSWQYFKMLLSDKESLLDDLEGTNSDQSDSDHVTLAISIEDTGVGIPLQAQDRVFTPFMQADSSTSRNYGGTGIGLSISKCLAELMGGQISFVSRPFVGSTFTFSTTLKRSYKDISVDSSRSLLEALPTAFKGMKAILIDGRPVRSAVTRYHLKRLGIIVQVVNNMSAVVKAFPGQNGATVSREKATILFIESDFWRPETDVQLLNHLREHKNRQLSDGHKV

SEQ ID NO: 176970 - protein, 93 aa, Zea Mays
MSSAASSPCHRLRRVALLLLVAAVLAGGTEGKAHDYGDALRKSLLYFEAQRSGRLPHSQRVAWRHHSGLTDGLEQGVDLVGGYYDAGDHVKFG

SEQ ID NO: 176971 - protein, 172 aa, Zea Mays
MQEVFKRVDGKAAVAAQPSSEEERTKALQALLSCPTSSIHTEKPPKDILKVQNMFPLPIDDKLLPGVYLCGYNSEDSYGATSYLVIHPQGNILIDSPRYTPKLANNIEKLGGARYMFLTHIDDVADHRKWAEQLKCERIIHSGDVEEATADVEWKLEGNGPWNLGTDFELIT

SEQ ID NO: 176972 - protein, 268 aa, Zea Mays
MALMSLGAAGYTTATAPPRPRRCTLPFRAAASPAALDRRRRPHNVAGDFFVDHRCIDCQTCRWMAPEVFKRVDGKAAVAAQPSSEEERTKALQALLSCPTSSIHTEKPPKDILKVQNMFPLPIDDKLLPGVYLCGYNSEDSYGATSYLVIHPQGNILIDSPRYTPKLANNIEKLGGARYMFLTHIDDVADHRKWAEQLKCERIIHSGDVIFRCTHWLRFWRLLQKEESQQQILIASQVLEVVAMEVFANHGWRSNSRIEAQCACTSNR

SEQ ID NO: 176973 - protein, 275 aa, Zea Mays
MALMSLGAAGYTTATAPPRPRRCTLPFRAAASPAALDRRRRPHNVAGDFFVDHRCIDCQTCRWMAPEVFKRVDGKAAVAAQPSSEEERTKALQALLSCPTSSIHTEKPPKDILKVQNMFPLPIDDKLLPGVYLCGYNSEDSYGATSYLVIHPQGNILIDSPRYTPKLANNIEKLGGARYMFLTHIDDVADHRKWAEQLKCERIIHSGDVIFRCTHWLRFWRLLQKEESQQQILIASQVLEVVAMEVFANHGWRSNSRIECCSLETMLQSQKNQTI

SEQ ID NO: 176974 - protein, 157 aa, Zea Mays
MQEVFKRVDGKAAVAAQPSSEEERTKALQALLSCPTSSIHTEKPPKDILKVQNMFPLPIDDKLLPGVYLCGYNSEDSYGATSYLVIHPQGNILIDSPRYTPKLANNIEKLGGARYMFLTHIDDVADHRKWAEQLKCERIIHSGDVRIASLAIFFYFT

SEQ ID NO: 176975 - protein, 328 aa, Zea Mays
MLTPSAGIPPPSLSAASSPSTSYSLLYLPRRCRRLPVPRASSSFAPKRSAPVPTTTLPPEAPSTSAAVEAPAPFSVTAPGTYRGGEDPLVSKLRTQLGVIHPLPAPPISRSVVGLFALFFFVGAAFDKLWTLRKRRRAERELKVNGSWPQVPTPSFSLFLEKDLQRKESVEWVNMVLGKLWKVYRTGIENWIVGLLQPVIDNLHKPDYVNRVEIRQFYLGEEPLSVRNVERRTSRRANDLQYQIGIRYAGGARMALALYLKFTKVPVVVPVWVRDFDIDGELWVKLRLIPTEPWVGAVSWAFVSLPKVKFELSLFRLFNLMAIPVLSM

SEQ ID NO: 176976 - protein, 241 aa, Zea Mays
MIIDDQVIKSKKNSQTTVIGLPGEPIWNQDFHMLVANPRKQKLTIQVKDSIGLTDITIGTGEVELGSLKDTVPTDKIVTLYGGWGLFGKREAGEVLLRLTYKAYVEDEEEEDEAVRSEIGAGYASDEDVLDYVSGMSKGTDFVGKERETFMDLLAALLVSEEFQGIVSSETGSSSREGEQAGSGPEGTDSVTVPTSAAAADTEASTVPNSSTDTALVWLAAITSVMVLVSSNLGGSGYFNP

SEQ ID NO: 176977 - protein, 139 aa, Zea Mays
MALLRAAVSELRRRGRGALTPLPALSSLLSSLSPRSPASTRPEPNNPHADRRHVIALRRCPPLPASAVLAPELLHARGLLPRHWSHASPLSTSSSSSRPADKAQLTWVDKWIPEAARPYAMLARLDKPIGTWLLAWPCM

SEQ ID NO: 176978 - protein, 250 aa, Zea Mays
MALLRAAVSELRRRGRGALTPLPALSSLLSSLSPRSPASTRPEPNNPHADRRHVIALRRCPPLPASAVLAPELLHARGLLPRHWSHASPLSTSSSSSRPADKAQLTWVDKWIPEAARPYAMLARLDKPIGTWLLAWPCMWSITIAAMPGDLPDLKMLALFGCGAVLLRGAGCTVNDLLDRDIDNKGVGFLGIQLLLGLGILLQLNNYSRILGASSLVLVFSYPLMKRFTFWSEGLYFFWCINNSLRLILA

SEQ ID NO: 176979 - protein, 96 aa, Zea Mays
MPGDLPDLKMLALFGCGAVLLRGAGCTVNDLLDRDIDNKVERTRSRPFASGVLTPLQGVGFLGIQLLLGLGILLQLNNYRYLDSGASLADAADAII

SEQ ID NO: 176980 - protein, 226 aa, Zea Mays
MDSLRSVLESIQAMQIRPVVAQIITLGMILTSALILWKGLVVVTGSESPVVVVLSGSMEPGFRKGDVLFLHMNKDPVRTGDIVVFNVEGRDIPIVHRVIKVHERHDTVDSDILTKGDNNPGDDRVLYAHGQLWLQRQHIIGRAVGYLPYAGWLTIVMTEKPVLKEGHEVRGHVCAGLHGMGKEGIRADTVTWNPLIHGLFKDARVKEAAQLFTEMVATQVMPDNVT

SEQ ID NO: 176981 - protein, 76 aa, Zea Mays
MMATARRVFDKMAREGHEVRGHVCAGLHGMGKEGIRADTVTWNPLIHGLFKDARVKEAAQLFTEMVATQVMPDNVT

SEQ ID NO: 176982 - protein, 76 aa, Zea Mays
MVGMKLGPDSIGIIAVSYNCSGVAAQADQGLVPEPQVVAHFGASWCVMSLSMNYKFEELAQTHPEVLFLYVDVDDV

SEQ ID NO: 176983 - protein, 190 aa, Zea Mays
MSRLLPPVLSPLPAFSLPPPLLPRIHIRTSAVRGGAAENAMASGTTARERRLVKVREERRRREYDREHTYPGWAKVLENACRDDEELRAILGDSIGNPELMKQRIQERVRKKGRAQFNKSKTGSIVAFKVSFRDFNPLNSFIWFELFGEPTDRDVDLLGSPSLVCHGKARSLQFFKFAAGQLNDGLRPFI

SEQ ID NO: 176984 - protein, 52 aa, Zea Mays
MSKKNNLAKRKKQYEFDLQREKEAKEKQAKKLQAKKSKMKNCNPLVAFCVWS

SEQ ID NO: 176985 - protein, 337 aa, Zea Mays
MDGRESTVASGPNFSSFYTQHRGIGAPGVPGHSAVLHDPPPAGYRQHLDAVSAGYAFQTPQVGGSHIGQGYHHVEASPHVAQYSSGGGTSSGGDMDIGMGSAVCTNVKGELGSGPAQDEQVKKKRGRPRKYKPDGAVTLGLSPSSSLTPHSASLGMGTMISAPGSGFGSEGSGASGLGAPSEKRGRGRPPGSGKMQQLASLGKWFLGSVGTGFTPHVIIIQPGEDVAARIMAFSQQGPRAVCIISATGAVSAATLHQDSESGSVVTYEGRFEILCLSGSYLVVDEGGGARTRSGGLCIALCGPDNRVIGGSVGGVLMAAGAVQWGASCTEEVQRRTR

SEQ ID NO: 176986 - protein, 420 aa, Zea Mays
MAGAASPPQALPPAPTLQASFLCSLALAFLRAGRLSAASHVVSSLPAPPPARLLRRLIPALASSGLVAAASRFRPVPGDPLTLNSIILSYCSLHALRPALSLLRSSSGPQPQVAADTVSYNIFLAGLSEQGHGRLAPPVLSEMCKRGVPWDGVTMSTALVGLSRTGLVGEAAALAEMLVRGRGIDGLGVVGWNALIDGYCKVQDMAAALAVVERMTTQGLSLDVVGYNTLVAGFFYSGDADAAWEVAERMKADGVEPSVVTHTTLIGEYCKMKRIEEAFTLYEGMVRSGVLPDVVTLSALVDGLCRDGRFSEAYALFREMDKIGVAPNHVTYCTFIDSLAKVQRVNESLGLLGEMVSRGVAMDLVMYTTVMDRLELAISMAQSRCCCKWRRNPLAPMLSHSHQSSMVLLKEDASPKQLAI

SEQ ID NO: 176987 - protein, 613 aa, Zea Mays
MQGWPVLRGICTFQGDGQDWSRSKPCDILYIYRFISESAEGERVTGSIGRDGLKGRGHGSGHVYNCDGPFRAGNIDGAEQMLLQMEEKSVSPNVVTFSSILNGLVKRGCIAKAAGYMRKMKDSGIAPNVVTYGTLIDGFFKCQGQEAALDVYRDMLHEGVEANNFIVDSLVNGLRKNGNIEEAEALFKDMGERGLLLDHVNYATLMDGLFKTGNMPAALKVGQELMERNLSPDAVVYNVFINCLCRLGKFSEAKSFLKEMRNTGLEPDQATYNTMISAQCREGNTSKALKLLNEMKWSSIKPNLITYTTLVVGLLEAGVVEKAKYLLNEMASAGFTPTPLTYRRVLQACSGSRSPYVILEVHELMMGAGLHADITVYNTLVHVLCCHGMTRKATIVLDEMLGRGIAPDTITFNALILGHCKSSHLDNAFATYAQMLHQGLSPNIATFNTLLGGLESAGRIGEADTVICEMKKMGLEPNNLTYDILVTGYAKKSNKVEALRLYCEMVSKGFIPKASTYNSLISDFAKAGMMNQAKELFSEMKRRGVLHTSSTYDILLNGWSKLRNGTEVRILLKDMKELGFKPSKGTISSMSRAFSKPGMTWEARRLLKTLFKV

SEQ ID NO: 176988 - protein, 533 aa, Zea Mays
MLLQMEEKSVSPNVVTFSSILNGLVKRGCIAKAAGYMRKMKDSGIAPNVVTYGTLIDGFFKCQGQEAALDVYRDMLHEGVEANNFIVDSLVNGLRKNGNIEEAEALFKDMGERGLLLDHVNYATLMDGLFKTGNMPAALKVGQELMERNLSPDAVVYNVFINCLCRLGKFSEAKSFLKEMRNTGLEPDQATYNTMISAQCREGNTSKALKLLNEMKWSSIKPNLITYTTLVVGLLEAGVVEKAKYLLNEMASAGFTPTPLTYRRVLQACSGSRSPYVILEVHELMMGAGLHADITVYNTLVHVLCCHGMTRKATIVLDEMLGRGIAPDTITFNALILGHCKSSHLDNAFATYAQMLHQGLSPNIATFNTLLGGLESAGRIGEADTVICEMKKMGLEPNNLTYDILVTGYAKKSNKVEALRLYCEMVSKGFIPKASTYNSLISDFAKAGMMNQAKELFSEMKRRGVLHTSSTYDILLNGWSKLRNGTEVRILLKDMKELGFKPSKGTISSMSRAFSKPGMTWEARRLLKTLFKV

SEQ ID NO: 176989 - protein, 163 aa, Zea Mays
MEWRSLGILEDSIEGVEIDGSEGGEACGVDAEVAELLLGALPPLRPVGGHDEDVVLQQRPRPGAAVRLLRHHRLAGHELAAVRQSGVAVPQDGRALVVGPRRQNPLHAWSQSGLVRVVFACSDAADATTVPYLHENGITGGDGLEHISANMPHSCNETTHDED

SEQ ID NO: 176990 - protein, 420 aa, Zea Mays
MVKWKNYLLAVAGSTRSSSSLNKVSVWLIDVQANSWSAVETYGKVPTARDGQSVSILGSRLLMFGGEDNKRRLLNDLHILDLETMMWEEVKSEKGGPAPRYDHSAAVYADQYLLIFGGSSHSTCFNDLYLLDLQTLEWSQPDAQGAHITPRSGHAGAMIDENWYIVGGGDNASGSTDTVVINASKFVWSVVTSVSARDPLACEGLTLCSTTVDGEKVLIAFGGYNGKYSNEIFVLKSKPRNLVQPRLLQSAAAAAAAASVTAAYAVITATDEKTRDIVATDDFDIKRAQPASNSKKFVAEIDVLNGENGKLAARLAEVRDENSKLKDKLDMTNLSYGELAKELKSVQDQLAAEGSRCQKLESQIAAARKRLESAGSLENELEVLHQHISQVEETIATTQRRKSGGVWKWVAGSTEVSDDE

SEQ ID NO: 176991 - protein, 259 aa, Zea Mays
MSCPDFEEMQSEQPCKVVNSYWVQVMGIPMVYRTFPTIWAVGSLLGTSIDVDMKHTRQFEVGRVQVMILDANLIPSTVEVVIGEEVYLLSFRVEDGNGGLRPETDNDEKGFNDDEDDLLGDDDGNDLNGAGPGQLGKMGDRAPAAATGGTITHHSKSGIAQGAALDDESGMGLVAVSGAQQVAQDGAVEPNRSGSCCAQELAAIPEMLAGSKSTRSSKRRGASMDESTLERAERLKARLNEGNLQGNLLVPFLGAASKA

SEQ ID NO: 176992 - protein, 117 aa, Zea Mays
MRRTPSRSASGRSSPSVPPQPPRGCAAPSSKLQRILPTCLLMGLHLHLDKCRMLRLFLIWWQFSKIFLYIHVFHEGKGRVYNVGGGRTPPLESLGGTTAAGDGMGGTTSASKWRASE

SEQ ID NO: 176993 - protein, 82 aa, Zea Mays
MLRLFLIWWQFSKIFLYIHVFHEVAYVLGQLQNKTASDAHSTVVKNVCEHPMARHEAAEALGSMRTKRALCFWRSLQRILSP

SEQ ID NO: 176994 - protein, 91 aa, Zea Mays
MRRTPSRSASGRSSPSVPPQPPRGCAAPSSKLQRILPTCLLMGLHLHLDKCRMLRLFLIWWQFSKIFLYIHVFHEVVNSIYMLLLVLAYPC

SEQ ID NO: 176995 - protein, 100 aa, Zea Mays
MALWRCSAAQTSCSRRTKIDLTMDFAIRSCKGRNSHHHSSVVAYVLGQLQNKTASDAHSTVVKNVCEHPMARHEAAEALGSMRTKRALCFWRSLQRILSP

SEQ ID NO: 176996 - protein, 75 aa, Zea Mays
MPSILSNAALFSLSRQVAYVLGQLQNKTASDAHSTVVKNVCEHPMARHEAAEALGSMRTKRALCFWRSLQRILSP

SEQ ID NO: 176997 - protein, 544 aa, Zea Mays
MALRRVASVLLRTRLRGPVTSPARKALVHPLQAPPRRQFSPRPPPPVPFAAAAAADAAEEAFEAARSTNDMLAAFSRLEATVPANDKRLALACLKLGQHLEASGSADTSRVLALALRCLGILEASPNASTPSSASDAVSLAMALHLAGSASFDLSRFHDALSFLSRALRLLAPLLPETGVAFEVGEEPGGFDVRPVAHAVRLQLANVKTALGRREEALADMRACLDLKESILPPGSRELGVAYRDLAEAHATLLDFKQALPFCQKALELHESTLGKNSVEVAHDRRLLGVIYTGLEQHEQALEQNEISQRVIKSWGAASPDLLLHAEIDAANINIALGKFDEAVSVLKNVAKQVKKDSETRALVFISMAKALANQEKAGDTKRCLEIACDILEKKKFATPDKVAEMYIEVSSLFETVNELEKAISLLKKSLGMLERMPQAQHLEGNVAARIGWLLLLTGKVSEAVPYLEDAVERMKDSFGPKHYGVGYVYNNLGAAYMEMDRPQSAAQMFALAKEVMDVSLGPHHSDTIEACQSLANAYNAMGS

SEQ ID NO: 176998 - protein, 424 aa, Zea Mays
MRCLPFLHGDVSEKDPVTKSASVRSMSTTSRSRSGSDFTSLNVSDMSAESIRRTQYPSFTDCPSNLRVFSFAELKSATRNFSRSLMLGEGGFGCVFSGIIKTSDKPNERIEIAVKQLNRKGLQKEWLTEMNVLGIVDHPNLVKLIGYCAEDDERGVQRLLVYEYMPNGSVDDHLSSRSTTLSWPMRLKVALDSARGLKYLHEEMEFQVIFRDLKTSNILLDENWNAKLSDFGLARHGPTEGLTHVSTAVVGTLGYTAPEYMQTGHLTAKSDIWSYGVVLYELITGRRPIDQNRPKSEQKLLDWVKPYISDVKRFPVIIDPRLEGHYNLKSATKLASVANRCMVRLPKSRPKMSEVYGMVQRIVDGVGTGPPQPPLLHYHHGSASEPGAKRAEKGSLRRRFREFRSGCRHVVLRRGRKPEVVKDL

SEQ ID NO: 176999 - protein, 275 aa, Zea Mays
MRCLPFLHGDVSEKDPVTKSASVRSMSTTSRSRSGSDFTSLNVSDMSAESIRRTQYPSFTDCPSNLRVFSFAELKSATRNFSRSLMLGEGGFGCVFSGIIKTSDKPNERIEIAVKQLNRKGLQKEWLTEMNVLGIVDHPNLVKLIGYCAEDDERGVQRLLVYEYMPNGSVDDHLSSRSTTLSWPMRLKVALDSARGLKYLHEEMEFQVIFRDLKTSNILLDENWNAKLSDFGLARHGPTEGLTHVSTAVCTITSRLLVYYISVFRLNSVLYPFGK

SEQ ID NO: 177000 - protein, 632 aa, Zea Mays
MKSEFLAQSKSDGAGKQENYPALGLGDGTDTQKMLERSDSSIPFELYKNQTTVVISREEFVSVVCDALSLYKYVGPNQKADLLLACRIKERKESVTILLCGTSGCGKSTLSSLLGSRLGITTVVSTDSIRHMMRGFADQKQNPLLYASTYHAGEYLDPIAVAQAKAKHKANKPTVVSHPNTCGGTSSDDKSQQGSSELPPRAELIGSKQMAVEGYKAQSEMVIDSLDRLITSWEEQKESVIVEGVHLSLNFVMGLMKKHPSIIPFMVYITNEEKHMERFAVRAKYMTLDPAKNRYIKYIRNIRAIQEYLCNRADKHLVPKINNTNVDQSVAAIHATAFSCLRRRAAGEQLYDLNTNTAAVVDEEYRNQRAANTLGSKGMFQLIQRQGSSRNLMALLNTDGSVTKAWHVGATDGGGENLGGNTSSGKKPDENRVLDASQIGKAEAVNLQFGPFGISAWMSDTGGTSHAGSVEDLRADGVETGGRNYSSCCSSPKTSDSTSKELMEDYSVYVSEEEEEEEADDPCDAETDEDLSDEERDMHEIDAGSVDEHSTKSDEEYEDLAMRDVMESGDWSDDEQQGVSKTKNSPTLECSIHGSGAAEDDGINGRYHHNLDLFLKMSKEVVASNRMPCASS

SEQ ID NO: 177001 - protein, 638 aa, Zea Mays
MKSEFLAQSKSDGAGKQENYPALGLGDGTDTQKMLERSDSSIPFELYKNQTTVVISREEFVSVVCDALSLYKYVGPNQKADLLLACRIKERKESVTILLCGTSGCGKSTLSSLLGSRLGITTVVSTDSIRHMMRGFADQKQNPLLYASTYHAGEYLDPIAVAQAKAKHKANKPTVVSHPNTCGGTSSDDKSQQGSSELPPRAELIGSKQMAVEGYKAQSEMVIDSLDRLITSWEEQKESVIVEGVHLSLNFVMGLMKKHPSIIPFMVYITNEEKHMERFAVRAKYMTLDPAKNRYIKYIRNIRAIQEYLCNRADKHLVPKINNTNVDQSVAAIHATAFSCLRRRAAGEQLYDLNTNTAAVVDEEYRNQRAANTLGSKGMFQLIQRQGSSRNLMALLNTDGSVTKAWHVGATDGGGENLGGNTSSGKKPDENRVLDASQIGKAEAVNLQFGPFGISAWMSDTGGTSHAGSVEDLRADGVETGGRNYSSCCSSPKTSDSTSKEMLSPRQLMEDYSVYVSEEEEEEEADDPCDAETDEDLSDEERDMHEIDAGSVDEHSTKSDEEYEDLAMRDVMESGDWSDDEQQGVSKTKNSPTLECSIHGSGAAEDDGINGRYHHNLDLFLKMSKEVVASNRMPCASS

SEQ ID NO: 177002 - protein, 120 aa, Zea Mays
MASKIYLIFCVVFLDMCGFSQFIWLHFYLPLNLIPDAGRQILSLLAAICVYLGISLKVDSTEPKHIKAYCYYLSFMFQTHLILHISTVCLHAQMLNSIYSLPYLFMIDEPISIDHDINVP

SEQ ID NO: 177003 - protein, 166 aa, Zea Mays
MDYDRLNSPNTSAISLEVMGHRLHISQDPNSKHLGTTVWDASMVFVKFLEKNSRKGRFCPSKLKGKRVIELGAGCGLAGFGMTLLGCDVTTTDQVEVLPLLMRNVERNRSWISQSNSDTDTIGSITVAELDWGNKEHIKAVEPPFDYIIGTDVYIMKNITYNFTSM

SEQ ID NO: 177004 - protein, 223 aa, Zea Mays
MRGGGAGPTAAFMSDEPPPADAEEVEENSGAEEEDEETVVEQDDDELELGLCLGSKQQQQQHPPPCRILTARDLQPRSLSPDSSVSSSSPAAGAGTAAPSKRAKADAAPNSPGTVASGHPQSFGVVGWPPIRTFRMNSLFNQAKENASEAGAKKPIVEPDMQEDKEESKKGRTVGWVKVNMEGDIIGRKVDLNAHRSYKTLASALELMFMKPSIGLCTSIQRL

SEQ ID NO: 177005 - protein, 243 aa, Zea Mays
MAAVAIHQFAECITCHAWSPDQSMIAFCPNNHEVHIYKFFTDKWEKLHVLSKHDQMVSGIDWSKSSNKIVTVSHDRNSYVWTQEGSDWVPTLVILKLNRAALCVQWSPKENKFAVGSGAKSVCICYYEQENNWWISKVIRKKHESSVTSLAWHPNNIYLATSSTDGKCRVFSTFIKGVDTRGSKSSTSTDSKFGEQIAQLDLSSTWVFGVRWSPSGKTLAYAGSCSSTRLLLSKAQLHDLFHR

SEQ ID NO: 177006 - protein, 255 aa, Zea Mays
MAAVAIHQFAECITCHAWSPDQSMIAFCPNNHEVHIYKFFTDKWEKLHVLSKMVSGIDWSKSSNKIVTVSHDRNSYVWTQEGSDWVPTLVILKLNRAALCVQWSPKENKFAVGSGAKSVCICYYEQENNWWISKVIRKKHESSVTSLAWHPNNIYLATSSTDGKCRVFSTFIKGVDTRGSKSSTSTDSKFGEQIAQLDLSSTWVFGVRWSPSGKTLAYAGHNSMIYFIDEVESSPVAQNLALRDLPLRDVGSFCL

SEQ ID NO: 177007 - protein, 259 aa, Zea Mays
MEAAAAAPHLLHCGGFGRVAHLPALHRRGQFPRVRAVATEPKLSTSTSSSSRGRTRSRNDLSDTRFGEVSKEIQRVRKQMEQDEQLATLMRGLRGQNLRDEQFADDNVRLRLVEVESADNNEGLPLVYSPEIISAYWGKRPRAVATRVVQLLSVAGGFISHLVSDLINKKLKENEVARAIELREIVTSLGPAYIKLGQALSIRPDILSPAAMTELQKLCDKVPSFPDDIAMALLEEELGQPWQAIYSELSPSPIAAGRQ

SEQ ID NO: 177008 - protein, 564 aa, Zea Mays
MTELQKLCDKVPSFPDDIAMALLEEELGQPWQAIYSELSPSPIAAASLGQVYKGRLKETGELVAVKVQRPFVLETVTIDLFIIRNLGLVLRRFPQVSIDVVGLVDEWAARFFEELDYVNEGENGTYFADVMKEDLPQVVVPKTYHKYTSRKVLTTQWIEGEKLSQSTEDDVGSLVSVGVICYLKQLLDTGFFHADPHPGNMIRTPDGKLAILDFGLVTKLTDDQKYGMIEAIAHLIHRDYDAIVKDFVKLGFIPEGVNLDPILPVLAKVFDQALEGGGAKNINFQELAADLAQITFDYPFRIPPYFALIIRAIGVLEGIALVGDPEFAIVDEAYPYIAQRLLTDESPRLRSALRYTIYGKTGVFDAERFIDVMQAFENFIRAAKSGGGENLKGNMAELAELGGQPSTSLVPVFAMAVAQPEQPVKARAALAFLLSERGNFFREFILDEIVKAIDAISREQLIQIAASFGIGNAAPVFSMVPVRARALLPTITEEDRVILNNVEKVVKFLTSGTATPTVGGDVNVVSVVQELLPVLPGISSKILPDVLSRLSSRVFARIIRETFL

SEQ ID NO: 177009 - protein, 194 aa, Zea Mays
MEAAAAAPHLLHCGGFGRVAHLPALHRRGQFPRVRAVATEPKLSTSTSSSSRGRTRSRNDLSDTRFGEVSKEIQRVRKQMEQDEQLATLMRGLRGQNLRDEQFADDNVRLRLVEVESADNNEGLPLVYSPEIISAYWGKRPRAVATRVVQLLSVAGGFISHLVSDLINKKLKEVPIIFLPAAALPSLKPCKRAC

SEQ ID NO: 177010 - protein, 606 aa, Zea Mays
MSIAELEVEVAAGTFLKQSQVKIMAAVASIQDDQKTRVTIYLVPLREEFDTYTASLISDRFRDKKVQINSSIFGDYKVINVSYHGLQSPPSSVPGGSDPSGTEDPITAEVPDQMKKHKKSDILIVVVALGSSLGLLLTCAVVLILLVRWKKLGRLHEDMNPATTPTVNRRYGARSTLSTGMVSSASASAFSTVATCTTSVKTFSLGQLQKATDGFDSRRVLGQGGFGCVYHGTIEDGNEIAVKLLTREDRSGDREFIAEVEMLSRLHHRNLVKLIGICVDRSKRCLVYELIRNGSVESHLHGADKAKGKLNWDVRMKIALGAARGLAYLHEDSNPHVIHRDFKASNILLEEDFTPKVTDFGLAREASNATQPISTRVMGTFGYVAPEYAMTGHLLVKSDVYSYGVVLLELLSGRKPVSISESKDPENLVTWARPLLSHKEGLEKLIDPSLEGNFNFDNVAKVASIASMCVHADPSQRPFMGEAVQALKLIYSDPDEACDDSYSPRNSSDQDGGYDGDLVFGSGSWGFGASGSGCLDYRNSLPFVTMDYSSGRIEGPRDPRAALSAGSHAQPPVLQNRSGPLRVKKKLAASYRSRGSVSEHGHLPRH

SEQ ID NO: 177011 - protein, 448 aa, Zea Mays
MNPATTPTVNRRYGARSTLSTGMVSSASASAFSTVATCTTSVKTFSLGQLQKATDGFDSRRVLGQGGFGCVYHGTIEDGNEIAVKLLTREDRSGDREFIAEVEMLSRLHHRNLVKLIGICVDRSKRCLVYELIRNGSVESHLHGADKAKGKLNWDVRMKIALGAARGLAYLHEDSNPHVIHRDFKASNILLEEDFTPKVTDFGLAREASNATQPISTRVMGTFGYVAPEYAMTGHLLVKSDVYSYGVVLLELLSGRKPVSISESKDPENLVTWARPLLSHKEGLEKLIDPSLEGNFNFDNVAKVASIASMCVHADPSQRPFMGEAVQALKLIYSDPDEACDDSYSPRNSSDQDGGYDGDLVFGSGSWGFGASGSGCLDYRNSLPFVTMDYSSGRIEGPRDPRAALSAGSHAQPPVLQNRSGPLRVKKKLAASYRSRGSVSEHGHLPRH

SEQ ID NO: 177012 - protein, 725 aa, Zea Mays
MPSSQLDLVATRSRTILPNPAPSPSSPPEARSFGPRISPSYPPRALSPGSPDIDVRSHSHKPPHHRESNQGPSPSSAEAGCSSYICTEPLTATPIGSPCGCVEPISVIVDLDLAPYLLFMSIAELEVEVAAGTFLKQSQVKIMAAVASIQDDQKTRVTIYLVPLREEFDTYTASLISDRFRDKKVQINSSIFGDYKVINVSYHGLQSPPSSVPGGSDPSGTEDPITAEVPDQMKKHKKSDILIVVVALGSSLGLLLTCAVVLILLVRWKKLGRLHEDMNPATTPTVNRRYGARSTLSTGMVSSASASAFSTVATCTTSVKTFSLGQLQKATDGFDSRRVLGQGGFGCVYHGTIEDGNEIAVKLLTREDRSGDREFIAEVEMLSRLHHRNLVKLIGICVDRSKRCLVYELIRNGSVESHLHGADKAKGKLNWDVRMKIALGAARGLAYLHEDSNPHVIHRDFKASNILLEEDFTPKVTDFGLAREASNATQPISTRVMGTFGYVAPEYAMTGHLLVKSDVYSYGVVLLELLSGRKPVSISESKDPENLVTWARPLLSHKEGLEKLIDPSLEGNFNFDNVAKVASIASMCVHADPSQRPFMGEAVQALKLIYSDPDEACDDSYSPRNSSDQDGGYDGDLVFGSGSWGFGASGSGCLDYRNSLPFVTMDYSSGRIEGPRDPRAALSAGSHAQPPVLQNRSGPLRVKKKLAASYRSRGSVSEHGHLPRH

SEQ ID NO: 177013 - protein, 211 aa, Zea Mays
MEEVGGDMPLPKQKLSAAPYRDGGGVVLVATGSFNPPTYMHLRMFELAKDELELRGYSVLGGYMSPVNDAYKKKDLLPAAHRIRFCELASKSSSFVMVDPWEAMQNGYQRTLTVLSRIRNSLCKDGVADQGSLKVMLLCGSDLLESFTTPGVWILDQVRTICQDFGVVCIRREGKDVGKLIDNSDILQECRDNIISVDEIVPNQISSSRTA

SEQ ID NO: 177014 - protein, 244 aa, Zea Mays
MEEVGGDMPLPKQKLSAAPYRDGGGVVLVATGSFNPPTYMHLRMFELAKDELELRGYSVLGGYMSPVNDAYKKKDLLPAAHRIRFCELASKSSSFVMVDPWEAMQNGYQRTLTVLSRIRNSLCKDGVADQGSLKVMLLCGSDLLESFTTPGVWILDQVRTICQDFGVVCIRREGKDVGKLIDNSDILQECRDNIISVDEIVPNQISSSRVRSLSIKYLTSDEVIEYIREHKLFMEGNGGDIALL

SEQ ID NO: 177015 - protein, 101 aa, Zea Mays
MGRMPSKLTGNGPAAQTSSGKTSLGPSKARLTKNSLPNSQHKQMLFEVNFDQLIPLDNRICRAGNPRPQISTLLSDGSSDGRAFHLSLWVHNHSSIVCNIT

SEQ ID NO: 177016 - protein, 674 aa, Zea Mays
MLARGAALVEQLRILADVKRILANHAVASRRSRPAGDSPPPPPSADGRSNSGRHLLSSSSPFLQASPQSMLDGSAELPQARVAEEVMAALERNGVSFVGSGLGSKAKKDGGGKQLTGRAAALPATVRIDVPPTSPGRAALKVWEELVNVLRKDGADPAAAFVHRKKVQHAEKSIRDAFLALYRGLDLLNKFSSLNVKAFTKILKKFVKVSEQQRKTDLFSEKVKRSPFSSSDKVLQLADEVECIFSRHFAGNDRKVAMKYLKPQQPRNTHMITFLVGLFTGTFVSLFIIYSVLAHVAGIFSSTGNTAYMEIVYHVFSMFALISLHVFLYGCNLLAWKSSRISHNFIFDFSPSTALTHRDAFLLSASIMCTVVAALVVNLFLSNAGATYANALPGALLLLSAAALFCPFNVFYRSTRYCFMRVMRNIMLSPFYKDGCLVTQVLMADFFMADQLTSQIALLRHLEFTGCYFMAGTFTTHAYGSCTSSSQYKNLAYVLSFLPYYWRAMQCLRRYLEEGHDIDQLANAGKYISAMVAAAVRFKYAAAPTPFWMWMVIVSSTGATIYQLYWDFVMDWGFLDLRSKNRWLRDQLILKNKPIYYASMMLNLVLRLAWAESVMKLRLGMVESRLLDFSLASLEIIRRGHWNFYRLENEHLNNAGKFRAVKTVPLPFRELETD

SEQ ID NO: 177017 - protein, 359 aa, Zea Mays
MEIVYHVFSMFALISLHVFLYGCNLLAWKSSRISHNFIFDFSPSTALTHRDAFLLSASIMCTVVAALVVNLFLSNAGATYANALPGALLLLSAAALFCPFNVFYRSTRYCFMRVMRNIMLSPFYKVLMADFFMADQLTSQIALLRHLEFTGCYFMAGTFTTHAYGSCTSSSQYKNLAYVLSFLPYYWRAMQCLRRYLEEGHDIDQLANAGKYISAMVAAAVRFKYAAAPTPFWMWMVIVSSTGATIYQLYWDFVMDWGFLDLRSKNRWLRDQLILKNKPIYYASMMLNLVLRLAWAESVMKLRLGMVESRLLDFSLASLEIIRRGHWNFYRLENEHLNNAGKFRAVKTVPLPFRELETD

SEQ ID NO: 177018 - protein, 132 aa, Zea Mays
MAGEGNGDEGWRRSGIEVSALQFGYDGQPPLFARFNLCVAPGSRCLLVGANGSGKTTLLKILAGKHMVGGRDVVRVLNGSAFHDTQLVCNGDLSYLGGSWSRTIGSAGDVPLQGDFSAEHMIFGGERSWLIC

SEQ ID NO: 177019 - protein, 118 aa, Zea Mays
MMLLFGCSNCNACASQCAILNQRAPPLGSLPALLCLPFANIIRNALHMTITAYSGKETRQRAGLVSVGMAVLAVHARLLPPSDDVHVSLSLSLSVSLFVLSFDLVASRARLTNPCVQW

SEQ ID NO: 177020 - protein, 436 aa, Zea Mays
MDHVVGGKFKLGKKIGSGSFGELFLAVNVQTGEEVAVKLENVKTKHPQLHYESKLYMLLQGGTGIPHLKWFGVEGDYNVMVIDLLGPSLEDLFNYCSRKFSLKTVLMLADQMVYIIDYGLAKKYRDLQTHKHIPYRENKNLTGTARYASVNTHLGVEQSRRDDLESLGYVLMYFLRGSLPWQGLKAGTKKQKYDKISEKKMLTPVEVLCKSYPSEFISYFHYCRSLRFEDKPDYSYLKRLFRDLFIREGYQFDYVFDWTILKYPQIGSNPRTRAGERTSGAAGPSMDRIEKTPGEASGRRNPSGPVNQSDSYAQRPRETVSMSLKEIMHSTDRSGERTVERPRTSSRTGSASRRAVASSSRPATSSMEPSEQQYSRASRLFSSNSGSRPSSAQRVNPAPGESRATSLSRAAVARGSRDEPLHRSLELLSLGSGKRK

SEQ ID NO: 177021 - protein, 265 aa, Zea Mays
MYFLRGSLPWQGLKAGTKKQKYDKISEKKMLTPVEVLCKSYPSEFISYFHYCRSLRFEDKPDYSYLKRLFRDLFIREGYQFDYVFDWTILKYPQIGSNPRTRAGERTSGAAGPSMDRIEKTPGEASGRRNPSGPVNQSDSYAQRPRETVSMSLKEIMHSTDRSGERTVERPRTSSRTGSASRRAVASSSRPATSSMEPSEQQYSRASRLFSSNSGSRPSSAQRVNPAPGESRATSLSRAAVARGSRDEPLHRSLELLSLGSGKRK

SEQ ID NO: 177022 - protein, 60 aa, Zea Mays
MAGPACSAPEQHRQGGGGPLDSGGKRELAIKTHCTTLTTKYLYYSASVLLLPIRCSVKCL

SEQ ID NO: 177023 - protein, 1217 aa, Zea Mays
MMGTECIMATLGGDPEPSIPPGFGPFVALALQGIQNNAKSADAHSSSAQAAHCMEKDVEVLEHGSAHGWSDTPASTSGTHSCRRSLRNRPPIDYSQFDLISDEESDVESAEKGVGLVRRRRQLPKGVLRGCAQCADCQKVVARWNPSGARRPVLEEAPVFYPSEEEFKDTLKYIESIRSTAEPYGICRIVPPPSWKPPCLLKEKNIWECSKFCTRVQKVDKLQNRKSSKKGRRGGMMKKRRKLLELEDNNNINHNQTGVQQNQERFGFEPGPEFTLQTFKKYADDFREQYFKKEVSADSPPSVEDIEGEYWRIVEKPTEEIEVVYGADLETGTFGSGFPKSSPEVKSDVEHKYLESGWNLNNLPRLQGSVLSFEGGDISGVLVPWLYVGMCFSSFCWHVEDHHLYSLNYMHWGAPKMWYGVPGKDAVNLEAAMRKHLPDLFEEQPDLLHNLVTQFSTSLLKSEGVPVYRCVQHEGEFVLTFPRAYHAGFNCGFNCAEAVNVAPIDWLPIGQDAVELYRKQARKITVSHDKLLLGAAREAIRAHWDILFLKKNTADNLRWKSMCGLDSTICKSLKARIDLELAQRQNICSPSQSRKMDAEFDSTDRECALCYYDLHLSASGCPCCPGKYTCLVHAKQLCSCDWDKRFFLFRYDINELNMLADALGGKLSAIHRWGVSHLGLSLRSCVKREKDQDSKTPRRVTDGPRRSYMSQASTVSLAPSLVCNEQNNNGNKMLEKASLETDTCPFAEQIKSGTISLQEAHMKTEVSCTLNNSVSPEGHKSSLSLPVPSGQSLSSNLATRSLSTAGESVKNAYDLVVFKGSRESSRAGDCISSLGVHHNIPPIMIDQGSNMNPSMESSNNSHRLMASNTNATKFYSYKDQMHVTPESQASAASSQPFAGTVLRAQSVSQEASPSVFTSKPLIDSSLLKNTYVGLSSGGAHIGHPNFGNQQPSDECLQRKSESLSGSEAKGHSAALVQPALGNHHNGSGGAHKGLRMANVVHRFKSLVESLEIGVVLSGRLWSSSQAIFPKGFRSRVKYFSIVDPTQMAYYISEILDAGPQGPLFMVTLENCPGELFINVSPAKCWSMVRERLNMEIRRQLSTGRANLPALQPPGSVDGFEMFRLLSPAIVQAIEARDRDRICTEYWRSRPHVVTEDRATAPPQAQGPLHALRGLFQRANRNELLALRSLLVSNISPDDFSRRQATQILDEEIAKQWR

SEQ ID NO: 177024 - protein, 884 aa, Zea Mays
MKKVFDQTVRDLKREVNKKVLKVPGIEQKILDATSNEPWGPHGSLLADIAQATNNYHEYQMIMHIVWKRVSDTGKNWRHVYKGLIVLDYLVAHGTERVIDDIREHAYQISALADFQYIDSSGRDQGSNVRRKSQSLVSLVNDKERIQEVREKALSTKDKYRSAFAPSGRSPGGYGGGYDNDRYEGSYGSRYDNRNGNGRGDYGYRDDDRYGGPGGTPNREGDRYSRDSNERYGRDYREDEYKGSHSNHEYAEGAGRRSYGQERDSYGDGEAYSSRGRGSNADDPTQDDRPIERKLSNQQISSPPPNYEDVTRDGQDNLHDDRNGGSVPAAVSRVPSPSVPATTVPAVQVNGVHDSTVEDVPAPPTAHAEPNGFDEFDPRGSVPDSSPPVNPASVANSLEMDLFGSDPISSLALVSVPQPTTTSNVEAPANSGFETNSFVGMPPASTGFGEIDASNPFGDPTPFKAVLDESPALPQTHAAPAGSFQPTGPGTDVNPFQPASAASFGFGDTLGDLTFAPNAAPELQDMFANTASLPSEAPQAAPAFSYSQGPHPGAAIQSQFPQTVAPSFPPSQVPQSVTPNLPPGQSNFFLQSASGSGIDSLSGVPTQNGAPSYIPPQNSQFTAPANQQPLQPSFIPQTSTPALQPALISRGASQPLGVPNSVPTSGSFPLQSSSSAPPETIVSALQVNQTEPVKKFEPRSKLWSDTLSRGLVNLDISGPKANPHADIGVDFDSINRKEKRQEKKINQAPVVSTVTMGKAMGAGSGIGRAGVGAMAPPPNQMGAGRGMGPGAGAGYGGGMGMNRPMGMGMGMNQQQMRMGMNQQPMGMGMGMNQQPMGGMNMGMGMNQGMPMRPPMGMGPGGMPGAGYNQMGAAYGGQQPYGGYR

SEQ ID NO: 177025 - protein, 882 aa, Zea Mays
MKKVFDQTVRDLKREVNKKVLKVPGIEQKILDATSNEPWGPHGSLLADIAQATNNYHEYQMIMHIVWKRVSDTGKNWRHVYKGLIVLDYLVAHGTERVIDDIREHAYQISALADFQYIDSSGRDQGSNVRRKSQSLVSLVNDKERIQEVREKALSTKDKSAFAPSGRSPGGYGGGYDNDRYEGSYGSRYDNRNGNGRGDYGYRDDDRYGGPGGTPNREGDRYSRDSNERYGRDYREDEYKGSHSNHEYAEGAGRRSYGQERDSYGDGEAYSSRGRGSNADDPTQDDRPIERKLSNQQISSPPPNYEDVTRDGQDNLHDDRNGGSVPAAVSRVPSPSVPATTVPAVQVNGVHDSTVEDVPAPPTAHAEPNGFDEFDPRGSVPDSSPPVNPASVANSLEMDLFGSDPISSLALVSVPQPTTTSNVEAPANSGFETNSFVGMPPASTGFGEIDASNPFGDPTPFKAVLDESPALPQTHAAPAGSFQPTGPGTDVNPFQPASAASFGFGDTLGDLTFAPNAAPELQDMFANTASLPSEAPQAAPAFSYSQGPHPGAAIQSQFPQTVAPSFPPSQVPQSVTPNLPPGQSNFFLQSASGSGIDSLSGVPTQNGAPSYIPPQNSQFTAPANQQPLQPSFIPQTSTPALQPALISRGASQPLGVPNSVPTSGSFPLQSSSSAPPETIVSALQVNQTEPVKKFEPRSKLWSDTLSRGLVNLDISGPKANPHADIGVDFDSINRKEKRQEKKINQAPVVSTVTMGKAMGAGSGIGRAGVGAMAPPPNQMGAGRGMGPGAGAGYGGGMGMNRPMGMGMGMNQQQMRMGMNQQPMGMGMGMNQQPMGGMNMGMGMNQGMPMRPPMGMGPGGMPGAGYNQMGAAYGGQQPYGGYR

SEQ ID NO: 177026 - protein, 65 aa, Zea Mays
MDESAEWRMKYDKEIEKNRQLHDELSKVKASLAGAARHLELLQKDNELQKRQTESLRQQCNCTLH

SEQ ID NO: 177027 - protein, 101 aa, Zea Mays
MNQPLRVYSMVKYAAIARGDAEIFMKFARAGYKEKIWDHAAGVVIIQEAGGVVTDAGGRPLDFSRGVYLEGLDRGIIACSGALLHQRILNAVDASWNSSTL

SEQ ID NO: 177028 - protein, 789 aa, Zea Mays
MALNQASDVSNRPEGLALLTRIAEDTDCCDSGPPLPDHSPLEKSLISKILRLRGVLDLPCRSSCDALDQLLLDTLGVLKVAYPKCLSGVSGNHTSSVREGLVHLHQVLVLVQDCYSKIKQLPNSGSEKQTIMESESLDHVGKRVIEMLDQVTPVVKEMFSSMESSSSAQAAAAAAAWPEDLPERRTLPPVLCRTTSHHPSDGDEVAMHTGRCKVEAPAPGHETDEGVCTREEDGQTSSREPLSAPIPTAEFLPLQPTLSSVSPHLLSAPPPSPMPVVGLSMLLQSWEATQDGHATAAAVVPPAGVAQPAEAAPTAHKDTTPVGTSMEVEGSTSSVLLEAGQPEPCVDSPNGSTQAPAQGGNAAVPNVPPPPPPVPAHRGRSQEGPSMDEPGPAVTDTPPRPPCEMQGEPPALPPAAAKVLPSPSPSPSPPPLPAHRGRFQEGASMDEPGQAVTDTPPRPPCEVQGGPPAPPPAAAKVSPAPPPPPGSISAAVRGKKAASKLKRSTQMGSLYRRLRDRVEGSGSTHGDRMRQNRKRPRTVGASKSDAGGQGMADALAEMAKRSTYFRQIEEDAEKYAAVILELKDAIGSFQSKDMSELVRFRQHVERQLVCLTDETQVLARFEGFPSKKLEALRTAAALYSKLDGTASRLQCWKHTAGPVSAQLDRLESYFNKVKDEVDMVERNRDEEMKRLQSQGVHFDFGVLVRIKEGMVDLSSACMELALKESQDARETPTPTRAKWASSHGDGESRMLWRVFQLAFRVYNFAGGQDERADRLTSILAHEIEERALL

SEQ ID NO: 177029 - protein, 56 aa, Zea Mays
MQKKKAKPIYIARRNQTKMHEQIAILTEARRIQRSNLHLQKHIDRYSLRFFLVVAG

SEQ ID NO: 177030 - protein, 88 aa, Zea Mays
MALSRSMRACLHSGRLALLAILVSGGIVLQILLGELHEILDGRINSREHRHSVDPEACGRHWMGSPDDGAVILCGLWRGNPVVPPDER

SEQ ID NO: 177031 - protein, 130 aa, Zea Mays
MVSRDSSMPSVVAVYPIGQVVMASTTDAVLQQGSRYRGNPTKLCPDPDSATDVDEAMFGRVSSNFCFPRELKMQKVPKQDCFFKQTKAPKPQLYTESIEAHSEQLSHDASPGDDAYGKATAPLTMALSYN

SEQ ID NO: 177032 - protein, 505 aa, Zea Mays
MGAGSSRADAPSRRRARLGLGGCFGTRSSSSPAAAAEAHDGGSFTLAGSSSSSAIEVQSGRPVRALNFQASLAAKDLQISTASSPRLHSSSSTISHHLRFNHLNCHENKEDGLGTENAETSGLESSSRKAVMVRGSFSNEAVNSDMSGEGISFIGSELENIPSTVSTNETGGSAAESGLGPSLMASERIMSDLEGEVSPQGTSSTTAMTSERSDVSQASLTSMFPNSSIASSVIVEPMPDPISTRADVPIFSGPHGEPGGSILHDDMMSIFSNDGLGRSRDSSSSETRRSHRRILWDTFSRRGSRGYPEFDADDLGFYSTWLDLGDDIFEELGESRYFHRRRHGSIRIREHRRAVFDSGNEQGTAACPLGIHQTGRCTCDSFLVAEESSARASISRIVMLTEALFEVLDEIHRQPASLSLSMVSVQAPESVVNSLPCKSYKKLEAPQRSDDMEQCHICLTEYEDGDQIRILPCKHEFHLQCVDKWLKEIHRVCPLCRGDVCEVAS

SEQ ID NO: 177033 - protein, 412 aa, Zea Mays
MGAGSSRADAPSRRRARLGLGGCFGTRSSSSPAAAAEAHDGGSFTLAGSSSSSAIEVQSGRPVRALNFQASLAAKDLQISTASSPRLHSSSSTISHHLRFNHLNCHENKEDGLGTENAETSGLESSSRKAVMVRGSFSNEAVNSDMSGEGISFIGSELENIPSTVSTNETGGSAAESGLGPSLMASERIMSDLEGEVSPQGTSSTTAMTSERSDVSQASLTSMFPNSSIASSVIVEPMPDPISTRADVPIFSGPHGEPGGSILHDDMMSIFSNDGLGRSRDSSSSETRRSHRRILWDTFSRRGSRGYPEFDADDLGFYSTWLDLGDDIFEELGESRYFHRRRHGSIRIREHRRAVFDSGNEQGTAACPLGIHQTGRCTCDSFLVAEESSARASISRIVMLTEALFEVPYLPN

SEQ ID NO: 177034 - protein, 493 aa, Zea Mays
MGAGSSRADAPSRRRARLGLGGCFGTRSSSSPAAAAEAHDGGSFTLAGSSSSSAIEVQSGRPVRALNFQASLAAKDLQISTASSPRLHSSSSTISHHLRFNHLNCHENKEDGLGTENAETSGLESSSRKAVMVRGSFSNEAVNSDMSGEGISFIGSELENIPSTVSTNETGGSAAESGLGPSLMASERIMSDLEGEVSPQGTSSTTAMTSERSDVSQASLTSMFPNSSIASSVIVEPMPDPISTRADVPIFSGPHGEPGGSILHDDMMSIFSNDGLGRSRDSSSSETRRSHRRILWDTFSRRGSRGYPEFDADDLGFYSTWLDLGDDIFEELGESRYFHRRRHGSIRVSQYSRSRIREHRRAVFDSGNEQGTAACPLGIHQTGRCTCDSFLVAEESSARASISRIVMLTEALFEAPESVVNSLPCKSYKKLEAPQRSDDMEQCHICLTEYEDGDQIRILPCKHEFHLQCVDKWLKEIHRVCPLCRGDVCEVAS

SEQ ID NO: 177035 - protein, 382 aa, Zea Mays
MVRGSFSNEAVNSDMSGEGISFIGSELENIPSTVSTNETGGSAAESGLGPSLMASERIMSDLEGEVSPQGTSSTTAMTSERSDVSQASLTSMFPNSSIASSVIVEPMPDPISTRADVPIFSGPHGEPGGSILHDDMMSIFSNDGLGRSRDSSSSETRRSHRRILWDTFSRRGSRGYPEFDADDLGFYSTWLDLGDDIFEELGESRYFHRRRHGSIRVSQYSRSRIREHRRAVFDSGNEQGTAACPLGIHQTGRCTCDSFLVAEESSARASISRIVMLTEALFEVLDEIHRQPASLSLSMVSVQAPESVVNSLPCKSYKKLEAPQRSDDMEQCHICLTEYEDGDQIRILPCKHEFHLQCVDKWLKEIHRVCPLCRGDVCEVAS

SEQ ID NO: 177036 - protein, 54 aa, Zea Mays
MSTRHQVSQDQNGSPPTESSVPHHPASCQVDTRYSRHLSTPIAGRSFWYWSSRG

SEQ ID NO: 177037 - protein, 102 aa, Zea Mays
MTKVDSIGTKRPRQPIQSFHPAASKRRTCYVSSSPRFHGFRSEGRWCRGWAAQNTKHPTTLIGLSMTRYSTWTFYQTPYGCGWCGIWCGITGGCPAARGCYR

SEQ ID NO: 177038 - protein, 407 aa, Zea Mays
MSGWDEGAVFYSDQAQFPRGGPGGDPAADLTRHSALRKFKEFLRGFTGPTGDFPYRESLVHNRDHVTVATEDLDAFDAELSDKIRKSPADYLPLFETAASEVLASLRSKVAGETGEMEEPVPGDVQIFLSSKENCLSMRSVGADYMSKLVKIAGITIAASRVKAKATHVTLICKNCRSVRTVPCRPGLGGAIVPRSCDHVPQPGEEPCPLDPWIAVPDKSKYVDLQTLKLQENPEDVPTGELPRNMLLSVDRHLVQTIVPGTRLTVVGIYSVYQASTTQKGAVGVKQPYIRVVGLEQSRDNNSNGPSNFTLDEEMEFKEFAQRPDAYAKLCSMIGPSIYGHSDVKKAIACLLFGGSKKRLPDGVRLRGDIHVLLLGDPSTAKSQRRLPLLQSIHLAKVHLQLVLQHL

SEQ ID NO: 177039 - protein, 586 aa, Zea Mays
MSGWDEGAVFYSDQAQFPRGGPGGDPAADLTRHSALRKFKEFLRGFTGPTGDFPYRESLVHNRDHVTVATEDLDAFDAELSDKIRKSPADYLPLFETAASEVLASLRSKVAGETGEMEEPVPGDVQIFLSSKENCLSMRSVGADYMSKLVKIAGITIAASRVKAKATHVTLICKNCRSVRTVPCRPGLGGAIVPRSCDHVPQPGEEPCPLDPWIAVPDKSKYVDLQTLKLQENPEDVPTGELPRNMLLSVDRHLVQTIVPGTRLTVVGIYSVYQASTTQKGAVGVKQPYIRVVGLEQSRDNNSNGPSNFTLDEEMEFKEFAQRPDAYAKLCSMIGPSIYGHSDVKKAIACLLFGGSKKRLPDGVRLRGDIHVLLLGDPSTAKSQFLKFVEKTAPIAVYTSGKGSSAAGLTASVTRDSSSREFYLEGGAMVLADGGVVCIDEFDKMRPEDRVAIHEAMEQQTISIAKAGITTVLNSRTSVLAAANPIAGRYDDLKTAQDNIDLQTTILSRFDQIFIVKDIRMYDQDKRIASHIIKVHASGAAASSANTEGSEGENWLKSTAVQHANHGFQKKQLRCCRTNISRLDRK

SEQ ID NO: 177040 - protein, 352 aa, Zea Mays
MLLSVDRHLVQTIVPGTRLTVVGIYSVYQASTTQKGAVGVKQPYIRVVGLEQSRDNNSNGPSNFTLDEEMEFKEFAQRPDAYAKLCSMIGPSIYGHSDVKKAIACLLFGGSKKRLPDGVRLRGDIHVLLLGDPSTAKSQFLKFVEKTAPIAVYTSGKGSSAAGLTASVTRDSSSREFYLEGGAMVLADGGVVCIDEFDKMRPEDRVAIHEAMEQQTISIAKAGITTVLNSRTSVLAAANPIAGRYDDLKTAQDNIDLQTTILSRFDQIFIVKDIRMYDQDKRIASHIIKVHASGAAASSANTEGSEGENWLKRYIQYCRATCKPRLSEKAAEMLQNKYIEIRQGGLQQYPSL

SEQ ID NO: 177041 - protein, 403 aa, Zea Mays
MSGWDEGAVFYSDQAQFPRGGPGGDPAADLTRHSALRKFKEFLRGFTGPTGDFPYRESLVHNRDHVTVATEDLDAFDAELSDKIRKSPADYLPLFETAASEVLASLRSKVAGETGEMEEPVPGDVQIFLSSKENCLSMRSVGADYMSKLVKIAGITIAASRVKAKATHVTLICKNCRSVRTVPCRPGLGGAIVPRSCDHVPQPGEEPCPLDPWIAVPDKSKYVDLQTLKLQENPEDVPTGELPRNMLLSVDRHLVQTIVPGTRLTVVGIYSVYQASTTQKGAVGVKQPYIRVVGLEQSRDNNSNGPSNFTLDEEMEFKEFAQRPDAYAKLCSMIGPSIYGHSDVKKAIACLLFGGSKKRLPDGVRLRGDIHVLLLGDPSTAKSQASIVWRYHSIQFDGKIMCQ

SEQ ID NO: 177042 - protein, 723 aa, Zea Mays
MEAILVNALDCLTMMCKSGYLRKRVIVGLLVKVLPLLRYTINWVKQSAVRFVAACSESLGSVDTYVYLSPQLRQFLHREPPSLDSETALLSCLKPPLPKSMFYVPLEDAQDIGNILLKSSGKKEQILHGGRYSGMAQSGSLGNLEDIRRLKGTNISSSVSLDVKDSFSFGKSLYSGFALHASAANSSFYDGLSKGIPSYSFCIDNRGLGETHMVPDSSVYKASIRLPWLEPNRPGMQTRDDHFSSKRRDLSINDSLKSNSSLQGDSISNSDTGGLPFSRSAVNLETGWKPRGILVAHLQEHRFSVNDIAVSNDNTFFVTASDDSSVKIWDTRKLEKDIAFRSRLTYSVGNSRALCTAMVHGTSQVIVGGSNGTLHLFSVDCARSVGSVVERYAGIVGVKRNDIKEGAILSVVNCSPDSFSPTVLFSTEHCGIHKWDTRTNSEFWYFKSSPEEGYISALVVGQCGNWFISGSSRGVLTLWDNRFLLPVNSWNYSIVSPIEKLCLLIPPPSSISSAGRPLVFVAAGCNEVSLWNAENGSCHQMFRTASTDNEAVMSKAPSRPVNKPIIKDIIRARNYKYRIDELNDPPVRRPGIRSLLPLPGGDLLTGGTDLKIRYWDQARPEQSFCIAGPSAKKVRSAKADILEKAAGNDECYDIRSSFGVQVVQEMYKQNTTVSGLTPKTQFAEAAADSAGCHRDAILALASFNLSSQRLISASRDGAVKVWK

SEQ ID NO: 177043 - protein, 1557 aa, Zea Mays
MGNKIARTTQASATEYYLHDLPSTYNLVLLDVVSRGRFLKSVRCKHDEGLLLVKVYFKRTGEPIDLKEHERRLERIRKAFKGIDGSHVWPFQVWLQTDKAAYLLRQYFFNNLHDRLSTRPFLSQIAKKWLAFQLIHAVEQSHSKGICHGDIKCENVLVTSWNWLYLADFASFKPTYIPDDDPSDFSFYFDTGGRRRCYLAPEVKITYLGLYNNTLISTLGIIRMPKFVGCCQSLGRDFRSICRVLPEHSKAAGEEGGGAGEGRTRDCALRIVYRIGTGRRFYEHGGESQVAADAPLQPSMDIFSLGCVLAELFLEGQPLFELSQLLAYRRGQYDPIHTLEKIQDTGIRDMILHMTQLEPKKRLPCRSYLQKYEIVVFPFYFSKFLHKFFSDIVPLDSDARVEKTQENFEKIHEIMMGSSTIEQIERSTSCEHSEPSGRKGMGGETLYSPGDYRNSTSIGKKNTSVDHQHIVGGINFLLKEVESRSNNTSTKVTKDTEHFVAPSISCASGVQSLQLVNPAGRQIGSGLMSQNNAVSHVKKISKTNLCSLVAAYDDQSDTYSFDIFQQIDTKVSCEGMVLLVSLLCSCIRSVKKPELRRASLILLKFSSTYIDDDRRLQLVLPYVIAMLSDPSAIVRCAALETLCDVLCLVQDFPISDTVIFPEYVLPMLSLLPDDTEESVRVCYASNIHKLALTAYRFLLRSRSIANIRPLDESLVAHRSQSADSPAKRQDIFFRQLAELRKSIYEIVQDLVMGQKQTPNTRRALLQDIGYLCYFFGHKQSNDFLLPILPAFLNDHDEQLRAVFFAQIVYVCYFIGARSVEEYLLPYLEQALSDGMEAILVNALDCLTMMCKSGYLRKRVIVGLLVKVLPLLRYTINWVKQSAVRFVAACSESLGSVDTYVYLSPQLRQFLHREPPSLDSETALLSCLKPPLPKSMFYVPLEDAQDIGNILLKSSGKKEQILHGGRYSGMAQSGSLGNLEDIRRLKGTNISSSVSLDVKDSFSFGKSLYSGFALHASAANSSFYDGLSKGIPSYSFCIDNRGLGETHMVPDSSVYKASIRLPWLEPNRPGMQTRDDHFSSKRRDLSINDSLKSNSSLQGDSISNSDTGGLPFSRSAVNLETGWKPRGILVAHLQEHRFSVNDIAVSNDNTFFVTASDDSSVKIWDTRKLEKDIAFRSRLTYSVGNSRALCTAMVHGTSQVIVGGSNGTLHLFSVDCARSVGSVVERYAGIVGVKRNDIKEGAILSVVNCSPDSFSPTVLFSTEHCGIHKWDTRTNSEFWYFKSSPEEGYISALVVGQCGNWFISGSSRGVLTLWDNRFLLPVNSWNYSIVSPIEKLCLLIPPPSSISSAGRPLVFVAAGCNEVSLWNAENGSCHQMFRTASTDNEAVMSKAPSRPVNKPIIKDIIRARNYKYRIDELNDPPVRRPGIRSLLPLPGGDLLTGGTDLKIRYWDQARPEQSFCIAGPSAKKVRSAKADILEKAAGNDECYDIRSSFGVQVVQEMYKQNTTVSGLTPKTQFAEAAADSAGCHRDAILALASFNLSSQRLISASRDGAVKVWK

SEQ ID NO: 177044 - protein, 1208 aa, Zea Mays
MILHMTQLEPKKRLPCRSYLQKYEIVVFPFYFSKFLHKFFSDIVPLDSDARVEKTQENFEKIHEIMMGSSTIEQIERSTSCEHSEPSGRKGMGGETLYSPGDYRNSTSIGKKNTSVDHQHIVGGINFLLKEVESRSNNTSTKVTKDTEHFVAPSISCASGVQSLQLVNPAGRQIGSGLMSQNNAVSHVKKISKTNLCSLVAAYDDQSDTYSFDIFQQIDTKVSCEGMVLLVSLLCSCIRSVKKPELRRASLILLKFSSTYIDDDRRLQLVLPYVIAMLSDPSAIVRCAALETLCDVLCLVQDFPISDTVIFPEYVLPMLSLLPDDTEESVRVCYASNIHKLALTAYRFLLRSRSIANIRPLDESLVAHRSQSADSPAKRQDIFFRQLAELRKSIYEIVQDLVMGQKQTPNTRRALLQDIGYLCYFFGHKQSNDFLLPILPAFLNDHDEQLRAVFFAQIVYVCYFIGARSVEEYLLPYLEQALSDGMEAILVNALDCLTMMCKSGYLRKRVIVGLLVKVLPLLRYTINWVKQSAVRFVAACSESLGSVDTYVYLSPQLRQFLHREPPSLDSETALLSCLKPPLPKSMFYVPLEDAQDIGNILLKSSGKKEQILHGGRYSGMAQSGSLGNLEDIRRLKGTNISSSVSLDVKDSFSFGKSLYSGFALHASAANSSFYDGLSKGIPSYSFCIDNRGLGETHMVPDSSVYKASIRLPWLEPNRPGMQTRDDHFSSKRRDLSINDSLKSNSSLQGDSISNSDTGGLPFSRSAVNLETGWKPRGILVAHLQEHRFSVNDIAVSNDNTFFVTASDDSSVKIWDTRKLEKDIAFRSRLTYSVGNSRALCTAMVHGTSQVIVGGSNGTLHLFSVDCARSVGSVVERYAGIVGVKRNDIKEGAILSVVNCSPDSFSPTVLFSTEHCGIHKWDTRTNSEFWYFKSSPEEGYISALVVGQCGNWFISGSSRGVLTLWDNRFLLPVNSWNYSIVSPIEKLCLLIPPPSSISSAGRPLVFVAAGCNEVSLWNAENGSCHQMFRTASTDNEAVMSKAPSRPVNKPIIKDIIRARNYKYRIDELNDPPVRRPGIRSLLPLPGGDLLTGGTDLKIRYWDQARPEQSFCIAGPSAKKVRSAKADILEKAAGNDECYDIRSSFGVQVVQEMYKQNTTVSGLTPKTQFAEAAADSAGCHRDAILALASFNLSSQRLISASRDGAVKVWK

SEQ ID NO: 177045 - protein, 1310 aa, Zea Mays
MGNKIARTTQASATEYYLHDLPSTYNLVLLDVVSRGRFLKSVRCKHDEGLLLVKVYFKRTGEPIDLKEHERRLERIRKAFKGIDGSHVWPFQVWLQTDKAAYLLRQYFFNNLHDRLSTRPFLSQIAKKWLAFQLIHAVEQSHSKGICHGDIKCENVLVTSWNWLYLADFASFKPTYIPDDDPSDFSFYFDTGGRRRCYLAPERFYEHGGESQVAADAPLQPSMDIFSLGCVLAELFLEGQPLFELSQLLAYRRGQYDPIHTLEKIQDTGIRDMILHMTQLEPKKRLPCRSYLQKYEIVVFPFYFSKFLHKFFSDIVPLDSDARVEKTQENFEKIHEIMMGSSTIEQIERSTSCEHSEPSGRKGMGGETLYSPGDYRNSTSIGKKNTSVDHQHIVGGINFLLKEVESRSNNTSTKVTKDTEHFVAPSISCASGVQSLQLVNPAGRQIGSGLMSQNNAVSHVKKISKTNLCSLVAAYDDQSDTYSFDIFQQIDTKVSCEGMVLLVSLLCSCIRSVKKPELRRASLILLKFSSTYIDDDRRLQLVLPYVIAMLSDPSAIVRCAALETLCDVLCLVQDFPISDTVIFPEYVLPMLSLLPDDTEESVRVCYASNIHKLALTAYRFLLRSRSIANIRPLDESLVAHRSQSADSPAKRQDIFFRQLAELRKSIYEIVQDLVMGQKQTPNTRRALLQDIGYLCYFFGHKQSNDFLLPILPAFLNDHDEQLRAVFFAQIVYVCYFIGARSVEEYLLPYLEQALSDGMEAILVNALDCLTMMCKSGYLRKRVIVGLLVKVLPLLRYTINWVKQSAVRFVAACSESLGSVDTYVYLSPQLRQFLHREPPSLDSETALLSCLKPPLPKSMFYVPLEDAQDIGNILLKSSGKKEQILHGGRYSGMAQSGSLGNLEDIRRLKGTNISSSVSLDVKDSFSFGKSLYSGFALHASAANSSFYDGLSKGIPSYSFCIDNRGLGETHMVPDSSVYKASIRLPWLEPNRPGMQTRDDHFSSKRRDLSINDSLKSNSSLQGDSISNSDTGGLPFSRSAVNLETGWKPRGILVAHLQEHRFSVNDIAVSNDNTFFVTASDDSSVKIWDTRKLEKDIAFRSRLTYSVGNSRALCTAMVHGTSQVIVGGSNGTLHLFSVDCARSVGSVVERYAGIVGVKRNDIKEGAILSVVNCSPDSFSPTVLFSTEHCGIHKWDTRTNSEFWYFKSSPEEGYISALVVGQCGNWFISGSSRGVLTLWDNRFLLPVNSWNYSIVSPIEKLCLLIPPPSSISSAGRPLVFVAAGCNEVSLWNAENGSCHQAFVLCYPYQVVIC

SEQ ID NO: 177046 - protein, 973 aa, Zea Mays
MMGSSTIEQIERSTSCEHSEPSGRKGMGGETLYSPGDYRNSTSIGKKNTSVDHQHIVGGINFLLKEVESRSNNTSTKVTKDTEHFVAPSISCASGVQSLQLVNPAGRQIGSGLMSQNNAVSHVKKISKTNLCSLVAAYDDQSDTYSFDIFQQIDTKVSCEGMVLLVSLLCSCIRSVKKPELRRASLILLKFSSTYIDDDRRLQLVLPYVIAMLSDPSAIVRCAALETLCDVLCLVQDFPISDTVIFPEYVLPMLSLLPDDTEESVRVCYASNIHKLALTAYRFLLRSRSIANIRPLDESLVAHRSQSADSPAKRQDIFFRQLAELRKSIYEIVQDLVMGQKQTPNTRRALLQDIGYLCYFFGHKQSNDFLLPILPAFLNDHDEQLRAVFFAQIVYVCYFIGARSVEEYLLPYLEQALSDGMEAILVNALDCLTMMCKSGYLRKRVIVGLLVKVLPLLRYTINWVKQSAVRFVAACSESLGSVDTYVYLSPQLRQFLHREPPSLDSETALLSCLKPPLPKSMFYVPLEDAQDIGNILLKSSGKKEQILHGGRYSGMAQSGSLGNLEDIRRLKGTNISSSVSLDVKDSFSFGKSLYSGFALHASAANSSFYDGLSKGIPSYSFCIDNRGLGETHMVPDSSVYKASIRLPWLEPNRPGMQTRDDHFSSKRRDLSINDSLKSNSSLQGDSISNSDTGGLPFSRSAVNLETGWKPRGILVAHLQEHRFSVNDIAVSNDNTFFVTASDDSSVKIWDTRKLEKDIAFRSRLTYSVGNSRALCTAMVHGTSQVIVGGSNGTLHLFSVDCARSVGSVVERYAGIVGVKRNDIKEGAILSVVNCSPDSFSPTVLFSTEHCGIHKWDTRTNSEFWYFKSSPEEGYISALVVGQCGNWFISGSSRGVLTLWDNRFLLPVNSWNYSIVSPIEKLCLLIPPPSSISSAGRPLVFVAAGCNEVSLWNAENGSCHQAFVLCYPYQVVIC

SEQ ID NO: 177047 - protein, 370 aa, Zea Mays
MYTQKDGEDEAATPREQQPANHLSLEPATASSTSARPLAHAHARNRQLQQPASPARPAIVGGGPCRGGSRGKGRMGNVTSSVAARLAFFPPEPATYGVEPAAENGALLRMTGVLPDAGVEVRALPTRAGTRVVSAFWRHPAARLTLLYSHGNAADLGQMLGLFLELRAHLRVNIMSYDYSGYGASTGKPSEYNTYNDIEAVYDCLRTEYGIEEEDLILYGQSVGSGPTLHLASRLEKLRGVVLHSGILSGIRVLYPVKVTLWFDIFKNIDKIKQVDCPVLVIHGTADDIVDLAHGKRLWELAKDKYEPLWIKGGGHCNLETYPEYIRHMRKFISAMEKLAKDSSKAAQAPPPSSMAAEERHTKCLRFGKR

SEQ ID NO: 177048 - protein, 70 aa, Zea Mays
MRCRRPGPGKETRCSSNPSSCIIRVRLSSDFRVESRQSGVTDRPVAAVVCCTCWSSGLERCLCFPRGATD

SEQ ID NO: 177049 - protein, 769 aa, Zea Mays
MFDVWSVVGWWDRWQLRVLVLGSLGIQWFLLVAAPMRKYTIRPGLRLCIWLAYISSDALAIYALATLFNRHARATSSSSCDGGANSKARILEVLWAPVLLIHLGGQEELTAYTIEDNELWTRHTVTLVSQVAVALYAFYKSWPNPSDWKLLASAILLFIIGVVSFSEKPWALKKASINRLASVSATIQGTKKRTRLAVYLDDLLFSDWYSCSRATEKSSSSGSSLPAAAAAAGVGWHDCFSFTEPSNKGHGDHVGLSEADKVYMVLSDMSLSAAADDLVLRGRARNVEDVLRPLSTKAEQALKRWLRGAFGLIYTRANLVFTRTYLVYHVLVVPILHVAALTLFATSDKHGYDRTDVKITYVLLCLTAALDVLAVFVRQLLYGAMSAKGVPALCETVPGYNLVDAVTRRRQKDIGWLFRCAAAMGCKEEYLEYCKCGGGQQHYTLYKNVSKMVLADLVDAQGRDLANYRVFTVPYASPASTAAGPAVEQQRASPAGAANWALSEEQQKLCGRKVRDTLRGSFDRSVLVWHIATDLCFRMEQVPPDADKEEDSHWLRIKCTEAISCYMARLLDSHPDMLLTGSRRHLVSEALDELESIFDRTMVDRSGKPPGKDDLHKIIDDVARVRFQVPVGVAHGAADDDGEEAVQSFFHIPEACGLAMELLQLEASTRWRVMYRVWLGMLFYSASMCRGYLHAKSLGEGGEFLSYVWLVLSLKGAKTLADKLQMLEVEGDDRQGRRVEMRNEELQIRGDDREPAPRSMPTTSSLFQT

SEQ ID NO: 177050 - protein, 132 aa, Zea Mays
MAARPSYSFGPRLSGSAVSSSPCSLLLARPSSLATAPWIFLRTRRRRVLWCLCIVKYLQRCGFPVPSGRAQLSQLVGVPSSPCLRAALSCCGFLLPCRARSISFSLVVPSSPLHAVASCFLLVSVPSRLARL

SEQ ID NO: 177051 - protein, 111 aa, Zea Mays
MGALAEPPQDSSADGVILIKDMAEWQKHWDQTAPYNKLAMDKPFEKLATQYKGRADFCKLDVDNFELLARICGVEGAYPTFVLFKKCAQVGKVVGLKEDDLERIVQRAIIS

SEQ ID NO: 177052 - protein, 134 aa, Zea Mays
MEPQTKIDILVATPERLMDHINMTNGFSLEHLQYLVIDETDRMVREAYQSWLPTVIQLTHSISQGHSWHDIDSQTLLHPLTSIRRSGVERVFKGKCYPRLGKMVLSATLTQDPSKLSQLELHHPLLLNSGKKRY

SEQ ID NO: 177053 - protein, 117 aa, Zea Mays
MVLEPSSPPAPPLSSCKGPLAPSTEPTEGRGRRDGGGDDDVEEEMAEAKEIGIRHSPLPCRYCMAVPMSSSISLATCCSVTRRLLPPPPLSPLVAPSPPSSLVPFPALSSPSDAMLA

SEQ ID NO: 177054 - protein, 288 aa, Zea Mays
MGGTAAPMQAARRSNDTTPPASDMQADAHPAHEPLAGRVAIVTGGAGGIGSAVAAHLASLGARVVVGFIGDPAPADQLVAALNNSSPAGNSDPRAVAVAADVSDPAQVARLFDAAEAAFGPELHVLVAAAGVQDATYPRIADTSPEQWDLAFGVNTRGTFLCCREAARRLARGGAGRIVTLSSSNVGSLRPGYGAYVASKAAVEAMTKVLAKELGGMGITANAVAPGPVATPMFYAGKSEERVAAAARECPMGRLAEPADVAPVVGFLCTDAAGWINGQVIRVNGGYV

SEQ ID NO: 177055 - protein, 410 aa, Zea Mays
MGNGRRILYRLLLNCPPQLIGGSDSASTQRSISYASFSAQLVASRLTATRTRTPLKVTSSGWKPLTQPVALNEERKCANLTINPTAKRSRVTSSRAVKDSINNSASKANSSVPSDKKYRNEDNVSLGDQSDGAVMPSPTKKLQICKGPSDAPSIRKSTIRILGVKGAALPPTGKSQVETRKCFANATAEVISASTNEISEPDNAAAPLLAQQLPPDTAKNSTVIMHTHETSKVNQLAATWPRANFQTDYNKKPSNVPIMANQPSGFAGATAPLVTPKMEIGNMKDSSNPLSNPAYARALVIKQQEQLLQQYKLGSSPQRQHHGQHLYIKGPALFENDDPPPVKPLGTRCQLCKLDVAFRTQGDAGRDANAPPVIAVLACHHVFHSRCIESVYGLAEPAECLACLESGAAH

SEQ ID NO: 177056 - protein, 160 aa, Zea Mays
MARVYVGNLDARVTSGELEDEFRVFGVLRSVWVARKPPGFAFIDFDDRRDAEDAIRDLDGKNGWKVELSRSTNGRGSRDRHGGSESKCYECGETGHFARECRLRIGSGGLGSGRRRSRSRSRSRSPRYRRSPSYNRSPRYRSPRRRTPSPARGRSYSRSP

SEQ ID NO: 177057 - protein, 489 aa, Zea Mays
MAPEKPRKEQEEELMLEDGGIEESPRRSFEDCGDSEEDRGEGDDEEERDSDRDGVGSTRSFLPQKWPQSYRETTDTYTIAASPSFGYLGSSTSKYSLLDLGRSILGSDLKSPLISAKADSVRNLPKTLGSMRDGRVSFQLQHTGEIYISQGCNVTQTVFNGINVLAGVGLLSTPFTIHEAGWTGLAVLACFAIVCCYTGILLKHCFESKDGISSYPDIGEAAFGRIGRVLISSYCVEFIILEGDNLTSIFPKAGFDWLGIHVDGKHFFGVLTAILVLPTVWLRDLRVLSYLSAGGVIATLLVFLSVGLVGVTDGIGFHSTGKAVNWSGMPFAIGIYGFCYSGHSVFPNIYQSMSDRSKFPKALFICFAICTAIYGSFAVIGFLMFGKNTLSQITLNLPKHSFASEVALWTTVINPFTKFALLLNPLARSLEELRPEGFMNETSCAIILRTALLASTVCIAFLLPFFGLVMSLIGSLLSILVFTAAYRAI

SEQ ID NO: 177058 - protein, 131 aa, Zea Mays
MGLWEGDWERDLEASGPIPASKMDEGKGRELFGKGNVEGTTNPSKENEWGGRGRAVTLTGTVGALAAGSGALSPESRAGEECRRSRRRARKGGYGGRECEMQEGERERERIGEKKRHEASTHKRTRENRNR

SEQ ID NO: 177059 - protein, 100 aa, Zea Mays
MLPAMEKKHRNWHMACSPALQCLNQIPCFVLSLLLKIQGLIPLNLEYLIQSQQGVKASLYIVSPKGKINTRTFLAQQQGRIYYPKPVEKHADSGDQCLPT

SEQ ID NO: 177060 - protein, 326 aa, Zea Mays
MAPEPEDDIMNEKNPRPLDEDDIALLKTYGLGPYSTSIKKVEKEIKEMAKKINDLCGIKESDTGLAPPSQWDLVSDKQMMQEEQPLQVARCTKIISPNTDDAKYVINVKQIAKFVVGLGDKVSPTDIEEGMRVGVDRNKYQIQIPLPPKIDPSVTMMTVEEKPDVTYNDVGGCKEQIEKMREVVELPMLHPEKFVKLGIDPPKGVLCYGPPGTGKTLLARAVANRTDACFIRVIGSELVQKYVGEGARMVRELFQMARSKKACIVFFDEVDAIGGARFDDGVGGDNEVQRTMLEIVNQLDGFDARGNIKVLMATNRSQKLTTFCFF

SEQ ID NO: 177061 - protein, 81 aa, Zea Mays
MEHDHITPQKGIYPLLYGNMCYTRIQPAVTRNTTVEGMNGRNSEGMLGSHARSDRPTEDDRRCSCTTECQPTGRVLAIICW

SEQ ID NO: 177062 - protein, 263 aa, Zea Mays
MAEFLEASCVAWRQTELREGGRGRTKQQQQRHPLASFPFSPSSPTAGVASTRARPAGGCRRCTRGPWAAAAYLYLRAAGGGGGGGSYASPLAMDAGVEKCGDAAAEGGGDLYAVLGLKKECSDADLKVAYRKLAKKWHPDKCSSSSISVKHMEEAKEKFQEIQGAYSVLSDANKRLLYDVGVYDDEDDEDSMQGMGDFIGEMTQMMSQVRPMGRKALRSCSSFLSTCSSLILIQDSAMGLLRAIRFRGKPKVEHAHHGPLLLL

SEQ ID NO: 177063 - protein, 125 aa, Zea Mays
MQGMGDFIGEMTQMMSQVRPMRQESFEELQQLFVDMFQSDIDSGFCNGTAKGHQVQGQAKSRTCSPRSPPTTIVKEAEVSSCNGFNKRGSSAMDSGKPPRPVECGAGQSQAGFCFGLASDERSCN

SEQ ID NO: 177064 - protein, 121 aa, Zea Mays
MDAGVEKCGDAAAEGGGDLYAVLGLKKECSDADLKVAYRKLAKKWHPDKCSSSSISVKHMEEAKEKFQEIQGAYSVLSDANKRLLYDVGVYDDEDDEDSMQGMGDFIGEMTQMMSQVRPMA

SEQ ID NO: 177065 - protein, 251 aa, Zea Mays
MDAGVEKCGDAAAEGGGDLYAVLGLKKECSDADLKVAYRKLAKKWHPDKCSSSSISVKHMEEAKEKFQEIQGAYSVLSDANKRLLYDVGVYDDEDDEDSMQGMGDFIGEMTQMMSQVRPMESFEELQQLFVDMFQSDIDSGFCNGTAKGHQVQGQAKSRTCSPRSPPTTIVKEAEVSSCNGFNKRGSSAMDSGKPPRPVECGAGQSQAGFCFGVSDTPKPRGPNANRKRNGRKQKLFPKHYVTSEDDTAGS

SEQ ID NO: 177066 - protein, 197 aa, Zea Mays
MDAGVEKCGDAAAEGGGDLYAVLGLKKECSDADLKVAYRKLAKMQGMGDFIGEMTQMMSQVRPMRQESFEELQQLFVDMFQSDIDSGFCNGTAKGHQVQGQAKSRTCSPRSPPTTIVKEAEVSSCNGFNKRGSSAMDSGKPPRPVECGAGQSQAGFCFGVSDTPKPRGPNANRKRNGRKQKLFPKHYVTSEDDTAGS

SEQ ID NO: 177067 - protein, 154 aa, Zea Mays
MQGMGDFIGEMTQMMSQVRPMRQESFEELQQLFVDMFQSDIDSGFCNGTAKGHQVQGQAKSRTCSPRSPPTTIVKEAEVSSCNGFNKRGSSAMDSGKPPRPVECGAGQSQAGFCFGVSDTPKPRGPNANRKRNGRKQKLFPKHYVTSEDDTAGS

SEQ ID NO: 177068 - protein, 267 aa, Zea Mays
MARSGLGSSYLPNRQQHQQGANSVQNGGSHNILLRPPSQTSSLGSYDPFLQQYQQPQPQNHFRLQQMSSAAHSYRDQIQKIQAGPTPPDPYGLLGFLGVIRMNDADLASLALGIDLTALGLNLNSPDNLYKTFGSPWSNDPAKGDTDFRIPACYLFDKTPPLQTLLFQRFHIVTLFFVFYSMPKDEAQLYSANELYNRGWFYHKEVHLWLTRISNVEPLVKTHLYERGSYYCFDPESWDTIRKDNFVLHYEMVEKRPVLPSTSPNLR

SEQ ID NO: 177069 - protein, 94 aa, Zea Mays
MKPLNDRVLIKVAEAEDKTPGGLLLTETAKEKPSIGTVVAVGPGPLDEDGERLALSVSAGSTVLYSKYAGSEFKGADGTNYIVLRASDLMAVLS

SEQ ID NO: 177070 - protein, 506 aa, Zea Mays
MVDKNDGSEGIKFNTSNLIQTTEEVARAFIAAASAATAQSARTSVVYSSKDESGSPMQKLQQHFSKIMKGFSSAPDLSGTYNPEVLTTQKRQWSRYQMKSLGDRCIREPSHLFESIVIVGLPPHADIQELENIALGRNDEDGKRSKNLFGNSHHQVHAITNLEPQVLFAYPPEKPLPLKYKDTLSFCLPGGVQVHAVERTPSFSELNEILLGQEQLKESNQSFVFRLQVADNSALYGCCVLVEEIVQRPSKLVSMLMNEKPVFPRRSRYVITTPRCYCILSRLPFFELHFGVLQSILMEERLEWLTDGVSMLTSLSLEESCENDICEGTAVTAQKHYLDSNTTDVDKSSESSNGVSSTELSDTDSSSGCRENQLDFVSKEQQQNSSCEEQSNFKREIVTCSDASEVSDHFVPEDTSSDQSGVKHHELHSAPSIPDESGARNCDDSPKENVDDEELDLFIIDTILPLMRSRLCEDCESSPRVLLLKAEILTPKNRIQRSHLPLVMET

SEQ ID NO: 177071 - protein, 442 aa, Zea Mays
MLMNEKPVFPRRSRYVITTPRCYCILSRLPFFELHFGVLQSILMEERLEWLTDGVSMLTSLSLEESCENDICEGTAVTAQKHYLDSNTTDVDKSSESSNGVSSTELSDTDSSSGCRENQLDFVSKEQQQNSSCEEQSNFKREIVTCSDASEVSDHFVPEDTSSDQSGVKHHELHSAPSIPDESGARNCDDSPKENVDDEELDLFIIDTILPLMRSRLCEDCESSPSSQGSPSEGRNFDTQESDSEEPSSIGDGDLVKHNNILQWAKAKKYGSLQVVCQYYQLQCPARGSTLAFHPLEHLHSLSFHRPGETVLHIAGSTIELRSRDTSLEVAEMRNALFAEEESTALSTWAVASICGCLRLEHVSGPFRRRTNKISRRALALSCLFLSTEVAHISHQLIAGRVQSPEPKQAEPFLSTVVKRKEKSIAIKICSSTLYRIILSFF

SEQ ID NO: 177072 - protein, 593 aa, Zea Mays
MASPRGTRSSPRSSATSRAPASSAAARSCSSSTTSLTTSAPPGTEKCEIIGNPALPPESGDSSSNSLRADQFNGAPPNGSMAGSTLNKVIKPSDNAPVIQRSMTGNSLNMVPRPSDNAQVFQPTVQPSYRPAPKYRSHGTIMKNDAPARIIPIPALNPYQGRWAIKARVTAKGEIRRYHNAKGDGKVFSFDLLDTDGGEIRATCFNALVDRFYEVVEVGKVYVVSRGNLKPAKKDYNHLNNEWEIFLEPQSTIELCLDENSSIPAQRFSFSSIDKIENSENNAIVDVIGVVTSVNPSTTIQRKNGMEAQKRTITLNDMSGRSVELTMWGDFCNREGSQLQEMVECGAFPVLAVKAGKVNDYSGKSVGTISSSQLHINPDLAEAHSLRQWFDCGGRDASTQSISRDFTPSASWNEVRKTVAQIKDDGLGMGDKPDWVTVKAAISFIKTDSFCYTACPNVIGDRQCGKKVTKSDSGNWLCDKCNQEFPECDYRYLLQLNIQDHTGTTSVTAFQDRGQEILGCSARELNIFKENKDPRYTDVLINCLYQNYLFRLKVKEEQYGDVRQVKNTVAKVERVDPLAESKFLLDSISRFIP

SEQ ID NO: 177073 - protein, 66 aa, Zea Mays
MDLKSSSLVQLEVGLVDIFVNLWQFKWQTGHRELATGLFQTKMEFILFGLALYLMTSSKQRRFEHF

SEQ ID NO: 177074 - protein, 81 aa, Zea Mays
MEGSRCSRKNGRGWRCSQPTLVGYALCQYHLGKGRMRSGSAATGGRGPGQLGRTEHAKKTSAAAPKADVPLPLPPPSVQRC

SEQ ID NO: 177075 - protein, 59 aa, Zea Mays
MGSSKDKTDGGGGGDRGTGGGGRAAGRARVQEGKRTSERERDGKRKMSQEPEDPGEVPP

SEQ ID NO: 177076 - protein, 62 aa, Zea Mays
MLGTANSIYYTSFHISPDDPKLPRPISTCPACHQDRSAGSSMTVSTDRDIDDAGRRRQEAAE

SEQ ID NO: 177077 - protein, 664 aa, Zea Mays
MGDSSVAGALVPSVPKPETAPSGDNSTAALALPEEAGTRAASASPQGPAEEEGPADRDLLCPICMAVIKDAFLTACGHSFCYMCVVTHLSNKSDCPCCGHYLTKAQLYPNFLLDKVLKKISARQIAKTASPVDQFRCALQQGNEMGVKELDSLMTLIAEKKRQMEQQESETNMQILLVFLHCLRKQKLEELNEIQSDLQYIKEDISAVERHRVELYRTKERYSMKLRMLLDEPTAQKMWPSPMDKASCRFPPNSRTPLGGSCPGTLQNKKLDPKAQVSHQGFQRRDALTSSDPPNSSIQSGNVIARKRRVQAQFNELQEYYLQRRRTGAQARRQEERETVAMNREGYHAGLQDFQSVLTTFTRYSRLRVIAELRHGDLFHSANIVSSIEFDRDDELFATAGVSKRIKVFEFSTVVNEPSDVHCPVVEMATRSKLSCLSWNKYSKNIIASSDYEGIVTVWDVQTRQSVMEYEEHEKRAWSVDFSRTEPSMLVSGSDDCKVKVWCTKQEASVINIDMKANICSVKYNPGSSFYVAVGSADHHIHYFDLRNPSAPVHVFGGHKKAVSYVKFLSNNELASASTDSTLRLWDVKDNLPVRTFRGHKNEKNFVGLSVNNEYIACGSETNEVFVYHKQAIDLYPLTWMMPMMILVLISLVLSAGRVIAPPC

SEQ ID NO: 177078 - protein, 2155 aa, Zea Mays
MEAAAADLIAALSSPSSFAGLYSRFAAYLQPFTPYLHSSNPNTKPPQKRATKQNKQPPPPDAATLRPLAKRFLPFLGRALHLLPPLVRACPVSGDKGGEAADELLEIYGLLLDCLEAISPCLAGKPYSVLLQRGRFICCLESRGHFARASAEAAATLDALRSALSPPTTSTKSRRGAAGVDPVLLPDPGSAGEAGTDPEVTLLAVELTVCLANCSSKGKVKEPTPYERLISLFKQLKPWLRILTNEVSRKYLPLLMNAMSRCTLFLVSESSLFNTDLVHGFCRYTMQECVGEGMIELLPAIARKICSSVDLTWGGSTQLLLHVLKTVTDSVVRLKDDLPKSVNELLVFVAYFCRFILSANRDLSVGASELLYKQGGYFSEVSSPTASMLLLYATGLYLSAQQAESEIPPYLSVGIPKDQKYLHALEKGLGTLARCPHDNTSLVTYLDSLEFISKILSQQVNTLWKDFSEGKPTHYSGNMDYVLTALHQFIDSSFTSFSCRQMSQGDNERQHEQHGTLLTVLVSAIKFSFLTKKDIQKSLGFIVCAISSKWFTLEELKFLIPSLGNIGVTLHNTGHVKEAPKALELCCQTIWAHISLFYYRLSSRTKGNDIMTDLSMDTLKDMDIILDAFSRIAKMVDALCRCGTEIETPLVIVAKSLSIMLPDGDNSEYNKCSFILIKAWVKAVHKDFRDTKVDDAPLLYPFLLKYRSPWPIKLIGLIVEQELLAYGLTEARSIEFCSKMQIRIIDVLLHKIYCTKEHFLERSRVLIRKAGALRASGVENIKNCLESLRDAISLLQKISHDSTRTNTTANNQLAIAYCLYAQCAQEDKLGGEVIFDSAEKALNLWLDMEAFDHSSSDMVLQQPSKTIVPLICFLVDLLSMKGCFELQFKLCKVMIMIWKQEKLPIEKLLSLLRTLPSALFIPQSCKHPFGRQFSFVTSVDEVSKVASSLVSGDTSNEQSTFLAGCLYYDLSEKVFSRGQLFQAFSYGNKALHLRKKLLKKKFKINSGISGNMERQHCGQDISLEVCGPTIVEIWPNSSSSVNTKDFFLTPWNVLRCYLESTLQVAMMHELIGNGAEAEVLLQTGKEISNFHGLSVFCIVFTSFLGQLYCKRQLWDEAESELNYARDLVKNDATISCKLCSLTLGISVDMQVGDLSWSLFEKKIHKQITAGLSNTLGMYQSAIDKLNSTNLEYCNGSFDRHTTGYLVCSKDCIPSKYEACNLGAEPLTSNDGLLSPCSVCMVIQVRRKNSGNAEAGPPLDAKARRSSRNSSRLAKGQNVETLAKTRTRSSKRNACMKSEKVLTELNSKNNVTGSKELAADASVCGEAECFPDGIDHSKDDLCNMFGCWSCLFIKSLNSGCIQNILQLRLDYVHRHYLVSLLLKKARALGSHSNGDCEVHSVYWKCISLLFFRSLPQDCCRTYGPYLIGLIMDRSIGDFLPLECAEILFNMSFFLLKSPLSEQSRDICCIFSSVTMADVVPWLLKAFVLSRESPSLVQEVCKLLACIFLLSTTDSSIQLPLGSHKESLSLNHWATYFHQVSVGTNLNCHYFASLQASSEEKVPKDTYKDFRNETDDNVSKFLRLSSRDIKYIEKHMTEFFQKLPDVPVLCISMLGGDYVNALLKFHCHPPFFPAWMLLSRFDSTNEPTTLLLPVDSISEMQFEDSCTKDLGNPTRVLDKWQCPWGYGITDYVAPVFRNILEENFMSLSSATLTIDDVNADRVRWWSHRMKLNNYLANTLKDIEDSWFGPWKCLLLGHQLSDEHIETASSMIITGLDTEFEFEVNPMLIKAILGGAVSVDEVQECFLQLILYKGYFGRGGCCGKDRLKAFSSCQMDDGSMETLKRIITDASYELPQPADRDPVILVLDVNVQMLPWENLPVLRNQEIYRMPSMGSIFLALSRTNNDYKDHSSPFPVIDPFNTYYLLNPSGDLSSTQEEFVQLFRNYEWKGVAGNSPKADELVLALTNHDLFLYFGHGSGTQYISSKEVEKIDNCAAALLMGCSSGTLHCKGSYAPRGAPLSYLFAGSPAIIANLWDVSDKDIDRFSKALLNSWLHDKSLDGNNCSKCCQLTMELESMSIASKENGKARRQGTRGKKQQHINDSTKCCSCKQRRIASYISEARRACRLPLLIGASPVCYGVPTIIRKKVMTDSTTREMT

SEQ ID NO: 177079 - protein, 2178 aa, Zea Mays
MEAAAADLIAALSSPSSFAGLYSRFAAYLQPFTPYLHSSNPNTKPPQKRATKQNKQPPPPDAATLRPLAKRFLPFLGRALHLLPPLVRACPVSGDKGGEAADELLEIYGLLLDCLEAISPCLAGKPYSVLLQRGRFICCLESRGHFARASAEAAATLDALRSALSPPTTSTKSRRGAAGVDPVLLPDPGSAGEAGTDPEVTLLAVELTVCLANCSSKGKVKEPTPYERLISLFKQLKPWLRILTNEVSRKYLPLLMNAMSRCTLFLVSESSLFNTDLVHGFCRYTMQECVGEGMIELLPAIARKICSSVDLTWGGSTQLLLHVLKTVTDSVVRLKDDLPKSVNELLVFVAYFCRFILSANRDLSVGASELLYKQGGYFSEVSSPTASMLLLYATGLYLSAQQAESEIPPYLSVGIPKDQKYLHALEKGLGTLARCPHDNTSLVTYLDSLEFISKILSQQVNTLWKDFSEGKPTHYSGNMDYVLTALHQFIDSSFTSFSCRQMSQGDNERQHEQHGTLLTVLVSAIKFSFLTKKDIQKSLGFIVCAISSKWFTLEELKFLIPSLGNIGVTLHNTGHVKEAPKALELCCQTIWAHISLFYYRLSSRTKGNDIMTDLSMDTLKDMDIILDAFSRIAKMVDALCRCGTEIETPLVIVAKSLSIMLPDGDNSEYNKCSFILIKAWVKAVHKDFRDTKVDDAPLLYPFLLKYRSPWPIKLIGLIVEQELLAYGLTEARSIEFCSKMQIRIIDVLLHKIYCTKEHFLERSRVLIRKAGALRASGVENIKNCLESLRDAISLLEDKLGGEVIFDSAEKALNLWLDMEAFDHSSSDMVLQQPSKTIVPLICFLVDLLSMKGCFELQFKLCKVMIMIWKQEKLPIEKLLSLLFTSGRLSHACCYLPLDERFLSIAKEHLGVCCHDIEFWINCFKGDHPSLCMFLQRTLPSALFIPQSCKHPFGRQFSFVTSVDEVSKVASSLVSGDTSNEQSTFLAGCLYYDLSEKVFSRGQLFQAFSYGNKALHLRKKLLKKKFKINSGISGNMERQHCGQDISLEVCGPTIVEIWPNSSSSVNTKDFFLTPWNVLRCYLESTLQVAMMHELIGNGAEAEVLLQTGKEISNFHGLSVFCIVFTSFLGQLYCKRQLWDEAESELNYARDLVKNDATISCKLCSLTLGISVDMQVGDLSWSLFEKKIHKQITAGLSNTLGMYQSAIDKLNSTNLEYCNGSFDRHTTGYLVCSKDCIPSKYEACNLGAEPLTSNDGLLSPCSVCMVIQVRRKNSGNAEAGPPLDAKARRSSRNSSRLAKGQNVETLAKTRTRSSKRNACMKSEKVLTELNSKNNVTGSKELAADASVCGEAECFPDGIDHSKDDLCNMFGCWSCLFIKSLNSGCIQNILQLRLDYVHRHYLVSLLLKKARALGSHSNGDCEVHSVYWKCISLLFFRSLPQDCCRTYGPYLIGLIMDRSIGDFLPLECAEILFNMSFFLLKSPLSEQSRDICCIFSSVTMADVVPWLLKAFVLSRESPSLVQEVCKLLACIFLLSTTDSSIQLPLGSHKESLSLNHWATYFHQVSVGTNLNCHYFASLQASSEEKVPKDTYKDFRNETDDNVSKFLRLSSRDIKYIEKHMTEFFQKLPDVPVLCISMLGGDYVNALLKFHCHPPFFPAWMLLSRFDSTNEPTTLLLPVDSISEMQFEDSCTKDLGNPTRVLDKWQCPWGYGITDYVAPVFRNILEENFMSLSSATLTIDDVNADRVRWWSHRMKLNNYLANTLKDIEDSWFGPWKCLLLGHQLSDEHIETASSMIITGLDTEFEFEVNPMLIKAILGGAVSVDEVQECFLQLILYKGYFGRGGCCGKDRLKAFSSCQMDDGSMETLKRIITDASYELPQPADRDPVILVLDVNVQMLPWENLPVLRNQEIYRMPSMGSIFLALSRTNNDYKDHSSPFPVIDPFNTYYLLNPSGDLSSTQEEFVQLFRNYEWKGVAGNSPKADELVLALTNHDLFLYFGHGSGTQYISSKEVEKIDNCAAALLMGCSSGTLHCKGSYAPRGAPLSYLFAGSPAIIANLWDVSDKDIDRFSKALLNSWLHDKSLDGNNCSKCCQLTMELESMSIASKENGKARRQGTRGKKQQHINDSTKCCSCKQRRIASYISEARRACRLPLLIGASPVCYGVPTIIRKKVMTDSTTREMT

SEQ ID NO: 177080 - protein, 1861 aa, Zea Mays
MSFWYLWRIFAGSFFLPIGIYLLALQNYFINKVSSPTASMLLLYATGLYLSAQQAESEIPPYLSVGIPKDQKYLHALEKGLGTLARCPHDNTSLVTYLDSLEFISKILSQQVNTLWKDFSEGKPTHYSGNMDYVLTALHQFIDSSFTSFSCRQMSQGDNERQHEQHGTLLTVLVSAIKFSFLTKKDIQKSLGFIVCAISSKWFTLEELKFLIPSLGNIGVTLHNTGHVKEAPKALELCCQTIWAHISLFYYRLSSRTKGNDIMTDLSMDTLKDMDIILDAFSRIAKMVDALCRCGTEIETPLVIVAKSLSIMLPDGDNSEYNKCSFILIKAWVKAVHKDFRDTKVDDAPLLYPFLLKYRSPWPIKLIGLIVEQELLAYGLTEARSIEFCSKMQIRIIDVLLHKIYCTKEHFLERSRVLIRKAGALRASGVENIKNCLESLRDAISLLQKISHDSTRTNTTANNQLAIAYCLYAQCAQEDKLGGEVIFDSAEKALNLWLDMEAFDHSSSDMVLQQPSKTIVPLICFLVDLLSMKGCFELQFKLCKVMIMIWKQEKLPIEKLLSLLFTSGRLSHACCYLPLDERFLSIAKEHLGVCCHDIEFWINCFKGDHPSLCMFLQRTLPSALFIPQSCKHPFGRQFSFVTSVDEVSKVASSLVSGDTSNEQSTFLAGCLYYDLSEKVFSRGQLFQAFSYGNKALHLRKKLLKKKFKINSGISGNMERQHCGQDISLEVCGPTIVEIWPNSSSSVNTKDFFLTPWNVLRCYLESTLQVAMMHELIGNGAEAEVLLQTGKEISNFHGLSVFCIVFTSFLGQLYCKRQLWDEAESELNYARDLVKNDATISCKLCSLTLGISVDMQVGDLSWSLFEKKIHKQITAGLSNTLGMYQSAIDKLNSTNLEYCNGSFDRHTTGYLVCSKDCIPSKYEACNLGAEPLTSNDGLLSPCSVCMVIQVRRKNSGNAEAGPPLDAKARRSSRNSSRLAKGQNVETLAKTRTRSSKRNACMKSEKVLTELNSKNNVTGSKELAADASVCGEAECFPDGIDHSKDDLCNMFGCWSCLFIKSLNSGCIQNILQLRLDYVHRHYLVSLLLKKARALGSHSNGDCEVHSVYWKCISLLFFRSLPQDCCRTYGPYLIGLIMDRSIGDFLPLECAEILFNMSFFLLKSPLSEQSRDICCIFSSVTMADVVPWLLKAFVLSRESPSLVQEVCKLLACIFLLSTTDSSIQLPLGSHKESLSLNHWATYFHQVSVGTNLNCHYFASLQASSEEKVPKDTYKDFRNETDDNVSKFLRLSSRDIKYIEKHMTEFFQKLPDVPVLCISMLGGDYVNALLKFHCHPPFFPAWMLLSRFDSTNEPTTLLLPVDSISAEMQFEDSCTKDLGNPTRVLDKWQCPWGYGITDYVAPVFRNILEENFMSLSSATLTIDDVNADRVRWWSHRMKLNNYLANTLKDIEDSWFGPWKCLLLGHQLSDEHIETASSMIITGLDTEFEFEVNPMLIKAILGGAVSVDEVQECFLQLILYKGYFGRGGCCGKDRLKAFSSCQMDDGSMETLKRIITDASYELPQPADRDPVILVLDVNVQMLPWENLPVLRNQEIYRMPSMGSIFLALSRTNNDYKDHSSPFPVIDPFNTYYLLNPSGDLSSTQEEFVQLFRNYEWKGVAGNSPKADELVLALTNHDLFLYFGHGSGTQYISSKEVEKIDNCAAALLMGCSSGTLHCKGSYAPRGAPLSYLFAGSPAIIANLWDVSDKDIDRFSKALLNSWLHDKSLDGNNCSKCCQLTMELESMSIASKENGKARRQGTRGKKQQHINDSTKCCSCKQRRIASYISEARRACRLPLLIGASPVCYGVPTIIRKKVMTDSTTREMT

SEQ ID NO: 177081 - protein, 916 aa, Zea Mays
MVIQVRRKNSGNAEAGPPLDAKARRSSRNSSRLAKGQNVETLAKTRTRSSKRNACMKSEKVLTELNSKNNVTGSKELAADASVCGEAECFPDGIDHSKDDLCNMFGCWSCLFIKSLNSGCIQNILQLRLDYVHRHYLVSLLLKKARALGSHSNGDCEVHSVYWKCISLLFFRSLPQDCCRTYGPYLIGLIMDRSIGDFLPLECAEILFNMSFFLLKSPLSEQSRDICCIFSSVTMADVVPWLLKAFVLSRESPSLVQEVCKLLACIFLLSTTDSSIQLPLGSHKESLSLNHWATYFHQVSVGTNLNCHYFASLQASSEEKVPKDTYKDFRNETDDNVSKFLRLSSRDIKYIEKHMTEFFQKLPDVPVLCISMLGGDYVNALLKFHCHPPFFPAWMLLSRFDSTNEPTTLLLPVDSISEMQFEDSCTKDLGNPTRVLDKWQCPWGYGITDYVAPVFRNILEENFMSLSSATLTIDDVNADRVRWWSHRMKLNNYLANTLKDIEDSWFGPWKCLLLGHQLSDEHIETASSMIITGLDTEFEFEVNPMLIKAILGGAVSVDEVQECFLQLILYKGYFGRGGCCGKDRLKAFSSCQMDDGSMETLKRIITDASYELPQPADRDPVILVLDVNVQMLPWENLPVLRNQEIYRMPSMGSIFLALSRTNNDYKDHSSPFPVIDPFNTYYLLNPSGDLSSTQEEFVQLFRNYEWKGVAGNSPKADELVLALTNHDLFLYFGHGSGTQYISSKEVEKIDNCAAALLMGCSSGTLHCKGSYAPRGAPLSYLFAGSPAIIANLWDVSDKDIDRFSKALLNSWLHDKSLDGNNCSKCCQLTMELESMSIASKENGKARRQGTRGKKQQHINDSTKCCSCKQRRIASYISEARRACRLPLLIGASPVCYGVPTIIRKKVMTDSTTREMT

SEQ ID NO: 177082 - protein, 159 aa, Zea Mays
MGCSSGTLHCKGSYAPRGAPLSYLFAGSPAIIANLWDVSDKDIDRFSKALLNSWLHDKSLDGNNCSKCCQLTMELESMSIASKENGKARRQGTRGKKQQHINDSTKCCSCKQRRIASYISEARRACRLPLLIGASPVCYGVPTIIRKKVMTDSTTREMT

SEQ ID NO: 177083 - protein, 272 aa, Zea Mays
MRKLQLSRSQLALSSESQMLEKIKVHMGFQKASFKEKKFKTEMEDTKHAELFRKLIDMLLTAVVLMSVCFGYGTYIYSYQRITAATSACAAISREYTSWWMPSSVSAINSGLLLFKCHVIAATRIFFGILMLLLIGWLIFQRSAMTGPNMPVTFNVMILGVLCGYFGSCCVDTLGGDGNVWLIYWEALCSIHLLGNIWPSLLHHMLYGPISVTHRTKAGHLPYWARRYTFYILVSLILPCLAGLLPFASLSDWKELAVQYLKSRFSGINIED

SEQ ID NO: 177084 - protein, 424 aa, Zea Mays
MCTSAVKESLTNIYGDRFHSFMSNFEKAFGSTLRTIHLINETPVFEQDVEQCSYKDDDSVPQIKLGGADSLPEIKVGGADSQSQIHDVQTDMPSSSMNSQIVLHTGINDQLVHLTCSRSNPEIGQHILSVFERSLNEQARSNELKELEIGLTMRKLQLSRSQLALSSESQMLEKIKVHMGFQKASFKEKKFKTEMEDTKHAELFRKLIDMLLTAVVLMSVCFGYGTYIYSYQRITAATSACAAISREYTSWWMPSSVSAINSGLLLFKCHVIAATRIFFGILMLLLIGWLIFQRSAMTGPNMPVTFNVMILGVLCGYFGSCCVDTLGGDGNVWLIYWEALCSIHLLGNIWPSLLHHMLYGPISVTHRTKAGHLPYWARRYTFYILVSLILPCLAGLLPFASLSDWKELAVQYLKSRFSGINIED

SEQ ID NO: 177085 - protein, 458 aa, Zea Mays
MAAAAPPSLAHPAPPRSTKEFQRAPRHAPRDVVSWTSTISRAARQGDLHAAAASLCAMVSSPAAPAPNDVTLLTVLSACADSPSSPLASPLALTLHARALKLFPSHLLLSTCLARFYLASRLPHLALQLFDSMPVRSVVTYNTMISGLMRNGLVDAAFEVFDGMPGPDKVSWTALIDGFVKNGRHDEAIDCFRAMLLDGVETDYITLVAVVSACAEVNLAAQVFRSIRKRTVVSWNSMIVGFAANGRCTDAIELFEEMRRQGFKPDAVTLTGVLTACSHAGLTEHGLRYYDLMTTEYGVAARMEHYGCVVDLLGRAGRLDEAMHVVETMPMRPNEVVLGALLAGCRTHGNLDMAEQMMQHLFELDPQGDANYVLLSNIYAAVGKWDGAGKVRSLMKARGVKKRPGHSTVEIDGDVHEFVSGDQSHPLAGEIGQMLGLLWHEMTRYGCDVHGGSSFDGD

SEQ ID NO: 177086 - protein, 663 aa, Zea Mays
MEVELRAFCSKHSAVGYTSSVENSNLASELNPRKSGPDNTTLNSGKIPILRFTRKNKDKFTNCGTSTSSSGNLIRVKTIEQGALANTVRNANTQPIQIWERGTGHPSVGGDHMGSSGDIAVVLRKLIDSGKISVSDIASEVGISSESLEAALVGETTTFSHGLTLKIMKWLQNYVQMHSAQGDVCKGSSEVVQESKSDRLVTTDTVDVKNPLVLDDDKGVGVLVDLLDSSVTEPAQTRSESNSKILNENSATCATGVTILQNGKKNMVKEGYNPECSAKEFANESTQDFSPISNKYVLKDEHGILILNATSGNKEFGTSTEIPNENQGALRGRKINDLTDVELGPCLEKGVSSHDHCFVRGDNGRDRVDSVENSFNARDCDSNCSHGQPFFNFDDSHSYIHPFIQKKISHHWDITFNQNKEALNHYIQESSYPSLEKVPTDSSVEVEGTADTTATGQVLKARSLKILEHSPDDEVEGEMVYLQSRLLDNAVVLKHRYEKLIAMVVQNLSRELDALSKRKWDLIFVNQFLRDVREAKKRGRKEKRHKEAQAVLAAAAAAIASSSRNSTVRKDAKEDAPKSSPKLAAGSSRVGQRTSLPQANDSSKSSNSKISSDKKSGSFLLPISSKENGLYCDVCMRTETLLNRIFVCYRCKKFGEFYWALEL

SEQ ID NO: 177087 - protein, 325 aa, Zea Mays
MCHGTSGAFRKTVDGKWVHAFCAEWLLDTKYVRGQDKPVEGTESLVEGKDTCCVCLHNVGVCLRCSSGDCNITFHPTCARSCGFYMNTKGFGTTPQHKAYCGKHSVQQKEADAQQYGPEELTSMKRMRVELEKLRLLCERIIKREKVKRETVLCDHEILAKTKDTVIFSYLACGASSESATTSVNNRSYSGAAQRSDDVTVDSTISGKKTIRFSLNNRGADRNTADSSRTLLSFKRKLSERGPRAGKQLPQRPTIAAEKLEDEDKKTTDKKREMFQKELIMTSDQASTQNLRLPKGYAYVPRDSLSKEKLWKQNTQPHNPQEPGG

SEQ ID NO: 177088 - protein, 1034 aa, Zea Mays
MEVELRAFCSKHSAVGYTSSVENSNLASELNPRKSGPDNTTLNSGKIPILRFTRKNKDKFTNCGTSTSSSGNLIRVKTIEQGALANTVRNANTQPIQIWERGTGHPSVGGDHMGSSGDIAVVLRKLIDSGKISVSDIASEVGISSESLEAALVGETTTFSHGLTLKIMKWLQNYVQMHSAQGDVCKGSSEVVQESKSDRLVTTDTVDVKNPLVLDDDKGVGVLVDLLDSSVTEPAQTRSESNSKILNENSATCATGVTILQNGKKNMVKEGYNPECSAKEFANESTQDFSPISNKYVLKDEHGILILNATSGNKEFGTSTEIPNENQGALRGRKINDLTDVELGPCLEKGVSSHDHCFVRGDNGRDRVDSVENSFNARDCDSNCSHGQPFFNFDDSHSYIHPFIQKKISHHWDITFNQNKEALNHYIQESSYPSLEKVPTDSSVEVEGTADTTATGQVLKARSLKILEHSPDDEVEGEMVYLQSRLLDNAVVLKHRYEKLIAMVVQNLSRELDALSKRKWDLIFVNQFLRDVREAKKRGRKEKRHKEAQAVLAAAAAAIASSSRNSTVRKDAKEDAPKSSPKLAAGSSRVGQRTSLPQANDSSKSSNSKISSDKKSGSFLLPISSKENGLYCDVCMRTETLLNRIFVCYRCKAAVHINCYRNLENSIGPWNCELCEDQDISSEAATVSDKSHCNGKKLPFAQCGMCHGTSGAFRKTVDGKWVHAFCAEWLLDTKYVRGQDKPVEGTESLVEGKDTCCVCLHNVGVCLRCSSGDCNITFHPTCARSCGFYMNTKGFGTTPQHKAYCGKHSVQQKEADAQQYGPEELTSMKRMRVELEKLRLLCERIIKREKVKRETVLCDHEILAKTKDTVIFSYLACGASSESATTSVNNRSYSGAAQRSDDVTVDSTISGKKTIRFSLNNRGADRNTADSSRTLLSFKRKLSERGPRAGKQLPQRPTIAAEKLEDEDKKTTDKKITMQQREMFQKELIMTSDQASTQNLRLPKGYAYVPRDSLSKEKLWKQNTQPHNPQEPGG

SEQ ID NO: 177089 - protein, 1038 aa, Zea Mays
MEIWGKSRHPNVELRAFCSKHSAVGYTSSVENSNLASELNPRKSGPDNTTLNSGKIPILRFTRKNKDKFTNCGTSTSSSGNLIRVKTIEQGALANTVRNANTQPIQIWERGTGHPSVGGDHMGSSGDIAVVLRKLIDSGKISVSDIASEVGISSESLEAALVGETTTFSHGLTLKIMKWLQNYVQMHSAQGDVCKGSSEVVQESKSDRLVTTDTVDVKNPLVLDDDKGVGVLVDLLDSSVTEPAQTRSESNSKILNENSATCATGVTILQNGKKNMVKEGYNPECSAKEFANESTQDFSPISNKYVLKDEHGILILNATSGNKEFGTSTEIPNENQGALRGRKINDLTDVELGPCLEKGVSSHDHCFVRGDNGRDRVDSVENSFNARDCDSNCSHGQPFFNFDDSHSYIHPFIQKKISHHWDITFNQNKEALNHYIQESSYPSLEKVPTDSSVEVEGTADTTATGQVLKARSLKILEHSPDDEVEGEMVYLQSRLLDNAVVLKHRYEKLIAMVVQNLSRELDALSKRKWDLIFVNQFLRDVREAKKRGRKEKRHKEAQAVLAAAAAAIASSSRNSTVRKDAKEDAPKSSPKLAAGSSRVGQRTSLPQANDSSKSSNSKISSDKKSGSFLLPISSKENGLYCDVCMRTETLLNRIFVCYRCKAAVHINCYRNLENSIGPWNCELCEDQDISSEAATVSDKSHCNGKKLPFAQCGMCHGTSGAFRKTVDGKWVHAFCAEWLLDTKYVRGQDKPVEGTESLVEGKDTCCVCLHNVGVCLRCSSGDCNITFHPTCARSCGFYMNTKGFGTTPQHKAYCGKHSVQQKEADAQQYGPEELTSMKRMRVELEKLRLLCERIIKREKVKRETVLCDHEILAKTKDTVIFSYLACGASSESATTSVNNRSYSGAAQRSDDVTVDSTISGKKTIRFSLNNRGADRNTADSSRTLLSFKRKLSERGPRAGKQLPQRPTIAAEKLEDEDKKTTDKKREMFQKELIMTSDQASTQNLRLPKGYAYVPRDSLSKEKLWKQNTQPHNPQEPGG

SEQ ID NO: 177090 - protein, 672 aa, Zea Mays
MEIWGKSRHPNVELRAFCSKHSAVGYTSSVENSNLASELNPRKSGPDNTTLNSGKIPILRFTRKNKDKFTNCGTSTSSSGNLIRVKTIEQGALANTVRNANTQPIQIWERGTGHPSVGGDHMGSSGDIAVVLRKLIDSGKISVSDIASEVGISSESLEAALVGETTTFSHGLTLKIMKWLQNYVQMHSAQGDVCKGSSEVVQESKSDRLVTTDTVDVKNPLVLDDDKGVGVLVDLLDSSVTEPAQTRSESNSKILNENSATCATGVTILQNGKKNMVKEGYNPECSAKEFANESTQDFSPISNKYVLKDEHGILILNATSGNKEFGTSTEIPNENQGALRGRKINDLTDVELGPCLEKGVSSHDHCFVRGDNGRDRVDSVENSFNARDCDSNCSHGQPFFNFDDSHSYIHPFIQKKISHHWDITFNQNKEALNHYIQESSYPSLEKVPTDSSVEVEGTADTTATGQVLKARSLKILEHSPDDEVEGEMVYLQSRLLDNAVVLKHRYEKLIAMVVQNLSRELDALSKRKWDLIFVNQFLRDVREAKKRGRKEKRHKEAQAVLAAAAAAIASSSRNSTVRKDAKEDAPKSSPKLAAGSSRVGQRTSLPQANDSSKSSNSKISSDKKSGSFLLPISSKENGLYCDVCMRTETLLNRIFVCYRCKKFGEFYWALEL

SEQ ID NO: 177091 - protein, 1057 aa, Zea Mays
MEIWGKSRHPNVELRAFCSKHSAVGYTSSVENSNLASELNPRKSGPDNTTLNSGKIPILRFTRKNKDKFTNCGTSTSSSGNLIRVKTIEQGALANTVRNANTQPIQIWERGTGHPSVGGDHMGSSGDIAVVLRKLIDSGKISVSDIASEVGISSESLEAALVGETTTFSHGLTLKIMKWLQNYVQMHSAQGDVCKGSSEVVQESKSDRLVTTDTVDVKNPLVLDDDKGVGVLVDLLDSSVTEPAQTRSESNSKILNENSATCATGVTILQNGKKNMVKEGYNPECSAKEFANESTQDFSPISNKYVLKDEHGILHYQLYQFFELVALQFILREILNATSGNKEFGTSTEIPNENQGALRGRKINDLTDVELGPCLEKGVSSHDHCFVRGDNGRDRVDSVENSFNARDCDSNCSHGQPFFNFDDSHSYIHPFIQKKISHHWDITFNQNKEALNHYIQESSYPSLEKVPTDSSVEVEGTADTTATGQVLKARSLKILEHSPDDEVEGEMVYLQSRLLDNAVVLKHRYEKLIAMVVQNLSRELDALSKRKWDLIFVNQFLRDVREAKKRGRKEKRHKEAQAVLAAAAAAIASSSRNSTVRKDAKEDAPKSSPKLAAGSSRVGQRTSLPQANDSSKSSNSKISSDKKSGSFLLPISSKENGLYCDVCMRTETLLNRIFVCYRCKAAVHINCYRNLENSIGPWNCELCEDQDISSEAATVSDKSHCNGKKLPFAQCGMCHGTSGAFRKTVDGKWVHAFCAEWLLDTKYVRGQDKPVEGTESLVEGKDTCCVCLHNVGVCLRCSSGDCNITFHPTCARSCGFYMNTKGFGTTPQHKAYCGKHSVQQKEADAQQYGPEELTSMKRMRVELEKLRLLCERIIKREKVKRETVLCDHEILAKTKDTVIFSYLACGASSESATTSVNNRSYSGAAQRSDDVTVDSTISGKKTIRFSLNNRGADRNTADSSRTLLSFKRKLSERGPRAGKQLPQRPTIAAEKLEDEDKKTTDKKREMFQKELIMTSDQASTQNLRLPKGYAYVPRDSLSKEKLWKQNTQPHNPQEPGG

SEQ ID NO: 177092 - protein, 941 aa, Zea Mays
MGSSGDIAVVLRKLIDSGKISVSDIASEVGISSESLEAALVGETTTFSHGLTLKIMKWLQNYVQMHSAQGDVCKGSSEVVQESKSDRLVTTDTVDVKNPLVLDDDKGVGVLVDLLDSSVTEPAQTRSESNSKILNENSATCATGVTILQNGKKNMVKEGYNPECSAKEFANESTQDFSPISNKYVLKDEHGILHYQLYQFFELVALQFILREILNATSGNKEFGTSTEIPNENQGALRGRKINDLTDVELGPCLEKGVSSHDHCFVRGDNGRDRVDSVENSFNARDCDSNCSHGQPFFNFDDSHSYIHPFIQKKISHHWDITFNQNKEALNHYIQESSYPSLEKVPTDSSVEVEGTADTTATGQVLKARSLKILEHSPDDEVEGEMVYLQSRLLDNAVVLKHRYEKLIAMVVQNLSRELDALSKRKWDLIFVNQFLRDVREAKKRGRKEKRHKEAQAVLAAAAAAIASSSRNSTVRKDAKEDAPKSSPKLAAGSSRVGQRTSLPQANDSSKSSNSKISSDKKSGSFLLPISSKENGLYCDVCMRTETLLNRIFVCYRCKAAVHINCYRNLENSIGPWNCELCEDQDISSEAATVSDKSHCNGKKLPFAQCGMCHGTSGAFRKTVDGKWVHAFCAEWLLDTKYVRGQDKPVEGTESLVEGKDTCCVCLHNVGVCLRCSSGDCNITFHPTCARSCGFYMNTKGFGTTPQHKAYCGKHSVQQKEADAQQYGPEELTSMKRMRVELEKLRLLCERIIKREKVKRETVLCDHEILAKTKDTVIFSYLACGASSESATTSVNNRSYSGAAQRSDDVTVDSTISGKKTIRFSLNNRGADRNTADSSRTLLSFKRKLSERGPRAGKQLPQRPTIAAEKLEDEDKKTTDKKITMQQREMFQKELIMTSDQASTQNLRLPKGYAYVPRDSLSKEKLWKQNTQPHNPQEPGG

SEQ ID NO: 177093 - protein, 240 aa, Zea Mays
MKILSQRLGLGKGGLRMAPEENLLEVLQVPLGCVTPFALINESASAVSLLLDQGFKSKQSCYFHPLTNDVTIALSSSNLDKFLISIGKQPAYVDLEAAPAVGKDNPPDLAHLVPTGVPNSSEQPVENTAPTNVLKETEVKAKPKVQSKGAETSSKVDKPTTDTSVDKFVNDVFEIISPLFLSEALKKLDIKKEDLSLILEGLRGRADPDLKSIAMTLKNASYTSGFHAGYKTMQNRGLNG

SEQ ID NO: 177094 - protein, 177 aa, Zea Mays
MHFPSPRALAMAAPAVARPRLAPVAHPASTSCLLALWDRRRGHGRAVAAVRAREQGAAPPDPAAFLRRPEVATVTSTEEEREADAGSSFDGPGEDEAPEEEGVRGRRKAPEREWVDWEDLILEDTVPLVGFVRMILHSGMKVAIGCVLNMRRRFWNVCFHTIHNIMRKLGVVLTTSR

SEQ ID NO: 177095 - protein, 94 aa, Zea Mays
MPGWRRRRHGEGHSAGVVVRGPRHHPVVLLQARHRGCLPRQTRRRSARAPLPHRPRPPLPSRPPFPTVKEAAEEIRTAEATGGTAVGAAAEGFL

SEQ ID NO: 177096 - protein, 85 aa, Zea Mays
MRVLVARWRCTPLRRTGQFVRHPTAPPPGRLRGGRLGPVLFGGRADSSCMPLVLGRQVVLSLLLLSCSGARHVLCDFAFLWFPPK

SEQ ID NO: 177097 - protein, 189 aa, Zea Mays
MMPLPCRYLEWKEGKCGTTDASIHQSSRTHPHPPIDDLLSGFRTEHRRAGPCRAPIQRIATLPRADPTAPRPPASSPHLRTAVACPSRIARAGRAATATPPLVCLSRRRRRRHFLRFACSAAPATRRTRELRKRVRCWIGCDTAATGIGVALLLLFIYTKGNLSAAQRGWSILYDQGKRTDDQTTNCCK

SEQ ID NO: 177098 - protein, 219 aa, Zea Mays
MSSLAWMTQLLAVACLSLASKIEETFVPLPLDLQVAEAKFVFEGRTIKRMELLVLSTLKWRMHAVTACSFVEYFLHKLSDHGAPSLLARSRSSDLVLSTAKGAEFVVFRPSEIAASVALAAIGECRSSVIERAASSCKYLDKERVLRCHEMIQEKITAGSIVLKSAGSSISSVPQSPIGVLDAAACLSQQSDDATVGSPAVCYHSSSTSKRRRITRRLL

SEQ ID NO: 177099 - protein, 233 aa, Zea Mays
MVPGYDCAASVLLCAEDNAAILGLDDDGEESSWAAAATPPRDTVAAAAAAATGVAVDGILTEFPLLSDDCVATLVEKEVEHMPAEGYLQKLQRRHGDLDLAAVRKDAIDWIWKEGRAWMTQLLAVACLSLASKIEETFVPLPLDLQVAEAKFVFEGRTIKRMELLVLSTLKWRMHAVTACSFVEYFLHKLSDHGAPSLLARSRSSDLVLSTAKDPPRLLPVLHLLLSANAGVL

SEQ ID NO: 177100 - protein, 78 aa, Zea Mays
MERVLRCHEMIQEKITAGSIVLKSAGSSISSVPQSPIGVLDAAACLSQQSDDATVGSPAVCYHSSSTSKRRRITRRLL

SEQ ID NO: 177101 - protein, 94 aa, Zea Mays
MKKRKITESTSQRSEVYVDTDQCELQFCERVKLATGTAEQDHVNGSGSSRRRQAECGAVSVVGVRPRDPVQGMFGLKGFEGDWRGLNPLLFKFV

SEQ ID NO: 177102 - protein, 54 aa, Zea Mays
MIFLVSLHYHTRVCKYFWSSQMQVLTSERSLSLLARDLKCMWIQINVSCNFVNV

SEQ ID NO: 177103 - protein, 627 aa, Zea Mays
MIRPMPWPSFTSSVNYRMNLDARFVWKPPWSLQWFTRASITLHELLIWLRISTISVNNLLAQTGLAATRALVCVRACRGQLLFYYNHIYWVTVIVYDGWMITWPSFTWRLHDALYEISDGDRISGTALNFCSDNLSYDVGAVSEQTQRGFLSVRFDVLQDKYRMVDCPFMFTRSNVQSVVQDKGLLSFFWDSLIYYGKKFLDIRLVWSHICIKQPRADWLWLQSIFYYIFHSAHFILICSGTHNPEELFREMFSQGTDDVSEVVPEPIEQPLVVLSSSAWSGTATATTWHLQDQIQHQDILVLIDSGSSHTFLINSGLKQLFMSVYYSAWSGTTCHQTLKLKGRIQEKSLNILLDSGSTHTFVNDKLIPLLSGVRSISYPTKVQVANGPIVSGRYQWLQAHWQIQEYEFVSDLLFLPLPSSDMAVDMDWAQKWLAILYKGSSIILYGQSQTIPSGTIVELWSLDSEAQQSSQPSHHPQTQSLLLQFASVSRTPFEDMANESTTWKEIKIVSSPTSRKQPVHEINMSSTKKQGPGSGERSREGMSASKARAEPVSIHGSRAKASSILMQWAQVCVRSILLLKLPTTDANKHELLKEALDGLAALCAAFLADAVACGSRPDWVIGDSRR

SEQ ID NO: 177104 - protein, 91 aa, Zea Mays
MYWPSSPRHPRACSAMPTQRSLATIVSGSPLASVPDVHAIAKAAISLSSSIPERPYPMCGVPGLLEALQNPFILRSVSELRGIKDQALATK

SEQ ID NO: 177105 - protein, 609 aa, Zea Mays
MSRALYRGVSGIGGKLAAADEAYAYYDPKEPSENSIGGGFGRGGARKRHLADAAVKVGVLLLVAAALVGSVAWAGTLYAGRGAAARAAAAAAHRGGKGFIWKDNVRISGHEFSSGSLFKRMMVEEDQISFPSDAHMADGVEDYAHQIAEMIGLRNEFNFNEAGKYCMLSRLAGSAGLFLLNLTNIHAQCAGKCMSEFTTVPAKVRTVLDIECGFGTFGAHLFERDLLTMCIANYEASGSQVQITLERGIPAMIGSFATKQLPYPYLSFDMVHCAKCNIEWYKNDGIFLVEVNRLLRPDGYFVWTSNLNTHRALRDKENQKKWTAIRDFAEGLCWEMLSQQDETIVWKKTNKRDCYNSRKSGPELCGHDPESPYYQPLNPCISGTRSQRWIPIEYRTTWPSQARQNSTELDIHGVHPEVFADDTSSWDSMVRNYWSLLSPLIFSDHPKRPGDEDPQPPFNMLRNVLDMNAHFGGFNAALLKAGKSVWVMNVVPTDAPNYLPLIFDRGFIGVQHDWCDAFPTYPRTYDMVHADGFLSLQKNHKHRCSTLDIFLEVDRILRPEGWVIIRDAAPLIEAARSVVTQLRWDARVLDLDIASDEKLLVCQKPFLRK

SEQ ID NO: 177106 - protein, 274 aa, Zea Mays
MLSQQDETIVWKKTNKRDCYNSRKSGPELCGHDPESPYYQPLNPCISGTRSQRWIPIEYRTTWPSQARQNSTELDIHGVHPEVFADDTSSWDSMVRNYWSLLSPLIFSDHPKRPGDEDPQPPFNMLRNVLDMNAHFGGFNAALLKAGKSVWVMNVVPTDAPNYLPLIFDRGFIGVQHDWCDAFPTYPRTYDMVHADGFLSLQKNHKHRCSTLDIFLEVDRILRPEGWVIIRDAAPLIEAARSVVTQLRWDARVLDLDIASDEKLLVCQKPFLRK

SEQ ID NO: 177107 - protein, 182 aa, Zea Mays
MARLLLWWTALLLPSLLAGVGPAAAAAASPPHDACLVPTIAQSVLRTPDTCSTLDRRLGDPVGVIEGDEVTLARAVNLLHANKDDYIAVLFYASWCPFSQECKPNFETLAYLFPAIRHFAFEESAIRPSIISRYGIHGFPTLFLLNSTMRVRYHGPRTVKSLAAFYTDVSVNCRGGHGTSLG

SEQ ID NO: 177108 - protein, 1063 aa, Zea Mays
MRATGEHTTAVPMPAPPPPPAAASASEEDDKERRKNRRRSSRRSRQAAVAAPQGLHADAAGPRTVRSMPPMHVGSSAGVDAEAEPSAAGTSQSCPLPPTPRPTEAPVSRLGRGAPGTRYFQPHWPERAVEEAVKRGHAFVGKFRVNAHNRNEAYCTIDGVSVDVLITGLAQNRAVEGDLVAITLDPVAHWTRMKGPNVACNPLIGDSVVCEVSETNRNHSWKKGQADDGCKFENCSNGVPVLDRTHPPHKNSGFSQAVKCGNGNATIPERNEIDLNDGKSEVARALQRISATIYSHPSRRPTGKVLSIIKKSPRRDAIVGFLASFSEFPDGEQQKNQMGLNRMNNRTQSVTGLFYLLPTDPKFPQMVVSFSTLPDSVRQSLRGNVAVKKELVAARIDEWNEENLYPYAHVIRFLGKVGHVKTHMDAILFENVICDAEFSPESLACLPDNCWKIPQKELEARKDLRKVLTFTIDPPTASDLDDAISIEILSGGTVRIGVHIADVSYFLHPETALDAEAQSRSTSVYTLKHKISMLPSGFSEVVSLNPGVDRLAFSIIWDIDPHGNLISRWIGRSIIFSCCKLSYELVQDLICNETSQTRPEVSSLEVHGIFGRDDVIKSLRGLYEVSKNLKEIRFKGGALSLDTAKIMILFDEDGDPCDSYRYVRKNACFIVEELMLLANMSAAEVISNAFPDCALLRRHPEPNLRKSREFEAFCAKNGFELDVSSSGQLHLSLSRIKEKLQEDPVMFDIIMFYASKQMQSAEYFCTGDLISKKDDWAHYALSVPLYTHFTSPLRRYPDIIVHRTLNAVIEAEQVYMKQKKSSAGQNGVKASCELMDMCFTGLQLCKDAAESEEGKKALSAAAKKFKVPSSENLGEIAEHCNERKWAGRRAEEAGQKLYMWALIKNKETVVCNARVLGLGPRFMSVYVPKLAMERRIYYDEVEGLSVEWLEVTGTLVLDTCRNKPAQRRGTQMKRRPIEEVAVVVNPSELSEEDEESGATEAGGCTAKSVLLSGDAVKAQTAPAVLPLVIHYLSDIPVVLHAIGGEDCAVDIGVRLYMASYFKL

SEQ ID NO: 177109 - protein, 943 aa, Zea Mays
MRATGEHTTAVPMPAPPPPPAAASASEEDDKERRKNRRRSSRRSRQAAVAAPQGLHADAAGPRTVRSMPPMHVGSSAGVDAEAEPSAAGTSQSCPLPPTPRPTEAPVSRLGRGAPGTRYFQPHWPERAVEEAVKAYCTIDGVSVDVLITGLAQNRAVEGDLVAITLDPVAHWTRMKGPNVACNPLIGDSVVCEVSETNRNHSWKKGQADDGCKFENCSNGVPVLDRTHPPHKNSGFSQAVKCGNGNATIPERNEIDLNDGKSEVARALQRISATIYSHPSRRPTGKVLSIIKKSPRRDAIVGFLASFSEFPDGEQQKNQMGLNRMNNRTQSVTGLFYLLPTDPKFPQMVVSFSTLPDSVRQSLRGNVAVKKELVAARIDEWNEENLYPYAHVIRFLGKVGHVKTHMDAILFENVICDAEFSPESLACLPDNCWKIPQKELEARKDLRKVLTFTIDPPTASDLDDAISIEILSGGTVRIGVHIADVSYFLHPETALDAEAQSRSTSVYTLKHKISMLPSGFSEVVSLNPGVDRLAFSIIWDIDPHGNLISRWIGRSIIFSCCKLSYELVQDLICNETSQTRPEVSSLEVHGIFGRDDVIKSLRGLYEVSKNLKEIRFKGGALSLDTAKIMILFDEDGDPCDSYRYVRKNACFIVEELMLLANMSAAEVISNAFPDCALLRRHPEPNLRKSREFEAFCAKNGFELDVSSSGQLHLSLSRIKEKLQEDPVMFDIIMFYASKQMQSAEYFCTGDLISKKDDWAHYALSVPLYTHFTSPLRRYPDIIVHRTLNAVIEAEQVYMKQKKSSAGQNGVKASCELMDMCFTGLQLCKDAAESEEGKKALSAAAKKFKVPSSENLGEIAEHCNERKWAGRRAEEAGQKLYMWALIKNKETVVCNARVLGLGPRFMSVYVPKLAMERRIYYDEVEGLSVEWLEVTGTLVLDTLP

SEQ ID NO: 177110 - protein, 918 aa, Zea Mays
MLTTEMRAYCTIDGVSVDVLITGLAQNRAVEGDLVAITLDPVAHWTRMKGPNVACNPLIGDSVVCEVSETNRNHSWKKGQADDGCKFENCSNGVPVLDRTHPPHKNSGFSQAVKCGNGNATIPERNEIDLNDGKSEVARALQRISATIYSHPSRRPTGKVLSIIKKSPRRDAIVGFLASFSEFPDGEQQKNQMGLNRMNNRTQSVTGLFYLLPTDPKFPQMVVSFSTLPDSVRQSLRGNVAVKKELVAARIDEWNEENLYPYAHVIRFLGKVGHVKTHMDAILFENVICDAEFSPESLACLPDNCWKIPQKELEARKDLRKVLTFTIDPPTASDLDDAISIEILSGGTVRIGVHIADVSYFLHPETALDAEAQSRSTSVYTLKHKISMLPSGFSEVVSLNPGVDRLAFSIIWDIDPHGNLISRWIGRSIIFSCCKLSYELVQDLICNETSQTRPEVSSLEVHGIFGRDDVIKSLRGLYEVSKNLKEIRFKGGALSLDTAKIMILFDEDGDPCDSYRYVRKNACFIVEELMLLANMSAAEVISNAFPDCALLRRHPEPNLRKSREFEAFCAKNGFELDVSSSGQLHLSLSRIKEKLQEDPVMFDIIMFYASKQMQSAEYFCTGDLISKKDDWAHYALSVPLYTHFTSPLRRYPDIIVHRTLNAVIEAEQVYMKQKKSSAGQNGVKASCELMDMCFTGLQLCKDAAESEEGKKALSAAAKKFKVPSSENLGEIAEHCNERKWAGRRAEEAGQKLYMWALIKNKETVVCNARVLGLGPRFMSVYVPKLAMERRIYYDEVEGLSVEWLEVTGTLVLDTCRNKPAQRRGTQMKRRPIEEVAVVVNPSELSEEDEESGATEAGGCTAKSVLLSGDAVKAQTAPAVLPLVIHYLSDIPVVLHAIGGEDCAVDIGVRLYMASYFKL

SEQ ID NO: 177111 - protein, 871 aa, Zea Mays
MKGPNVACNPLIGDSVVCEVSETNRNHSWKKGQADDGCKFENCSNGVPVLDRTHPPHKNSGFSQAVKCGNGNATIPERNEIDLNDGKSEVARALQRISATIYSHPSRRPTGKVLSIIKKSPRRDAIVGFLASFSEFPDGEQQKNQMGLNRMNNRTQSVTGLFYLLPTDPKFPQMVVSFSTLPDSVRQSLRGNVAVKKELVAARIDEWNEENLYPYAHVIRFLGKVGHVKTHMDAILFENVICDAEFSPESLACLPDNCWKIPQKELEARKDLRKVLTFTIDPPTASDLDDAISIEILSGGTVRIGVHIADVSYFLHPETALDAEAQSRSTSVYTLKHKISMLPSGFSEVVSLNPGVDRLAFSIIWDIDPHGNLISRWIGRSIIFSCCKLSYELVQDLICNETSQTRPEVSSLEVHGIFGRDDVIKSLRGLYEVSKNLKEIRFKGGALSLDTAKIMILFDEDGDPCDSYRYVRKNACFIVEELMLLANMSAAEVISNAFPDCALLRRHPEPNLRKSREFEAFCAKNGFELDVSSSGQLHLSLSRIKEKLQEDPVMFDIIMFYASKQMQSAEYFCTGDLISKKDDWAHYALSVPLYTHFTSPLRRYPDIIVHRTLNAVIEAEQVYMKQKKSSAGQNGVKASCELMDMCFTGLQLCKDAAESEEGKKALSAAAKKFKVPSSENLGEIAEHCNERKWAGRRAEEAGQKLYMWALIKNKETVVCNARVLGLGPRFMSVYVPKLAMERRIYYDEVEGLSVEWLEVTGTLVLDTCRNKPAQRRGTQMKRRPIEEVAVVVNPSELSEEDEESGATEAGGCTAKSVLLSGDAVKAQTAPAVLPLVIHYLSDIPVVLHAIGGEDCAVDIGVRLYMASYFKL

SEQ ID NO: 177112 - protein, 303 aa, Zea Mays
MAENTHGSGRHVLGDLTNVICKRAATSDLEKSTGGIKIRRIEKTGTRKEYDANAKASSIGKGIVFGHLFDDVAREKFQSHSIFQNSRVQHIAAEAAGLLSKEANDSKNHYASIGPLDLSDKEQDSSLESEDDYDDEDNDETNGELLHHFFSSELANKMSTNDGECLTQEEIVGSSGNQKPLSSLDATTGGDLPISSAQHASVRTGGLEEAVAPKSCACSFCLKAAFMWMDLHYQDARSRLSVLKKSIKFARSLEEKCRGNEYAANVAGYESKRAVGVEFELSQQQRSLFLYTENALLPSICTC

SEQ ID NO: 177113 - protein, 173 aa, Zea Mays
MMMKIMMRRMEEIVGSSGNQKPLSSLDATTGGDLPISSAQHASVRTGGLEEAVAPKSCACSFCLKAAFMWMDLHYQDARSRLSVLKKSIKFARSLEEKCRGNEYAANVAGYESKRAVGVEFELSQQQRSLFLYTENALVRESTQLHSAFVKLKELRENCKTDLETLSNSSMRK

SEQ ID NO: 177114 - protein, 305 aa, Zea Mays
MAENTHGSGRHVLGDLTNVICKRAATSDLEKSTGGIKIRRIEKTGTRKEYDANAKASSIGKGIVFGHLFDDVAREKFQSHSIFQNSRVQHIAAEAAGLLSKEANDSKNHYASIGPLDLSDKEQDSSLESEDDYDDEDNDETNGELLHHFFSSELANKMSTNDGGDLPISSAQHASVRTGGLEEAVAPKSCACSFCLKAAFMWMDLHYQDARSRLSVLKKSIKFARSLEEKCRGNEYAANVAGYESKRAVGVEFELSQQQRSLFLYTENALVRESTQLHSAFVKLKELRENCKTDLETLSNSSMRK

SEQ ID NO: 177115 - protein, 286 aa, Zea Mays
MLKKTLKWRSEYKPDEIRWDDISDEAVTGKTYRTDYFDKIGRSILVMRPGCQNTKNANGQVKYLVYCMENAILNLPHGQDQMVWLIDFAGFNLGNLSIQVTKMTADVLQGHYPERLGVAILFNAPKFFEPFWKMASPLLEKKTRNKVKFVYSDRPDTMKIMEDLFNMDELECAFGGKNPATFNINDYAARMREDDKKMPSFWSPENSALASEPYQMSSQKALGSVSGAKTEDAGSGKMDDMETAPEKSEESGTESGEEVQTRTESSTVEQKNLPGEDNAPADKSGL

SEQ ID NO: 177116 - protein, 198 aa, Zea Mays
MSSANGTTNVHGKEAAPYEEQLFKIGKVRTDLGQLSGKSALYCSDASIARYLIARNWDIRKATKMLKKTLKWRSEYKPDEIRWDDISDEAVTGKTYRTDYFDKIGRSILVMRPGCQNTKNANGQVKYLVYCMENAILNLPHGQDQMVWLIDFAGFNLGNLSIQVTKMTADVLQGHYPERLGVAILFNAPKFFEPFWKI

SEQ ID NO: 177117 - protein, 277 aa, Zea Mays
MQPLCICGKKDDISDEAVTGKTYRTDYFDKIGRSILVMRPGCQNTKNANGQVKYLVYCMENAILNLPHGQDQMVWLIDFAGFNLGNLSIQVTKMTADVLQGHYPERLGVAILFNAPKFFEPFWKMASPLLEKKTRNKVKFVYSDRPDTMKIMEDLFNMDELECAFGGKNPATFNINDYAARMREDDKKMPSFWSPENSALASEPYQMSSQKALGSVSGAKTEDAGSGKMDDMETAPEKSEESGTESGEEVQTRTESSTVEQKNLPGEDNAPADKSGL

SEQ ID NO: 177118 - protein, 327 aa, Zea Mays
MIGKVRTDLGQLSGKSALYCSDASIARYLIARNWDIRKATKMLKKTLKWRSEYKPDEIRWDDISDEAVTGKTYRTDYFDKIGRSILVMRPGCQNTKNANGQVKYLVYCMENAILNLPHGQDQMVWLIDFAGFNLGNLSIQVTKMTADVLQGHYPERLGVAILFNAPKFFEPFWKMASPLLEKKTRNKVKFVYSDRPDTMKIMEDLFNMDELECAFGGKNPATFNINDYAARMREDDKKMPSFWSPENSALASEPYQMSSQKALGSVSGAKTEDAGSGKMDDMETAPEKSEESGTESGEEVQTRTESSTVEQKNLPGEDNAPADKSGL

SEQ ID NO: 177119 - protein, 154 aa, Zea Mays
MMASPLLEKKTRNKVKFVYSDRPDTMKIMEDLFNMDELECAFGGKNPATFNINDYAARMREDDKKMPSFWSPENSALASEPYQMSSQKALGSVSGAKTEDAGSGKMDDMETAPEKSEESGTESGEEVQTRTESSTVEQKNLPGEDNAPADKSGL

SEQ ID NO: 177120 - protein, 89 aa, Zea Mays
MAETRQRRAPALRARRGQIRPSPCLHRRPRPCRGPSPPPWAASLRPCTSRRPTPRAVSAPRLVSGRCPTFVRARNAPAPGLSRAAAPAL

SEQ ID NO: 177121 - protein, 189 aa, Zea Mays
MRHWIVVHVCLTVYFEMENKFGLFPHRMPKSHDYGLRQQYRTGKKATRPRAVKTPEIEAIADVESRPAVCFLLLLLLLTARLAPRIESLALPRPRPRHRHSLSRSIITNGSMPKPQLKISAWAYPSIHREEEACPLPRISLLPGSHPPTESSPPRFHPTRKQEFVVKFPACACFCGFLPASLLLPPMGL

SEQ ID NO: 177122 - protein, 173 aa, Zea Mays
MENKFGLFPHRMPKSHDYGLRQQYRTGKKATRPRAVKTPEIEAIADVESRPAVCFLLLLLLLTARLAPRIESLALPRPRPRHRHSLSRSIITNGSMPKPQLKISAWAYPSIHREEEACPLPRISLLPGSHPPTESSPPRFHPTRKQEFVVKFPACACFCGFLPASLLLPPMGL

SEQ ID NO: 177123 - protein, 162 aa, Zea Mays
MPKSHDYGLRQQYRTGKKATRPRAVKTPEIEAIADVESRPAVCFLLLLLLLTARLAPRIESLALPRPRPRHRHSLSRSIITNGSMPKPQLKISAWAYPSIHREEEACPLPRISLLPGSHPPTESSPPRFHPTRKQEFVVKFPACACFCGFLPASLLLPPMGL

SEQ ID NO: 177124 - protein, 77 aa, Zea Mays
MDNKDIAPKTVNDLKLINGGRILENNRTLAESRVPVGEIPGGVITMHVVVRPPQADKNSEKQLANSPKQNRCGCTIL

SEQ ID NO: 177125 - protein, 558 aa, Zea Mays
MLLDAHCYVLQYIHTYIIYITETKVTRLCHEKTILAVNGQFPGPTIYARKDDVVIVNVYNQGYKNITLHWHGVDQPRNPWSDGPEYITQCPIQPGANFTYKIIFTEEEGTLWWHAHSEFDRATVHGAIVIHPKRGTVYPYPKPHKEMPIILGEWWNADVEQILLESQRTGGDVNISDANTINGQPGDFAPCSKEDTFKMSVEHGKTYLLRVINAGLTNEMFFAVAGHRLTVVGTDGRYLRPFTVDYILISPGQTMNMLLEANCATDGSANSRYYMAARPFFTNTAVNVDDKNTTAILEYTDAPPSAGPPDSPDLPAMDDIAAATAYTAQLRSLVTKEHPIDVPMEVDEHMLVTISVNTIPCEPNKTCAGPGNNRLAASLNNVSFMNPTIDILDAYYDSISGVYEPDFPNKPPFFFNFTAPNPPQDLWFTKRGTKVKVVEYGTVLEVVFQDTAILGAESHPMHLHGFSFYVVGRGFGNFDKDKDPATYNLVDPPYQNTVSVPTGGWAAMRFRAANPGVWFMHCHFDRHTVWGMDTVFIVKNGKGPDAQMMPRPPNMPKC

SEQ ID NO: 177126 - protein, 164 aa, Zea Mays
MEDLGIEAKEAAVREVAKLLPFPELLSSIASIKYDYLTRQQINDAQLSTMVADQVEQAHAGINALALSQITINKLRENFIDIDKLCQECQTLIENHDKIKLLSNTRNNLNTTLKFLKKKGTLGVMVRAISLSYQVAGSKQPLLICGRKTCLGLSFPRLHSHRSQ

SEQ ID NO: 177127 - protein, 198 aa, Zea Mays
MEDLGIEAKEAAVREVAKLLPFPELLSSIASIKYDYLTRQQINDAQLSTMVADQVEQAHAGINALALSQITINKLRENFIDIDKLCQECQTLIENHDKIKLLSNTRNNLNTTLKDVGGMMSISVEAAAAHDSLSNDQELIHTYERLIALDGKRRFALAAAASHKEEVGRLREYFEDVDQTWETFEKTLWGHITNFFKL

SEQ ID NO: 177128 - protein, 282 aa, Zea Mays
MQEIFDEQVAEEATEAEGAGVIATITNQRRTAKKGAGATATPRKSTQEKSKVQGKGYRDKCYESIRVAVEARFNKLLTELVFVEDLMEALEEAKAIGEELGDIYDYVAPCFPSRYEIFQLMVNLYTERFIQMLRLLSDRANDIQNINILKVTSWVVQYQEDLIGLGVDESLAQVCSESGALDPLMNMYVERMQATTKKWYNNILEADKTQPPKSREDGKLYTPAAVDLFRILTEQVQIVRDNSTYVMLYRIALAVIQGWKGIYSMLWAKAHYKEDVEIAAKL

SEQ ID NO: 177129 - protein, 720 aa, Zea Mays
MKSSLSRGGGLSGTFIGEGSGSTRAALLLAAAEKRAAMHQLVVVLAPAAVRMPAAAPTPQRKEVVAAASKAGDTAAATWRKGGRVVFVVEKPDGACYFASIATQIGEELGDIYDYVAPCFPSRYEIFQLMVNLYTERFIQMLRLLSDRANDIQNINILKVTSWVVQYQEDLIGLGVDESLAQVCSESGALDPLMNMYVERMQATTKKWYNNILEADKTQPPKSREDGKLYTPAAVDLFRILTEQVQIVRDNSTYVMLYRIALAVIQVFIYLPYEIMAAAGSGRAAVAVEDREGSAVERPKAGKKRARWRKGSTQAEWQRRATTRGSTRERGVADRGREQSGCWRGQQDRRSAVKEGVGVEGVYGKASELARCRGRRRHAKHRRRRTEVVGGDGAAPRRHAQGSGRTGWRRRATARGGTRDRGGRRQGKGAARLRERVMLDFQAAERQRLEEPIFYVGLACLCALINNNMHCYELSSELSSSTLEALPQNYAEQVNFEDTCKGFLEVAKEAVLQTVTVIFEDPGVHDLLVKLYQRDWLEGMVTEYLVETFADYFGDVKMYIEERPFRRFVEACIEETIVVYVDHLLSQKNYIKEETIERMRLDEEKLMDFFREHVNVTKVESRVRILADMRDLASAGSLDSFTLIFTNILEHQPDCPPEVVEKLVAMREDIPRKEAKEIVQECKEIYENSLVDGNPRKSGFVFGKLKCLTAKKGIWRKRGQ

SEQ ID NO: 177130 - protein, 353 aa, Zea Mays
MKSSLSRGGGLSGTFIGEGSGSTRAALLLAAAEKRAAMHQLVVVLAPAAVRMPAAAPTPQRKEVVAAASKAGDTAAATWRKGGRVVFVVEKPDGACYFASIATQIGEELGDIYDYVAPCFPSRYEIFQLMVNLYTERFIQMLRLLSDRANDIQNINILKVTSWVVQYQEDLIGLGVDESLAQVCSESGALDPLMNMYVERMQATTKKWYNNILEADKTQPPKSREDGKLYTPAAVDLFRILTEQVQIVRDNSTYVMLYRIALAVIQVMLDFQAAERQRLEEPIFYVGLACLCALINNNMHCYELSSELSSSTLEALPQNYAEQVQICDKAFALYYMSFFEPCFNLSRDDFMFF

SEQ ID NO: 177131 - protein, 412 aa, Zea Mays
MLEDQSCLISRSLPGSCEQESRLAYMTYHLLEITRSKRPPGTLSIEHDVVAALTKRTKSSEHQNSEALDCQGSNGQGDSDSSTLISSIGRDNSINCLARCSRSDYGSIASLNRSFRSLVRSGELYKERRQQGISEHWVYFSCNVQEWEAYDPYRSRWMTLPRMPRNECFMHSDKESLAVGTELLVFGKEILSHIILSYSILTHSWSRGVEMNAPRCLFGSASFGEKAIIAGGMDADGRVLRSVELYNSETKRWTTLPSMNKARRKCSGVFMDGKFYVIGGMASNTEVLTCGEEYDLDRGTWRVIENMSEGLNGASGAPPLVAVVENELYAAQYAGKLVRKYNKRDNSWTTLGELPERPEAVDGWGIAFRGCGERLLVIGGPRVLGGGMIELHSWIPSEGPLQWNMIGSKPSG

SEQ ID NO: 177132 - protein, 348 aa, Zea Mays
MGSKQPLCICGGRLASVYPFPRPDSWELLTLGFPILGVEWQKMENPDLRKAMGMKPDQKGVRVRRVEPTAPESGCLQPSDIILSFDGVDIANDGTARQAVPVPYTLILDVRMLSGGGGGGNGSSGGGGEGMDGGQRGDGRCDRASCSSGDDRHGRMAEERWQTWSHGSRGTADVVAWQRRCRAQPGGGRRQQKRRVEADGDNDRREEERKQSWDSCVHLGDGGGIRWGPPPTLVYDPKTLVVANYMKEHGYLFLHTAVDTISKQVLVSDINIGYEEIVNTQVLAFNGQPVKNLKNLATMVENCKDEFLKFDLEYDQIVVLETKTAKSATQDILTTHCIPSAMSDDLKA

SEQ ID NO: 177133 - protein, 765 aa, Zea Mays
MDDPSSASNKRKRGRKPKVSPPSPDRSSPSAVAAPAPVPVARRGRKPRRHEDPADADAARPPSPLRRRVLNTVANGGDAVAEAGPASWDEVVRVVPCMDAVVKVFCVHTEPNFSLPWQRKRQYSSSSSGFIISGRRVLTNAHSVEHYTQVKLKKRGSDTKYLATVLAIGTECDIALLTVNDDEFWEGVSPVEFGTLPALQDAVTVVGYPIGGDTISVTSGVVSRIEILSYVHGSTELLGLQIDAAINSGNSGGPAFNDRGKCVGIAFQSLKHEDAENIGYVIPTPVITHFIEDYKNSGGYTGFPILGVEWQKMENPDLRKAMGMKPDQKGVRVRRVEPTAPESGCLQPSDIILSFDGVDIANDGTARQAVPVPYTLILDVRMLSGGGGGGNGSSGGGGEGMDGGQRGDGRCDRASCSSGDDRHGRMAEERWQTWSHGSRGTADVVAWQRRCRAQPGGGRRQQKRRVEADGDNDRREEERKQSWDSCVHLGDGGGIRWGPPPTLVYDPKTLVVANYMKEHGYLFLHTAVDTISKQVLVSDINIGYEEIVNTQVLAFNGQPVKNLKNLATMVENCKDEFLKFDLEYDQDYIPTVFDNFSANVVVDGTTVNLGLWDTAGQEDYNRLRPLSYRGADVFVLAFSLVSRASYENIMKKWIPELQHYARGVPVVLVGTKFDLREDKHYLMDHPGLVPVTTAQGEELRRQIGAMYYIECSSKTQQNVKAVFDAAIKVVIQPPTKLREKKKKKSRKGCSMVNILSGRKMLCFKS

SEQ ID NO: 177134 - protein, 219 aa, Zea Mays
MASSASRFIKCVTVGDGAVGKTCMLICYTSNKFPTDYIPTVFDNFSANVVVDGTTVNLGLWDTAGQEDYNRLRPLSYRGADVFVLAFSLVSRASYENIMKKWIPELQHYARGVPVVLVGTKFDLREDKHYLMDHPGLVPVTTAQGEELRRQIGAMYYIECSSKTQQNVKAVFDAAIKVVIQPPTKLREKKKKKSRKGCSMVVRGRDKPRQTFNPQMRRG

SEQ ID NO: 177135 - protein, 174 aa, Zea Mays
MASSASRFIKCVTVGDGAVGKTCMLICYTSNKFPTDYIPTVFDNFSANVVVDGTTVNLGLWDTAGQEDYNRLRPLSYRGADVFVLAFSLVSRASYENIMKKWIPELQHYARGVPVVLVGTKFDLREDKHYLMDHPGLVPVTTAQGEELRRQIGAMYYIECSSKTQQLAYFVGNM

SEQ ID NO: 177136 - protein, 2016 aa, Zea Mays
MPLFISDEELRLLGGDTAAVAERADAAIRELRRQVDTVRAEADAAAIAAEQTCALLEQRYASLSAEFDRSKAEAAELTASAERRAAELASSQAEIHQLRIQAIAKDGEVERLKIEISELHKSKCQSLELIEQRDAEIKEKDGIIQSYYNKIVNLAETSAGKEARIQEVEAKFTHCQAICNRMTQEKELLEKHNVWLDEELKAKVKNLAELRKTNMDEEARLSASIAELEREISESSSSLRRSKERISELEQRVSYMEKELRSTKDTAAANEQRLGAELSTVKKLAELHQESSEEWSKKAGELEGVIKALETHLTQVEDEYKEKLEKETLSRRDLEKEAVNLKQKLEKCEFDLENTRKSSELSLVPLTSIAAGSSDVVDTTVQGLPISDAVNQNDLMVIPKVPSGVSGTALAASLLRDGWSLAKIYEKYQEATDAFLHERRGRRHAEAVLERVLHEIEEKAELILDERAEHERMVEAYAMMDQKLQQALLEHDNFENNVRNLKSELKRRERDHSVAQKEIDDLQKQVAVLLKECQDIQLRCGSSLPNVGYVASSSLVNVLSNVEHDIKDNMSFKDINGLVQQNVQLRNQIHMLSADLDKKDMELRESFQIELKKITDAAASRVEKVMKKSEEQAIMIESLHRSVAMYRKLCEEQQKARSNVESAPTTLQDSSRTDLMVLFEGSQEVSKKAYEQVSERARSLDEELTKLRTELESLRSERDKAVLEADFARDRLNGFAAELEHQRKESNSASLRNAELTRLVVDYERRLREDLDSKQALEENLRKLSMEVSTLKNAKESLEKSERRALDEVRDLTERVHRLQATIDTIHTTEEVQENARSMERRNHEEHIKRLERDWAELNKELQEQRDHVRVLSLDKKNVFDSCMKQVEDMRKELNNSWKAVSDAEARAAIAEAKCSDLEAKVKSRKAISRDGCHEISAASEENDELFQLKEELEKYKEEAQANKNYMVQYKEIAHSNEVALKQLESAHQDYKAETEVGRKALEDEIVNLRDKLSEMEKSYVIKCEEAANAIESKEKHITSLMNEISVLRTEVSQKLPQLEKLEIELALSKSSLDEQYKRWRTAQDNYERQVILQSETIQELTNTSKQLSSLQHEITVLRQTADALKNENECLRSSAEQEKIGLLKEKDDALQKYNELNDQNRILHNQLEALHIRLAEKERNIAGLSSHRTDNSHAEDDLQSVISYLRRSKEIAETEISLLKQEKSRLQIELESSLKSAKEAQDLLRSQADSARALMFKDEEFKSLQIQVREINLLRESNIQLREENRHNFEECQKFREEAQKAKMESERLQNLLLEKEVDAEMCKRELEMQKAEIANLNQSISELIENSKGIDLNTYEAMKNELQNIKSTLRENSMELESAKILLSEKEVAIKILEDKLSLCQSELDSKEKKLNDVEASLKSEIDKHKKINLNLKRKHDNLMKEKGEIAKENQSLVKQMEDLKSTQKTTSETTLEQAIKEKDFRIQTLERTLEKERDDNKKEKAKSRRNENTIFGALQKVQQDKKQVEESIDKHKQAVRELIENYPGLSSEVPPISALEEQLLSYFRAAKDMEESSSPFRDGAATQTPVVETAPVDAPTSAGGRPVDTSSRPAKAKMTEERAVPKPSSEVRRPGGRRPLVRPTLERTEEPHADTDISAVDASTVQDKGGPPAEQETSGILPVLQPLSRKRLITSSQTVDSASQGEANDVNPPSKKPKEEESSQGTSELKSGQPPLGDVAAQVNVLPATDDLDGQQPTEEIDTDQAPEPMVEVEATREEDGGDKDDSGDASTDIKGQDADANIDANAIPLEEEHVVAKSEAIIESFDDDRKTEDSKEDAQRTTATDVDDDMEEGELAEEPEDKSDVDMSEIEGEATAERAAVEPDQSPITQPGAADASPSRTADASPAREPSPSPVQAGASSRPQNTSTATEAREPSSNPAQAGASSEQRNTSTVVEAAETRSRTINLSERARQNRQTRFQRAQQPGTARGRGQQSVTLRVWFLYSCSFQLGAYIQH

SEQ ID NO: 177137 - protein, 2017 aa, Zea Mays
MPLFISDEELRLLGGDTAAVAERADAAIRELRRQVDTVRAEADAAAIAAEQTCALLEQRYASLSAEFDRSKAEAAELTASAERRAAELASSQAEIHQLRIQAIAKDGEVERLKIEISELHKSKCQSLELIEQRDAEIKEKDGIIQSYYNKIVNLAETSAGKEARIQEVEAKFTHCQAICNRMTQEKELLEKHNVWLDEELKAKVKNLAELRKTNMDEEARLSASIAELEREISESSSSLRRSKERISELEQRVSYMEKELRSTKDTAAANEQRLGAELSTVKKLAELHQESSEEWSKKAGELEGVIKALETHLTQVEDEYKEKLEKETLSRRDLEKEAVNLKQKLEKCEFDLENTRKSSELSLVPLTSIAAGSSDVVDTTVQGLPISDAVNQNDLMVIPKVPSGVSGTALAASLLRDGWSLAKIYEKYQEATDAFLHERRGRRHAEAVLERVLHEIEEKAELILDERAEHERMVEAYAMMDQKLQQALLEHDNFENNVRNLKSELKRRERDHSVAQKEIDDLQKQVAVLLKECQDIQLRCGSSLPNVGYVASSSLVNVLSNVEHDIKDNMSFKDINGLVQQNVQLRNQIHMLSADLDKKDMELRESFQIELKKITDAAASRVEKVMKKSEEQAIMIESLHRSVAMYRKLCEEQQKARSNVESAPTTLQDSSRTDLMVLFEGSQEVSKKAYEQVSERARSLDEELTKLRTELESLRSERDKAVLEADFARDRLNGFAAELEHQRKESNSASLRNAELTRLVVDYERRLREDLDSKQALEENLRKLSMEVSTLKNAKESLEKSERRALDEVRDLTERVHRLQATIDTIHTTEEVQENARSMERRNHEEHIKRLERDWAELNKELQEQRDHVRVLSLDKKNVFDSCMKQVEDMRKELNNSWKAVSDAEARAAIAEAKCSDLEAKVKSRKAISRDGCHEISAASEENDELFQLKEELEKYKEEAQANKNYMVQYKEIAHSNEVALKQLESAHQDYKAETEVGRKALEDEIVNLRDKLSEMEKSYVIKCEEAANAIESKEKHITSLMNEISVLRTEVSQKLPQLEKLEIELALSKSSLDEQYKRWRTAQDNYERQVILQSETIQELTNTSKQLSSLQHEITVLRQTADALKNENECLRSSAEQEKIGLLKEKDDALQKYNELNDQNRILHNQLEALHIRLAEKERNIAGLSSHRTDNSHAEDDLQSVISYLRRSKEIAETEISLLKQEKSRLQIELESSLKSAKEAQDLLRSQADSARALMFKDEEFKSLQIQVREINLLRESNIQLREENRHNFEECQKFREEAQKAKMESERLQNLLLEKEVDAEMCKRELEMQKAEIANLNQSISELIENSKGIDLNTYEAMKNELQNIKSTLRENSMELESAKILLSEKEVAIKILEDKLSLCQSELDSKEKKLNDVEASLKSEIDKHKKINLNLKRKHDNLMKEKGEIAKENQSLVKQMEDLKSTAQKTTSETTLEQAIKEKDFRIQTLERTLEKERDDNKKEKAKSRRNENTIFGALQKVQQDKKQVEESIDKHKQAVRELIENYPGLSSEVPPISALEEQLLSYFRAAKDMEESSSPFRDGAATQTPVVETAPVDAPTSAGGRPVDTSSRPAKAKMTEERAVPKPSSEVRRPGGRRPLVRPTLERTEEPHADTDISAVDASTVQDKGGPPAEQETSGILPVLQPLSRKRLITSSQTVDSASQGEANDVNPPSKKPKEEESSQGTSELKSGQPPLGDVAAQVNVLPATDDLDGQQPTEEIDTDQAPEPMVEVEATREEDGGDKDDSGDASTDIKGQDADANIDANAIPLEEEHVVAKSEAIIESFDDDRKTEDSKEDAQRTTATDVDDDMEEGELAEEPEDKSDVDMSEIEGEATAERAAVEPDQSPITQPGAADASPSRTADASPAREPSPSPVQAGASSRPQNTSTATEAREPSSNPAQAGASSEQRNTSTVVEAAETRSRTINLSERARQNRQTRFQRAQQPGTARGRGQQSVTLRVWFLYSCSFQLGAYIQH

SEQ ID NO: 177138 - protein, 1996 aa, Zea Mays
MPLFISDEELRLLGGDTAAVAERADAAIRELRRQVDTVRAEADAAAIAAEQTCALLEQRYASLSAEFDRSKAEAAELTASAERRAAELASSQAEIHQLRIQAIAKDGEVERLKIEISELHKSKCQSLELIEQRDAEIKEKDGIIQSYYNKIVNLAETSAGKEARIQEVEAKFTHCQAICNRMTQEKELLEKHNVWLDEELKAKVKNLAELRKTNMDEEARLSASIAELEREISESSSSLRRSKERISELEQRVSYMEKVKKLAELHQESSEEWSKKAGELEGVIKALETHLTQVEDEYKEKLEKETLSRRDLEKEAVNLKQKLEKCEFDLENTRKSSELSLVPLTSIAAGSSDVVDTTVQGLPISDAVNQNDLMVIPKVPSGVSGTALAASLLRDGWSLAKIYEKYQEATDAFLHERRGRRHAEAVLERVLHEIEEKAELILDERAEHERMVEAYAMMDQKLQQALLEHDNFENNVRNLKSELKRRERDHSVAQKEIDDLQKQVAVLLKECQDIQLRCGSSLPNVGYVASSSLVNVLSNVEHDIKDNMSFKDINGLVQQNVQLRNQIHMLSADLDKKDMELRESFQIELKKITDAAASRVEKVMKKSEEQAIMIESLHRSVAMYRKLCEEQQKARSNVESAPTTLQDSSRTDLMVLFEGSQEVSKKAYEQVSERARSLDEELTKLRTELESLRSERDKAVLEADFARDRLNGFAAELEHQRKESNSASLRNAELTRLVVDYERRLREDLDSKQALEENLRKLSMEVSTLKNAKESLEKSERRALDEVRDLTERVHRLQATIDTIHTTEEVQENARSMERRNHEEHIKRLERDWAELNKELQEQRDHVRVLSLDKKNVFDSCMKQVEDMRKELNNSWKAVSDAEARAAIAEAKCSDLEAKVKSRKAISRDGCHEISAASEENDELFQLKEELEKYKEEAQANKNYMVQYKEIAHSNEVALKQLESAHQDYKAETEVGRKALEDEIVNLRDKLSEMEKSYVIKCEEAANAIESKEKHITSLMNEISVLRTEVSQKLPQLEKLEIELALSKSSLDEQYKRWRTAQDNYERQVILQSETIQELTNTSKQLSSLQHEITVLRQTADALKNENECLRSSAEQEKIGLLKEKDDALQKYNELNDQNRILHNQLEALHIRLAEKERNIAGLSSHRTDNSHAEDDLQSVISYLRRSKEIAETEISLLKQEKSRLQIELESSLKSAKEAQDLLRSQADSARALMFKDEEFKSLQIQVREINLLRESNIQLREENRHNFEECQKFREEAQKAKMESERLQNLLLEKEVDAEMCKRELEMQKAEIANLNQSISELIENSKGIDLNTYEAMKNELQNIKSTLRENSMELESAKILLSEKEVAIKILEDKLSLCQSELDSKEKKLNDVEASLKSEIDKHKKINLNLKRKHDNLMKEKGEIAKENQSLVKQMEDLKSTQKTTSETTLEQAIKEKDFRIQTLERTLEKERDDNKKEKAKSRRNENTIFGALQKVQQDKKQVEESIDKHKQAVRELIENYPGLSSEVPPISALEEQLLSYFRAAKDMEESSSPFRDGAATQTPVVETAPVDAPTSAGVAGRPVDTSSRPAKAKMTEERAVPKPSSEVRRPGGRRPLVRPTLERTEEPHADTDISAVDASTVQDKGGPPAEQETSGILPVLQPLSRKRLITSSQTVDSASQGEANDVNPPSKKPKEEESSQGTSELKSGQPPLGDVAAQVNVLPATDDLDGQQPTEEIDTDQAPEPMVEVEATREEDGGDKDDSGDASTDIKGQDADANIDANAIPLEEEHVVAKSEAIIESFDDDRKTEDSKEDAQRTTATDVDDDMEEGELAEEPEDKSDVDMSEIEGEATAERAAVEPDQSPITQPGAADASPSRTADASPAREPSPSPVQAGASSRPQNTSTATEAREPSSNPAQAGASSEQRNTSTVVEAAETRSRTINLSERARQNRQTRFQRAQQPGTARGRGQQSVTLRKDATGRGSRGRGGRGQS

SEQ ID NO: 177139 - protein, 1995 aa, Zea Mays
MPLFISDEELRLLGGDTAAVAERADAAIRELRRQVDTVRAEADAAAIAAEQTCALLEQRYASLSAEFDRSKAEAAELTASAERRAAELASSQAEIHQLRIQAIAKDGEVERLKIEISELHKSKCQSLELIEQRDAEIKEKDGIIQSYYNKIVNLAETSAGKEARIQEVEAKFTHCQAICNRMTQEKELLEKHNVWLDEELKAKVKNLAELRKTNMDEEARLSASIAELEREISESSSSLRRSKERISELEQRVSYMEKVKKLAELHQESSEEWSKKAGELEGVIKALETHLTQVEDEYKEKLEKETLSRRDLEKEAVNLKQKLEKCEFDLENTRKSSELSLVPLTSIAAGSSDVVDTTVQGLPISDAVNQNDLMVIPKVPSGVSGTALAASLLRDGWSLAKIYEKYQEATDAFLHERRGRRHAEAVLERVLHEIEEKAELILDERAEHERMVEAYAMMDQKLQQALLEHDNFENNVRNLKSELKRRERDHSVAQKEIDDLQKQVAVLLKECQDIQLRCGSSLPNVGYVASSSLVNVLSNVEHDIKDNMSFKDINGLVQQNVQLRNQIHMLSADLDKKDMELRESFQIELKKITDAAASRVEKVMKKSEEQAIMIESLHRSVAMYRKLCEEQQKARSNVESAPTTLQDSSRTDLMVLFEGSQEVSKKAYEQVSERARSLDEELTKLRTELESLRSERDKAVLEADFARDRLNGFAAELEHQRKESNSASLRNAELTRLVVDYERRLREDLDSKQALEENLRKLSMEVSTLKNAKESLEKSERRALDEVRDLTERVHRLQATIDTIHTTEEVQENARSMERRNHEEHIKRLERDWAELNKELQEQRDHVRVLSLDKKNVFDSCMKQVEDMRKELNNSWKAVSDAEARAAIAEAKCSDLEAKVKSRKAISRDGCHEISAASEENDELFQLKEELEKYKEEAQANKNYMVQYKEIAHSNEVALKQLESAHQDYKAETEVGRKALEDEIVNLRDKLSEMEKSYVIKCEEAANAIESKEKHITSLMNEISVLRTEVSQKLPQLEKLEIELALSKSSLDEQYKRWRTAQDNYERQVILQSETIQELTNTSKQLSSLQHEITVLRQTADALKNENECLRSSAEQEKIGLLKEKDDALQKYNELNDQNRILHNQLEALHIRLAEKERNIAGLSSHRTDNSHAEDDLQSVISYLRRSKEIAETEISLLKQEKSRLQIELESSLKSAKEAQDLLRSQADSARALMFKDEEFKSLQIQVREINLLRESNIQLREENRHNFEECQKFREEAQKAKMESERLQNLLLEKEVDAEMCKRELEMQKAEIANLNQSISELIENSKGIDLNTYEAMKNELQNIKSTLRENSMELESAKILLSEKEVAIKILEDKLSLCQSELDSKEKKLNDVEASLKSEIDKHKKINLNLKRKHDNLMKEKGEIAKENQSLVKQMEDLKSTAQKTTSETTLEQAIKEKDFRIQTLERTLEKERDDNKKEKAKSRRNENTIFGALQKVQQDKKQVEESIDKHKQAVRELIENYPGLSSEVPPISALEEQLLSYFRAAKDMEESSSPFRDGAATQTPVVETAPVDAPTSAGGRPVDTSSRPAKAKMTEERAVPKPSSEVRRPGGRRPLVRPTLERTEEPHADTDISAVDASTVQDKGGPPAEQETSGILPVLQPLSRKRLITSSQTVDSASQGEANDVNPPSKKPKEEESSQGTSELKSGQPPLGDVAAQVNVLPATDDLDGQQPTEEIDTDQAPEPMVEVEATREEDGGDKDDSGDASTDIKGQDADANIDANAIPLEEEHVVAKSEAIIESFDDDRKTEDSKEDAQRTTATDVDDDMEEGELAEEPEDKSDVDMSEIEGEATAERAAVEPDQSPITQPGAADASPSRTADASPAREPSPSPVQAGASSRPQNTSTATEAREPSSNPAQAGASSEQRNTSTVVEAAETRSRTINLSERARQNRQTRFQRAQQPGTARGRGQQSVTLRKDATGRGSRGRGGRGQS

SEQ ID NO: 177140 - protein, 1997 aa, Zea Mays
MPLFISDEELRLLGGDTAAVAERADAAIRELRRQVDTVRAEADAAAIAAEQTCALLEQRYASLSAEFDRSKAEAAELTASAERRAAELASSQAEIHQLRIQAIAKDGEVERLKIEISELHKSKCQSLELIEQRDAEIKEKDGIIQSYYNKIVNLAETSAGKEARIQEVEAKFTHCQAICNRMTQEKELLEKHNVWLDEELKAKVKNLAELRKTNMDEEARLSASIAELEREISESSSSLRRSKERISELEQRVSYMEKVKKLAELHQESSEEWSKKAGELEGVIKALETHLTQVEDEYKEKLEKETLSRRDLEKEAVNLKQKLEKCEFDLENTRKSSELSLVPLTSIAAGSSDVVDTTVQGLPISDAVNQNDLMVIPKVPSGVSGTALAASLLRDGWSLAKIYEKYQEATDAFLHERRGRRHAEAVLERVLHEIEEKAELILDERAEHERMVEAYAMMDQKLQQALLEHDNFENNVRNLKSELKRRERDHSVAQKEIDDLQKQVAVLLKECQDIQLRCGSSLPNVGYVASSSLVNVLSNVEHDIKDNMSFKDINGLVQQNVQLRNQIHMLSADLDKKDMELRESFQIELKKITDAAASRVEKVMKKSEEQAIMIESLHRSVAMYRKLCEEQQKARSNVESAPTTLQDSSRTDLMVLFEGSQEVSKKAYEQVSERARSLDEELTKLRTELESLRSERDKAVLEADFARDRLNGFAAELEHQRKESNSASLRNAELTRLVVDYERRLREDLDSKQALEENLRKLSMEVSTLKNAKESLEKSERRALDEVRDLTERVHRLQATIDTIHTTEEVQENARSMERRNHEEHIKRLERDWAELNKELQEQRDHVRVLSLDKKNVFDSCMKQVEDMRKELNNSWKAVSDAEARAAIAEAKCSDLEAKVKSRKAISRDGCHEISAASEENDELFQLKEELEKYKEEAQANKNYMVQYKEIAHSNEVALKQLESAHQDYKAETEVGRKALEDEIVNLRDKLSEMEKSYVIKCEEAANAIESKEKHITSLMNEISVLRTEVSQKLPQLEKLEIELALSKSSLDEQYKRWRTAQDNYERQVILQSETIQELTNTSKQLSSLQHEITVLRQTADALKNENECLRSSAEQEKIGLLKEKDDALQKYNELNDQNRILHNQLEALHIRLAEKERNIAGLSSHRTDNSHAEDDLQSVISYLRRSKEIAETEISLLKQEKSRLQIELESSLKSAKEAQDLLRSQADSARALMFKDEEFKSLQIQVREINLLRESNIQLREENRHNFEECQKFREEAQKAKMESERLQNLLLEKEVDAEMCKRELEMQKAEIANLNQSISELIENSKGIDLNTYEAMKNELQNIKSTLRENSMELESAKILLSEKEVAIKILEDKLSLCQSELDSKEKKLNDVEASLKSEIDKHKKINLNLKRKHDNLMKEKGEIAKENQSLVKQMEDLKSTAQKTTSETTLEQAIKEKDFRIQTLERTLEKERDDNKKEKAKSRRNENTIFGALQKVQQDKKQVEESIDKHKQAVRELIENYPGLSSEVPPISALEEQLLSYFRAAKDMEESSSPFRDGAATQTPVVETAPVDAPTSAGVAGRPVDTSSRPAKAKMTEERAVPKPSSEVRRPGGRRPLVRPTLERTEEPHADTDISAVDASTVQDKGGPPAEQETSGILPVLQPLSRKRLITSSQTVDSASQGEANDVNPPSKKPKEEESSQGTSELKSGQPPLGDVAAQVNVLPATDDLDGQQPTEEIDTDQAPEPMVEVEATREEDGGDKDDSGDASTDIKGQDADANIDANAIPLEEEHVVAKSEAIIESFDDDRKTEDSKEDAQRTTATDVDDDMEEGELAEEPEDKSDVDMSEIEGEATAERAAVEPDQSPITQPGAADASPSRTADASPAREPSPSPVQAGASSRPQNTSTATEAREPSSNPAQAGASSEQRNTSTVVEAAETRSRTINLSERARQNRQTRFQRAQQPGTARGRGQQSVTLRKDATGRGSRGRGGRGQS

SEQ ID NO: 177141 - protein, 173 aa, Zea Mays
MAPCCGSARDGSGFDPLTSHPSAKKAAPARMAVPQAWEYQRLYCRTANRHWSRRVAASGIAASGGFGYPALPGCALPTPGKRGRATLPSAGWGGGDVVGFSWWFAIPALWIDHPQPLDEERRQERRAILCTRTSLKQASAWRPNLRTGIEGRCTENVLHYRSRDGMIHFKKDT

SEQ ID NO: 177142 - protein, 403 aa, Zea Mays
MAATTRTAARTSHSASSAPTSWFSTTATTWSPSGWTKRPNASAWRGAGSTTLSTCSRALELVLPSPAFLILVRKAKNRYTWIGFGGVSISLRELKERALREKSGLAPLQTEQQSAATISEDEDDDTLANPGAYIETERLSQTVDKPSGKPGASGCRLRSDHRKEKSLGLLTQNFVKLFLTMEVDTISLDEAAKLLLGEGHEETNMRTKVRRLYDIANVLSSLNLIEKIHQGDSRKPAFRWLGRATLNTENGVTVAVPPPGKIASKKRAFGTELTNIDMHRSNLDSKNKKKAKLVQSSGDVLTNCKLAVRSRLGQGKQSGFVYGPFHPSGARKHGLDGGNKPGQRERAEDWESLSASFRPQYQNQALSDLFVHYVDAWKTWYSEFAQGSSIMQQHFGHPVNHFL

SEQ ID NO: 177143 - protein, 107 aa, Zea Mays
MDTYRYHGHSMSDPGSTYRTRDEISGVRQERDPIERVRKLLLTHDLANAAELKNMEKEIRKQVDDAIAKAKESSMPDTSELFTNVYKKGFGVESFGPDRKEMRASLP

SEQ ID NO: 177144 - protein, 73 aa, Zea Mays
MILCRPYNIHLCTNKSNETLKEMEKRSLALNITGSGEMEKRPLAFQPCFSSRGLKKPDRGFHFVLTACLSENI

SEQ ID NO: 177145 - protein, 887 aa, Zea Mays
MAAAFSAAILFHLLLLLFSPSAAQPGFISLDCGGARDHTDAIGIQWTSDASFVSGGQAAQLLVQNGLQQTQQQLTTVRYFPADNRKHCYTMNVRNRTRYLVRATFLYGNFDNSNVYPKFDISLGASPWSTIVVDDATTPVVEEAIILAAAPTLSVCLSNASTGQPFISTLELRQFNGSLYYTTDETRFFLGLSARINFGAGSNDSVRYPDDPFDRIWESDSVRRANYLVDVAPGTERISTTKPIFVGTNEEPPEKVMQTAVVGQDGSLNYRLDLEGFPANAWGVSYFAEIEDLAPNETRKFKLEVPGMPALSKPTVDVEENAQGKYRLYEPGYTNLSLPFVFSFGFRKTNDSSKGPILNALEIYKYVQITMGSQDANIMASMVSRYPQEGWAQEGGDPCLPASWSWVQCSSETSPRIFSITLSGKNITGSIPVELTKLSGLVELRLDGNSFSGQIPDFRECGNLQYIHLENNQLTGELPSSLGDLPNLKELYVQNNKLSGQVPKALFKRSIILNFSGNSGLHIVSNGISHTIIVICLVIGAVVLLGVAIGCYFITCRRKKKSHEDTVVIAAAPAKKLGSYFSEVATESAHRFSLSEIENATGKFERRIGSGGFGIVYYGKLADGREIAVKLLTNDSYQGIREFLNEVTLLSRIHHRHLVTFLGYSQQDGKNILVYEFMHNGTLKEHLRGADNEKITSWLKRLEIAEDSAKGIEYLHTGCSPTIIHRDLKSSNILLDKNMRAKVADFGLSKPAVDGSHVSSIVRGTVGYLDPEYYISQQLTEKSDIYSFGVILLELISGHEPISNDNFGLNCRNIVAWARSHIESGNIHAIIDESLDRGCYDLQSVWKIAEVAWSRMEEHLSTSCSCSRVSDEMRTTYSYLESIVCSN

SEQ ID NO: 177146 - protein, 58 aa, Zea Mays
MDGCHAIQVQLRLPCPAQAPTTTTLSSADSVSFTACVKVFRSFQVKIRTATECSPTWL

SEQ ID NO: 177147 - protein, 104 aa, Zea Mays
MLLNSVCPYDPICGGKHTNALKEMSEPLKIFKQLDGIKSVLEKRKTILSGTYIQSEKISREERMPAGRRDMLENGMRHLASCWIPARGQEEAVRTIRCTERMLA

SEQ ID NO: 177148 - protein, 244 aa, Zea Mays
MVHCSFAGVVHCSSATSFDLLCSLHTRVEGVDSWTAHDSTILYWFIPGLPVVICAGKFLVLIICPPVTPLSREADAISFPDRTGAPLPPLRPYMAVPRPQIRALRRGTLLLFLVPLIYSVSRLQPWAPEKGVCLPPPTAPKRPDHLVLGPAAGQDRPDRLQCRGLRALNKIGISSEENYSGEHVSFATVFTTYNSVSAGDDNVPSDSVTVGNSSYSKIERSMAILNTFISFIKIARNPIYLTYS

SEQ ID NO: 177149 - protein, 140 aa, Zea Mays
MAVPRPQIRALRRGTLLLFLVPLIYSVSRLQPWAPEKGVCLPPPTAPKRPDHLVLGPAAGQDRPDRLQCRGLRALNKIGISSEENYSGEHVSFATVFTTYNSVSAGDDNVPSDSVTVGNSSYSKIERSMAILNTFISFIK

SEQ ID NO: 177150 - protein, 196 aa, Zea Mays
MLQRIKTYIAFLEQKLVEFDRMERLNHFVLTDSDIAVVGDLGHIFKKYPHFHLAVTFRNNKGQPLNSGFVAVRGTRDGITNLRYMKASRMLGDQLALAWVVKSHLPSAFGKFSKNEAFTGEVNGTSVLFLPCAVYNWTPPEGAGQFHGVPLDVKVVHFKGSRKRLMLEAWNFYSSTSKLSDMLCLILRSGRTKYDF

SEQ ID NO: 177151 - protein, 271 aa, Zea Mays
MAVPRPQIRALRRGTLLLFLVPLIYSVSRLQPWAPEKGVCLPPPTAPKRPDHLVLGPAAGQDRPDRLQCRGLRALNKIGISSEENYSGEHVSFATVFTTYNSVSAGDDNVPSDSVTVGNSSYSKIERSMAILNTFISFIKVSMPRSDLIILTDPGSKISVNQGTATLLPVEGNYSRGNLMLQRIKTYIAFLEQKLVEFDRMERLNHFVLTDSDIAVVGDLGHIFKKYPHFHLAVTFRNNKGQPLNSGFVAVRGTRDGITKFKIYEGFSYAW

SEQ ID NO: 177152 - protein, 155 aa, Zea Mays
MAVPRPQIRALRRGTLLLFLVPLIYSVSRLQPWAPEKGVCLPPPTAPKRPDHLVLGPAAGQDRPDRLQCRGLRALNKIGISSEENYSGEHVSFATVFTTYNSVSAGDDNVPSDSVTVGNSSYSKIERSMAILNTFISFIKNPAGINAKKRLDHID

SEQ ID NO: 177153 - protein, 112 aa, Zea Mays
MKASRMLGDQLALAWVVKSHLPSAFGKFSKNEAFTGEVNGTSVLFLPCAVYNWTPPEGAGQFHGVPLDVKVVHFKGSRKRLMLEAWNFYSSTSKLSDMLCLILRSGRTKYDF

SEQ ID NO: 177154 - protein, 238 aa, Zea Mays
MRTSFTRLGCSTATSLSARCPTPTTTSSTSESATFHRTRAGDATQINNITCTCLLTQLCGAHLAEHGISAQQMYVTPPDTDIYSIPRVLAPMPQKYARCTKKNFGRYHVSEPPVEHLRDPLYKTEREIMKVFLTKHYRNRRADDPDFFLDFEEIYVIDSRTRSITRAKVMVSVPEGKKRDRRNDLLLIRDGGESFRIIDKTKRDDASTIIQREEWAKSRQDVEKHFRKLRDFDYSNWF

SEQ ID NO: 177155 - protein, 81 aa, Zea Mays
MDKGCRNIEANCLNWLTPNKVLDHIHILATCFSVEAGPEECETQTTKRKCCSNVYINIKISRDSHEVKHNRFEKKIKYLER

SEQ ID NO: 177156 - protein, 387 aa, Zea Mays
MASTRAAATLLLLLALAGTSSAQLSTGFYSYSCPGVYGAVKSVMQSAIAREKRMGASILRLFFHDCFVQGCDASLLLDDTPSFQGEKMANPNNGSVRGFEVIDAVKSAVEKLCPGVVSCADILAIAARDSVVILGGPTWDVKVGRRDSTTASFSGANNNIPPPTSGLANLTSLFAAQGLSQKDMVALSGAHTIGQARCTNFRAHIYNDTDIDAAFARTRQSGCPSTSGAGGDNNLAPLDLQTPTVFENNYYRNLLAKKGLLHSDQELFNGGATDALVQSYVGSQSAFFADFVAGMIKMGDNNLAPLDLQTPTVFENNYYKNLVCKKGLLHSDQELFNGGATDALVQSYASGQSEFFSDFVTGMVKMGDITPLTGSGGQIRKNCRRVN

SEQ ID NO: 177157 - protein, 318 aa, Zea Mays
MASTRAAATLLLLLALAGTSSAQLSTGFYSYSCPGVYGAVKSVMQSAIAREKRMGASILRLFFHDCFVQGCDASLLLDDTPSFQGEKMANPNNGSVRGFEVIDAVKSAVEKLCPGVVSCADILAIAARDSVVILGGPTWDVKVGRRDSTTASFSGANNNIPPPTSGLANLTSLFAAQGLSQKDMVALSGAHTIGQARCTNFRAHIYNDTDIDAAFARTRQSGCPSTSGAGDNNLAPLDLQTPTVFENNYYKNLVCKKGLLHSDQELFNGGATDALVQSYASGQSEFFSDFVTGMVKMGDITPLTGSGGQIRKNCRRVN

SEQ ID NO: 177158 - protein, 82 aa, Zea Mays
MRIGSPRTSNSGTWLCWLSQLSFTMPHSLSRVHLNMTVDSTYFTLSSHRFLFFHLQSFPCTRRYRLIVCFLPFIDFAYAFIT

SEQ ID NO: 177159 - protein, 80 aa, Zea Mays
MALVGARRDGRHTHLQRGARVCCACLRAVEKRGQSGSEPSARYYIHPLPHANVLQILQLLLENGIRVNELTRTEVALVVP

SEQ ID NO: 177160 - protein, 1256 aa, Zea Mays
MARQTSVTEADLEFMLIDENAKPKPLPYSLLEKITNGFSGAHIIGYGGSADVYEGFIGNHKIAVKRLRIPYQHEKEFSQEIECLMKVKHINVVRFIGYCSDTQGQAEKYEDNHVMADSQERLICFEFLPACLDKYIKDPSCSLEWRQRYQIINGVCQGLHQLHEHEILHLDLNPRNILLDDDMVPKISDFGISKCLKKNQGHFYTETISGTPIYMSPERGKHGPITTKSDLFSLGVTVIEIMTGNKENIDQATVEDVFASCIKIFNDKSLTAAQVRQIMVCAEIGIKCRNSEPDKRPSNTKEIIDKLEEEARTEESQESGKLLKVLPTLLLFDLHPGKLIPCSLQLTNDTDEHMAYKLSITESVDWSKYFTTKLPLYGIVQARSTYTVILTVLLECDAPVINRSCYMTLQSCTLAYEYIWKFNNTLEFEDFLEVKKTENAVKEVKLKAFLCEEGRSISKQTRPRVKLLSIVKPQTPLLSLDAHPTKPWVITGHAFGHVRIWNHETQKLLYSFKLSLGPVYSVKFIARKQWFVSSSAEGLIHVYSMETKMQKVKSYRAHDGVSISLAVHPTLPYVLSWPCSGPHEKKLWNWEKGWDCTQTFEREYVARNFVCQVAFDPKETNRFASASNYRVKVWSVDLPKCNYNLPGFFNEVNFLEFFTRDDQQYLIITVSHDKTAKIWDMRNKKYVYDSMEQNLMSPVSSVFSHPNLPILLTRSIDGTSHFWSPKDFRFEAVLDCRYGGHVWGIACLMGSKRRFVIGQETALTILDVGDQECQDMRQEGTSSEVITPGSSELLLDVHPLTLHFPFHAHKLIPCTLHLTNKTDEHVAFNLSIEDGMESWQQIFVRMPLSGIVPPKSTYTLVVTMRELTYLPTQNFNLTLQSNICEDRYIYSFMSLSESDQFFEDLKEIRNVAPPQVKLKAVFSLQGQTTFENGSSTGENLVQPLINIWTLFNPAKDFSSMLISLDADPTESWVITGHRHGDVALWKHGMQKMMSLINISGEASLPRNSLNTQHDVYSVKFIARKRWFVAGTCDGFIHVYKYETRIMDCIKRFRAYSSGIIDWGICSSRALIVHPTQPYLLSTCEEMKLWDWDDDWKCIQKFGREHTDSILQVAFSPNDSFASVSSDHTIKLWCLKSPTSECTLHGHSDKVNCLDFVTHDGQQYLISGSQDCTAKAWALKEKECVQTMDVFMSPVVSVISLPDTPYITTGSADGTIHLWSSANFRLERILSLGLCGPVWDLRLIGPTRLARQLPQMS

SEQ ID NO: 177161 - protein, 718 aa, Zea Mays
MARQTSVTEADLEFMLIDENAKPKPLPYSLLEKITNGFSGAHIIGYGGSADVYEGFIGNHKIAVKRLRIPYQHEKEFSQEIECLMKVKHINVVRFIGYCSDTQGQAEKYEDNHVMADSQERLICFEFLPACLDKYIKDPSCSLEWRQRYQIINGVCQGLHQLHEHEILHLDLNPRNILLDDDMVPKISDFGISKCLKKNQGHFYTETISGTPIYMSPERGKHGPITTKSDLFSLGVTVIEIMTGNKENIDQATVEDVFASCIKIFNDKSLTAAQVRQIMVCAEIGIKCRNSEPDKRPSNTKEIIDKLEEEARTEESQESGKLLKVLPTLLLFDLHPGKLIPCSLQLTNDTDEHMAYKLSITESVDWSKYFTTKLPLYGIVQARSTYTVILTVLLECDAPSCTLAYEYIWKFNNTLEFEDFLEVKKTENAVKEVKLKAFLCEEGRSISKQTRPRVKLLSIVKPQTPLLSLDAHPTKPWVITGHAFGHVRIWNHETQKLLYSFKLSLGPVYSVKFIARKQWFVSSSAEGLIHVYSMETKMQKVKSYRAHDGVSISLAVHPTLPYVLSWPCSGPHEKKLWNWEKGWDCTQTFEREYVARNFVCQVAFDPKETNRFASASNYRVKVWSVDLPKCNYNLPGFFNEVNFLEFFTRDDQQYLIITVSHDKTAKIWDMRNKKYVYDSMEQNLMSPVSSVFSHPNLPILLTRSIDGTSHFWSPKDFR

SEQ ID NO: 177162 - protein, 976 aa, Zea Mays
MARQTSVTEADLEFMLIDENAKPKPLPYSLLEKITNGFSGAHIIGYGGSADVYEGFIGNHKIAVKRLRIPYQHEKEFSQEIECLMKVKHINVVRFIGYCSDTQGQAEKYEDNHVMADSQERLICFEFLPACLDKYIKDPSCSLEWRQRYQIINGVCQGLHQLHEHEILHLDLNPRNILLDDDMVPKISDFGISKCLKKNQGHFYTETISGTPIYMSPERGKHGPITTKSDLFSLGVTVIEIMTGNKENIDQATVEDVFASCIKIFNDKSLTAAQVRQIMVCAEIGIKCRNSEPDKRPSNTKEIIDKLEEEARTEESQESGKLLKVLPTLLLFDLHPGKLIPCSLQLTNDTDEHMAYKLSITESVDWSKYFTTKLPLYGIVQARSTYTVILTVLLECDAPVINRSCYMTLQSCTLAYEYIWKFNNTLEFEDFLEVKKTENAVKEVKLKAFLCEEGRSISKQTRPRVKLLSIVKPQTPLLSLDAHPTKPWVITGHAFGHVRIWNHETQKLLYSFKLSLGPVYSVKFIARKQWFVSSSAEGLIHVYSMETKMQKVKSYRAHDGVSISLAVHPTLPYVLSWPCSGPHEKKLWNWEKGWDCTQTFEREYVARNFVCQVAFDPKETNRFASASNYRVKVWSVDLPKCNYNLPGFFNEVNFLEFFTRDDQQYLIITVSHDKTAKIWDMRNKKYVYDSMEQNLMSPVSSVFSHPNLPILLTRSIDGTSHFWSPKDFRFEAVLDCRYGGHVWGIACLMGSKRRFVIGQETALTILDVGDQECQDMRQEGTSSEVITPGSSELLLDVHPLTLHFPFHAHKLIPCTLHLTNKTDEHVAFNLSIEDGMESWQQIFVRMPLSGIVPPKSTYTLVVTMRELTYLPTQNFNLTLQSNICEDRYIYSFMSLSESDQFFEDLKEIRNVAPPQVKLKAVFSLQGQTTFENGSSTGENLVQPLINIWTLFNPAKDFSSMLISLDADPTESWSPPR

SEQ ID NO: 177163 - protein, 1212 aa, Zea Mays
MDVFMSPVVSVISLPDTPYITTGSADGTIHLWSSANFRLERILSLGLCGPVWDLRLIGPTRIVIQPNNYEISVIMDIDTGSEASSSAPSNELIQVDPKELRFPVAQEVSSTLEIRNVTDHHVAFCMWSLNHTANYIPVPNIEVLSPQSMRQVVITRIARREPVPADPVDDIVYVKGTTVVQGTTSADVTYDMFDGTRTGQILQPAMELNVVLVADSEIIHKARLPWALDVHPTMPWIMMAQGDYQIRIWNYKTRIEKPIAIKGREVTSAKFIMHKQWILAGCSSGLVYVYRYEPEKKKSVEKIRVLQGHSNAINSLAVHSTKPCVLSASKDGKILIWDYENEWELMKTFDVKSPVQHVAFSPKDSNMFASAQDKTVKIWDWHSGNCKSTLSGHSDLVLCLDYFSQGDQLYLITGSRDKTAKIWDCKTRSCVRTLEGHTDVVNVACCHPDLLILITGSLNGSVRLWDLNRSTTFRYELIFDLGEVYAIASLKGTRIVIGHEIGLALVDIDLEGKKDGYVKSNVAIMDSKNDTDQNMKELSPTASSSEVQKVSSIIALETLYKMKSSESSIDVHPTETWMVITSDKYVHIWDYHTREVKQMMDTKGAKVRLAKFIARKQWVIAGATSGFIFVYDYDSKKEIIHVLCNHTEPIKSLAIHGTEPLVLSASVDGKILLWDYANDWHLIKTFDARSQRLVQVAFNPKDTNMFASAQGKTVKIWDRQHDECQYKLDGHSHQIECFDYFSGGDFDKLYIVTGSQDKTAKIWDCENAGCVQTLEGHAGPVRAVCYHQNLSLLITGCSDGSIHLWNSTTFRLEHKLNFADFGLLSSVACLKGSKRIAIRSREGLALVDIDIEDKKDSDVESITTTASMNDTGPITEENGVAADHISDDHLAQGVVYVHTEIIGKVNSACTIDVHPTKPWMVITQANKFVHVWDYHTKVVEWTIQIKGAKVSSAKFIASQDWIVAGTTRGFLHVYDCESRKEIRRLCEHPKSITSLAVDDDALELVLSASIDGKILIWSYWHYYHARRRSTWHLEKTFDAGSQCLKQVAFIAPSVHRSSSTIIATARDGTVKIWDPDRSDGCREFTLAADSGQIVECFDWFSRGTDIYLVTGSRDNTAKIWDIEDGSCVRTLEGHADHVTVVCYHPDLSMLITGSRDGSIRLWNSTTFRFEHELNFDLGSLSSLACIKGSTRIAIGYERGLVLADICTQEHRA

SEQ ID NO: 177164 - protein, 639 aa, Zea Mays
MARQTSVTEADLEFMLIDENAKPKPLPYSLLEKITNGFSGAHIIGYGGSADVYEGFIGNHKIAVKRLRIPYQHEKEFSQEIECLMKVKHINVVRFIGYCSDTQGQAEKYEDNHVMADSQERLICFEFLPACLDKYIKDPSCSLEWRQRYQIINGVCQGLHQLHEHEILHLDLNPRNILLDDDMVPKISDFGISKCLKKNQGHFYTETISGTPIYMSPERGKHGPITTKSDLFSLGVTVIEIMTGNKENIDQATVEDVFASCIKIFNDKSLTAAQVRQIMVCAEIGIKCRNSEPDKRPSNTKEIIDKLEEEARTEESQESGKLLKVLPTLLLFDLHPGKLIPCSLQLTNDTDEHMAYKLSITESVDWSKYFTTKLPLYGIVQARSTYTVILTVLLECDAPVINRSCYMTLQSCTLAYEYIWKFNNTLEFEDFLEVKKTENAVKEVKLKAFLCEEGRSISKQTRPRVKLLSIVKPQTPLLSLDAHPTKPWVITGHAFGHVRIWNHETQFILSNLLHGSNGSSPALQKASYMSTVWKQKCRRSRVTELMTASAYRWPCIQPYHMCCHGLVRAPTRRSYGTGKRDGTAHKHLRGSTLQGILYVKLLLTQRRPTDLLALRTIGLRFGALIFPNVTIICLVFLTK

SEQ ID NO: 177165 - protein, 692 aa, Zea Mays
MARQTSVTEADLEFMLIDENAKPKPLPYSLLEKITNGFSGAHIIGYGGSADVYEGFIGNHKIAVKRLRIPYQHEKEFSQEIECLMKVKHINVVRFIGYCSDTQGQAEKYEDNHVMADSQERLICFEFLPACLDKYIKDPSCSLEWRQRYQIINGVCQGLHQLHEHEILHLDLNPRNILLDDDMVPKISDFGISKCLKKNQGHFYTETISGTPIYMSPERGKHGPITTKSDLFSLGVTVIEIMTGNKENIDQATVEDVFASCIKIFNDKSLTAAQVRQIMVCAEIGIKCRNSEPDKRPSNTKEIIDKLEEEARTEESQESGKLLKVLPTLLLFDLHPGKLIPCSLQLTNDTDEHMAYKLSITESVDWSKYFTTKLPLYGIVQARSTYTVILTVLLECDAPSCTLAYEYIWKFNNTLEFEDFLEQTRPRVKLLSIVKPQTPLLSLDAHPTKPWVITGHAFGHVRIWNHETQKLLYSFKLSLGPVYSVKFIARKQWFVSSSAEGLIHVYSMETKMQKVKSYRAHDGVSISLAVHPTLPYVLSWPCSGPHEKKLWNWEKGWDCTQTFEREYVARNFVCQVAFDPKETNRFASASNYRVKVWSVDLPKCNYNLPGFFNEVNFLEFFTRDDQQYLIITVSHDKTAKIWDMRNKKYVYDSMEQNLMSPVSSVFSHPNLPILLTRSIDGTSHFWSPKDFR

SEQ ID NO: 177166 - protein, 735 aa, Zea Mays
MARQTSVTEADLEFMLIDENAKPKPLPYSLLEKITNGFSGAHIIGYGGSADVYEGFIGNHKIAVKRLRIPYQHEKEFSQEIECLMKVKHINVVRFIGYCSDTQGQAEKYEDNHVMADSQERLICFEFLPACLDKYIKDPSCSLEWRQRYQIINGVCQGLHQLHEHEILHLDLNPRNILLDDDMVPKISDFGISKCLKKNQGHFYTETISGTPIYMSPERGKHGPITTKSDLFSLGVTVIEIMTGNKENIDQATVEDVFASCIKIFNDKSLTAAQVRQIMVCAEIGIKCRNSEPDKRPSNTKEIIDKLEEEARTEESQESGKLLKVLPTLLLFDLHPGKLIPCSLQLTNDTDEHMAYKLSITESVDWSKYFTTKLPLYGIVQARSTYTVILTVLLECDAPVINRSCYMTLQSCTLAYEYIWKFNNTLEFEDFLEVKKTENAVKEVKLKAFLCEEGRSISKQTRPRVKLLSIVKPQTPLLSLDAHPTKPWVITGHAFGHVRIWNHETQKLLYSFKLSLGPVYSVKFIARKQWFVSSSAEGLIHVYSMETKMQKVKSYRAHDGVSISLAVHPTLPYVLSWPCSGPHEKKLWNWEKGWDCTQTFEREYVARNFVCQVAFDPKETNRFASASNYRVKVWSVDLPKCNYNLPGFFNEVNFLEFFTRDDQQYLIITVSHDKTAKIWDMRNKKYVYDSMEQNLMSPVSSVFSHPNLPILLTRSIDGTSHFWSPKDFRAKKRSV

SEQ ID NO: 177167 - protein, 1021 aa, Zea Mays
MARQTSVTEADLEFMLIDENAKPKPLPYSLLEKITNGFSGAHIIGYGGSADVYEGFIGNHKIAVKRLRIPYQHEKEFSQEIECLMKVKHINVVRFIGYCSDTQGQAEKYEDNHVMADSQERLICFEFLPACLDKYIKDPSCSLEWRQRYQIINGVCQGLHQLHEHEILHLDLNPRNILLDDDMVPKISDFGISKCLKKNQGHFYTETISGTPIYMSPERGKHGPITTKSDLFSLGVTVIEIMTGNKENIDQATVEDVFASCIKIFNDKSLTAAQVRQIMVCAEIGIKCRNSEPDKRPSNTKEIIDKLEEEARTEESQESGKLLKVLPTLLLFDLHPGKLIPCSLQLTNDTDEHMAYKLSITESVDWSKYFTTKLPLYGIVQARSTYTVILTVLLECDAPVINRSCYMTLQSCTLAYEYIWKFNNTLEFEDFLEVKKTENAVKEVKLKAFLCEEGRSISKQTRPRVKLLSIVKPQTPLLSLDAHPTKPWVITGHAFGHVRIWNHETQKLLYSFKLSLGPVYSVKFIARKQWFVSSSAEGLIHVYSMETKMQKVKSYRAHDGVSISLAVHPTLPYVLSWPCSGPHEKKLWNWEKGWDCTQTFEREYVARNFVCQVAFDPKETNRFASASNYRVKVWSVDLPKCNYNLPGFFNEVNFLEFFTRDDQQYLIITVSHDKTAKIWDMRNKKYVYDSMEQNLMSPVSSVFSHPNLPILLTRSIDGTSHFWSPKDFRFEAVLDCRYGGHVWGIACLMGSKRRFVIGQETALTILDVGDQECQDMRQEGTSSEVITPGSSELLLDVHPLTLHFPFHAHKLIPCTLHLTNKTDEHVAFNLSIEDGMESWQQIFSNICEDRYIYSFMSLSESDQFFEDLKEIRNVAPPQVKLKAVFSLQGQTTFENGSSTGENLVQPLINIWTLFNPAKDFSSMLISLDADPTESWVITGHRHGDVALWKHGMQKMMSLINISGEASLPRNSLNTQHDVYSVKFIARKRWFVAGTCDGFIHVYKYETRIMDCIKRFRGISSS

SEQ ID NO: 177168 - protein, 996 aa, Zea Mays
MARQTSVTEADLEFMLIDENAKPKPLPYSLLEKITNGFSGAHIIGYGGSADVYEGFIGNHKIAVKRLRIPYQHEKEFSQEIECLMKVKHINVVRFIGYCSDTQGQAEKYEDNHVMADSQERLICFEFLPACLDKYIKDPSCSLEWRQRYQIINGVCQGLHQLHEHEILHLDLNPRNILLDDDMVPKISDFGISKCLKKNQGHFYTETISGTPIYMSPERGKHGPITTKSDLFSLGVTVIEIMTGNKENIDQATVEDVFASCIKIFNDKSLTAAQVRQIMVCAEIGIKCRNSEPDKRPSNTKEIIDKLEEEARTEESQESGKLLKVLPTLLLFDLHPGKLIPCSLQLTNDTDEHMAYKLSITESVDWSKYFTTKLPLYGIVQARSTYTVILTVLLECDAPVINRSCYMTLQSCTLAYEYIWKFNNTLEFEDFLEVKKTENAVKEVKLKAFLCEEGRSISKQTRPRVKLLSIVKPQTPLLSLDAHPTKPWVITGHAFGHVRIWNHETQKLLYSFKLSLGPVYSVKFIARKQWFVSSSAEGLIHVYSMETKMQKVKSYRAHDGVSISLAVHPTLPYVLSWPCSGPHEKKLWNWEKGWDCTQTFEREYVARNFVCQVAFDPKETNRFASASNYRVKVWSVDLPKCNYNLPGFFNEVNFLEFFTRDDQQYLIITVSHDKTAKIWDMRNKKYVYDSMEQNLMSPVSSVFSHPNLPILLTRSIDGTSHFWSPKDFRFEAVLDCRYGGHVWGIACLMGSKRRFVIGQETALTILDVGDQECQDMRQEGTSSEVITPGSSELLLDVHPLTLHFPFHAHKLIPCTLHLTNKTDEHVAFNLSIEDGMESWQQIFVRMPLSGIVPPKSTYTLVVTMRELTYLPTQNFNLTLQSNICEDRYIYSFMSLSESDQFFEDLKEIRNVAPPQVKLKAVFSLQGQTTFENGSSTGENLVQPLINIWTLFNPAKDFSSMLISLDADPTESWVITGHRHGDVALWKHGMQHTHLGS

SEQ ID NO: 177169 - protein, 1786 aa, Zea Mays
MARQTSVTEADLEFMLIDENAKPKPLPYSLLEKITNGFSGAHIIGYGGSADVYEGFIGNHKIAVKRLRIPYQHEKEFSQEIECLMKVKHINVVRFIGYCSDTQGQAEKYEDNHVMADSQERLICFEFLPACLDKYIKDPSCSLEWRQRYQIINGVCQGLHQLHEHEILHLDLNPRNILLDDDMVPKISDFGISKCLKKNQGHFYTETISGTPIYMSPERGKHGPITTKSDLFSLGVTVIEIMTGNKENIDQATVEDVFASCIKIFNDKSLTAAQVRQIMVCAEIGIKCRNSEPDKRPSNTKEIIDKLEEEARTEESQESGKLLKVLPTLLLFDLHPGKLIPCSLQLTNDTDEHMAYKLSITESVDWSKYFTTKLPLYGIVQARSTYTVILTVLLECDAPVINRSCYMTLQSCTLAYEYIWKFNNTLEFEDFLEVKKTENAVKEVKLKAFLCEEGRSISKQTRPRVKLLSIVKPQTPLLSLDAHPTKPWVITGHAFGHVRIWNHETQKLLYSFKLSLGPVYSVKFIARKQWFVSSSAEGLIHVYSMETKMQKVKSYRAHDGVSISLAVHPTLPYVLSWPCSGPHEKKLWNWEKGWDCTQTFEREYVARNFVCQVAFDPKETNRFASASNYRVKVWSVDLPKCNYNLPGFFNEVNFLEFFTRDDQQYLIITVSHDKTAKIWDMRNKKYVYDSMEQNLMSPVSSVFSHPNLPILLTRSIDGTSHFWSPKDFRFEAVLDCRYGGHVWGIACLMGSKRRFVIGQETALTILDVGDQECQDMRQEGTSSEVITPGSSELLLDVHPLTLHFPFHAHKLIPCTLHLTNKTDEHVAFNLSIEDGMESWQQIFVRMPLSGIVPPKSTYTLVVTMRELTYLPTQNFNLTLQSNICEDRYIYSFMSLSESDQFFEDLKEIRNVAPPQVKLKAVFSLQGQTTFENGSSTGENLVQPLINIWTLFNPAKDFSSMLISLDADPTESWVITGHRHGDVALWKHGMQKMMSLINISGEASLPRNSLNTQHDVYSVKFIARKRWFVAGTCDGFIHVYKYETRIMDCIKRFRAYSSGIIDWGICSSRALIVHPTQPYLLSTCEEMKLWDWDDDWKCIQKFGREHTDSILQVAFSPNDSFASVSSDHTIKLWCLKSPTSECTLHGHSDKVNCLDFVTHDGQQYLISGSQDCTAKAWALKEKECVQTMDVFMSPVVSVISLPDTPYITTGSADGTIHLWSSANFRLERILSLGLCGPVWDLRLIGPTRIVIQPNNYEISVIMDIDTGSEASSSAPSNELIQVDPKELRFPVAQEVSSTLEIRNVTDHHVAFCMWSLNHTANYIPVPNIEVLSPQSMRQVVITRIARREPVPADPVDDIVYVKGTTVVQGTTSADVTYDMFDGTRTGQILQPAMELNVVLVADSEIIHKARLPWALDVHPTMPWIMMAQGDYQIRIWNYKTRIEKPIAIKGREVTSAKFIMHKQWILAGCSSGLVYVYRYEPEKKKSVEKIRVLQGHSNAINSLAVHSTKPCVLSASKDGKILIWDYENEWELMKTFDVKSPVQHVAFSPKDSNMFASAQDKTVKIWDWHSGNCKSTLSGHSDLVLCLDYFSQGDQLYLITGSRDKTAKIWDCKTRSCVRTLEGHTDVVNVACCHPDLLILITGSLNGSVRLWDLNRSTTFRYELIFDLGEVYAIASLKGTRIVIGHEIGLALVDIDLEGKKDGYVKSNVAIMDSKNDTDQNMKELSPTASSSEVQKVSSIIALETLYKMKSSESSIDVHPTETWMVITSDKYVHIWDYHTRSDWLNL

SEQ ID NO: 177170 - protein, 688 aa, Zea Mays
MDSKNDTDQNMKELSPTASSSEVQKVSSIIALETLYKMKSSESSIDVHPTETWMVITSDKYVHIWDYHTREVKQMMDTKGAKVRLAKFIARKQWVIAGATSGFIFVYDYDSKKEIIHVLCNHTEPIKSLAIHGTEPLVLSASVDGKILLWDYANDWHLIKTFDARSQRLVQVAFNPKDTNMFASAQGKTVKIWDRQHDECQYKLDGHSHQIECFDYFSGGDFDKLYIVTGSQDKTAKIWDCENAGCVQTLEGHAGPVRAVCYHQNLSLLITGCSDGSIHLWNSTTFRLEHKLNFADFGLLSSVACLKGSKRIAIRSREGLALVDIDIEDKKDSDVESITTTASMNDTGPITEENGVAADHISDDHLAQGVVYVHTEIIGKVNSACTIDVHPTKPWMVITQANKFVHVWDYHTKVVEWTIQIKGAKVSSAKFIASQDWIVAGTTRGFLHVYDCESRKEIRRLCEHPKSITSLAVDDDALELVLSASIDGKILIWSYWHYYHARRRSTWHLEKTFDAGSQCLKQVAFIAPSVHRSSSTIIATARDGTVKIWDPDRSDGCREFTLAADSGQIVECFDWFSRGTDIYLVTGSRDNTAKIWDIEDGSCVRTLEGHADHVTVVCYHPDLSMLITGSRDGSIRLWNSTTFRFEHELNFDLGSLSSLACIKGSTRIAIGYERGLVLADICTQEHRA

SEQ ID NO: 177171 - protein, 418 aa, Zea Mays
MAATAAALRCCFPGSSGVGSGFVKPNSSRRGWCAAAVAAPSREAEPVSSLGHRTRVDFPILHQEFDDAKLVYFDNGATSQKPCSVMKTLDEYYRSYNSNVHRGIHALSAKATHAYEDARRKVANFVNAADSREIVFTRNATEAINLVAYSWGLSNLKEGDEKTGATLKYVGLTKENVPDIEQLKGFLSNKTKIVVVHHVSNVLGSMLPIEEIVTWSNRVGAKVLVDACQSVPHMPVDVQKLGADFLVASSHKMCGPTGVGFLHGKFEILSSMEPFLGGGEMIADVFEDKSTYAEPPSRFEAGTPAIGEAIGLGAAIDYLSCIGMEQIHEYEVNTNLGPVVRAIPTIASSLLLASAFQKELGTYLYESLLSVPNVQIYGPAPSQTVHRAPLCSFNIENVHPTDIAEILDLQHCLYRYSR

SEQ ID NO: 177172 - protein, 290 aa, Zea Mays
MAATAAALRCCFPGSSGVGSGFVKPNSSRRGWCAAAVAAPSREAEPVSSLGHRTRVDFPILHQEFDDAKLVYFDNGATSQKPCSVMKTLDEYYRSYNSNVHRGIHALSAKATHAYEDARRKVANFVNAADSREIVFTRNATEAINLVAYSWGLSNLKEGDEIVLTVAEHHSAIVPWQFVSQKTGATLKYVGLTKENVPDIEQLKGFLSNKTKIVVVHHVSNVLGSMLPIEEIVTWSNRVGAKVLVDACQSVPHMPVDVQKLGADFLVASSHKASDFCMVNLRFCRLWSLS

SEQ ID NO: 177173 - protein, 386 aa, Zea Mays
MAATAAALRCCFPGSSGVGSGFVKPNSSRRGWCAAAVAAPSREAEPVSSLGHRTRVDFPILHQEFDDAKLVYFDNGATSQKPCSVMKTLDEYYRSYNSNVHRGIHALSAKATHAYEDARRKVANFVNAADSREIVFTRNATEAINLVAYSWGLSNLKEGDEKTGATLKYVGLTKENVPDIEQLKGFLSNKTKIVVVHHVSNVLGSMLPIEEIVTWSNRVGAKVLVDACQSVPHMPVDVQKLGADFLVASSHKMCGPTGVGFLHGKFEILSSMEPFLGGGEMIADVFEDKSTYAEPPSRFEAGTPAIGEAIGLGAAIDYLSCIGMEQIHEYEKSWGHTSTKAFSLFQMSRYMARRLPRLSTVLRCAPSISRTSILQISQRFLICSIA

SEQ ID NO: 177174 - protein, 117 aa, Zea Mays
MEQIHEYEKELGTYLYESLLSVPNVQIYGPAPSQTVHRAPLCSFNIENVHPTDIAEILDLQHSVAIRSGHHCAQILHRTLGINASARASLHFYNTKDEVDTFVDALKATVDFLTDRY

SEQ ID NO: 177175 - protein, 463 aa, Zea Mays
MSDQQRHYGSYELLPAHPDLRCLVCTRPFTLDAEVTDSLEALAICRECKTTVLSDSNRDDTPRANRQRRWRRQQSSIRGVSVFSQLINLARQQGHEADTDSPTVPRRHTSYSSTPSRSQRGHTSDDESDGLSYADSVFGEIESNISFGDEGGESDTSLDRHTMVGREIGIQLDNESYMNTDTDIDPMNAGVYQWDSDDPEDDEDEESEESGLDEGDDTMQERRQQWHDIVPSGLNEQESEGAAWTWRTVGSQDINRTDLRVDMEGREIRRLFIGNPGDYVDARQFEMLLEQFADEDNNSRRGAPPAAASSIENLSSVVISKGYEINGGVTCPVCKDDMPITTVAKQLPCMHLYHSSCILPWLNSRNTCPVCRYELPTDDSEYERSKHAAVNEGGIHGVERTHPQEVVEETYEPEVDGGSNTGGDTMNETNTHEQHTAQQPNGAHGRHRWLFIAAAPVVVTSSM

SEQ ID NO: 177176 - protein, 443 aa, Zea Mays
MSDQQRHYGSYELLPAHPDLRCLVCTRPFTLDAEVTDSLEALAICRECKTTVLSDSNRDDTPRANRQRRWRRQQSSIRGVSVFSQLINLARQQGHEADTDSPTVPRRHTSYSSTPSRSQRGHTSDDESDGLSYADSVFGEIESNISFGDEGGESDTSLDRHTMVGREIGIQLDNESYMNTDTDIDPMNAGVYQWDSDDPEDDEDEESEESGLDEGDDTMQERRQQWHDIVPSGLNEQESEGAAWTWRTVGSQDINRTDLRVDMEGREIRRLFIGNPGDYVDARQFEMLLEQFADEDNNSRRGAPPAAASSIENLSSVVISKGYEINGGVTCPVCKDDMPITTVAKQLPCMHLYHSSCILPWLNSRNTCPVCRYELPTDDSEYERSKHAAVNEGGIHGVERTHPQEVVEETYEPEVDGGSNTGGDTMNETNTHVDTRRSWWSMF

SEQ ID NO: 177177 - protein, 83 aa, Zea Mays
MKNKYVGGASLACGGRQRRTCLLVTKKKIQFQWCRYLKILCSMLDGLPTCGHFPFRLVCYVKYVFKEKVEFLLLIHTSREQQY

SEQ ID NO: 177178 - protein, 648 aa, Zea Mays
MPPPPPPPPLTPYCRRCPPPHLPPPPPSSPNHFLLHYLHQLDHQEAAAAAMVRKRPASDMDLPPPRRHVTGDLSDVTAAAAAGVGGSGAPSSASAQLPALPTQLHQLPPAFQHHAPEVDVPAHPAPAAHAQAGGEATASTTAWVDGIIRDIIGSSGGAAVSITQLIHNVREIIHPCNPGLASLLELRLRSLLAADPAPLPPPPQPQQHALLHGAPAAAPAGLTLPPPPPLPDKRRHEHPPPCQQQQQEEPHPAPQSPKAPTAEETAAAAAAAQAAAAAAAKERKEEQRRKQRDEEGLHLLTLLLQCAEAVNADNLDDAHQTLLEIAELATPFGTSTQRVAAYFAEAMSARLVSSCLGLYAPLPPGSPAAARLHGRVAAAFQVFNGISPFVKFSHFTANQAIQEAFEREERVHIIDLDIMQGLQWPGLFHILASRPGGPPRVRLTGLGASMEALEATGKRLSDFADTLGLPFEFCAVAVHWLHHSLYDVTGSDSNTLWLIQRLAPKVVTMVEQDLSHSGSFLARFVEAIHYYSALFDSLDASYGEDSPERHVVEQQLLSREIRNVLAVGGPARTGDVKFGSWREKLAQSGFRAASLAGSAAAQASLLLGMFPSDGYTLVEENGALKLGWKDLCLLTASAWRPIQVPPCR

SEQ ID NO: 177179 - protein, 347 aa, Zea Mays
MPAFRAVTQVQQDAVGQGQSVPGDKVLNTLSIRCLTNCFSIIQCRFLHSCNCRTDAVQHRQSWPPPVQYGILGDGVQVWLPPWPPPVWEFWLSLKITGPQMMHSVGYFGLPVMPATCITISEIVSGSSEQIFPEIFLQSLHECRVCLSENTGRSLLQLPCHHLFCLMCMKSNCRIHVIEGNLTQVWLREDAVAYFKNMFDGGLRPTSNAFNKVIDRWVKVDMLNEAHGFFDMMLEKDIDDVTVVIFYFGGQHVGWEMKTKWLSNGWLCLLSPPIWRWFTTEGEEQEAAYEAAVEQLLVLEKELAVSWKPFFGGDKVGFVDLSLGPLAYVLPIDVRGGDRRRRERDDE

SEQ ID NO: 177180 - protein, 51 aa, Zea Mays
METIMVFCWSLVSVNLDISWCFSISLPSINVASMVGTDGSPTAVFFIWEIE

SEQ ID NO: 177181 - protein, 297 aa, Zea Mays
MGEVSDDNSNMSFLKRIATSDVPLLKEYGVNGVVVALLLAVVTPVLLSMMFGKKTKQRAVRADVGGEEGFAMRNNRFSSLVEVPWEGATTMSALFEMASKKYSRQRCLGTRKLIKREFMESSDGRKFEKLHLGEYEWDTYTEAFNRACNFSSGLIKMGHDLDSHAAIFSDTRAEWIIAAQGCFRQNLTVVTIYASLGEDALVHSLNETQVSTLICDSKQLKKIPAISYKLQSLRRIIYIEDEPVEAETLNQVKHLTTLSFTEVEELGKTSHVDARLPSGSDTAVIMYTSGSTGLPKV

SEQ ID NO: 177182 - protein, 144 aa, Zea Mays
MAAAAAFVVVVVQLQASSGEGGGRAEAELGRGGDPQEHAVPPPLQALRPPDTRADPRPRSCDLARRPQLPDRSELHGGQEARPGQRLGRSLREGSEGGTRARSSSPRRTSTRGTPTPTPARTCRPRRRGGRRHGATASSGTAKG

SEQ ID NO: 177183 - protein, 422 aa, Zea Mays
MAGAHQPGAEPAVAAFRRLRGIGSSSDQLLVQPVVPGHGGGGGGCADAGDAERQPLDPSRFHKASNREIRRAAITRGRRLKACTCPSPDHQHRRRRRRRLPLRAPCLMGCGGRGASAAAVEGDDTTTTSDEEDEEVRASSFAASDVTKSPAAAAAWAAAGAGAPGRRERYCLVACKQMVGLFATVWVRRGLVPHVGHVRFSCVGRGIMGYLGNKGCISVSMSLHQTSLCFVCSHLASGEKEGDELRRNSDVVEILRNTQFRRLCKRSGRRIPERILDHDRVIWLGDLNYRIALSYTEAKKLVQANDWAALFEKDQRVERGQDPLRPDVQVLVELRHLRRRGRVVQEEEEDAGMVRPHPLARRRDSAAVLHPRRVQVLRPPPCLRRVHRRGRGRPRQQPPRQVRLGPQHESRRGGAPARLLQV

SEQ ID NO: 177184 - protein, 204 aa, Zea Mays
MASKAIKRRPISAETDTTGEKQMDTALSDPVTEPLLGNTPQEEKSKTYEPITRSGFWDGTAQECLRWTHLLAAFVAQSARNIVNVLSEFGYLLARLFGCSSASKSSQNGQTLPVNLSPLQEERLRLLRQRIDVPYDCSSVKHQDALKELWKLAYPNRQLPPLKSDLWKEMGWQNSDPSTDFRIPFTGYCIKQMVRELNGSILLQ

SEQ ID NO: 177185 - protein, 310 aa, Zea Mays
MASKAIKRRPISAETDTTGEKQMDTALSDPVTEPLLGNTPQEEKSKTYEPITRSGFWDGTAQECLRWTHLLAAFVAQSARNIARLFGCSSASKSSQNGQTLPVNLSPLQEERLRLLRQRIDVPYDCSSVKHQDALKELWKLAYPNRQLPPLKSDLWKEMGWQNSDPSTDFRAAGFMSLENLIYFARNYPDSFHRLLHKADGKRAEWEYPFAVGGVNISYMLVQMLDLQSGKMRTKAGVHFVQLLDDDGVAFDNLFCVAFQVLDSQWLARRASYMEFNEVLKSTRGQLEQELTIGGISRIQDMPSFRMLRR

SEQ ID NO: 177186 - protein, 194 aa, Zea Mays
MSLEASIDRLPTMGLAVDVTCYLSDSAASLLHQFFSPLCLPNRPSINPVTTGENHIRWVINQLSIEATIVTSAPNCPKDSTTPKENQLLFSFIKTINPGTKKVSCVFGNRGQIKGNLDNSPNKPGHRAVKKQMIYGLQKSTKDTVRIPMPVSFNQIIFCQNLLIILYLVLPLWHFFLLSNEWQFYTCEELDKCN

SEQ ID NO: 177187 - protein, 84 aa, Zea Mays
MAMAAATANAILLLALFFAGAHANVPCILPVCKTVGGGSRFFDVQFCLAALGSDGRSVDHCLDYQQVFKLAKLAVALLRTVYAR

SEQ ID NO: 177188 - protein, 394 aa, Zea Mays
MEEAAPAGTNKVYYDGCPGCAMDRRKESRAGVPYKELLFVAAATFASALPITSLFPFLYFMIRDLRVAEREEDIGFYAGFLGAAYMIGRGVASVFWGVVADRVGRKPVIAFSVLSVVVFNTLFGLSAKYWMAIATRFLLGALNGFLAPAKAYSIEVCRPEQQALGISVVSTAWGMGVIIGPAIGGYLAQPAKQYPHLFHEKSVFGRFPYLLPCLCISFFAALVVISCAWLPETLHKHRGLERAAAEVAEGTTAAAAAQESTPEPEPEPPKSSLLRNRPLMSSIVTYCVFSLHDTAYVEIFSLWTVSGRDHGGLSFASKDVGQVLTVAGASLLVYQIFAYRWVNKILGPVNSTRVSSALSIPIIAAYPFMTRLSGIRLGVPLYVAAMLKSVLAYC

SEQ ID NO: 177189 - protein, 360 aa, Zea Mays
MEEAAPAGTNKVYYDGCPGCAMDRRKESRAGVPYKELLFVAAATFASALPITSLFPFLYFMIRDLRVAEREEDIGFYAGFLGAAYMIGRGVASVFWGVVADRVGRKPVIAFSVLSVVVFNTLFGLSAKYWMAIATRFLLGALNGFLAPAKAYSIEVCRPEQQALGISVVSTAWGMGVIIGPAIGGYLAQPAKQYPHLFHEKSVFGRFPYLLPCLCISFFAALVVISCAWLPETLHKHRGLERAAAEVAEGTTAAAAAQESTPEPEPEPPKSSLLRNRPLMSSIVTYCVFSLHDTAYVEIFSLWTVSGRDHGGLSFASKDVGQVLTVAGASLLVYQIFAYRWVNKILGPVNSTRVSRYPYR

SEQ ID NO: 177190 - protein, 446 aa, Zea Mays
MEEAAPAGTNKVYYDGCPGCAMDRRKESRAGVPYKELLFVAAATFASALPITSLFPFLYFMIRDLRVAEREEDIGFYAGFLGAAYMIGRGVASVFWGVVADRVGRKPVIAFSVLSVVVFNTLFGLSAKYWMAIATRFLLGALNGFLAPAKAYSIEVCRPEQQALGISVVSTAWGMGVIIGPAIGGYLAQPAKQYPHLFHEKSVFGRFPYLLPCLCISFFAALVVISCAWLPETLHKHRGLERAAAEVAEGTTAAAAAQESTPEPEPEPPKSSLLRNRPLMSSIVTYCVFSLHDTAYVERSRRPQLRVQGRRPSPHRRWRQSPGVPNLRLPLGQQDPRPSQLNPSFVATYAGAIHTDNRRLPLHDALVGNKAWCASLRRGDAQKRPRHHQSHRHIAPAEQRCATGAEGRCERDSYDGDVSVQGVRSGRGRHLVLVGTEAPACRVLSR

SEQ ID NO: 177191 - protein, 346 aa, Zea Mays
MEEAAPAGTNKVYYDGCPGCAMDRRKESRAGVPYKELLFVAAATFASALPITSLFPFLYFMIRDLRVAEREEDIGFYAGFLGAAYMIGRGVASVFWGVVADRVGRKPVIAFSVLSVVVFNTLFGLSAKYWMAIATRFLLGALNGFLAPAKVRACTIQYNTYSIEAYSIEVCRPEQQALGISVVSTAWGMGVIIGPAIGGYLAQPAKQYPHLFHEKSVFGRFPYLLPCLCISFFAALVVISCAWLPETLHKHRGLERAAAEVAEGTTAAAAAQESTPEPEPEPPKSSLLRNRPLMSSIVTYCVFSLHDTAYVEAPVSWCTKSSPTVGSTRSSAQSTQPEFRRRYPYR

SEQ ID NO: 177192 - protein, 58 aa, Zea Mays
MGTTSVLHPSHFALSAWTSCPFPSPMEKPPPSSSATSLRALLTMSGAASFVLALPGTC

SEQ ID NO: 177193 - protein, 190 aa, Zea Mays
MSSLEEPLGLGDLPKLSINRLGRFVSLGARRPPADDDDHSTGKYSSSSCNNGSHQMAFHHGSNSSYPWHPQCRQAADPSRDAVELRDLPRKVMWELPRFVKIVEVGPRDGLQNEKGNVPASVKIQLIHKLVGAGLSVVEATSFVSPKWVPQLADAEEVLKGIKQEPGVRYPVLTPNLRVRSTPPPFSFFL

SEQ ID NO: 177194 - protein, 403 aa, Zea Mays
MDSLFFSGRMSSLEEPLGLGDLPKLSINRLGRFVSLGARRPPADDDDHSTGKYSSSSCNNGSHQMAFHHGSNSSYPWHPQCRQAADPSRDAVELRDLPRKVMWELPRFVKIVEVGPRDGLQNEKGNVPASVKIQLIHKLVGAGLSVVEATSFVSPKWVPQLADAEEVLKGIKQEPGVRYPVLTPNLRGFEAAIAAGAKEIAVFASASESFSRSNINCTIEESLARYRGVTAAAKKHGLSIRGYVSCVIACPVGGATDPAKVAYVAKELYTMGCSEISLGDTTGVGTPGSVVAMLQAVMSFVPVDKIAVHFHDTYGQALANILVSLQMGINIVDSSVSGLGGCPYAKGATGNVATEDVVYMLHGLGIETNVDLNKLMEAGDYISKHLGRPLGSKTATALRKLTA

SEQ ID NO: 177195 - protein, 428 aa, Zea Mays
MPRRTGNAASTKSVELVKQDQMEFDHPDEVDEEEEVEYEEIEEEVEYEEVEVEEEEEEEEEDEIEGVREVDANHDSKIVDDDPKDGNEKEKHAELLALPPHGAEVYVGGLSSDVSSEDLKQLFESVGEVAEVRMRGKGDNKTYAFINFRTKEMALKAIQKLSNKDLKGKKIKVSSSQAKNRLFIGNVPHDWTPDDFKTAVEEVGPGVLKVDLMKAPGSGRNKGYGFIEYYNQACAEYAKQKMSTPEFKLDTNAPTVSWADHKNASEATSTSQVKSLYVKNLPKTVTQEQLKKLFEHVGEITKVVIPPAKSGHENRYGFVHFKERSMVMKALKNTERYELDGQLLDCSPAKPPADKKDDTGSSPTAKGRPLPPSYAPLGYGLAGAYNPLGKGLAGAYNSPGNGLAGGETFTIGDVLLTVVHFWHQLHMC

SEQ ID NO: 177196 - protein, 417 aa, Zea Mays
MPRRTGNAASTKSVELVKQDQMEFDHPDEVDEEEEVEYEEIEEEVEYEEVEVEEEEEEEEEDEIEGVREVDANHDSKIVDDDPKDGNEKEKHAELLALPPHGAEVYVGGLSSDVSSEDLKQLFESVGEVAEVRMRGKGDNKTYAFINFRTKEMALKAIQKLSNKDLKGKKIKVSSSQAKNRLFIGNVPHDWTPDDFKTAVEEVGPGVLKVDLMKAPGSGRNKGYGFIEYYNQACAEYAKQKMSTPEFKLDTNAPTVSWADHKNASEATSTSQVKSLYVKNLPKTVTQEQLKKLFEHVGEITKVVIPPAKSGHENRYGFVHFKERSMVMKALKNTERYELDGQLLDCSPAKPPADKKDDTGSSPTAKGRPLPPSYAPLGYGLAGAYNPLGKGLAGGETFTIGDVLLTVVHFWHQLHMC

SEQ ID NO: 177197 - protein, 1003 aa, Zea Mays
MGGRKLPGSSLPKLQAAPEGQSREKIRLALYVQKAAMTFIDGAKHKDYRITEDIRNAGFSINPDELASITSKHDAKALKMHGGVDGVSKKIRSALDHGISASDLDTRQSIYGVNRYAEKPSRTFWMFVWDALQDMTLIILMVCALLSAAVGLASEGWPRGMYDGLGIMLSILLVVMVTAVSDYRQSLQFKELDNEKKKIFIHVTRDGSRQKVSIYDLAVGDIVHLSIGDQVPADGLYVHGYSLLIDESSLSGESEPVYVSQDKPFILAGTKVQDGSAKMMVTAVGMRTEWGRLMSTLSEGGEDETPLQVKLNGVATIIGKIGLLFATLTFVVLMVRFLIEKGLTVGLSKWYSTDALTIVNYFATAVTIIVVAVPEGLPLAVTLSLAFAMKKLMNDKALVRHLSACETMGSAGTICTDKTGTLTTNHMVVDKIWASEVSKSVTDSSSLEDLASAVSPATLSLLLQGIFENTSAEVVNEKDGKQTVLGTPTERAIFEFGLKLEGLGAEDRTCTKVKVEPFNSVKKKMAVLVSLHDGGSYRWFTKGASEIVVEMCDMMIDGDGNSVPLSEAQRKIVLDTINSFASDALRTLCLAYKDVDGLEDDDDDADSPTSGFTLICIFGIKDPLRPGVKDAVEACKSAGIVVRMVTGDNINTAKAIAKECGILTDGDLAIEGPEFRSKSPEEMRDIIPKIRVMARSLPLDKHTLVTNLRGMFREVVAVTGDGTNDAPALHEADIGLAMGIAGTEVAKESADVIVLDDNFTTIINVARWGRAVYINIQKFVQFQLTVNIVALVINFVSACITGSAPLTAVQLLWVNMIMDTLGALALATEPPNDDMMKRPPVGRGESFITKVMWRNIIGQSLYQLVVLGALMFGGEQFLNIKGADSKSVVNTLIFNSFVFCQVFNEINSREMEKINVFRGMVTNWIFIAIIAATVLFQVVIVELLGTFASTVPLDWRLWLLSVGLGSVSLVVGAVLKCIPVAKSNGAPASPNGYAPLPSGPDDI

SEQ ID NO: 177198 - protein, 324 aa, Zea Mays
MTEKMAQEDRIPVLKASQDHLKEFIALCEVLELIPEDELELSRQKQSDTMANRRAQKVARFKRQKAAETKLQEIRERKERRGRSLRATALSAPVEAGEEDDLEDDGEEEREAWLATISLAICKAFDLLDMLKKEEEMLLAVKERKAKDGNAFAREMLDERTKKAEAWHHKAASRVAYSKPADPITCATFAQDVIEGRASVSQAHEHKHQPLIFGPASLVGGGLTSERERMAAQVFQPSYRMPTMSIEEAGLREMKMMERWQERTAEMMREANSAWHKGGDSSSSSMPQGEGGDEDAEEAKARAWDDWKDDNPRGAGNKKLTPCG

SEQ ID NO: 177199 - protein, 564 aa, Zea Mays
MAFNAKPYCSTTAKPPTPAAHRSPSGPSPCISVRAAAVSPRARHSAYGLSAAGNASSSTVRLRALAQRTRAQPQPPRRRPEYVPNRIDDPNYVRIFDTTLRDGEQSPGATMTSAEKLVVARQLARLGVDVIEAGFPASSPDDLDAVRSIAIEVGNPPPGDDGGAHVPVICGLSRCNRRDIDAAWEAVRHARRPRIHTFIATSEIHMQHKLRKTPDQVVAVAREMVAYARSLGCADVEFSPEDAGRSNREFLYHILEEVIKAGATTLNIPDTVGYTLPYEFGKLISDIKENTPGIENAIISTHCQNDLGLATANTLAGAHAGARQLEVTINGIGERAGNASLEEVVMAIKCRGELLDGLYTGINSQHITLTSKMVQEHSGLHVQPHKAIVGANAFAHESGIHQDGMLKYKGTYEIISPDDIGLARANEFGIVLGKLSGRHAVRSKLVELGYEISDKEFEDFFKRYKEVAEKKKRVTDEDIEALLSDEIFQPKVIWSLADVQATCGTLGLSTATVKLIGPDGEERIACSVGTGPVDAAYKAVDQIIQFRIVIIKPLRPSVYKDLHR

SEQ ID NO: 177200 - protein, 463 aa, Zea Mays
MAFNAKPYCSTTAKPPTPAAHRSPSGPSPCISVRAAAVSPRARHSAYGLSAAGNASSSTVRLRALAQRTRAQPQPPRRRPEYVPNRIDDPNYVRIFDTTLRDGEQSPGATMTSAEKLVVARQLARLGVDVIEAGFPASSPDDLDAVRSIAIEVGNPPPGDDGGAHVPVICGLSRCNRRDIDAAWEAVRHARRPRIHTFIATSEIHMQHKLRKTPDQVVAVAREMVAYARSLGCADVEFSPEDAGRSNREFLYHILEEVIKAGATTLNIPDTVGYTLPYEFGKLISDIKENTPGIENAIISTHCQNDLGLATANTLAGAHAGARQLEVTINGIGERAGNASLEEVVMAIKCRGELLDGLYTGINSQHITLTSKMVQEHSGLHVQPHKAIVGANAFAHESGIHQDGMLKYKGTYEIISPDDIGLARANEFGIVLGKLSGRHAVRSKLVEVQLEYFFVFLATSPHS

SEQ ID NO: 177201 - protein, 183 aa, Zea Mays
MGISKVTGIAATAFLVTSVSLCQLGMRIIMLPFLATGIVASIVTVASHDAINLPWILGKNSVGRFPLWSIILFGPFLTLARTYAMVKRYMRKEAVYDKIVEGLYLGGWPFLLKHLPPGNPSVIDCTCELPRSSFVPANEYLCLATWDTRAPTPHQIEKAARWACEKRSEGKPVYVHCAFGLTR

SEQ ID NO: 177202 - protein, 188 aa, Zea Mays
MGISKVTGIAATAFLVTSVSLCQLGMRIIMLPFLATGIVASIVTVASHDAINLPWILGKNSVGRFPLWSIILFGPFLTLARTYAMVKRYMRKEAVYDKIVEGLYLGGWPFLLKHLPPGNPSVIDCTCELPRSSFVPANEYLCLATWDTRAPTPHQIEKAARWACEKRSEGKPVYVHCAFGLTRCMGLP

SEQ ID NO: 177203 - protein, 990 aa, Zea Mays
MKSVEPSDMPLSFLTAITNNFSEDQTIGRGGFAVVYKGLLRNGLSVAVKKFYDTIELSDEMYRKEVQSMMRLKHANIVRFFGYCADTQWKMFKHDGRHVIAEARQRLLCFEFVPNGSLDKYISDMFHGLEWRKRYQIIRGICEGLRYLHDENVLHLDLKPSNILLDHNLVPKITDFGLSRCFDDNKTRTVTANLIGSVGYLAPEFFSGLISFKSDVYSLGVIIMEVVTGIKGYCEIEDVLESWRKRLKMPMGDALEQIRVCVEIGTMCIESNPLNRPDLRHIIELFDEMENMRLVTKTTSSLGTQGSDEHDSEETIASAITDEKREKLSVLSTLPKYLPFAFLEDITDGFSKERQLGRGGFGVVYKGILSDGYTIAVRRLLRFQGIEMKQFDNEVNILMELRHKNIVNLLGYCHEVRGTYVQYKGKPVFAETSEQLLCYEYLHCGSIDKYIFGKNHELDWHTRYKMIKGICEGLHYLHENDRAPIIHLNLKPANVLLDAAMEPRITDFGLSRLIGEGNTRIVNTHTPGPIGYMAPEYRYMGEVSRKVDIFSLGILILEIVTGQDNSTKVDFIDHVCEHCMEGPQIKFMYPSLEPELHDQVELCIKIGLECVQTDRKKRPTAGDIIRKLEEGTKLGPTPSRENITTEIGKPQMFSFELLNDITESFSPGRLRGTGGFGYVYEGIPHGNEGAMAVKRLKEKIGISPKQFENEVHNLSRIEHRNIVRLIGYCDEIREILSHGKNKNDPPIREHIQERLLCYEYMPKGSLDKIIYDNLDWHTRYKIIEGICHGLHCLHEGQQDIQIAHLDLKPANILLDSDMVPKLADFGMSRLFSLEQVYILASKPMGTIGYIAPEYLDHKKVSTKADIYSFGIVVLEIVTRKQCPRSYADINAQHFIHHLRQNLTKDNYVKSMYPALEADCLQQVKLCIEIGLNCVEKEPTKRPTAREIISMFNQKKDSSRSGVSNCIVNVIEAWLSRLPWHPWPLTLLRQT

SEQ ID NO: 177204 - protein, 1038 aa, Zea Mays
MKSVEPSDMPLSFLTAITNNFSEDQTIGRGGFAVVYKGLLRNGLSVAVKKFYDTIELSDEMYRKEVQSMMRLKHANIWKMFKHDGRHVIAEARQRLLCFEFVPNGSLDKYISGMTVERNVFHLHFFAEYYLFQVSHRYDTVTLQFFKCVEICLTDRIKLHNAYLNLHHTTPDMFHGLEWRKRYQIIRGICEGLRYLHDENVLHLDLKPSNILLDHNLVPKITDFGLSRCFDDNKTRTVTANLIGSVGYLAPEFFSGLISFKSDVYSLGVIIMEVVTGIKGYCEIEDVLESWRKRLKMPMGDALEQIRVCVEIGTMCIESNPLNRPDLRHIIELFDEMENMRLVTKTTSSLGTQGSDEHDSEETIASAITDEKREKLSVLSTLPKYLPFAFLEDITDGFSKERQLGRGGFGVVYKGILSDGYTIAVRRLLRFQGIEMKQFDNEVNILMELRHKNIVNLLGYCHEVRGTYVQYKGKPVFAETSEQLLCYEYLHCGSIDKYIFGKNHELDWHTRYKMIKGICEGLHYLHENDRAPIIHLNLKPANVLLDAAMEPRITDFGLSRLIGEGNTRIVNTHTPGPIGYMAPEYRYMGEVSRKVDIFSLGILILEIVTGQDNSTKVDFIDHVCEHCMEGPQIKFMYPSLEPELHDQVELCIKIGLECVQTDRKKRPTAGDIIRKLEEGTKLGPTPSRENITTEIGKPQMFSFELLNDITESFSPGRLRGTGGFGYVYEGIPHGNEGAMAVKRLKEKIGISPKQFENEVHNLSRIEHRNIVRLIGYCDEIREILSHGKNKNDPPIREHIQERLLCYEYMPKGSLDKIIYDNLDWHTRYKIIEGICHGLHCLHEGQQDIQIAHLDLKPANILLDSDMVPKLADFGMSRLFSLEQVYILASKPMGTIGYIAPEYLDHKKVSTKADIYSFGIVVLEIVTRKQCPRSYADINAQHFIHHLRQNLTKDNYVKSMYPALEADCLQQVKLCIEIGLNCVEKEPTKRPTAREIISMFNQKKDSSRSGVSNCIVNVIEAWLSRLPWHPWPLTLLRQT

SEQ ID NO: 177205 - protein, 563 aa, Zea Mays
MKQFDNEVNILMELRHKNIVNLLGYCHEVRGTYVQYKGKPVFAETSEQLLCYEYLHCGSIDKYIFANVLLDAAMEPRITDFGLSRLIGEGNTRIVNTHTPGPIGYMAPEYRYMGEVSRKVDIFSLGILILEIVTGQDNSTKVDFIDHVCEHCMEGPQIKFMYPSLEPELHDQVELCIKIGLECVQTDRKKRPTAGDIIRKLEEGTKLGPTPSRENITTEIGKPQMFSFELLNDITESFSPGRLRGTGGFGYVYEGIPHGNEGAMAVKRLKEKIGISPKQFENEVHNLSRIEHRNIVRLIGYCDEIREILSHGKNKNDPPIREHIQERLLCYEYMPKGSLDKIIYDNLDWHTRYKIIEGICHGLHCLHEGQQDIQIAHLDLKPANILLDSDMVPKLADFGMSRLFSLEQVYILASKPMGTIGYIAPEYLDHKKVSTKADIYSFGIVVLEIVTRKQCPRSYADINAQHFIHHLRQNLTKDNYVKSMYPALEADCLQQVKLCIEIGLNCVEKEPTKRPTAREIISMFNQKKDSSRSGVSNCIVNVIEAWLSRLPWHPWPLTLLRQT

SEQ ID NO: 177206 - protein, 55 aa, Zea Mays
MTISSKNLLKTSKHNKKTKQKVDQGRLSCLPTSATLLHAYTSHPWSCSLSPPPPP

SEQ ID NO: 177207 - protein, 81 aa, Zea Mays
MERNPYRLVSTQAANLEMASTTKLFAEFSVLEKIINLLCITSFSLPQKFLFYIKNCIMPERMMGKILSFLITECIKIFQNR

SEQ ID NO: 177208 - protein, 79 aa, Zea Mays
MYHGHFVGPVLVGPPVCASSWVASATHFSRGTISYICCILILVAFNLVMVTSSAPPSWHFHVYSFFGSPMFCIHAAILQ

SEQ ID NO: 177209 - protein, 53 aa, Zea Mays
MLSAPPPPLWLQVPKHHNIRALEWEVYIGSRLDLDKDLPALSLSVQFPKAFRL

SEQ ID NO: 177210 - protein, 519 aa, Zea Mays
MGGYIVSTEKLKDKHAAYLKVSRLEKFFHELSLCEEKIFLKRYDLRESLQRKFLRQAAEECKETNYDTMEENTDGLNLTAKSFSTNCSISTYSQDESDVKANTLELRRNLKDALRNKQDLIKSGSCKHDMIRLGLAGWKSRYYREKFGVEKLSEVGKLKNDMVQRYMEGLCWVLQYYFTDVPSWSWYYPYYHAPFASDFKGLSQFKICFTTDKPLKPFDQLMAVLPKESSCALPKCYRELMENEESLVQKFYPSDLQIDTHGKRFLWQGIAMLPFIDEKLLVSATKTVEGKLAVHEINRNAVRQEKIFMRNSNTTVPNGSAFSKAFDCSSKKLWLDPSTSELGGWLSPVDDKDTSSGFFHSSVMRDLPDIRNDQTISFLFSNPEAVETIPRLLDDVKKPEKTITETEISKRPLWHTYPGCRLPETNPSVLEPQPMVSSFGRGRGRATAAETMLGGGGRGYGRSFHGAESSQTQSRGSRNDGNSYAGRGTYGGGFQRQQTAWRPAGDAGGRGGSEQRRGW

SEQ ID NO: 177211 - protein, 467 aa, Zea Mays
MNMRSSRSHTIFRMVIESSGKDQTDGGDAIRVSVLNLVDLAGSERIIKTGAEGVRLNEGKYINKSLMILGNVINKLSENGKQRGHIPYRDSKLTRILQPALGGNAKTSIICTAAPEEIHIEETRGTLQFASRAKCVSNCAQVNEILTDAALLKRQKLEIEELRKKLQGSHSEGLEQVVLKLRNDMHKSELERDRLAMELEDERKLRMTLEQHLTEQQKLEAISSDHFTDSIQLDLLKTPDSKSVPDGFVACRSRYSQDVEFSPIPENLDNIAEEDLWTRLNKGCVTDLDMLEMTPNLKRESSFLQEKSSAAPLEEPTNAICQRLAKECIYDQQQLEESKARCANLEKDCDVLRDENLSLQQELSESKLEADSLVAEKQAQLDDLRMRCVALERDLSSSRQEAHRLATEKQELAGQLGTERQKMDELKQDIRVICGDLLQREGQLTSIYTKSKAIIESCKASQVATLL

SEQ ID NO: 177212 - protein, 390 aa, Zea Mays
MSHEVTRGHIPYRDSKLTRILQPALGGNAKTSIICTAAPEEIHIEETRGTLQFASRAKCVSNCAQVNEILTDAALLKRQKLEIEELRKKLQGSHSEGLEQVVLKLRNDMHKSELERDRLAMELEDERKLRMTLEQHLTEQQKLEAISSDHFTDSIQLDLLKTPDSKSVPDGFVACRSRYSQDVEFSPIPENLDNIAEEDLWTRLNKGCVTDLDMLEMTPNLKRESSFLQEKSSAAPLEEPTNAICQRLAKECIYDQQQLEESKARCANLEKDCDVLRDENLSLQQELSESKLEADSLVAEKQAQLDDLRMRCVALERDLSSSRQEAHRLATEKQELAGQLGTERQKMDELKQDIRVICGDLLQREGQLTSIYTKSKAIIESCKASQGSDR

SEQ ID NO: 177213 - protein, 667 aa, Zea Mays
MEKISVAVRFRPPNLVAANTSPASSGGGGDREWRIDDTRVSLLHRAAGPITGASFAFDHVFDGAANNERIYGTVVRELIGAVVGGFNGTAFAYGQTSSGKTFTMNGSDADPGIIPRAVRDVFDTVRQADDREFLIRVSYMEIYNEEINDLLTLEGQKLKIHESLDRGVYVSGLREEIVNSAEQVFELLQLGEANRHFGETNMNMRSSRSHTIFRMVIESSGKDQTDGGDAIRVSVLNLVDLAGSERIIKTGAEGVRLNEGKYINKSLMILGNVINKLSENGKQRGHIPYRDSKLTRILQPALGGNAKTSIICTAAPEEIHIEETRGTLQFASRAKCVSNCAQVNEILTDAALLKRQKLEIEELRKKLQGSHSEGLEQVVLKLRNDMHKSELERDRLAMELEDERKLRMTLEQHLTEQQKLEAISSDHFTDSIQLDLLKTPDSKSVPDGFVACRSRYSQDVEFSPIPENLDNIAEEDLWTRLNKGCVTDLDMLEMTPNLKRESSFLQEKSSAAPLEEPTNAICQRLAKECIYDQQQLEESKARCANLEKDCDVLRDENLSLQQELSESKLEADSLVAEKQAQLDDLRMRCVALERDLSSSRQEAHRLATEKQELAGQLGTERQKMDELKQDIRVICGDLLQREGQLTSIYTKSKAIIESCKASQGSDR

SEQ ID NO: 177214 - protein, 68 aa, Zea Mays
MPQSTQPPVEAPPTALAQATTSSKAEEANSDHQSDWPMPDAIGSIGVVPSGFGHLTVQVEDEDYDNED

SEQ ID NO: 177215 - protein, 75 aa, Zea Mays
MRKKLGTRFPAARIKKIMQADEDVGKIALAVPVLVSRSLELFLQDLIDRTYEITLQSGAKTLNSFHLWDSYLVGP

SEQ ID NO: 177216 - protein, 237 aa, Zea Mays
MQADEDVGKIALAVPVLVSRSLELFLQDLIDRTYEITLQSGAKTLNSFHLKQCVKRYSSFDFLTEVVSKVPDLGGADSCGDERGLPRRRKSNGSDPENDESRSSKMAIRNANISPRGRGRGRGRGRGRPPTKRKEVGYVQFEDESSMFAEQGEPLPGEETVQEINGNETMPQSTQPPVEAPPTALAQATTSSKAEEANSDHQSDWPMPDAIGSIGVVPSGFGHLTVQVEDEDYDNED

SEQ ID NO: 177217 - protein, 993 aa, Zea Mays
MDAAEASEVQARLAAAVHALNHDARPEARLAANQWLLALQRSPQAWAVATSLLATPDPLPPADLLFFAAQMLRRKIQSPGPALLGLGLASQLLDALLLAARRFCAAPAPRQLLTQICLALAALALRAEGGVDGLFARMPHLPPPAVLELLTVLPEEAAQDQGGDTGVDAAARCRFTRELLAHAPSVLEFLHRQSEKAPADDDGVPLDERNRRILRCLLSWVRVRCFSETPAASLARHPLLTFAFNSLQVSFSFEVAIEVMTELVSQHQELPEAFLSKTPYIREALLLPALANRNEKIIAGLACLMCEVGQAAPALVAEGGSQALALTDGLLRCSLAHFILGIDVKSAKRNVVQELFVPVFSSLLDALLFRAQMDTDEHGSDGAPCIPERLTQFRMNLEELLVDICLLLGAPAYINRLFSGGWDFSSQTIPWKEVEVRMYALSMVADTILQDEGSFDFSIIMHFVNILSSRTPVELNGNLFLVYKSFGDVVGSYSKWLSSSQCNIKPLLLFCASGISKSVSSNACSLALRKLCEDAPSFIHEPQNLEILFWIGEGMNKGNLQLEDEEEIISAITHALSSISEKELKKSSLARLLCSSYSAVEKIIDIDRDQLLRQNPAAYTQSLDLAVRGLYRMSALFHHLATSVTSGLVDDDIIIVLLGIFWPLLESLFRSSHMENVHLSAAICRSLSSAIHSCGHHFHILLPKVMECLSANFLLFQRHDCFLRTAANVIEEFGHKEEYGALCVRTFEILSSASSISALNSSYTCDQEPDLVEAYTYFTSMFIRCCPKEAIVASSSLIELSFQKAAICSTAMHRGAALAAMSYMSCFLETALAAVLESPECIPNGSPGVALIQILARCGEGLLSNVLYALLGVSALSRVHKSATILQQLAALCSFSEGTTWKAILSWNSLCGWLQSTVKSLPSEYLKQGEAEIIVPSWLKVLQDAGSDYLHSRTGDNIRSHQGYMQGKGGRTLKRIIRDFAESHRNVPIPSPT

SEQ ID NO: 177218 - protein, 580 aa, Zea Mays
MDAAEASEVQARLAAAVHALNHDARPEARLAANQWLLALQRSPQAWAVATSLLATPDPLPPADLLFFAAQMLRRKIQSPGPALLGLGLASQLLDALLLAARRFCAAPAPRQLLTQICLALAALALRAEGGVDGLFARMPHLPPPAVLELLTVLPEEAAQDQGGDTGVDAAARCRFTRELLAHAPSVLEFLHRQSEKAPADDDGVPLDERNRRILRCLLSWVRVRCFSETPAASLARHPLLTFAFNSLQVSFSFEVAIEVMTELVSQHQELPEAFLSKTPYIREALLLPALANRNEKIIAGLACLMCEVGQAAPALVAEGGSQALALTDGLLRCVAFTSEDWEIAESTLQFWCSLAHFILGIDVKSAKRNVVQELFVPVFSSLLDALLFRAQMDTDEHGSDGAPCIPERLTQFRMNLEELLVDICLLLGAPAYINRLFSGGWDFSSQTIPWKEVEVRMYALSMVADTILQDEGSFDFSIIMHFVNILSSRTPVELNGNLFLVYKSFGDVVGSYSKWLSSSQCNIKPLLLFCASGISKSVSSNACSLALRKLCEDAPSFIHEPQNLEILFWIGEYLKYSVLT

SEQ ID NO: 177219 - protein, 1012 aa, Zea Mays
MDAAEASEVQARLAAAVHALNHDARPEARLAANQWLLALQRSPQAWAVATSLLATPDPLPPADLLFFAAQMLRRKIQSPGPALLGLGLASQLLDALLLAARRFCAAPAPRQLLTQICLALAALALRAEGGVDGLFARMPHLPPPAVLELLTVLPEEAAQDQGGDTGVDAAARCRFTRELLAHAPSVLEFLHRQSEKAPADDDGVPLDERNRRILRCLLSWVRVRCFSETPAASLARHPLLTFAFNSLQVSFSFEVAIEVMTELVSQHQELPEAFLSKTPYIREALLLPALANRNEKIIAGLACLMCEVGQAAPALVAEGGSQALALTDGLLRCVAFTSEDWEIAESTLQFWCSLAHFILGIDVKSAKRNVVQELFVPVFSSLLDALLFRAQMDTDEHGSDGAPCIPERLTQFRMNLEELLVDICLLLGAPAYINRLFSGGWDFSSQTIPWKEVEVRMYALSMVADTILQDEGSFDFSIIMHFVNILSSRTPVELNGNLFLVYKSFGDVVGSYSKWLSSSQCNIKPLLLFCASGISKSVSSNACSLALRKLCEDAPSFIHEPQNLEILFWIGEGMNKGNLQLEDEEEIISAITHALSSISEKELKKSSLARLLCSSYSAVEKIIDIDRDQLLRQNPAAYTQSLDLAVRGLYRMSALFHHLATSVTSGLVDDDIIIVLLGIFWPLLESLFRSSHMENVHLSAAICRSLSSAIHSCGHHFHILLPKVMECLSANFLLFQRHDCFLRTAANVIEEFGHKEEYGALCVRTFEILSSASSISALNSSYTCDQEPDLVEAYTYFTSMFIRCCPKEAIVASSSLIELSFQKAAICSTAMHRGAALAAMSYMSCFLETALAAVLESPECIPNGSPGVALIQILARCGEGLLSNVLYALLGVSALSRVHKSATILQQLAALCSFSEGTTWKAILSWNSLCGWLQSTVKSLPSEYLKQGEAEIIVPSWLKVLQDAGSDYLHSRTGDNIRSHQGYMQGKGGRTLKRIIRDFAESHRNVPIPSPT

SEQ ID NO: 177220 - protein, 762 aa, Zea Mays
MVAAVRVDARGWYTGPGMVVPGVVSHATGDEDGATQLELPEAFLSKTPYIREALLLPALANRNEKIIAGLACLMCEVGQAAPALVAEGGSQALALTDGLLRCSLAHFILGIDVKSAKRNVVQELFVPVFSSLLDALLFRAQMDTDEHGSDGAPCIPERLTQFRMNLEELLVDICLLLGAPAYINRLFSGGWDFSSQTIPWKEVEVRMYALSMVADTILQDEGSFDFSIIMHFVNILSSRTPVELNGNLFLVYKSFGDVVGSYSKWLSSSQCNIKPLLLFCASGISKSVSSNACSLALRKLCEDAPSFIHEPQNLEILFWIGEGMNKGNLQLEDEEEIISAITHALSSISEKELKKSSLARLLCSSYSAVEKIIDIDRDQLLRQNPAAYTQSLDLAVRGLYRMSALFHHLATSVTSGLVDDDIIIVLLGIFWPLLESLFRSSHMENVHLSAAICRSLSSAIHSCGHHFHILLPKVMECLSANFLLFQRHDCFLRTAANVIEEFGHKEEYGALCVRTFEILSSASSISALNSSYTCDQEPDLVEAYTYFTSMFIRCCPKEAIVASSSLIELSFQKAAICSTAMHRGAALAAMSYMSCFLETALAAVLESPECIPNGSPGVALIQILARCGEGLLSNVLYALLGVSALSRVHKSATILQQLAALCSFSEGTTWKAILSWNSLCGWLQSTVKSLPSEYLKQGEAEIIVPSWLKVLQDAGSDYLHSRTGDNIRSHQGYMQGKGGRTLKRIIRDFAESHRNVPIPSPT

SEQ ID NO: 177221 - protein, 621 aa, Zea Mays
MDTDEHGSDGAPCIPERLTQFRMNLEELLVDICLLLGAPAYINRLFSGGWDFSSQTIPWKEVEVRMYALSMVADTILQDEGSFDFSIIMHFVNILSSRTPVELNGNLFLVYKSFGDVVGSYSKWLSSSQCNIKPLLLFCASGISKSVSSNACSLALRKLCEDAPSFIHEPQNLEILFWIGEGMNKGNLQLEDEEEIISAITHALSSISEKELKKSSLARLLCSSYSAVEKIIDIDRDQLLRQNPAAYTQSLDLAVRGLYRMSALFHHLATSVTSGLVDDDIIIVLLGIFWPLLESLFRSSHMENVHLSAAICRSLSSAIHSCGHHFHILLPKVMECLSANFLLFQRHDCFLRTAANVIEEFGHKEEYGALCVRTFEILSSASSISALNSSYTCDQEPDLVEAYTYFTSMFIRCCPKEAIVASSSLIELSFQKAAICSTAMHRGAALAAMSYMSCFLETALAAVLESPECIPNGSPGVALIQILARCGEGLLSNVLYALLGVSALSRVHKSATILQQLAALCSFSEGTTWKAILSWNSLCGWLQSTVKSLPSEYLKQGEAEIIVPSWLKVLQDAGSDYLHSRTGDNIRSHQGYMQGKGGRTLKRIIRDFAESHRNVPIPSPT

SEQ ID NO: 177222 - protein, 735 aa, Zea Mays
MVAAVRVDARGWYTGPGMVVPGVVSHATGDEDGATQLELPEAFLSKTPYIREALLLPALANRNEKIIAGLACLMCEVGQAAPALVAEGGSQALALTDGLLRCSLAHFILGIDVKSAKRNVVQELFVPVFSSLLDALLFRAQMDTDEHGSDGAPCIPERLTQFRMNLEELLVDICLLLGAPAYINRVADTILQDEGSFDFSIIMHFVNILSSRTPVELNGNLFLVYKSFGDVVGSYSKWLSSSQCNIKPLLLFCASGISKSVSSNACSLALRKLCEDAPSFIHEPQNLEILFWIGEGMNKGNLQLEDEEEIISAITHALSSISEKELKKSSLARLLCSSYSAVEKIIDIDRDQLLRQNPAAYTQSLDLAVRGLYRMSALFHHLATSVTSGLVDDDIIIVLLGIFWPLLESLFRSSHMENVHLSAAICRSLSSAIHSCGHHFHILLPKVMECLSANFLLFQRHDCFLRTAANVIEEFGHKEEYGALCVRTFEILSSASSISALNSSYTCDQEPDLVEAYTYFTSMFIRCCPKEAIVASSSLIELSFQKAAICSTAMHRGAALAAMSYMSCFLETALAAVLESPECIPNGSPGVALIQILARCGEGLLSNVLYALLGVSALSRVHKSATILQQLAALCSFSEGTTWKAILSWNSLCGWLQSTVKSLPSEYLKQGEAEIIVPSWLKVLQDAGSDYLHSRTGDNIRSHQGYMQGKGGRTLKRIIRDFAESHRNVPIPSPT

SEQ ID NO: 177223 - protein, 440 aa, Zea Mays
MHNPRPGGGDIVEMSSSATAEGRVIPHSGPLSKKSGARKSARFAESVSAPLSAPPPRASANNNNNNDDDDYVEITLDVRDDSVAVHSVKPAHGGGAGAGAGAGGDDPDVTLLARTLESRRSSSYGHSVIRNASSRIKQVSQELRRIASINRRGAAGPRIDRSKSAAAHALKGLKFISKAEGAAGWEAVERRFDKLAENGLLHRSKFGQCIGMKEPEFAGELFDALSRRRNISGDSISKAELLEFWDQISDTSFDGRLQTFFDMVDKDADGRITEEEVKEIITLSASANKLSKITDQAEEYARLIMEELDPGNLGYIELYACERLTRALRSSVRPVRILKVAVYPGNVLSLHFSKPQGFRYKSGQYIFVNCAAVSPFQWHPFSITSAPQDDYVSVHIRTLGDWTRELKNVFSRVCRPPTEGKSGLLRAEYDRDGSAVANPR

SEQ ID NO: 177224 - protein, 50 aa, Zea Mays
MTDGLSIIELHDHAYKNKTSQLQSPFYSTAKKTINLIENMPKVVNTTKHL

SEQ ID NO: 177225 - protein, 530 aa, Zea Mays
MKYFDAEFFNDSKLREMEDGAKEFNVPAFRENRKLVATENGGLHNPSVLLFKSSWSSGSMTSETRSFEYPRASSVHRPTNDEDIAFMSVIELGELIRTKQITSRELTDIFLRRLKRYNPVLEAVITYTEDLAYKQAKEADDLLAQGKYLGPLHGIPYGLKDIIAVPHYKTTWGSRTFKNQVLDSEAYVYRRLKSAGAVLVAKLVTGSLAYDDIWFGGRTRNPWNIEEFSTGSSAGPAASTSAGMVPFAIGSETAGSIAYPAARCGVTALRPTFGTVARTDVMSISESLDKLGPFCRSAVDCAVVLDTIRGTDAGDPSSREVALGDPFHVDITKLTVGYLDDAEMEVVDVLSSKGVKLVPFKLNYTVESVQSILNITMDTDMLAHFDNWQREGHDDDYEAQDQWPVELRRARLIPAVDYIQAQRARGKLIREIKDSFTVDAFVGNVTDWERVCLGNLVGMPVVVVPTGLKSIENPPKGGTKRRTTVTTGIYAPPDHDHIALALAMAYQSVTDHNKQRPPIDDLGPNDVIQR

SEQ ID NO: 177226 - protein, 516 aa, Zea Mays
MKYFDAEFFNDSKLREMEDGAKEFNVPAFRENRKLVATENGGLHNPSVLLFKSSWSSGSMTSETRSFEYPRASSVHRPTNDEDIAFMSVIELGELIRTKQITSRELTDIFLRRLKRYNPVLEAVITYTEDLAYKQAKEADDLLAQGKYLGPLHGIPYGLKDIIAVPHYKTTWGSRTFKNQVLDSEAYVYRRLKSAGAVLVAKLVTGSLAYDDIWFGGRTRNPWNIEEFSTGSSAGPAASTSAETAGSIAYPAARCGVTALRPTFGTVARTDVMSISESLDKLGPFCRSAVDCAVVLDTIRGTDAGDPSSREVALGDPFHVDITKLTVGYLDDAEMEVVDVLSSKGVKLVPFKLNYTVESVQSILNITMDTDMLAHFDNWQREGHDDDYEAQDQWPVELRRARLIPAAQRARGKLIREIKDSFTVDAFVGNVTDWERVCLGNLVGMPVVVVPTGLKSIENPPKGGTKRRTTVTTGIYAPPDHDHIALALAMAYQSVTDHNKQRPPIDDLGPNDVIQR

SEQ ID NO: 177227 - protein, 287 aa, Zea Mays
MVPFAIGSETAGSIAYPAARCGVTALRPTFGTVARTDVMSISESLDKLGPFCRSAVDCAVVLDTIRGTDAGDPSSREVALGDPFHVDITKLTVGYLDDAEMEVVDVLSSKGVKLVPFKLNYTVESVQSILNITMDTDMLAHFDNWQREGHDDDYEAQDQWPVELRRARLIPAVDYIQAQRARGKLIREIKDSFTVDAFVGNVTDWERVCLGNLVGMPVVVVPTGLKSIENPPKGGTKRRTTVTTGIYAPPDHDHIALALAMAYQSVTDHNKQRPPIDDLGPNDVIQR

SEQ ID NO: 177228 - protein, 609 aa, Zea Mays
MLPPRPPRPTPLPSSRPFHFLVVVSVLCFAAILTPAPAAVAAAASGDADGGGGEGGVIRIRTAAVARSAMDTKPFISAKDALKKEPISDVIALKDSMKYFDAEFFNDSKLREMEDGAKEFNVPAFRENRKLVATENGGLHNPSVLLFKSSWSSGSMTSETRSFEYPRASSVHRPTNDEDIAFMSVIELGELIRTKQITSRELTDIFLRRLKRYNPVLEAVITYTEDLAYKQAKEADDLLAQGKYLGPLHGIPYGLKDIIAVPHYKTTWGSRTFKNQVLDSEAYVYRRLKSAGAVLVAKLVTGSLAYDDIWFGGRTRNPWNIEEFSTGSSAGPAASTSAETAGSIAYPAARCGVTALRPTFGTVARTDDKLGPFCRSAVDCAVVLDTIRGTDAGDPSSREVALGDPFHVDITKLTVGYLDDAEMEVVDVLSSKGVKLVPFKLNYTVESVQSILNITMDTDMLAHFDNWQREGHDDDYEAQDQWPVELRRARLIPAVDYIQAQRARGKLIREIKDSFTVDAFVGNVTDWERVCLGNLVGMPVVVVPTGLKSIENPPKGGTKRRTTVTTGIYAPPDHDHIALALAMAYQSVTDHNKQRPPIDDLGPNDVIQR

SEQ ID NO: 177229 - protein, 576 aa, Zea Mays
MNSGRCLSYTHVCKYHKIWKDTKPFISAKDALKKEPISDVIALKDSMKYFDAEFFNDSKLREMEDGAKEFNVPAFRENRKLVATENGGLHNPSVLLFKSSWSSGSMTSETRSFEYPRASSVHRPTNDEDIAFMSVIELGELIRTKQITSRELTDIFLRRLKRYNPVLEAVITYTEDLAYKQAKEADDLLAQGKYLGPLHGIPYGLKDIIAVPHYKTTWGSRTFKNQVLDSEAYVYRRLKSAGAVLVAKLVTGSLAYDDIWFGGRTRNPWNIEEFSTGSSAGPAASTSAGMVPFAIGSETAGSIAYPAARCGVTALRPTFGTVARTDVMSISESLDKLGPFCRSAVDCAVVLDTIRGTDAGDPSSREVALGDPFHVDITKLTVGYLDDAEMEVVDVLSSKGVKLVPFKLNYTVESVQSILNITMDTDMLAHFDNWQREGHDDDYEAQDQWPVELRRARLIPAVDYIQAQRARGKLIREIKDSFTVDAFVGNVTDWERVCLGNLVGMPVVVVPTGLKSIENPPKGGTKRRTTVTTGIYAPPDHDHIALALAMAYQSVTDHNKQRPPIDDLGPNDVIQR

SEQ ID NO: 177230 - protein, 640 aa, Zea Mays
MLPPRPPRPTPLPSSRPFHFLVVVSVLCFAAILTPAPAAVAAAASGDADGGGGEGGVIRIRTAAVARSAMAWPSKCKWLPLQNSGRCLSYTHVCKYHKIWKDTKPFISAKDALKKEPISDVIALKDSMKYFDAEFFNDSKLREMEDGAKEFNVPAFRENRKLVATENGGLHNPSVLLFKSSWSSGSMTSETRSFEYPRASSVHRPTNDEDIAFMSVIELGELIRTKQITSRELTDIFLRRLKRYNPVLEAVITYTEDLAYKQAKEADDLLAQGKYLGPLHGIPYGLKDIIAVPHYKTTWGSRTFKNQVLDSEAYVYRRLKSAGAVLVAKLVTGSLAYDDIWFGGRTRNPWNIEEFSTGSSAGPAASTSAETAGSIAYPAARCGVTALRPTFGTVARTDDKLGPFCRSAVDCAVVLDTIRGTDAGDPSSREVALGDPFHVDITKLTVGYLDDAEMEVVDVLSSKGVKLVPFKLNYTVESVQSILNITMDTDMLAHFDNWQREGHDDDYEAQDQWPVELRRARLIPAVDYIQAQRARGKLIREIKDSFTVDAFVGNVTDWERVCLGNLVGMPVVVVPTGLKSIENPPKGGTKRRTTVTTGIYAPPDHDHIALALAMAYQSVTDHNKQRPPIDDLGPNDVIQR

SEQ ID NO: 177231 - protein, 505 aa, Zea Mays
MKYFDAEFFNDSKLREMEDGAKEFNVPAFRENRKLVATENGGLHNPSVLLFKSSWSSGSMTSETRSFEYPRASSVHRPTNDEDIAFMSVIELGELIRTKQITSRELTDIFLRRLKRYNPVLEAVITYTEDLAYKQAKEADDLLAQGKYLGPLHGIPYGLKDIIAVPHYKTTWGSRTFKNQVLDSEAYVYRRLKSAGAVLVAKLVTGSLAYDDIWFGGRTRNPWNIEEFSTGSSAGPAASTSAETAGSIAYPAARCGVTALRPTFGTVARTDVMSISESLDKLGPFCRSAVDCAVVLDTIRGTDAGDPSSREVALGDPFHVDITKLTVGYLDDAEMEVVDVLSSKGVKLVPFKLNYTVESVQSILNITMDTDMLAHFDNWQREGHDDDYEAQDQWPAQRARGKLIREIKDSFTVDAFVGNVTDWERVCLGNLVGMPVVVVPTGLKSIENPPKGGTKRRTTVTTGIYAPPDHDHIALALAMAYQSVTDHNKQRPPIDDLGPNDVIQR

SEQ ID NO: 177232 - protein, 249 aa, Zea Mays
MSISESLDKLGPFCRSAVDCAVVLDTIRGTDAGDPSSREVALGDPFHVDITKLTVGYLDDAEMEVVDVLSSKGVKLVPFKLNYTVESVQSILNITMDTDMLAHFDNWQREGHDDDYEAQDQWPVELRRARLIPAVDYIQAQRARGKLIREIKDSFTVDAFVGNVTDWERVCLGNLVGMPVVVVPTGLKSIENPPKGGTKRRTTVTTGIYAPPDHDHIALALAMAYQSVTDHNKQRPPIDDLGPNDVIQR

SEQ ID NO: 177233 - protein, 873 aa, Zea Mays
MSSQDPPPATSTQKKQSESLVNLLAEASRFYRKAYNELFSGLITEWEPESSTNTPDYMLFGWHLFLTLRSRSPELFKDLVSCIHGLVAVLAILLVHVPAKFRTFTIEGSSHLIKQTEKGVDLIASLCHNYHTSEECLKEMMDKSHKAIEEVFSMKALSASECKTENLDKIDTDRLMYFKGLIDMECFQSNLEKMEKLCNSNNCEAELDFKLILTNNDYIPCAENLSRDSTNLGCSKCAFETLASPTKTIKNMLTVPSSPLSPTNGGSVKIVQMTPITSAMTTAKWLREVISSLPEKPSSKLQQLMSSCDRDLTNAVTERVSIVLEAIFPTKSSADRGGSLGLNCANAFDTLWADARKMEASKLYYRVLEAICRAELQNSNVNNLTPLLSNERFHRCLIACSAELVLATHKTVIMMFPAVLESTGLTSFDLSKIIENFVRHEETLPRELKRHLNSLEEQILESMAWEKGSSLYNSLIVARPSVASEINRFGLLAESMPSLDDLVARQNIHIEGLPATPSKKRAAGRDDNADPRSPKRPCNESRSTVVEHNLQTPPPKQCHMVLTSLKAKCHPLQSTFASPTVSNPVGGNEKCADVTIQIFFSKILKLAAIRIRNLCERIQYMEQTERVYNVFKQILDQQTTLFFNRHIDQLILCCLYGVAKVCQLELSFREILNNYKKEAQCKPEVFLSIYIGSRNHNGVLISRHVDIITFYNEVFVPAAKPFLVSLISSGTRPEDKKNASGQVPGSPKLSPFPNLPDMSPKKVSASHNVYVSPLRQTKMDLLLSPSSRSFYACIGEGTHAYQSPSKDLAAINSRLNYNGRRVNSRLNFDMGGWFSESINPFPRTQDNFCMLHFPKLQLIQKSAYFHSVSSQQH

SEQ ID NO: 177234 - protein, 727 aa, Zea Mays
MMDKSHKAIEEVFSMKALSASECKTENLDKIDTDRLMYFKGLIDMECFQSNLEKMEKLCNSNNCEAELDFKLILTNNDYIPCAENLSRDSTNLGCSKCAFETLASPTKTIKNMLTVPSSPLSPTNGGSVKIVQMTPITSAMTTAKWLREVISSLPEKPSSKLQQLMSSCDRDLTNAVTERVSIVLEAIFPTKSSADRGGSLGLNCANAFDTLWADARKMEASKLYYRVLEAICRAELQNSNVNNLTPLLSNERFHRCLIACSAELVLATHKTVIMMFPAVLESTGLTSFDLSKIIENFVRHEETLPRELKRHLNSLEEQILESMAWEKGSSLYNSLIVARPSVASEINRFGLLAESMPSLDDLVARQNIHIEGLPATPSKKRAAGRDDNADPRSPKRPCNESRSTVVEHNLQTPPPKQCHMVLTSLKAKCHPLQSTFASPTVSNPVGGNEKCADVTIQIFFSKILKLAAIRIRNLCERIQYMEQTERVYNVFKQILDQQTTLFFNRHIDQLILCCLYGVAKVCQLELSFREILNNYKKEAQCKPEVFLSIYIGSRNHNGVLISRHVDIITFYNEVFVPAAKPFLVSLISSGTRPEDKKNASGQVPGSPKLSPFPNLPDMSPKKVSASHNVYVSPLRQTKMDLLLSPSSRSFYACIGEGTHAYQSPSKDLAAINSRLNYNGRRVNSRLNFDMVSDSVVAGSLGQPNGGSTSLDPAAAFSPLSKRKPDT

SEQ ID NO: 177235 - protein, 599 aa, Zea Mays
MLTVPSSPLSPTNGGSVKIVQMTPITSAMTTAKWLREVISSLPEKPSSKLQQLMSSCDRDLTNAVTERVSIVLEAIFPTKSSADRGGSLGLNCANAFDTLWADARKMEASKLYYRVLEAICRAELQNSNVNNLTPLLSNERFHRCLIACSAELVLATHKTVIMMFPAVLESTGLTSFDLSKIIENFVRHEETLPRELKRHLNSLEEQILESMAWEKGSSLYNSLIVARPSVASEINRFGLLAESMPSLDDLVARQNIHIEGLPATPSKKRAAGRDDNADPRSPKRPCNESRSTVVEHNLQTPPPKQCHMVLTSLKAKCHPLQSTFASPTVSNPVGGNEKCADVTIQIFFSKILKLAAIRIRNLCERIQYMEQTERVYNVFKQILDQQTTLFFNRHIDQLILCCLYGVAKVCQLELSFREILNNYKKEAQCKPEVFLSIYIGSRNHNGVLISRHVDIITFYNEVFVPAAKPFLVSLISSGTRPEDKKNASDMSPKKVSASHNVYVSPLRQTKMDLLLSPSSRSFYACIGEGTHAYQSPSKDLAAINSRLNYNGRRVNSRLNFDMVSDSVVAGSLGQPNGGSTSLDPAAAFSPLSKRKPDT

SEQ ID NO: 177236 - protein, 691 aa, Zea Mays
MYFKGLIDMECFQSNLEKMEKLCNSNNCEAELDFKLILTNNDYIPCAENLSRDSTNLGCSKCAFETLASPTKTIKNMLTVPSSPLSPTNGGSVKIVQMTPITSAMTTAKWLREVISSLPEKPSSKLQQLMSSCDRDLTNAVTERVSIVLEAIFPTKSSADRGGSLGLNCANAFDTLWADARKMEASKLYYRVLEAICRAELQNSNVNNLTPLLSNERFHRCLIACSAELVLATHKTVIMMFPAVLESTGLTSFDLSKIIENFVRHEETLPRELKRHLNSLEEQILESMAWEKGSSLYNSLIVARPSVASEINRFGLLAESMPSLDDLVARQNIHIEGLPATPSKKRAAGRDDNADPRSPKRPCNESRSTVVEHNLQTPPPKQCHMVLTSLKAKCHPLQSTFASPTVSNPVGGNEKCADVTIQIFFSKILKLAAIRIRNLCERIQYMEQTERVYNVFKQILDQQTTLFFNRHIDQLILCCLYGVAKVCQLELSFREILNNYKKEAQCKPEVFLSIYIGSRNHNGVLISRHVDIITFYNEVFVPAAKPFLVSLISSGTRPEDKKNASGQVPGSPKLSPFPNLPDMSPKKVSASHNVYVSPLRQTKMDLLLSPSSRSFYACIGEGTHAYQSPSKDLAAINSRLNYNGRRVNSRLNFDMVSDSVVAGSLGQPNGGSTSLDPAAAFSPLSKRKPDT

SEQ ID NO: 177237 - protein, 154 aa, Zea Mays
MGISQDTHESMATDAANYLCHQLQHLLGPISSATSQSGPWEERSVMVRLTQKLQKSKRNKWWRQRRRKHVAELFQKERADYDRVDQEADEWRAKQIAKDIAKRRVESMQQIARKKTNEERKRLESEVDLDLENYECFIDVTLTRDNNITTRNIY

SEQ ID NO: 177238 - protein, 213 aa, Zea Mays
MGISQDTHESMATDAANYLCHQLQHLLGPISSATSQSGPWEERSVMVRLTQKLQKSKRNKWWRQRRRKHVAELFQKERADYDRVDQEADEWRAKQIAKDIAKRRVESMQQIARKKTNEERKRLESEQSAACLQENFRRSVRVLQFRRCSSFPRHLPARKRRGRAVFSPSTLQQQRSKFRRRVGQQQQLAANVPLPRPLLLSQLRDKLGARRRG

SEQ ID NO: 177239 - protein, 163 aa, Zea Mays
MGISQDTHESMATDAANYLCHQLQHLLGPISSATSQSGPWEERSVMVRLTQKLQKSKRNKWWRQRRRKHVAELFQKERADYDRVDQEADEWRAKQIAKDIAKRRVESMQQIARKKTNEERKRLESEVVWNKISRPGCAVKVFFSRVFENYLLLVMCKRMCAYY

SEQ ID NO: 177240 - protein, 249 aa, Zea Mays
MGISQDTHESMATDAANYLCHQLQHLLGPISSATSQSGPWEERSVMVRLTQKLQKSKRNKWWRQRRRKHVAELFQKERADYDRVDQEADEWRAKQIAKDIAKRRVESMQQIARKKTNEERKRLESETGNALGDSDTEPRNTKYMSLGDDRSLCMECLGSAVMDTGECQPLYHSIRDYYEGMKMKLDQQIPMLLVEQQALNEAMEGESRGPHHMPETRGLCLSEEQTVSSEAQDWWKPVTGHENSATKTD

SEQ ID NO: 177241 - protein, 269 aa, Zea Mays
MGISQDTHESMATDAANYLCHQLQHLLGPISSATSQSGPWEERSVMVRLTQKLQKSKRNKWWRQRRRKHVAELFQKERADYDRVDQEADEWRAKQIAKDIAKRRVESMQQIARKKTNEERKRLESETGNALGDSDTEPRNTKYMSLGDDRSLCMECLGSAVMDTGECQPLYHSIRDYYEGMKMKLDQQIPMLLVEQQALNEAMEGESRGPHHMPETRGLCLSEEQTVSSILRRPRIGGNRLLDMRTQPQKLTRRCELRVIPLCPSGSRL

SEQ ID NO: 177242 - protein, 277 aa, Zea Mays
MNIQTSPLSHPCGPYPQPKMDATTAVAARRLLLLPLRAQPPAPRGAAPATANPWCRSVPRRRRVRAAPARASLDRAAVLLDTAAAVANGGTGYSQASYYTSLGLFVLSVPGLWSLIKRSVKSKIVQKTFVKDEGQSMAPNQVAGEILSFFTRNNFTVSDRGEVITFEGTMIPNRGQAALLTFCTCISLGSVGLVLSIAVPEGGNNWFWLMTLSPLAGAYYWTKASRKEEIKVKMILSDDGNVSEILVQGDDVQVEQMRKDLKFSEKGMVYVKGIFET

SEQ ID NO: 177243 - protein, 128 aa, Zea Mays
MHLCPCLQNRIVQKTFVKDEGQSMAPNQVAGEILSFFTRNNFTVSDRGEVITFEGTMIPNRGQAALLTFCTCISLGSVGLVLSIAVPEGGNNWFWLMTLSPLAYVSLLLNSQQFRMNSSSTNAVTDPS

SEQ ID NO: 177244 - protein, 156 aa, Zea Mays
MVLEALEAMSEKEAFEMKAELETKGETNFKVCTLGKDVVITKKMVSISMEKKLEHQRVFTPSVVEPSFGIGRIIYCLFEHSFYTRPSKSEEEQLNVFRFPPLVAPIKCTVFPLVKNQEFDDAAKVIAKALTTAGISHIIDTTGTCNTILNTPLRIT

SEQ ID NO: 177245 - protein, 199 aa, Zea Mays
MQCPNCRKIEKGRWLYASGHRASVDIDMGGWVTSDNYDITSELPFGFQWCPFSGFTRLASMFEEREAELTYHTTGDRSSAASSSLVCPYLALRGFLHPVHVPSTSNPGAESTSFRRHATGLEGHATLDLNNAQLFHAIESINHDSEHRHLSNLPVSGIPEYSMTPFGIGLPRYDSGSQQRFRSYAHHHPLIHSYYFRRV

SEQ ID NO: 177246 - protein, 277 aa, Zea Mays
MDLERSPPASSAEAPGDGGGGGAAACSICLDAVLARSAGRSVAKLQCGHEFHLDCIGSAFNAKGAMQCPNCRKIEKGRWLYASGHRASVDIDMGGWVTSDNYDITSELPFGFQWCPFSGFTRLASMFEEREAELTYHTTGDRSSAASSSLVCPYLALRGFLHPVHVPSTSNPGAESTSFRRHATGLEGHATLDLNNAQLFHAIESINHDSEHRHLSNLPVSGIPEYSMTPFGIGLPRYDSGSQQRFRSYAHHHPLIHRLHPWWLLHHLFGVTPRGYR

SEQ ID NO: 177247 - protein, 379 aa, Zea Mays
MQCPNCRKIEKGRWLYASGHRASVDIDMGGWVTSDNYDITSELPFGFQWCPFSGFTRLASMFEEREAELTYHTTGDRSSAASSSLVCPYLALRGFLHPVHVPSTSNPGAESTSFRRHATGLEGHATLDLNNAQLFHAIESINHDSEHRHLSNLPVSGIPEYSMTPFGIGLPRYDSGSQQRFRSYAHHHPLIHRPAPRSGSNLVAPPLGSVPAVVAAAETARGSHMYQRSSVHGSPFPPTTTRRVRPRALTITSFIAATSSDPLTGRTMHGAGRASLRSPGSPLKASLTGGAPSTLCRTMRMEALAEGLLGSGCRRRAKATRRTAIRLCRRHRGCRRSCDSTRLFLRPIAVYKMKYSVRGLREHIERRSTALQSPALGPV

SEQ ID NO: 177248 - protein, 203 aa, Zea Mays
MTPFGIGLPRYDSGSQQRFRSYAHHHPLIHRPAPRSGSNLVAPPLGSVPAVVAAAETARGSHMYQRSSVHGSPFPPTTTRRVRPRALTITSFIAATSSGEIGGPHGFSAPGAAMNRSVSDAEGISRPIDRPYNAWGREGFAPFPWIPAEGESHWWGTFNPVQNHAHGGFSRRPAGERMPPQSQSHPENSYQAVPPSQRMPPFL

SEQ ID NO: 177249 - protein, 237 aa, Zea Mays
MSREENVYMAKLAEQAERYEEMVEYMEKVAKTTDVQELTVEERNLLSVAYKNVIAAPRASWRIISSIEQKEESRKNEEHVAQIKEYRGKIEAELSNICDGILKLLDTHLVPSSTATESKVFYLKMKGDYHRYLAEFKTGAERKESAESTMVAYKAAQDIALAELPPIHPIRLGLALNFSVFYYEIQNSPDKACNLAKEAFDEAISQLDMLGEDSYKDSNLIMQLLRDNLTLWTVYPC

SEQ ID NO: 177250 - protein, 293 aa, Zea Mays
MQSLLNDPSIKEMADQIARDPAFNRMAEQLQRSAQSTGEQGTPPLNPQQYMETMQKVMENPQFMTMAERLGNALMQDPAMSSMLETFSSPSHKEQLEERMSRIKEDPAMKSILDELENGGPSAMMKYWNDPDTLQKIGEAMGASFPFGAGSSAEPSGTEETEEEGGDDDESIVHHTASVGDEEGLKKALDGGADKDEEDSEGRRALHFACGYGELKCAQILLEAGAAVDALDKNKNTPLHYAAGYGRKECVDLLLKHGAAVTLQNLDGKTPIDVAKLNNQDEVLKLLEKDAFL

SEQ ID NO: 177251 - protein, 377 aa, Zea Mays
MDSDVEMNTASDEEVMDNDDYYDYCYSDVGDDGGSNSGSEELVAGDYDEGLEAEGTDEVVSRREQTFVVLNEQVISERQAEDVSKVSAVTLITREEACALLHHYKWNISKLSDEWFADEEKVRHTVGLLLNGNHDPRSRKLVCGICFEGCSSDMMSSAGCAHFYCHECWEGYISAAIGDGPGCLSLRCPDPSCSAMVLQGMINELAKDEDRKKYARFLLRAYVEGSKKTKWCPAPDCTCAVEFLGDENYDVSCNCMFSFCWNCTEEAHRPVNCETVSKWILKNSAESENMNWILANSKPCPKCKRPIEKNQGCMHMTCTPPCKFEFCWLCLGAWSDHGERTGGFYACNRYESAKKEGVVCLFFTSCILEKHFCRTLV

SEQ ID NO: 177252 - protein, 442 aa, Zea Mays
MMSSAGCAHFYCHECWEGYISAAIGDGPGCLSLRCPDPSCSAMVLQGMINELAKDEDRKKYARFLLRAYVEGSKKTKWCPAPDCTCAVEFLGDENYDVSCNCMFSFCWNCTEEAHRPVNCETVSKWILKNSAESENMNWILANSKPCPKCKRPIEKNQGCMHMTCTPPCKFEFCWLCLGAWSDHGERTGGFYACNRYESAKKEGVYDETDARRERAKNSLERYMHYYERWASNQTSRQKAQADLLKAEKDQIANLTDIFGIPETQLKFIIEAWSQIIECRRVLKWTYAYGYYLDDKIKSEFFEYLQGEAESGLERLHQCAEKDLQIFLPSVKSDSTETTTPTVAEFGEFRVKLAGLTSVTRNYFENLVQALEAGLEDVRATGQAAGTSSTATSSKKGGTKSKKKQHTAPSSDHTDDGWPCERCTFLNPPTVDACSVCEKSRY

SEQ ID NO: 177253 - protein, 579 aa, Zea Mays
MDSDVEMNTASDEEVMDNDDYYDYCYSDVGDDGGSNSGSEELVAGDYDEGLEAEGTDEVVSRREQTFVVLNEQVISERQAEDVSKVSAVTLITREEACALLHHYKWNISKLSDEWFADEEKVRHTVGLLLNGNHDPRSRKLVCGICFEGCSSDMMSSAGCAHFYCHECWEGYISAAIGDGPGCLSLRCPDPSCSAMVLQGMINELAKDEDRKKYARFLLRAYVEGSKKTKWCPAPDCTCAVEFLGDENYDVSCNCMFSFCWNCTEEAHRPVNCETVSKWILKNSAESENMNWILANSKPCPKCKRPIEKNQGCMHMTCTPPCKFEFCWLCLGAWSDHGERTGGFYACNRYESAKKEGVYDETDARRERAKNSLERYMHYYERWASNQTIANLTDIFGIPETQLKFIIEAWSQIIECRRVLKWTYAYGYYLDDKIKSEFFEYLQGEAESGLERLHQCAEKDLQIFLPSVKSDSTETTTPTVAEFGEFRVKLAGLTSVTRNYFENLVQALEAGLEDVRATGQAAGTSSTATSSKKGGTKSKKKQHTAPSSDHTDDGWPCERCTFLNPPTVDACSVCEKSRY

SEQ ID NO: 177254 - protein, 233 aa, Zea Mays
MATSTEPEGAPPAAKGPKGEANTKGSNEHREVGAGSGGGSQKRKRKEVFIYGNYRNYYGYRIDRNVGEDPRLEAFKKQWFEKKDCLDIGCNQGLVTIGLAMKFKCQSILGVDIDSGLIETAKWNLRRIMRQDKVATNNVKAQKSSDSPQSSPEELASELSNGNKHQDLFKIVSFRRENFVASMDGCSEQYDTILCYVICEDLEASKTGRCFYHGASTMEFIQEKQISFRGRQK

SEQ ID NO: 177255 - protein, 253 aa, Zea Mays
MATSTEPEGAPPAAKGPKGEANTKGSNEHREVGAGSGGGSQKRKRKEVFIYGNYRNYYGYRIDRNVGEDPRLEAFKKQWFEKKDCLDIGCNQGLVTIGLAMKFKCQSILGVDIDSGLIETAKWNLRRIMRQDKVATNNVKAQKSSDSPQSSPEELASELSNGNKHQDLFKIVSFRRENFVASMDGCSEQYDTILCLSVTKWIHLNWGDDGLVTLFVKIWRLLRPGGVFIMEPQPWSSYKRNRLVSEGHFARFF

SEQ ID NO: 177256 - protein, 249 aa, Zea Mays
MATSTEPEGAPPAAKGPKGEANTKGSNEHREVGAGSGGGSQKRKRKEVFIYGNYRNYYGYRIDRNVGEDPRLEAFKKQWFEKKDCLDIGCNQGLVTIGLAMKFKCQSILGVDIDSGLIETAKWNLRRIMRQDKVATNNVKAQKSSDSPQSSPEELASELSNGNKHQDLFKIVSFRRENFVASMDGCSEQYDTILCVTKWIHLNWGDDGLVTLFVKIWRLLRPGGVFIMEPQPWSSYKRNRLVSEARGNS

SEQ ID NO: 177257 - protein, 223 aa, Zea Mays
MGAGGEEAPRIIVPMAVEGTPNQLAFVEESKLQKRKENVDWAVRNRERRAAKRQRIRDEHKVAVRRPEEFVTAFRNKERDFLRMRTRIKVRSQPPVEALGSRLVFAIRIPGSVDLHPHIRKVLRKLRLTKVLTGVFLRATELTLKRLLVVEPFVTYGFPNLKSVKELIYKKGRGFFDMEPFPLTSNDLIEKALGDHGIICLEDLVYESGNRGDKVNELIEKLN

SEQ ID NO: 177258 - protein, 81 aa, Zea Mays
MLGACMLPFEITIRALNEALTGEVQRLKLATGEMTDGPMPKGLQQQMNSQMLQLQQLQIQQQAPPQQTQQQGQRQQPQKSA

SEQ ID NO: 177259 - protein, 378 aa, Zea Mays
MSIKCHCSAIHVLLQNNVTSFLQLATDQVTSKMDQKQYWTGDQNKYQYHTIENFAESFRTSYLPLLVEDKLCSPNNTGKNKEVKVNAGRRVSRWNIFKACFSRELLLLKRNSPVHIFKTIQITVMALVISTLFLRTKMSHNSVLDANKYMGALFMAVVIVNFNGMTEIAMTIKRLPTFYKQRELLALPGWALLCSVYLISIPISLVETGLWTGLTYYVIGYAPSAIRFIQHFLVLFAMHQMSMGLYRFLAAIGRTQVMANMLGTAALIAIYILGGFVISKDDLQPWLRWGYWTSPFTYAQNAIALNEFHDKRWNSEFYYNGANTVGEAILKIRGLLMEWHWYWICVTILFGYSLVFNIFSIFALEFIGCMYTNLSQTS

SEQ ID NO: 177260 - protein, 352 aa, Zea Mays
MLRDMKEKLGVDAPKVEVRFERLTVEADVRVGRRAVPTLLNAAINAAQELATSVHMCVTRKRPIRIINEVSGVIRPSRMTLLLGAPGSGKTTLLKALAGKLDSSLKFKGKVMYNGEEINYSTPQTQYLRTYVSQYDLHHAEMTVRETIDFSSKMLGTNNEFDMLGEAIRRKKGVINEVDQDLDSFIKLFSQATTFGEGSNLTTNYIIKILGLSECADTLVGDEMRRGISGGQKKRATVGEMLVGLARCFFMDDISTGLDSSTAFEIMKFLQQMAHLMDLTMVISLLQPPPETLELFDDIILLCEGQIVYHGPRENATDLFETMGFKCPDRKNVADFLQEVINHQMCLTANNK

SEQ ID NO: 177261 - protein, 1153 aa, Zea Mays
MYNGEEINYSTPQTQYLRTYVSQYDLHHAEMTVRETIDFSSKMLGTNNEFDMLGEAIRRKKGVINEVDQDLDSFIKLFSQATTFGEGSNLTTNYIIKILGLSECADTLVGDEMRRGISGGQKKRATVGEMLVGLARCFFMDDISTGLDSSTAFEIMKFLQQMAHLMDLTMVISLLQPPPETLELFDDIILLCEGQIVYHGPRENATDLFETMGFKCPDRKNVADFLQEVTSKMDQKQYWTGDQNKYQYHTIENFAESFRTSYLPLLVEDKLCSPNNTGKNKEVKVNAGRRVSRWNIFKACFSRELLLLKRNSPVHIFKTIQITVMALVISTLFLRTKMSHNSVLDANKYMGALFMAVVIVNFNGMTEIAMTIKRLPTFYKQRELLALPGWALLCSVYLISIPISLVETGLWTGLTYYVIGYAPSAIRFIQHFLVLFAMHQMSMGLYRFLAAIGRTQVMANMLGTAALIAIYILGGFVISKDDLQPWLRWGYWTSPFTYAQNAIALNEFHDKRWNSEFYYNGANTVGEAILKIRGLLMEWHWYWICVTILFGYSLVFNIFSIFALEFIGSPHKHQVNIKTTKVNFVYNRQMAENGNSSNDQVILPFRPLSLVFDHIQYFVDMPKVISCSLIKILPGSFINSYHILKTRIQISHQEMTKNGATKKKLQLLQDVSGAFRPGVLTALMGITGAGKTTLLDVLAGRKTGGYIEGTIKIAGYPKKQDTFSRISGYCEQSDIHSPNLTVYESLKFSAWLRLPSNVKPHQRDMFIKEVMNLIEITDLKNAMVGIPGATGLSAEQRKRLTIAVELVASPSIIFMDEPTTGLDARAAAIVMRTVRKTVDTGRTVVCTIHQPSIEIFESFDELLLMKRGGQLIYSGSAIPGVPKINKGQNPATWMLDISSHITEYEIGVDYAEIYCNSSLYSKDEQDVLNILGIVYGSALFLGFMNCSILQPVVAMERVVLYREKAAGMYSTMAYAIAQVSVELPYMLVQVMIFSSIVYPMIGFQVTASKFFWFFLYQVMSFMYYTLYGMMTVALTPNIEIAMGLSFLIFIFWNVFSGFIIVREMMPVWWRWVYWADPAAWTVYGLMFSQLADRTEQILVPGLGEQTVREFLEGYLGLQDRYFVLVTCLHLAIIGLFVFLFFLAIKHLNFQRSF

SEQ ID NO: 177262 - protein, 226 aa, Zea Mays
MGALNWAKVVHEHQGWRLISCIWLHAGLVHLVVNMLSLLFIGIRLEQQFGFVRIGVIYLISGFGGSVLSALFLHSNYVSVGASGALFGLLGSMLSELIINWTIYSNKAAAIITLLFIIVINLAIGILPHADNFAHIGGFASGFLIGFVLLARPQFGWMERSELPQTSQPPKYKSYQYVLWVAALLLLVVGFAIILVMLFTGKNGNDSCHWCHYLNCVPTSRWKCDT

SEQ ID NO: 177263 - protein, 92 aa, Zea Mays
MFIKKHNMLLQESSKGLGNDTEVLNEFAVITCQPKKTSQLLRVSWCRPGYNCLHFGRTSGHANFTNNMVQVSYFLFCKCALSKLDLPVVLKQ

SEQ ID NO: 177264 - protein, 322 aa, Zea Mays
MATGGQGKAAGYYQYPTSYAGAADEERRWWPWLVPTVLVACIAVFAAEMFVNDCPRHGSTLGGGAGCVAAGLLRRFSFQPLRENPLFGPSSATLEKMGALNWAKVVHEHQGWRLISCIWLHAGLVHLVVNMLSLLFIGIRLEQQFGFVRIGVIYLISGFGGSVLSALFLHSNYVSVGASGALFGLLGSMLSELIINWTIYSNKAAAIITLLFIIVINLAIGILPHADNFAHIGGFASGFLIGFVLLARPQFGWMERSELPQTSQPPKYKSYQYVLWVAALLLLVVGFAIILVMLFKGKNGNDSCHWCHYLNCVPTSRWKCDT

SEQ ID NO: 177265 - protein, 175 aa, Zea Mays
MRIGVIYLISGFGGSVLSALFLHSNYVSVGASGALFGLLGSMLSELIINWTIYSNKAAAIITLLFIIVINLAIGILPHADNFAHIGGFASGFLIGFVLLARPQFGWMERSELPQTSQPPKYKSYQYVLWVAALLLLVVGFAIILVMLFTGKNGNDSCHWCHYLNCVPTSRWKCDT

SEQ ID NO: 177266 - protein, 292 aa, Zea Mays
MARPPQEAIDTFVSITGADEVTAVRVLEEHGHDLNEAVNAYFNEGDRTTTRINQNPVPATASYDDMMELDEPLDPMFNRPLFPRTLGNPFALLDPGFADITAGDIFGRGPRVTQPRDVRQIPIEVKDSNTQTGSSGQGPIIEDVTGRESFYGPEVHGTVIVDEDDEDLPLTLSAQDPKIPSSALHPNHFMPSAPPVVDVSDHNNDIEEEMIKAAIEASKREADGMKNVLSSGQSENMSRGRGDHELARAVSLSLETAERERALRQEGMYVADHSPDLSDKEGGQGGSGISER

SEQ ID NO: 177267 - protein, 121 aa, Zea Mays
MERNLAKWVALACRSVKHTASSCTRKNGSLKSDRSSEGVTDTFGAPGKWAREGLSRLCPYGIIACRLFPFLFSGRRGLLLCLRTQLPPPLSKRRSSETNLGTATADVRRTRAGGSSGRPIL

SEQ ID NO: 177268 - protein, 134 aa, Zea Mays
MLSELIMNWTIYSNKAAAIITLLFIIVINLAIGILPHADNFAHLGGFASGFLIGSVLLARPQFGWMERSELPQTNQPPKYKSYQYVLWVAALLLLVVGFAIILVMLFKGKNGNDSCHWCHYLNCVPTSRWKCDT

SEQ ID NO: 177269 - protein, 201 aa, Zea Mays
MMELDEPLDPMFNRPLFPRTLGNPFALLDPGFADITAGDIFGRGPRVTQPRDVRQIPIEVKDSNTQTGSSGQGPIIEDVTGRESFYGPEVHGTVIVDEDDEDLPLTLSAQDPKIPSSALHPNHFMPSAPPVVDVSDHNNDIEEEMIKAAIEASKREADGMKNVLSSGQSENMSRGRGDHELARAVSLSLEARTNYRRSGNF

SEQ ID NO: 177270 - protein, 625 aa, Zea Mays
MVLGGGPLGAIIGRYPSSSAAAGDDEQGDPGPGGGVIRHDRKCRDWPFLVLFAAFWVAMIVNSSFGFNQGNPLRLTYGLDYKGNICGSRHADPDLYQLDVRYWVNPNQVYQSGLKTSHIELPDAKTICLMECPLPAEDGLNFVCDYPEGDIRLSVDDWIDRDYDYFEYLTPDMRNSSLQLQGPCYPVIFPSVNVYWSCQFIARASNASLKHWKDMGGVTIDENMLIDRTIHDAINSKSAVMKEINHLHAASVLMTVIMILAFLTSIAIARRIMKATSVLKVAAKVVGEVQALIIFPVVPYLILAIFYTFWFSAALHLFSAGQVIQNDCNTDCCSYDLKLGKVNCDRCCGYTIHYTPHIGIAILFHLFGCYWATQFFIGCSSTIIAGSVASYYWARGEISHDIPFHTVVSSLKRLLRYSLGSVALGSLIVSIVEWVRFILESLRRRLKFVDSARGSRFGKTVSSSSQCCLGCIDWTLKSVNRNAYVMIAITGKGFCKASVLATGLIMNNVLRVGKVNVIGDVILLLGKLCVSLLCALFAFLMLDEHKYRSGHNKISSPLVPVLLSWALGYIVAKLFFAVVEVSIDTMVLSFCQDSEEHQGNARYAPPLLMETLDEESELRRLTQGP

SEQ ID NO: 177271 - protein, 353 aa, Zea Mays
MGQMGGPDGDGDGGAGPHHQYHYQALLAAVQNPSQGLHPFPLPFHVPLHAGAGAPAAGPGPGADADASTHNANAAHHSQPPRGFTDWSASNSAFAAVASQPAPATTNTPFHYNLSQSYALWTHYMLNKNVSYSTYPTPHEEHPHPLRHTHIQENPHPLRHTHIPDKDSGCASSLGFDSFTTMSLGPNICSHMTPMEGSISAKEPENSEDLPAIVRSSDEMDTRNSGKVHRDTVGTLPESKQSHESCASVNNKFNSGEYQVILRKELTKSDVANSGRIVLPKKDAEAGLPPLVQGDPLILQMDDMVLPIIWKFKYRFWPNNKSRMYILEAAGEFVKTHGLQIIRGEKSIQQTNP

SEQ ID NO: 177272 - protein, 367 aa, Zea Mays
MGQMGGPDGDGDGGAGPHHQYHYQALLAAVQNPSQGLHPFPLPFHVPLHAGAGAPAAGPGADADASTHNANAAHHSQPPRGFTDWSASNSAFAAVASQPAPATTNTPFHYNLSQSYALWTHYMLNKNVSYSTYPTPHEEHPHPLRHTHIQENPHPLRHTHIPDKDSGCASSLGFDSFTTMSLGPNICSHMTPMEGSISAKEPENSEDLPAIVRSSDEMDTRNSGKVHRDTVGTLPESKQSHESCASVNNKFNSGEYQVILRKELTKSDVANSGRIVLPKKDAEAGLPPLVQGDPLILQMDDMVLPIIWKFKYRFWPNNKSRMYILEAAGEFVKTHGLQAGDALIIYKNSVPGKFIIRGEKSIQQTNP

SEQ ID NO: 177273 - protein, 327 aa, Zea Mays
MVGCLDGLGREGTTWRPGPGADADASTHNANAAHHSQPPRGFTDWSASNSAFAAVASQPAPATTNTPFHYNLSQSYALWTHYMLNKNVSYSTYPTPHEEHPHPLRHTHIQENPHPLRHTHIPDKDSGCASSLGFDSFTTMSLGPNICSHMTPMEGSISAKEPENSEDLPAIVRSSDEMDTRNSGKVHRDTVGTLPESKQSHESCASVNNKFNSGEYQVILRKELTKSDVANSGRIVLPKKDAEAGLPPLVQGDPLILQMDDMVLPIIWKFKYRFWPNNKSRMYILEAAGEFVKTHGLQAGDALIIYKNSVPGKFIIRGEKSIQQTNP

SEQ ID NO: 177274 - protein, 1185 aa, Zea Mays
MEDDPPTDCSSTSGQGSGTEEDVKDGGHEIGDNSLAVPQKKASLQQDPKHPKTKKSAASKSGFDMYTEQEHSPTSLRAERQIEEVKIEEESCHLEGFVLEPNLEVVCALEVPKNFKSNKLLRNAESKENEHVGVGSPTGRIAVEAASDVVLNMSAEEESREFKKSKIMTKQSLTTGSEKRDNKIVHGKPDKQLTGKSSAGFSLNQKSLTGSGQHKMDSSADTRPAKKARLMDRAGETDKTVAKSETKLNINYENHNAVKHEQSTAVETCKNTILKTGIGDDRARKSGGAVSPISKLHSEIMEPASGSSVTQSTVADSLKKGSSRKEDVSRVDRKLVKPKRRACRFDDDEDEGQQTPLHRTSAKSLSTHIVPTEKPGSRGNFASHVGNASGKKPGPAREEKSRSVRMSPVKHEPVFSSPSQDKVHARHQLMGRNLITGSVETPVIGNKMSLVDGKSSAQVKMPACSEVKKLHSTSKPLQVTSGKSHSRNYPASEKIALVPKSEETKAKSKPATSVEHKVATTLSTERTGKRDHLKEERSSSVDKAAYSEPNPDSAKSIKHLIAAAQARRNLMASALAKFDGSSTDNSAITSTSYAIARDALEGMIETLSRTKDSIGRATRHAIECSKYGIAGEIVELLIQKLENEHNLHRRIDLLFLVDSITQCSHSHRGVAGASYVPTVQAALPRLFGAAAPPGAGARENRRQCLKVLRLWLERKIMPEDILRKYMGDIEVPNDDTSTSLMLKRPSRSERSVDDPIREMDDMLVDEYGSNATFELSGILSSKVFEDDEDFPQNNGSSSFVSRPVEGGVIHETEDNIAPASVEEHIIRVEHVATDAAMEDALELLGNNQQTHGAVIIEHDSSQGPGSEQALIAQNELPPLPDGPPPLPSDSPPPPPPLPPSPPPATPPPPPPLSPASPLPPPPPPLPSGPPPQPAPPPLPTQDPPLPSIPLPVSSSPLSLGYQPPAPEYFMTPNGNQLAQMTVNTSIQAIGNTTTFIPGGPVNGQAAVNFVTSMPAEFGNTSVFMAQASNGNYQFRPTGVPFQQGNFSAFPSAQTPPVHPHSRMAHMNPMGQQAVAPPHNPYAAQSFPNSQSHYPSEEHWRMASGNFSPDDQHNWIASGRSLPCSEGPFVHDGYSRSNIDRSSMNPMNHQHTVLNHLPSGAPLPGHISQMLPARSDMHTLNCWRPS

SEQ ID NO: 177275 - protein, 1333 aa, Zea Mays
MPPGGRRGAKQRSNWTREPQLGDLVLAKIKGYPSWPAKISKPEDWKRKPTPKKFFVCFYGTGEIAFVPLADLEEFTEKKKNDLLDRALKVQRKYVQQFNVAVEQICKAYNELPKTSEAANVALPDQSEKTTEHLVRSPDIGGTPGLGQMEDDPPTDCSSTSGQGSGTEEDVKDGGHEIGDNSLAVPQKKASLQQDPKHPKTKKSAASKSGFDMYTEQEHSPTSLRAERQIEEVKIEEESCHLEGFVLEPNLEVVCALEVPKNFKSNKLLRNAESKENEHVGVGSPTGRIAVEAASDVVLNMSAEEESREFKKSKIMTKQSLTTGSEKRDNKIVHGKPDKQLTGKSSAGFSLNQKSLTGSGQHKMDSSADTRPAKKARLMDRAGETDKTVAKSETKLNINYENHNAVKHEQSTAVETCKNTILKTGIGDDRARKSGGAVSPISKLHSEIMEPASGSSVTQSTVADSLKKGSSRKEDVSRVDRKLVKPKRRACRFDDDEDEGQQTPLHRTSAKSLSTHIVPTEKPGSRGNFASHVGNASGKKPGPAREEKSRSVRMSPVKHEPVFSSPSQDKVHARHQLMGRNLITGSVETPVIGNKMSLVDGKSSAQVKMPACSEVKKLHSTSKPLQVTSGKSHSRNYPASEKIALVPKSEETKAKSKPATSVEHKVATTLSTERTGKRDHLKEERSSSVDKAAYSEPNPDSAKSIKHLIAAAQARRNLMASALAKFDGSSTDNSAITSTSYAIARDALEGMIETLSRTKDSIGRATRHAIECSKYGIAGEIVELLIQKLENEHNLHRRIDLLFLVDSITQCSHSHRGVAGASYVPTVQAALPRLFGAAAPPGAGARENRRQCLKVLRLWLERKIMPEDILRKYMGDIEVPNDDTSTSLMLKRPSRSERSVDDPIREMDDMLVDEYGSNATFELSGILSSKVFEDDEDFPQNNGSSSFVSRPVEGGVIHETEDNIAPASVEEHIIRVEHVATDAAMEDALELLGNNQQTHGAVIIEHDSSQGPGSEQALIAQNELPPLPDGPPPLPSDSPPPPPPLPPSPPPATPPPPPPLSPASPLPPPPPPLPSGPPPQPAPPPLPTQDPPLPSIPLPVSSSPLSLGYQPPAPEYFMTPNGNQLAQMTVNTSIQAIGNTTTFIPGGPVNGQAAVNFVTSMPAEFGNTSVFMAQASNGNYQFRPTGVPFQQGNFSAFPSAQTPPVHPHSRMAHMNPMGQQAVAPPHNPYAAQSFPNSQSHYPSEEHWRMASGNFSPDDQHNWIASGRSLPCSEGPFVHDGYSRSNIDRSSMNPMNHQHTVLNHLPSGAPLPGHISQMLPARSDMHTLNCWRPS

SEQ ID NO: 177276 - protein, 1244 aa, Zea Mays
MEDDPPTDCSSTSGQGSGTEEDVKDGGHEIGDNSLAVPQKKASLQQDPKHPKTKKSAASKSGFDMYTEQEHSPTSLRAERQIEEVKIEEESCHLEGFVLEPNLEVVCALEVPKNFKSNKLLRNAESKENEHVGVGSPTGRIAVEAASDVVLNMSAEEESREFKKSKIMTKQSLTTGSEKRDNKIVHGKPDKQLTGKSSAGFSLNQKSLTGSGQHKMDSSADTRPAKKARLMDRAGETDKTVAKSETKLNINYENHNAVKHEQSTAVETCKNTILKTGIGDDRARKSGGAVSPISKLHSEIMEPASGSSVTQSTVADSLKKGSSRKEDVSRVDRKLVKPKRRACRFDDDEDEGQQTPLHRTSAKSLSTHIVPTEKPGSRGNFASHVGNASGKKPGPAREEKSRSVRMSPVKHEPVFSSPSQDKVHARHQLMGRNLITGSVETPVIGNKMSLVDGKSSAQVKMPACSEVKKLHSTSKPLQVTSGKSHSRNYPASEKIALVPKSEETKAKSKPATSVEHKVATTLSTERTGKRDHLKEERSSSVDKAAYSEPNPDSAKSIKHLIAAAQARRNLMASALAKFDGSSTDNSAITSTSYGLPRLSPSPVFRIPSPPRIAFPESPGQRILKSPMELDNGHGKSPKSRQASGSPSGGSDAAIARDALEGMIETLSRTKDSIGRATRHAIECSKYGIAGEIVELLIQKLENEHNLHRRIDLLFLVDSITQCSHSHRGVAGASYVPTVQAALPRLFGAAAPPGAGARENRRQCLKVLRLWLERKIMPEDILRKYMGDIEVPNDDTSTSLMLKRPSRSERSVDDPIREMDDMLVDEYGSNATFELSGILSSKVFEDDEDFPQNNGSSSFVSRPVEGGVIHETEDNIAPASVEEHIIRVEHVATDAAMEDALELLGNNQQTHGAVIIEHDSSQGPGSEQALIAQNELPPLPDGPPPLPSDSPPPPPPLPPSPPPATPPPPPPLSPASPLPPPPPPLPSGPPPQPAPPPLPTQDPPLPSIPLPVSSSPLSLGYQPPAPEYFMTPNGNQLAQMTVNTSIQAIGNTTTFIPGGPVNGQAAVNFVTSMPAEFGNTSVFMAQASNGNYQFRPTGVPFQQGNFSAFPSAQTPPVHPHSRMAHMNPMGQQAVAPPHNPYAAQSFPNSQSHYPSEEHWRMASGNFSPDDQHNWIASGRSLPCSEGPFVHDGYSRSNIDRSSMNPMNHQHTVLNHLPSGAPLPGHISQMLPARSDMHTLNCWRPS

SEQ ID NO: 177277 - protein, 832 aa, Zea Mays
MPPGGRRGAKQRSNWTREPQLGDLVLAKIKGYPSWPAKISKPEDWKRKPTPKKFFVCFYGTGEIAFVPLADLEEFTEKKKNDLLDRALKVQRKYVQQFNVAVEQICKAYNELPKTSEAANVALPDQSEKTTEHLVRSPDIGGTPGLGQMEDDPPTDCSSTSGQGSGTEEDVKDGGHEIGDNSLAVPQKKASLQQDPKHPKTKKSAASKSGFDMYTEQEHSPTSLRAERQIEEVKIEEESCHLEGFVLEPNLEVVCALEVPKNFKSNKLLRNAESKENEHVGVGSPTGRIAVEAASDVVLNMSAEEESREFKKSKIMTKQSLTTGSEKRDNKIVHGKPDKQLTGKSSAGFSLNQKSLTGSGQHKMDSSADTRPAKKARLMDRAGETDKTVAKSETKLNINYENHNAVKHEQSTAVETCKNTILKTGIGDDRARKSGGAVSPISKLHSEIMEPASGSSVTQSTVADSLKKGSSRKEDVSRVDRKLVKPKRRACRFDDDEDEGQQTPLHRTSAKSLSTHIVPTEKPGSRGNFASHVGNASGKKPGPAREEKSRSVRMSPVKHEPVFSSPSQDKVHARHQLMGRNLITGSVETPVIGNKMSLVDGKSSAQVKMPACSEVKKLHSTSKPLQVTSGKSHSRNYPASEKIALVPKSEETKAKSKPATSVEHKVATTLSTERTGKRDHLKEERSSSVDKAAYSEPNPDSAKSIKHLIAAAQARRNLMASALAKFDGSSTDNSAITSTSYAIARDALEGMIETLSRTKDSIGRATRHAIECSKYGIAGEVLSLTYAICITVSLLFHYPYCFSSRLSSFSYRNWRTSIICIAELTSFFLWIP

SEQ ID NO: 177278 - protein, 374 aa, Zea Mays
MNNATFELSGILSSKVFEDDEDFPQNNGSSSFVSRPVEGGVIHETEDNIAPASVEEHIIRVEHVATDAAMEDALELLGNNQQTHGAVIIEHDSSQGPGSEQALIAQNELPPLPDGPPPLPSDSPPPLPTQDPPLPSIPLPVSSSPLSLGYQPPAPEYFMTPNGNQLAQMTVNTSIQAIGNTTTFIPGGPVNGQAAVNFVTSMPAEFGNTSVFMAQASNGNYQFRPTGVPFQQGNFSAFPSAQTPPVHPHSRMAHMNPMGQQAVAPPHNPYAAQSFPNSQSHYPSEEHWRMASGNFSPDDQHNWIASGRSLPCSEGPFVHDGYSRSNIDRSSMNPMNHQHTVLNHLPSGAPLPGHISQMLPARSDMHTLNCWRPS

SEQ ID NO: 177279 - protein, 210 aa, Zea Mays
MTPNMTVNTSIQAIGNTTTFIPGGPVNGQAAVNFVTSMPAEFGNTSVFMAQASNGNYQFRPTGVPFQQGNFSAFPSAQTPPVHPHSRMAHMNPMGQQAVAPPHNPYAAQSFPNSQSHYPSEEHWRMASGNFSPDDQHNWIASGRSLPCSEGPFVHDGYSRSNIDRSSMNPMNHQHTVLNHLPSGAPLPGHISQMLPARSDMHTLNCWRPS

SEQ ID NO: 177280 - protein, 949 aa, Zea Mays
MFFLCQSLVGYPLLINNCGIHLLARCVIVTVIPFNFCYDFKSLSLTESASEDPSSRPTSPEENPETSSSPSILFLHLNAQDVSHRRWQDNSSRLLEDKPTTSNSMSDSDFLVNSFTKPSDNARPSRRKSKKKSKKHRQRCRKPTDGSEAKFREGNGAASAADVGDCEDSTLSPKHVGDIRFEETSPSSSVKEASEEAPESDDDEYHCCSGGSVSSASYCDEMELSKSTTSCPALCGQCPSSNLQYLDNTQNSAPTGPSQETCYAGSKANCNHDTKSLFIFRNERGSDPCEATEFCSSSSGFDENWIEKFDYDSGICSPKSVGTYGGDQAAHLCSDTTGDNDFCLVISRKRARKEKKMSLWKSYGAHASTPALDRNKKYVGHSSMQMTNEFNSNDWSHRQNHVSRIHPQHGNALKSSTKNFMQRPSIGCRETQYGFPAKESKLGASLNHSTGPREKTCGKLTGGFDKTAQQLYLDRDLSNALNSSESIRCETRSISSSEPTTPKSLKGNYTSESGESTDITIGALPMQKRRLQDLVRTDDASETISGRSSPCSESSTTELIAGHSTDSSIEGNHGCQGLCNSRTHLAQMLRVVNDACKVQVGADVLLAAGYPISDLEKFICSATPVIGRAPCMISNTCSLDQVVSDSVCQHDISNVSLRRIWEWYEEPGCYGLEVKALSNLSSKTSSSSSSEFFAYFVPYLSAIQLFGLSRNNMHHSFGVQGRELLISSNTASSMSSHPVHAKAHTLLEESNACLPESSLVVEDPGELIFEYFETEQPSLRPPLFEKIKELVSSANVSDHRVFGDTEKLQNAKLCELHPASWFCVAWYPVYRVPRGNFRAAFLTYHSLGKLVHKKCSMDTNDGHTQVVSPVVGLQSYNDKGEQWFQLRCPDLKQLPIEDSLKTSPAEVHKERLRTLKMGALAMARAVVPKGSGESVNHHPDYEFFLSRCA

SEQ ID NO: 177281 - protein, 978 aa, Zea Mays
MPPELGMSSRTVAGAVVNRRPRRLFGRSSERKNPLNLQFERQVARLEARQQQQRCVIVTVIPFNFCYDFKSLSLTESASEDPSSRPTSPEENPETSSSPSILFLHLNAQDVSHRRWQDNSSRLLEDKPTTSNSMSDSDFLVNSFTKPSDNARPSRRKSKKKSKKHRQRCRKPTDGSEAKFREGNGAASAADVGDCEDSTLSPKHVGDIRFEETSPSSSVKEASEEAPESDDDEYHCCSGGSVSSASYCDEMELSKSTTSCPALCGQCPSSNLQYLDNTQNSAPTGPSQETCYAGSKANCNHDTKSLFIFRNERGSDPCEATEFCSSSSGFDENWIEKFDYDSGICSPKSVGTYGGDQAAHLCSDTTGDNDFCLVISRKRARKEKKMSLWKSYGAHASTPALDRNKKYVGHSSMQMTNEFNSNDWSHRQNHVSRIHPQHGNALKSSTKNFMQRPSIGCRETQYGFPAKESKLGASLNHSTGPREKTCGKLTGGFDKTAQQLYLDRDLSNALNSSESIRCETRSISSSEPTTPKSLKGNYTSESGESTDITIGALPMQKRRLQDLVRTDDASETISGRSSPCSESSTTELIAGHSTDSSIEGNHGCQGLCNSRTHLAQMLRVVNDACKVQVGADVLLAAGYPISDLEKFICSATPVIGRAPCMISNTCSLDQVVSDSVCQHDISNVSLRRIWEWYEEPGCYGLEVKALSNLSSKTSSSSSSEFFAYFVPYLSAIQLFGLSRNNMHHSFGVQGRELLISSNTASSMSSHPVHAKAHTLLEESNACLPESSLVVEDPGELIFEYFETEQPSLRPPLFEKIKELVSSANVSDHRVFGDTEKLQNAKLCELHPASWFCVAWYPVYRVPRGNFRAAFLTYHSLGKLVHKKCSMDTNDGHTQVVSPVVGLQSYNDKGEQWFQLRCPDLKQLPIEDSLKTSPAEVHKERLRTLKMGALAMARAVVPKGSGESVNHHPDYEFFLSRCA

SEQ ID NO: 177282 - protein, 164 aa, Zea Mays
MIKELVSSANVSDHRVFGDTEKLQNAKLCELHPASWFCVAWYPVYRVPRGNFRAAFLTYHSLGKLVHKKCSMDTNDGHTQVVSPVVGLQSYNDKGEQWFQLRCPDLKQLPIEDSLKTSPAEVHKERLRTLKMGALAMARAVVPKGSGESVNHHPDYEFFLSRCA

SEQ ID NO: 177283 - protein, 507 aa, Zea Mays
MAPPARPPRAGEDLEEGTGESSPPPRSPRASNPDCHEVQRKICERLRQTGRHDRTLADPTFNARFARHLERLPRRYLLDLDLDDKLEDVLLHWGILDECADPNKRPVFRARFIKYKTVPREDDGIGHDQDHEEPCQKLLEDLSLERRKIADRNDSLSISSRGDLKTVLLHEIIFSSIDKPKLLSRLTALLSEVGLNIQEAHVYSTKDGFCLDVFVVDGWKTEETDELIAAIKETLTQKNASPSNSTNSSTPEKIVDLQQQVGDYEIDLSMLTRGDKIASGSSADFGVNHENILQFYGACTKHPNYCIVTEYMPGGNIYDFLHKQNNFLDLHKILRFAIDISKGMDYLHQNNIIHRDLKSANLLLGHDQVVKIADFGVARHGSQQGQMTAETGTYRWMAPEIINHKPYDHKADVFSFAIVLWELATSMVPYDNMTPLQAALGVRQGLRLDIPGSVHPRLTKLIRQCWNEDPDARLTFAEITKELQDSLHHIEAPKGASRRSRAKMQKK

SEQ ID NO: 177284 - protein, 318 aa, Zea Mays
MAPPARPPRAGEDLEEGTGESSPPPRSPRASNPDCHEVQRKICERLRQTGRHDRTLADPTFNARFARHLERLPRRYLLDLDLDDKLEDVLLHWGILDECADPNKRPVFRARFIKYKTVPREDDGIGHDQDHEEPCQKLLEDLSLERRKIADRNDSLSISSRGDLKTVLLHEIIFSSIDKPKLLSRLTALLSEVGLNIQEAHVYSTKDGFCLDVFVVDGWKTEETDELIAAIKETLTQKNASPSNSTNSSTPEKIVDLQQQVGDYEIDLSMLTRGDKIASGSSADLYRGTYKGHDVAIKCLRSLYLNNPSEVEFLQEWC

SEQ ID NO: 177285 - protein, 345 aa, Zea Mays
MAIVVVVFHNPIGRPAARTHPPPAAPATARRGFKILKMAPPARPPRAGEDLEEGTGESSPPPRSPRASNPDCHEVQRKICERLRQTGRHDRTLADPTFNARFARHLERLPRRYLLDLDLDDKLEDVLLHWGILDECADPNKRPVFRARFIKYKTVPREDDGIGHDQDHEEPCQKLLEDLSLERRKIADRNDSLSISSRGDLKTVLLHEIIFSSIDKPKLLSRLTALLSEVGLNIQEAHVYSTKDGFCLDVFVVDGWKTEETDELIAAIKETLTQKNASPSNSTNSSTPEKIVDLQQQVGDYEIDLSMLTRGDKIASGSSADLLVLIMKIFCNFMGHAQNIQTIAL

SEQ ID NO: 177286 - protein, 477 aa, Zea Mays
MAIVVVVFHNPIGRPAARTHPPPAAPATARRGFKILKMAPPARPPRAGEDLEEGTGESSPPPRSPRASNPDCHEVQRKICERLRQTGRHDRTLADPTFNARFARHLERLPRRYLLDLDLDDKLEDVLLHWGILDECADPNKRPVFRARFIKYKTVPREDDGIGHDQDHEEPCQKLLEDLSLERRKIADRNDSLSISSRGDLKTVLLHEIIFSSIDKPKLLSRLTALLSEVGLNIQEAHVYSTKDGFCLDVFVVDGWKTEETDELIAAIKETLTQKNASPSNSTNSSTPEKIVDLQQQVGDYEIDLSMLTRGDKIASGSSADLYRGTYKGHDVAIKCLRSLYLNNPSEVEFLQEVLILSGVNHENILQFYGACTKHPNYCIVTEYMPGGNIYDFLHKQNNFLDLHKILRFAIDISKGMDYLHQNNIIHRDLKSANLLLGHDQVVKIADFGVARHGSQQGQMTAETGTYRWMAPEVSKY

SEQ ID NO: 177287 - protein, 274 aa, Zea Mays
MLTRGDKIASGSSADLYRGTYKGHDVAIKCLRSLYLNNPSEVEFLQEVLILSGVNHENILQFYGACTKHPNYCIVTEYMPGGNIYDFLHKQNNFLDLHKILRFAIDISKGMDYLHQNNIIHRDLKSANLLLGHDQVVKIADFGVARHGSQQGQMTAETGTYRWMAPEIINHKPYDHKADVFSFAIVLWELATSMVPYDNMTPLQAALGVRQGLRLDIPGSVHPRLTKLIRQCWNEDPDARLTFAEITKELQDSLHHIEAPKGASRRSRAKMQKK
